United States Patent Application Publication US 2018/0126003 A1 - sequence listing, part 18

SEQ ID NO: 29286 - DNA, 4158 bp, Artificial Sequence
  derived and/or modified sequence
atggagctgagcgacagcgaccggcccgtgagcttcggcagcacctcaagctctgcctcttctcgagactctcatgggtcttttggatcaagaatgacgctagtctctaattcccacatgggtctatttaatcaggacaaagaggttggtgcaatcaagctggaattgattccagcgcgccccttcagctccagcgagctgcagcgggacaacccggctaccggacagcagaacgctgatgaaggaagtgagcggccacctagggcccagtggcgcgttgactccaacggagctccaaaaaccattgcggactctgcaacttcgcccaaactgctttatgtggatagggttgtgcaggaaatcctggagactgagcggacctacgtccaagatctgaagtccattgtagaggattatctagactgcatccgtgatcagacgaaattgcctctgggcaccgaagagagatcagctcttttcgggaacattcaggacatctaccattttaacagtgagcttctccaagatctcgagaattgtgaaaacgatcctgtggcaatcgcagaatgtttcgtatcaaagtccgaggagtttcacatttatacgcagtactgcacgaactaccccagaagcgttgccgttttaacagagtgcatgcgaaataaaattcttgcaaaattcttcagggagagacaggagacactcaaacactctctgcctctaggttcttatctgttgaaaccagtccagcgcattctcaaataccacctgttgttgcacgagatcgagaatcatcttgataaagacacggagggatacgatgtagtgctggatgcaattgatacaatgcagagagtggcatggcatattaacgatatgaaaagaaagcatgaacatgccgttagactgcaagaaatccaatctctgctaactaactggaaggggccagatctcacttcctatggcgaactcgttcttgaaggcaccttccgaatacagcgggctaaaaacgagcgtaccttatttttatttgataagctcctccttattacaaaaaagagggatgatacctttacttataaagcacatattctctgtggtaacttgatgctcgtggaagtcatccctaaggagccactgtctttcagcgtgtttcattacaaaaacccaaagctgcagcataccgtacaggccaaaagccagcaggataagcggctttgggtactacatcttaagcggttaatactggaaaatcacgctgcaaaaattcccgcaaaggccaagcaagcaattctggaaatggacgccatccatcatccaggcttttgttacagcccagaaggcggcacaaaggccctattcgggagtaaggagggttcagcaccataccgtctgaggaggaaatctgaaccaagttctcgctcgcacaaggtgcttaaaacttcagagactgcccaggatattcagaaagtgagcagggaagaggggtcaccccagctgtcgtccgcccgacccagtccagctcaacgtaattcccagccatcctcctccacaatgatatccgtacttagagccgggggcgcactgagaaacatatggacagatcatcagatacgccaggctctgtttccctctcggaggagtccccaggaaaacgaagatgacgaggatgactatcagatgttcgtgcccagctttagtagttccgacctgaactcaactcgcctttgtgaggactctacatcgagccgtccatgctcctggcacatggggcagatggagtcaacggaaacgagcagcagcggtcatcgcattgtgagaagggcctccagtgcaggagaaagcaacacatgccctcccgaaatcgggacctctgaccgaacacgcgagttacagaactcccctaagacagaaggacaggaagagatgaccccctttggctcgtctatcgaattgacaattgacgacattgatcatgtctacgataacatcagttacgaagatttgaagctgatggtcgctaaacgggaagaggctgaatcaacacccagtaaaagcgccagagattctgtccggcctaaaagtaccccagaactggccttcaccaaaagacaggcaggacatagtaaagggtcactgtacgcgcagacagatgggacgctgagtgggggcgaggccagttcccagtctactcatgagttgcaggcggtagaagaaaatatctacgatactatcggcctgcccgatcctcccagcctggggttcaagtgctcatctttgaagagagctaaaagaagtacgtttctcggattagaggccgatttcgtctgttgcgattccttgcgaccattcgttagtcaggactctctgcaactgtcagaagacgaggccccatatcaccaggcaaccccggatcacggatacctgagtctcctctatgattcaccatccggcaacctgagcatgcctcacaagccagtttccgataagctgtctgaggaggtggatgaaatttggaacgacctcgagaactatataaagaagaacgaggataaggctcgcgatcgactgctcgccgcttttcccgtgtctaaagacgacgtgcctgataggttacatgctgagagcaccccggagctttcccgcgatgtcggcagatctgtgagtacactgagcctgcctgagagccaggcccttttaacaccagttaagtcaagggccgggagggcctcccgcgccaactgcccttttgaggaggacttgattagtaaggagggatctttcatgtccctgaacaggctatccctggccagcgaaatgcctctgatggataacccatatgatcttgccaactccgggctttctcagacagacccagaaaatccagacctcgggatggaagctactgacaagaccaaaagtcgcgtgtttatgatggcacgacagtactctcagaagatcaaaaaggccaatcagcttctgaaggtcaaaagtctcgagctggaacagccacccgcctcacagcaccagaaaagcatgcacaaagatttagccgctattttggaggagaagaaacagggagggcctgctattggcgctagaattgcagaatactcccagttatatgatcagatcgtgttccgagaatctcctctgaagatacagaaggatggttgggctagccctcaagaatcttcgcttctaagatctgtgtccccaagtcaagtgcaccatggcagcggagactggctgctccactccacgtacagtaatggagagctagcagacttctgccttcccccagagcaggacttgcgttcccgctacccgacgttcgagattaacacaaaaagcacacctcggcagctgtccgcagcctgctccgtgccgagtctccaaacctccgacccactgccgggtagcgtacaacgttgttccgttgttgtcagtcagcctaacaaggaaaactggtgccaggatcacctgtacaatagcctaggacgaaaaggcatttccgctaagtcacaaccgtaccatcggtcccagtcttctagctcagtcttaattaataaaagtatggacagtataaattatcccagtgatgtcggcaaacaacagctcctgtccctccaccggtcttcccgctgtgaaagccaccaagacttattgcccgatattgccgactctcatcagcaggggactgagaagctgtccgatttaacattgcaagactcacagaaggtggtggtggtcaatcggaatctacctttgaatgcccagatcgctacccagaattacttttctaacttcaaggagacagatggagatgaggacgattatgttgagattaagtccgaggaggatgagtctgagctggaattatcccacaaccgccgaaggaaatcagacagcaaatttgtagatgctgacttttcagacaatgtgtgttccggcaatacattacactccttaaactcacccaggacccccaagaagcctgtgaacagcaagctgggcctaagcccgtatctgacaccatacaatgactccgacaagttgaacgattatctgtggcgcggcccaagtcctaatcaacaaaacatcgtccagagcctcagggaaaaattccagtgcttgagctcatcgagttttgcttag

SEQ ID NO: 29287 - DNA, 2859 bp, Artificial Sequence
  derived and/or modified sequence
atggagctgagcgacagcgaccggcccgtgagcttcggcagcaccagttcctcagcctcaagtagagacagtcatggatcatttggaagccgcatgactctggtgtccaattctcacatgggcctgttcaatcaagacaaggaggtcggcgccattaaactggagctgatccctgcaagaccttttagctcctctgagttgcaaagagataatccggccaccggccaacagaacgccgacgaaggctccgagcggccccccagggcacaatggcgggtggactccaatggcgcgccaaaaacaattgccgattccgctaccagccctaagctgctctacgtcgatcgcgttgtgcaggagattctggaaaccgaacggacctatgtgcaggatcttaagtcaatcgtagaagattacctggattgtattcgggaccaaactaagttgcccctgggcaccgaggagagaagcgctttgttcggtaacattcaagatatctaccactttaattccgagttgctgcaagacctggagaattgcgagaacgaccccgttgcgatcgccgaatgcttcgtatctaagtcagaagaattccatatttacacccagtactgtacaaactatccacgctctgtggctgtcctaactgagtgcatgcgtaataaaatactggcaaaattcttcagggagaggcaggagaccctgaagcactcgctcccgcttggtagctatctgttaaaaccagtgcagaggatcctcaaataccacttgctgctgcacgagatcgaaaatcacctggataaagacaccgaggggtacgatgttgtgctggatgcgattgacaccatgcagagggttgcctggcatataaatgatatgaaaagaaagcatgagcacgctgtgcggctacaggagatccagagtttgctgactaactggaaaggccctgatctgactagctacggggaactagttctggaaggcaccttccggattcagagggccaaaaatgaacgcacactgttcctgtttgataagctgctgcttatcacgaaaaagcgagacgatacgtttacctacaaggcccacattctatgcggaaatcttatgcttgtcgaagtgattcctaaagagccactctcattctccgtcttccactataagaaccccaagcttcagcatacagttcaggccaagtcccaacaggataagaggttgtgggtgctacatttaaaaagactaatcctggaaaatcatgctgctaagatcccagctaaggccaaacaggcaattctggaaatggatgccatccaccacccagggttttgttactccccagagggcggcaccaaagccttgtttggttccaaggaggggagtgcgccctaccgactccgacgaaaaagcgaaccatccagcaggtcacataaagtgctgaagaccagtgagacagcgcaggatattcagaaggtctccagagaagagggctccccgcaattatcttctgcgagaccaagccctgctcaaaggaatagccaaccgtcctcaagcacaatgatttccgtgctacgtgctggcggtgctctaaggaatatatggacagatcaccagattagacaggcactgttcccgtcaagacggagcccccaggaaaacgaagatgatgaagacgactatcagatgtttgtgccgtctttctcgagttcagaccttaactccactcgtctgtgtgaagacagtacatcaagcaggccgtgcagttggcatatgggccagatggaatccacggagactagcagctccggtcatcgcattgtgaggagagcctcgagcgccggggaatcaaatacttgtcctccagagatcggtacatctgatcgaacccgcgagctccagaacagcccaaagacggagggccaggaagaaatgaccccttttgggtctagtattgagcttacaattgatgacattgaccatgtgtatgataacatatcttatgaggacctgaaactgatggtcgccaagagggaagaggccgaatctacacccagtaaatcggctcgggactctgttagacctaagtccacccctgaactcgcctttacgaagagacaagccggacactctaaggggtcactctacgctcagacagacggcacactgagcgggggggaagctagttcacagagcactcatgagttgcaagctgttgaggaaaacatctatgatactataggactgccagatccaccctccctgggctttaagtgtagtagcctgaaaagagctaagcgctctactttcctcggtctagaggctgatttcgtatgctgcgactcactgaggccctttgtttcacaggacagtttgcaactttctgaggacgaagccccatatcatcaggctacgcccgaccacggatacctgtcccttctgtacgattccccttcggggaatctgtccatgccacataaacccgtgtcagacaagctatctgaggaagtggacgaaatctggaacgatttagagaactatatcaagaagaacgaagacaaagcccgcgatcggctcctcgccgcttttcctgtttccaaggacgacgttcctgacagacttcacgctgaatctacgccagaactgtccagagacgtgggcagaagtgtgagcactctgtccctcccagagtcacaagcgttgctgacccctgtcaagtcccgagccggccgggcatcccgcgccaattgtccctttgaagaggaccttatctcaaaagagggaagttttatgagcctgaaccgcctcagcctggcctctgagatgacactgtgtcaggccctttgtcgagatgcagcttggtag

SEQ ID NO: 29288 - DNA, 4158 bp, Artificial Sequence
  derived and/or modified sequence
atggagctgtctgattccgacagacctgtttcgtttggcagcacatctagttctgccagtagccgggatagccacggcagtttcggatcccgaatgaccctggtttctaactcacatatgggccttttcaaccaggacaaagaggttggcgcaattaagttagagcttattccagcaaggccgtttagttcctcagagttacagagagacaaccctgccaccggtcagcagaacgcagatgaggggtcagagcgtccccctcgcgcacagtggcgtgtcgactcaaatggtgctcccaagacgatagccgattctgctacctctccgaaattactctacgtggaccgggtcgtgcaggagatccttgagacagagcgaacctatgtgcaagacctgaagagcattgtcgaagactaccttgactgtatcagagaccagacaaaattaccccttggcaccgaagagaggagcgcacttttcggtaacatccaggatatttaccatttcaactcagagcttttgcaggatctggagaattgtgagaatgatccagtcgcaatcgcggagtgttttgtcagcaagtcagaagagttccacatatacacgcagtattgtactaactatcctaggagcgtggccgtcctcaccgaatgtatgcgaaataaaattcttgctaaatttttcagggaacgccaggagacgctaaaacactccctaccattgggatcctatttgctgaagcccgttcagagaattttaaaataccatctcttgctccacgaaatagagaaccatctggacaaggacaccgaaggatacgatgttgtgctggacgctatcgatactatgcagcgcgtcgcttggcacattaacgacatgaagcggaaacacgaacatgccgtgcggctgcaggagattcagagtctgctcacaaattggaagggaccagatctgacttcatatggcgaattagtcctagagggaacatttaggatacagcgagctaagaatgagagaactctgttcctgtttgacaaactcctgctgattacgaagaagagagacgatacattcacctacaaggcccacatattgtgtggtaatctgatgcttgtggaggttatacctaaggagccgctttcgttctctgtcttccactataagaacccaaagcttcaacatactgtacaggccaagagccagcaggacaaaagactctgggtactacatctgaagcgactcatattggagaaccacgccgctaagatccccgctaaggctaagcaggcaattttagaaatggatgcaatccaccaccctggcttctgctacagcccagaaggcggaaccaaggccctgtttggatcaaaggagggtagtgctccataccgactgagaaggaagtcagagccaagttccagaagccacaaagttctcaagactagcgagacagcgcaggatattcaaaaggtctcccgcgaggaggggtctcctcagctcagttctgccagaccctcacccgctcagaggaactcccagccctcctccagtaccatgatcagcgtcctgcgggctgggggtgctctgaggaatatctggacagatcatcaaattcgacaggctctctttccctcgcgtcgttccccccaggaaaacgaagacgatgaggatgactaccaaatgttcgttccaagctttagcagttcggatttgaacagcacccggttatgtgaggacagtacaagttcccggccttgtagctggcatatggggcagatggagagcacggaaacatccagttctgggcatagaatcgtccgaagggcatcctcagccggtgaaagcaatacctgccccccagaaatcgggacaagcgaccgaacacgggaactacagaactcccccaaaactgagggtcaggaagagatgaccccttttggaagtagtatcgagctgaccattgatgacattgatcacgtgtatgacaacatctcgtatgaggacctgaagctaatggtggccaagcgagaggaagctgagtctacccctagcaagagcgctcgtgattctgtgcgaccaaaatcgactcctgagctggccttcaccaagcggcaggctgggcattccaagggctcactgtatgcgcagacggacggcaccctgagcggcggtgaggccagttctcaaagcactcatgagctccaggccgtggaagagaatatatacgacactattggcttaccggatcccccaagtctgggcttcaagtgctcttcactgaagagagctaagcgcagcacattcttaggactggaagccgactttgtttgttgtgacagcttgcgtcccttcgtgtcccaggattcactacaactgtcagaggacgaggctccgtatcaccaagccacacctgaccatgggtaccttagcctcctctatgatagcccaagtggaaatttgagcatgccgcataaacccgtgtctgataagctcagcgaagaggtcgacgagatttggaatgaccttgagaactatataaaaaaaaatgaagacaaggccagagatagattattggccgctttcccagtatcaaaagacgatgttccagatcgcctgcacgcagaatcaacacccgaactgagtagagatgtgggcagaagtgtctccactttgagcctgcctgaaagtcaggctctgttgaccccggttaagagccgggctggacgtgctagccgggcaaactgtccatttgaggaagatctcatttccaaggaggggagcttcatgtcgctaaacaggctgagtctggcatccgagatgcctttaatggacaatccttacgacctcgccaattccggtctcagccagacagatcctgaaaaccccgacctgggtatggaagcaacagataaaaccaagtcgagagtttttatgatggccagacagtacagtcaaaagataaagaaagccaatcagctgctgaaagttaagtctctggagctggagcagcccccagcttcgcagcaccaaaaatccatgcacaaggacctggccgcaatcctggaggagaagaagcaaggaggacctgccatcggcgctcgtattgccgaatacagtcaactgtacgaccagatagtattccgggagagtccccttaaaattcagaaggacgggtgggcttcgcctcaggagagctctctgctaaggtcggtgtctccatcacaagtgcaccatggttccggggattggcttctccattccacttattctaacggtgagctggctgatttttgccttccacctgagcaagacctgcggtccagataccctacttttgaaattaataccaaatcgacccctcggcagctcagtgctgcctgctccgtgccaagccttcagacgagcgacccgctgcctggtagcgtgcagcgctgctccgtggttgtaagtcaacccaacaaggagaactggtgccaagaccacctttataattctctcggtcgcaaggggatatccgccaagtcccagccctatcacaggagtcaaagttcatcaagcgtccttattaacaagtcaatggactccatcaattacccatcggatgttgggaagcagcaactgctctccctgcatcgctctagtagatgcgagtcccaccaggacctcctccccgatatcgcagattcccatcaacagggcacggaaaaactgtccgacctgacgctccaggacagtcaaaaggtggtagtggtgaataggaacctgcctcttaatgcacagatcgctacccaaaactacttttcaaactttaaggaaaccgatggggacgaggacgactatgtcgaaattaagtcggaggaggatgaaagcgagctcgagctgtctcataacagacggagaaaatccgactctaaatttgtcgatgccgacttcagcgataatgtctgttccggcaatactctgcattcgcttaactcacctagaacgcccaagaaaccggtcaattccaaactgggcctaagcccatatctcactccctacaatgattcagataagctgaatgattatttgtggcggggaccctcacctaaccaacagaatatcgtgcagtcactcagggagaagtttcagtgcctctccagctcatccttcgcctag

SEQ ID NO: 29289 - DNA, 141 bp, Artificial Sequence
  derived and/or modified sequence
atggaactgtcagacagcgacaggccggtatcttttggatccacatcctcatctgcctcgtcccgggactcacacggttcattcggatcccgcatgaccttagtgtccaattcacatatgggcctcttcaatcaggactag

SEQ ID NO: 29290 - DNA, 4158 bp, Artificial Sequence
  derived and/or modified sequence
atggaattgagtgacagtgacagacccgtgtcttttggttccacaagctcatctgccagctcaagagactcacatggctcgtttgggtccagaatgaccctggtgtcgaactcccacatgggcttgtttaaccaagacaaggaagttggtgccataaagctggagcttatcccagccaggcctttcagttcatctgaactgcagagagataaccccgctacaggacagcagaatgcggacgaaggtagcgaacgtccacccagagcccagtggcgcgtggatagcaacggcgcacctaagacaatcgccgacagcgccactagccccaaactgctttacgttgaccgagtggtgcaggaaatcctggagacggagcggacctacgtgcaggacttaaagtcaatcgttgaagactatctggactgcatacgggaccagaccaagctgccattgggaactgaagagaggtctgcattgttcggtaacatacaggacatatatcacttcaactctgagctgctccaagacctggagaattgtgaaaatgatcccgtcgccattgccgagtgttttgtgagtaaaagcgaggagttccacatctacacacagtattgcacgaactatcctagaagcgtggcggttctgacggagtgtatgcggaacaagatccttgcaaagttttttcgagaaaggcaggagactcttaaacattcactccccttgggcagttacctgctaaaacccgttcagcgcattctgaaatatcacctgctcttgcacgaaatagagaaccacctggataaggacactgaaggatacgacgtggtgttggatgctatcgacacaatgcaaagggtggcctggcatatcaacgacatgaaaagaaaacacgagcacgctgtcaggctccaggagatacagagcctgctcacaaattggaagggtccagaccttacttcttatggcgagctagtgctggaaggcacatttcgcatccagcgcgcaaaaaatgaaaggaccctgttcctttttgacaagctcctgctcatcacgaaaaagcgagacgatacgtttacatataaggctcacatattgtgtggcaacctgatgctcgtggaagtcatacctaaagagcctctaagtttctctgtgttccactacaaaaatcctaaattacagcacacagtgcaggctaagtcccagcaggataaacgcttatgggtgctgcatctgaagcgcctgattctggaaaatcacgcggcaaagattccggctaaagccaaacaagctatattggagatggacgccatccatcaccctgggttctgctacagtccggagggtggcaccaaagccctgttcggctccaaagaaggttccgcaccgtacaggctgcggaggaagtctgaacccagcagtcggagccacaaagtcctgaagaccagcgaaactgcccaggacatccagaaagtgtctcgcgaggaagggtccccacaactgtcctcagccaggccatcccccgcacagagaaattcccaaccttcttcttccacaatgattagcgtattaagggcaggcggtgctctgaggaacatatggactgatcaccagatcaggcaggcattgttcccctctaggcgatctcctcaggaaaatgaggatgatgaggatgattatcaaatgtttgtaccatcattctcatcctcggacctcaactctacaagactctgcgaggactctacaagctctcgaccctgttcttggcacatgggacaaatggagtcaactgagacctcttcatccggccacagaatcgtgcgccgagcttcatctgccggtgaatctaatacttgcccccctgaaatcgggacctccgatagaactcgcgagttacaaaactcacccaaaacagaggggcaagaagagatgacgccatttgggtcctccatcgagctgaccatcgatgatatagatcacgtttacgacaacatctcttacgaggatctgaaactcatggttgccaagcgtgaggaagcagaaagcaccccttcaaaaagcgctcgcgatagtgtgaggcccaagagtacaccagaattggcttttacaaaacgacaggccggtcactcaaagggtagtctgtatgctcagacagacggaacgctctctggaggtgaggcgtccagccaatccactcatgaactgcaggccgttgaggaaaacatttacgatactatcggactgcctgatcccccaagccttggctttaagtgcagctcactaaagcgcgctaagcgtagcaccttccttggactcgaggcagacttcgtctgttgtgattcgctcagacctttcgtttcccaggatagtttgcagctctctgaggacgaggcaccatatcaccaagcgacacctgaccacggatacctgtccctgctatacgactctccctctggcaatcttagtatgccacacaagcccgttagcgacaaattaagtgaagaagtcgacgagatatggaatgatctcgagaattacattaaaaagaatgaggacaaagcacgtgacaggctactggcagcctttccagtgtctaaggacgacgtaccagaccgattgcatgccgaatccactcccgagcttagcagagatgtcggtcggagcgtgagcacactatcactgcctgaatcccaggccctactaacccctgtgaaaagtcgtgccggaagagcctccagagccaactgcccctttgaagaggacttaatatccaaggaggggtccttcatgagtctcaaccgactgagcctagcatcagaaatgcctcttatggacaacccatatgatttggctaattcgggtctgtcccaaacagatccagaaaatcctgacctgggcatggaagcaacagacaaaacgaaatccagagtgttcatgatggcaagacaatactcccagaaaattaaaaaggcaaaccagctcctcaaagtcaagtctctagaactggaacagccaccagcaagtcagcaccagaaatcaatgcataaagatctcgccgcaatcctggaggagaaaaaacagggaggaccggcaattggcgctaggattgctgagtattcgcagttgtacgatcagattgtgttccgcgaatccccactgaaaatacaaaaggacggttgggcctcaccgcaagaatcatctctgctgcgtagtgtaagccccagccaggtgcatcacgggtcgggcgactggcttttgcacagtacctattcaaacggagagctggcagatttttgcctgcctcccgagcaggatctacgctctaggtaccccacattcgagatcaacaccaaatccaccccaaggcaattatctgcggcatgcagcgtgcccagcctccagaccagcgaccccctcccaggcagcgtgcaaaggtgttctgtggttgtctcacagcctaataaagagaactggtgtcaggaccatctgtacaactccctggggaggaaggggatttccgccaagagccagccttatcatagatcccagtcaagctcttctgtgttgattaacaaatccatggattctataaactatccctcggatgtgggcaaacagcagcttctcagccttcatcggtcctctcgctgtgagagtcaccaagacctgctccctgatattgcagacagtcaccagcaggggactgaaaaactgtcggacctgacgctccaagatagccagaaggtggtggtcgtgaaccgcaatcttccactgaacgcccagatcgccacccagaattacttcagcaacttcaaagagaccgatggcgatgaggatgattacgttgagatcaagtcggaggaagatgaaagcgaattagaactttcccacaacaggcgccgaaaatccgacagtaaattcgtggatgcggacttttccgataacgtctgttctggcaacacactccattctctgaatagccctcgcactcctaaaaaacctgtaaactcgaagctaggcttgtctccgtacctgacgccttacaatgattctgacaagctgaacgactacctgtggagaggaccttcccccaatcaacagaatatcgtgcagtcccttcgcgaaaagttccagtgtctgagtagcagctcgttcgcatag

SEQ ID NO: 29291 - DNA, 2859 bp, Artificial Sequence
  derived and/or modified sequence
atggagttgtccgacagcgaccggcctgttagctttggctcaaccagttctagtgcctctagtcgcgattcacatggctccttcggatcacgaatgaccctggtgtccaactcacacatggggctgttcaatcaagacaaggaagtcggcgctataaagctcgaacttatacctgctagaccattttcgtccagcgagttgcagcgtgacaaccccgcaaccggccaacagaatgctgatgagggtagtgagaggccccctagggctcaatggagggtggactccaatggggctcccaagaccattgcagactctgcaacgtcacctaagctgctctatgtggatagagtcgtccaggaaatactggagactgaacgtacatatgttcaagacttgaagtctattgtggaagactatctcgactgcataagagatcagaccaaattgcccctcggaaccgaagaacgctccgcactgttcggcaatattcaggacatctatcatttcaattccgagctgctgcaggaccttgaaaactgcgaaaacgaccctgtggcaatcgccgagtgtttcgtttcaaagtcagaagagttccatatctacacacagtattgtactaactatcccagatcagtcgctgttttgaccgaatgtatgagaaacaagatcttggctaaattcttccgagaaaggcaggaaacactcaaacactcgttacccctgggcagctacttgctaaaaccggttcagcgcatcctcaagtatcatctcctccttcatgagatcgaaaaccatctcgataaggacacagagggctacgacgttgtactggacgcaatagacacaatgcaacgggtggcttggcatatcaatgacatgaaacgtaaacatgagcatgctgtgaggctgcaggagatacagagcctcctcaccaactggaagggtcccgatcttaccagttacggggagctagtcctggagggaacgttcagaatccagcgtgcgaagaacgagaggacgctgttcttgttcgataaacttcttttaatcacgaagaagcgtgatgacaccttcacctacaaggcccacatcctgtgcggtaacttaatgctggtggaggttatccccaaggagcctctttcattctccgtctttcactataagaacccgaagctccagcacaccgtccaagcaaagagccagcaagacaagcgcctgtgggtgctgcatctcaagcgcttgatcctagaaaatcacgcagcaaagatccccgcaaaagctaaacaggctattctcgagatggatgccatacatcatccaggtttctgctacagccctgagggagggacgaaagccctatttgggtccaaagagggctccgccccatatcgtctcaggagaaagagtgagccctcatctaggtcacacaaggtcctgaaaacttccgagaccgcgcaggacatccagaaagtatccagggaagagggcagtccacagttgtcaagcgctcgcccttccccagcacaacggaactcccagccttccagctcgactatgatctccgtcctgcgagccggaggcgctcttcgcaacatatggactgaccatcagatcagacaagcgctgtttcctagccggcgatctccacaagagaatgaggacgatgaagacgattatcagatgttcgtcccctccttcagtagttcagaccttaactcaaccagactgtgcgaagactcaacttcaagcaggccctgttcatggcacatgggccagatggagtccacagaaacatctagtagcgggcaccgcattgtgcgccgtgcgtcatcagctggggaaagcaatacttgtccccctgagattggcacctccgatcggaccagggaactgcagaactcaccaaagaccgagggacaagaagagatgactccgttcggcagctccatagagctcacaatcgacgacatcgaccacgtttacgataatatttcttatgaggacttaaagcttatggtagccaagcgggaggaggccgaatcaacaccctctaagtcagctagagactctgtaaggcccaagtctacccctgaactagcctttaccaaacgtcaggcaggtcatagcaaaggatctctatacgcccaaacggacggcactctctccgggggtgaagcctccagccagtctactcatgaactgcaagccgtcgaagaaaacatctatgacaccattgggctgccggaccctcccagcctgggtttcaagtgttcctccttgaagagagcgaagagatccacatttctggggctggaggcagacttcgtgtgttgtgactcattgcggcctttcgtaagtcaggacagtctgcaactgagtgaggacgaagccccatatcaccaggcgacgcccgaccacggctatttgtctctcctgtatgactccccttctggaaacctatccatgcctcacaaacctgtttccgacaaattgagcgaagaagtggatgagatttggaacgacctggagaactatataaaaaagaacgaggacaaagcccgagataggttgctagccgctttcccagtatccaaggacgacgttcccgaccggctgcacgcagaatctaccccagagctgtcaagggacgtcggtcggagcgttagcacactttccctgccagagtctcaagcgctcctgactccagtcaagagcagagcaggcagagcaagtagggcaaattgcccctttgaggaggacttaattagtaaggaaggtagcttcatgtcattgaataggttgtccctcgctagcgaaatgacgctctgccaagcattatgtagagacgctgcctggtag

SEQ ID NO: 29292 - protein, 254 aa, Artificial Sequence
  derived and/or modified sequence
MAAYKLVLIRHGESTWNLENRFSCWYDADLSPAGHEEAKRGGQALRDAGYEFDICLTSVQKRVIRTLWTVLDAIDQMWLPVVRTWRLNERHYGGLTGLNKAETAAKHGEAQVKIWRRSYDVPPPPMEPDHPFYSNISKDRRYADLTEDQLPSYESPKDTIARALPFWNEEIVPQIKEGKRVLIAAHGNSLQGIAKHVEGLSEEAIMELNLPTGIPIVYELDKNLKPIKPMQFLGDEETVCKAIEAVAAQGKAKK

SEQ ID NO: 29293 - DNA, 765 bp, Artificial Sequence
  derived and/or modified sequence
atggcggcctataagttagtgttgatccgacacggcgagtctacttggaacctagaaaacagatttagttgttggtatgacgctgatcttagcccagccggccacgaagaagcaaaaagaggcgggcaggcactgcgggacgctgggtacgagttcgacatttgtctaacgtcagtccagaagcgggtcataaggaccttgtggaccgtgctggatgccatcgatcaaatgtggcttccagtagtgagaacatggagactgaatgaaaggcattacggaggcctaacggggctgaacaaggccgagacagctgccaaacacggggaagcacaagtaaagatatggcgcagatcttatgatgttcctccccctcccatggaacctgatcaccccttttactctaacatcagcaaagatcgaaggtatgctgacttgaccgaagaccagctgccctcttatgagtctcccaaggatacaatcgctagggccctgcccttttggaacgaagaaattgtgccacagatcaaggaaggaaaacgcgttctgattgcggcgcatgggaattctctgcagggaatcgccaaacacgttgaagggctgagcgaagaagctattatggagctaaatctaccaactggcataccgattgtgtacgagctggataagaatcttaagcctatcaagccaatgcagtttttaggcgatgaagaaactgtttgtaaagccatcgaggcggtcgcagcacagggaaaggctaagaaatag

SEQ ID NO: 29294 - DNA, 765 bp, Artificial Sequence
  derived and/or modified sequence
atggccgcctacaagctggtgctgatcagacatggagagagcacctggaacctggagaaccgcttcagctgctggtatgatgctgacctgagccctgctggccacgaggaggccaagagaggaggccaggccctgagagatgctggctatgaatttgacatctgcctgacctctgtgcagaagagggtcatccgcaccctgtggacagtgctggatgccatcgaccagatgtggctgcctgtggtgaggacctggaggctgaatgaaagacactacggcggcctgaccggcctgaacaaggccgagacagctgccaagcatggagaggcccaggtgaagatctggaggaggagctatgatgtgcccccaccacccatggagccagaccaccccttctacagcaacatcagcaaggaccggcgctatgctgacctgacagaggaccagctgcccagctatgagagccccaaggacaccatcgcccgggccctgcccttctggaatgaggagatcgtgccccagatcaaggagggcaagagggtgctgattgctgcccacggcaacagcctgcagggcatcgccaagcacgtggagggcctgtctgaggaggccatcatggagctgaacctgcccaccggcatccccatcgtgtatgagctggacaagaacctgaagcccatcaagcccatgcagttcctgggagatgaggagaccgtgtgcaaggccattgaagctgtggccgcccagggcaaggccaagaagtag

SEQ ID NO: 29295 - DNA, 765 bp, Artificial Sequence
  derived and/or modified sequence
atggccgcctacaagctggtgctgatccggcacggcgagagcacctggaacttggaaaaccgtttttcgtgttggtatgatgccgatctgtcccccgccggacatgaggaagctaaaagggggggtcaagccctccgagatgccggatatgagttcgacatttgtttgacgagcgtccagaaacgggtgatacggacgctgtggaccgtgctggatgctatagatcaaatgtggctcccagtggtgcgcacttggagactcaatgagaggcattatggcggcttaacagggttaaacaaggccgagaccgcagcgaaacatggtgaagcacaggtgaaaatctggaggcgcagctatgacgtgccccctcctcccatggagcctgaccatccattctactccaacatatccaaggacagaaggtacgctgacttaacagaggaccagttgcctagctacgagagtcccaaagatacgatcgctcgggcactgcctttttggaatgaggagattgtgcctcaaataaaagaaggtaagagggtccttatcgctgcacacggaaacagtcttcagggtatcgccaagcacgttgagggactttccgaagaggctattatggaattaaatctacctaccgggatacctatcgtctacgagttagacaagaacctcaaacccatcaagcctatgcagttcctaggagatgaagagactgtctgtaaggcaatagaggcggtggcggcccagggcaaagccaaaaaatag

SEQ ID NO: 29296 - DNA, 1678 bp, Artificial Sequence
  derived and/or modified sequence
atggccgcctacaaactggtgctgatccggcacggcgagagcacatggaacctggagaaccgcttcagctgctggtacgacgccgatctgagcccggcgggccacgaggaggcgaagcgcggcgggcaggcgctacgagatgctggctatgagtttgacatctgcctcacctcagtgcagaagagagtgatccggaccctctggacagtgctagatgccattgatcagatgtggctgccagtggtgaggacttggcgcctcaatgagcggcactatgggggtctaaccggtctcaataaagcagaaactgctgcaaagcatggtgaggcccaggtgaagatctggaggcgctcctatgatgtcccaccacctccgatggagcccgaccatcctttctacagcaacatcagtaaggatcgcaggtatgcagacctcacagaagatcagctaccctcctatgagagtccgaaggatactattgccagagctctgcccttctggaatgaagaaatagttccccagatcaaggaggggaaacgtgtactgattgcagcccatggcaacagcctccagggcattgccaagcatgtggagggtctctctgaagaggctatcatggagctgaacctgccgactggtattcccatcgtctatgaattggacaagaacttgaagcctatcaagcccatgcagtttctgggggatgaagagacggtgtgcaaagccatagaagctgtggctgcccagggcaaggccaagaagtgaaggccagcggggaggatactgtccccaggagcaccctccctgctggtcttgtccctctgcccctcccacctgcacatgtcacactgaccacatctgtagacatcttgagttgtagctgcagatggggaccagtggctcccattttcattttagccattttgtcgcctgcacccactcccttcatacaatctagtcagaatagcagttctagagcacaggttctcagtctaagctgtggaaaagctccccttatccaacagagtttaaaagtagtgacttgggtttttgtgagtgctttgtttactaaggactttggggaggaacatgctaagccacgaccaatgaggagaagcaacagagcctgtctgtccccatgagcagagtctgtcctctgctcttctgcagtcaggccactgcctgggggctctagtcattccagtggaagatgaatgtaatctgcatggtgatgtgacaactgtttcctccttgaccccagaggatctggctctaggttgggatcaatcctgaatttcgttatgtgttatatttacttttattaaaaaagtatagtatatattaataatacaaaacaataacccttctggggtttcttgtggcggttgaaatagtcccacatgtggtcatcagaaaataagccattcctcataccaatataggatcagctccttgacctctgaggggcaggagtgcttcctggtgtgtgtattagaatcccttcctgccttgtttcatggcagtgaaatgcctcttggtcctgtccaagtgtgtctttcactgatttctgaatcatgttctagttgcttgaccctgccacatgggcccagtgttcatctgagcataactgtactaaatccttttaccagatcagtataataaaggagtgatgtgcaat

SEQ ID NO: 29297 - DNA, 765 bp, Artificial Sequence
  derived and/or modified sequence
atggcagcatacaagctcgtgctcattaggcatggtgaatcaacatggaatctcgagaatcggttctcctgctggtacgacgccgacttgagcccggcaggacacgaggaagcaaagagagggggtcaggcattaagagacgctggttatgaattcgacatttgcctaacatccgttcagaagagggtgatacggaccctgtggacagtgctggatgcaatcgatcaaatgtggttacctgtcgtgagaacatggaggctgaacgagcgccactatggcggtcttactggtctgaataaggccgagactgcggctaaacacggggaagctcaggtcaagatttggcggagaagctatgacgtcccccctccgcctatggagccagaccacccattttatagcaacatatcaaaggatagacgctatgctgacctgaccgaggatcagctgcctagctacgagagtcccaaggatacaatcgccagagctctgccgttttggaacgaagagatagttcctcagattaaagagggaaaaagagttttgatcgctgcacacgggaatagtcttcagggcatagcaaagcatgtggaggggttgtcagaagaggctatcatggagctaaacttaccaaccgggattcccatcgtatacgaactagataaaaatctcaagccgataaagcctatgcaatttttaggggatgaagagaccgtgtgtaaagccatcgaagctgttgctgctcagggcaaggccaagaaatag

SEQ ID NO: 29298 - DNA, 765 bp, Artificial Sequence
  derived and/or modified sequence
atggccgcctacaagctggtgctgatcagacacggcgagagcacctggaacctggagaacagattcagctgctggtacgacgccgacctgagccccgccggccacgaggaggccaagagaggcggccaggccctgagagacgccggctacgagttcgacatctgcctgaccagcgtgcagaagagagtgatcagaaccctgtggaccgtgctggacgccatcgaccagatgtggctgcccgtggtgagaacctggagactgaacgagagacactacggcggcctgaccggcctgaacaaggccgagaccgccgccaagcacggcgaggcccaggtgaagatctggagaagaagctacgacgtgccccccccccccatggagcccgaccaccccttctacagcaacatcagcaaggacagaagatacgccgacctgaccgaggaccagctgcccagctacgagagccccaaggacaccatcgccagagccctgcccttctggaacgaggagatcgtgccccagatcaaggagggcaagagagtgctgatcgccgcccacggcaacagcctgcagggcatcgccaagcacgtggagggcctgagcgaggaggccatcatggagctgaacctgcccaccggcatccccatcgtgtacgagctggacaagaacctgaagcccatcaagcccatgcagttcctgggcgacgaggagaccgtgtgcaaggccatcgaggccgtggccgcccagggcaaggccaagaagtag

SEQ ID NO: 29299 - protein, 371 aa, Artificial Sequence
  derived and/or modified sequence
MTQQPLRGVTSLRFNQDQSCFCCAMETGVRIYNVEPLMEKGHLDHEQVGSMGLVEMLHRSNLLALVGGGSSPKFSEISVLIWDDAREGKDSKEKLVLEFTFTKPVLSVRMRHDKIVIVLKNRIYVYSFPDNPRKLFEFDTRDNPKAAHPTPHLHTLGLCDLCPSLEKQLLVFPGHKCGSLQLVDLASTKPGTSSAPFTINAHQSDIACVSLNQPGTVVASASQKGTLIRLFDTQSKEKLVELRRGTDPATLYCINFSHDSSFLCASSDKGTVHIFALKDTRLNRRSALARVGKVGPMIGQYVDSQWSLASFTVPAESACICAFGRNTSKNVNSVIAICVDGTFHKYVFTPDGNCNREAFDVYLDICDDDDF

SEQ ID NO: 29300 - protein, 360 aa, Artificial Sequence
  derived and/or modified sequence
MTQQPLRGVTSLRFNQDQSCFCCAMETGVRIYNVEPLMEKGHLDHEQVGSMGLVEMLHRSNLLALVGGGSSPKFSEISVLIWDDAREGKDSKEKLVLEFTFTKPVLSVRMRHDKIVIVLKNRIYVYSFPDNPRKLFEFDTRDNPKGLCDLCPSLEKQLLVFPGHKCGSLQLVDLASTKPGTSSAPFTINAHQSDIACVSLNQPGTVVASASQKGTLIRLFDTQSKEKLVELRRGTDPATLYCINFSHDSSFLCASSDKGTVHIFALKDTRLNRRSALARVGKVGPMIGQYVDSQWSLASFTVPAESACICAFGRNTSKNVNSVIAICVDGTFHKYVFTPDGNCNREAFDVYLDICDDDDF

SEQ ID NO: 29301 - protein, 158 aa, Artificial Sequence
  derived and/or modified sequence
MTQQPLRGVTSLRFNQDQSCFCCAMETGVRIYNVEPLMEKGHLDHEQVGSMGLVEMLHRSNLLALVGGGSSPKFSEISVLIWDDAREGKDSKEKLVLEFTFTKPVLSVRMRHDKIVIVLKNRIYVYSFPDNPRKLFEFDTRDNPKAAHPTPHLHTLGL

SEQ ID NO: 29302 - DNA, 1116 bp, Artificial Sequence
  derived and/or modified sequence
atgacccagcagcccctgagaggcgtgaccagcctgagattcaaccaggaccagagctgcttctgctgcgccatggagaccggcgtgagaatctacaacgtggagcccctgatggagaagggccacctggaccacgagcaggtgggcagcatgggcctggtggagatgctgcacagaagcaacctgctggccctggtgggcggcggcagcagccccaagttcagcgagatcagcgtgctgatctgggacgacgccagagagggcaaggacagcaaggagaagctggtgctggagttcaccttcaccaagcccgtgctgagcgtgagaatgagacacgacaagatcgtgatcgtgctgaagaacagaatctacgtgtacagcttccccgacaaccccagaaagctgttcgagttcgacaccagagacaaccccaaggccgcccaccccaccccccacctgcacaccctgggcctgtgcgacctgtgccccagcctggagaagcagctgctggtgttccccggccacaagtgcggcagcctgcagctggtggacctggccagcaccaagcccggcaccagcagcgcccccttcaccatcaacgcccaccagagcgacatcgcctgcgtgagcctgaaccagcccggcaccgtggtggccagcgccagccagaagggcaccctgatcagactgttcgacacccagagcaaggagaagctggtggagctgagaagaggcaccgaccccgccaccctgtactgcatcaacttcagccacgacagcagcttcctgtgcgccagcagcgacaagggcaccgtgcacatcttcgccctgaaggacaccagactgaacagaagaagcgccctggccagagtgggcaaggtgggccccatgatcggccagtacgtggacagccagtggagcctggccagcttcaccgtgcccgccgagagcgcctgcatctgcgccttcggcagaaacaccagcaagaacgtgaacagcgtgatcgccatctgcgtggacggcaccttccacaagtacgtgttcacccccgacggcaactgcaacagagaggccttcgacgtgtacctggacatctgcgacgacgacgacttctag

SEQ ID NO: 29303 - DNA, 1083 bp, Artificial Sequence
  derived and/or modified sequence
atgacccagcagcccctgagaggcgtgaccagcctgagattcaaccaggaccagagctgcttctgctgcgccatggagaccggcgtgagaatctacaacgtggagcccctgatggagaagggccacctggaccacgagcaggtgggcagcatgggcctggtggagatgctgcacagaagcaacctgctggccctggtgggcggcggcagcagccccaagttcagcgagatcagcgtgctgatctgggacgacgccagagagggcaaggacagcaaggagaagctggtgctggagttcaccttcaccaagcccgtgctgagcgtgagaatgagacacgacaagatcgtgatcgtgctgaagaacagaatctacgtgtacagcttccccgacaaccccagaaagctgttcgagttcgacaccagagacaaccccaagggcctgtgcgacctgtgccccagcctggagaagcagctgctggtgttccccggccacaagtgcggcagcctgcagctggtggacctggccagcaccaagcccggcaccagcagcgcccccttcaccatcaacgcccaccagagcgacatcgcctgcgtgagcctgaaccagcccggcaccgtggtggccagcgccagccagaagggcaccctgatcagactgttcgacacccagagcaaggagaagctggtggagctgagaagaggcaccgaccccgccaccctgtactgcatcaacttcagccacgacagcagcttcctgtgcgccagcagcgacaagggcaccgtgcacatcttcgccctgaaggacaccagactgaacagaagaagcgccctggccagagtgggcaaggtgggccccatgatcggccagtacgtggacagccagtggagcctggccagcttcaccgtgcccgccgagagcgcctgcatctgcgccttcggcagaaacaccagcaagaacgtgaacagcgtgatcgccatctgcgtggacggcaccttccacaagtacgtgttcacccccgacggcaactgcaacagagaggccttcgacgtgtacctggacatctgcgacgacgacgacttctag

SEQ ID NO: 29304 - DNA, 168 bp, Artificial Sequence
  derived and/or modified sequence
atgacccagcagcccctgagaggcgtgaccagcctgagattcaaccaggaccagagctgcttctgctgcgccatggagaccggcgtgagaatctacaacgtggagcccctgatggagaagggccacctggaccacgagcaggtgggcagcatgggcctggtggagtag

SEQ ID NO: 29305 - DNA, 477 bp, Artificial Sequence
  derived and/or modified sequence
atgacccagcagcccctgagaggcgtgaccagcctgagattcaaccaggaccagagctgcttctgctgcgccatggagaccggcgtgagaatctacaacgtggagcccctgatggagaagggccacctggaccacgagcaggtgggcagcatgggcctggtggagatgctgcacagaagcaacctgctggccctggtgggcggcggcagcagccccaagttcagcgagatcagcgtgctgatctgggacgacgccagagagggcaaggacagcaaggagaagctggtgctggagttcaccttcaccaagcccgtgctgagcgtgagaatgagacacgacaagatcgtgatcgtgctgaagaacagaatctacgtgtacagcttccccgacaaccccagaaagctgttcgagttcgacaccagagacaaccccaaggccgcccaccccaccccccacctgcacaccctgggcctgtag

SEQ ID NO: 29306 - DNA, 879 bp, Artificial Sequence
  derived and/or modified sequence
atgacccagcagcccctgagaggcgtgaccagcctgagattcaaccaggaccagagctgcttctgctgcgccatggagaccggcgtgagaatctacaacgtggagcccctgatggagaagggccacctgggcctgtgcgacctgtgccccagcctggagaagcagctgctggtgttccccggccacaagtgcggcagcctgcagctggtggacctggccagcaccaagcccggcaccagcagcgcccccttcaccatcaacgcccaccagagcgacatcgcctgcgtgagcctgaaccagcccggcaccgtggtggccagcgccagccagaagggcaccctgatcagactgttcgacacccagagcaaggagaagctggtggagctgagaagaggcaccgaccccgccaccctgtactgcatcaacttcagccacgacagcagcttcctgtgcgccagcagcgacaagggcaccgtgcacatcttcgccctgaaggacaccagactgaacagaagaagcgcctacgtgagacccctgcacaccctgctgagcgccctggtggtggccgtggccctgggcgtgctggtgtgggccgccgagaccagagccgccgtgagaagatgcagaagaagccaccccgccgcctgcctggccgccgtgctggccgtgggcctgctggtgctgtgggtggccggcggcgcctgcaccttcctgttcagcatcgccggccccgtgctgctgatcctggtgcacgccagcctgagactgagaaacctgaagaacaagatcgagaacaagatcgagagcatcggcctgaagagaacccccatgggcctgctgctggaggccctgggccaggagcaggaggccggcagctag

SEQ ID NO: 29307 - DNA, 1116 bp, Artificial Sequence
  derived and/or modified sequence
atgacccagcagcctctgcgtggcgtgacatcactgcgcttcaatcaggaccaaagttgcttttgttgtgcaatggagacaggcgtcaggatctataatgtggaacctcttatggaaaaagggcacttggatcatgagcaggtgggatctatgggcctcgtcgagatgcttcaccgatccaacctgttggctttggtcgggggtggcagcagtccaaagttctctgaaatcagcgtgctaatttgggacgatgcacgggaaggcaaggacagcaaggagaagctggttctcgagttcactttcacaaaacctgtactgtctgtgcgcatgcgccatgataagatcgtgatcgtgttaaagaatcggatctatgtatactcgttccccgataaccccagaaaactgttcgaatttgacactcgcgacaacccaaaggccgcacaccccaccccccatctacatacattgggactgtgtgatctgtgcccttcactggagaagcagctcctcgtcttcccaggacataagtgcggaagcctgcaactggtcgatttggcgagcaccaagccgggcacctccagtgcacctttcactatcaacgcacaccaaagcgacatcgcatgcgtgagcctgaaccaacctgggaccgtggtagcttccgccagccaaaagggaacactcatcagactgttcgacacccaaagcaaggaaaaactggtcgagctgcgacgggggacggatccagctactctttactgtataaatttcagccacgatagcagcttcctctgtgcttcctctgataagggaacggttcatatattcgccttaaaagatacccggctgaaccggagaagcgcactggcaagggtgggcaaggtaggaccgatgattggacaatacgttgattcacagtggagtctagcaagctttaccgtgcccgccgaaagtgcctgtatttgtgccttcggccgaaatacttctaagaatgtcaactccgtcattgccatttgtgtggacggcacattccacaagtacgtcttcacacccgacggcaattgtaatcgggaagcctttgatgtgtatctcgatatttgtgatgatgacgatttttag

SEQ ID NO: 29308 - DNA, 1083 bp, Artificial Sequence
  derived and/or modified sequence
atgactcagcagccccttcgaggagttaccagcttacggtttaaccaagatcagagttgcttctgctgcgccatggagaccggtgttcgcatatataacgtcgagcccttaatggagaaaggacatctagatcacgaacaggtcggatccatgggccttgttgagatgctccaccggagcaaccttctggcattagtggggggaggatcctctcccaagttctccgagatcagcgtgctcatatgggatgacgctcgggaaggcaaagattctaaagagaaactggttctcgagtttaccttcacaaagcctgtacttagcgtccggatgcgacacgataaaattgtcatagtgcttaagaataggatctacgtttactcattccccgataaccctcggaaactgtttgagttcgatacaagagataaccccaagggtttatgtgacctgtgcccttctctcgaaaagcagctcctggtgtttcccgggcacaaatgcggttctctgcagctagtcgatctggctagtaccaagcccggaacttccagcgctccctttaccattaatgcgcaccaatctgacatagcctgtgtgagtctgaaccaaccaggcacggtagtagcctctgcgtcccagaagggcacactaatcaggctatttgatactcagtcgaaagaaaagctggtggagctgcggaggggcacagatcccgcgacgctgtattgcatcaatttcagccacgactcttcctttctgtgtgcatcttctgacaagggaactgtgcatatattcgccctaaaggatactaggcttaaccgacggtccgccctggcccgggtaggcaaagttggtcctatgatcgggcagtatgtagactcacaatggagtttggccagttttactgtgcccgccgagagcgcatgtatctgcgcattcggtcggaatacatcaaagaatgtaaatagtgttatcgccatttgtgtagatgggactttccacaaatacgtgtttactcctgacggaaattgcaacagagaagccttcgacgtctatctcgatatctgcgatgacgacgatttttag

SEQ ID NO: 29309 - DNA, 168 bp, Artificial Sequence
  derived and/or modified sequence
atgacccaacagccccttagaggcgtcacctctcttcgattcaaccaggatcagtcttgcttttgttgtgctatggagactggcgttcggatctataacgtggagccactcatggagaagggccatcttgatcacgaacaggtcggctcaatgggcctcgtggagtag

SEQ ID NO: 29310 - DNA, 477 bp, Artificial Sequence
  derived and/or modified sequence
atgacacagcagcccctgcggggtgtgacgtccctcaggttcaatcaggatcagagttgtttctgctgcgctatggagacgggggtaaggatatataatgtggagcctctgatggagaaggggcatctggaccacgagcaggtcggatccatgggtttagtagagatgctgcaccgatcaaaccttttggccctcgtcggtgggggcagttcccccaagttctccgaaataagtgttcttatttgggatgatgcccgcgaaggcaaggactcaaaagagaaactagtgctggaattcacatttacaaaacctgttctatccgtaaggatgagacatgacaagatcgttatagtactcaagaacagaatttacgtatactcatttcctgataaccccaggaaactgttcgagttcgacacccgggataacccaaaggcagctcatcctactcctcatcttcacacgctcgggctctag

SEQ ID NO: 29311 - DNA, 879 bp, Artificial Sequence
  derived and/or modified sequence
atgacccagcagccacttcgcggggttacaagcctgaggttcaaccaagaccagtcttgtttctgctgtgctatggaaacaggagtgcgtatctacaacgtggaaccattgatggaaaagggacatcttggcctctgcgatctgtgtccctcactcgagaaacaattactcgtgttcccaggacataagtgtggcagcctccagttggttgatttggcctcaacaaaaccaggaaccagcagcgcccctttcaccatcaatgctcaccagagtgatattgcatgtgtgtctttgaatcagccaggcactgtggtcgcatcagccagtcagaagggtactcttatccgcctgttcgatacccaatccaaggagaaactggttgagctgaggagaggaaccgatcctgccactctttattgtattaacttcagtcacgattccagcttcctttgcgcttcttccgacaagggcaccgtccacatctttgccctcaaggatacccgcttaaatcgaagatcagcatacgtcagaccgcttcacactctactctctgctctggtggtggccgtggcgttgggcgtgttggtctgggcagcagaaacccgggctgctgtccggcgttgcagaaggagtcaccccgccgcgtgcttggccgcagtgcttgccgttggattgctcgtgctctgggtggcaggtggcgcgtgcacctttctcttctccatcgccgggcctgtccttcttatcctcgtgcacgctagtttgcggttgcgaaacctgaagaataaaattgagaacaagatagagagcataggcttgaaacgcaccccaatgggtcttttactggaagccctggggcaagagcaagaggcaggctcttag

SEQ ID NO: 29312 - DNA, 1116 bp, Artificial Sequence
  derived and/or modified sequence
atgacccagcagcccctgcggggcgtgaccagcctgcgcttcaaccaggaccagagctgcttctgctgtgccatggagactggagtgcgcatctacaacgtggagcccctgatggagaagggccacctggaccacgagcaggtgggctccatgggcctggtggagatgctgcacaggagcaacctgctggccctggtgggcggcggcagcagccccaagttcagcgagatctctgtgctgatctgggatgatgcccgggagggcaaggacagcaaggagaagctggtgctggagttcaccttcaccaagcctgtgctgtctgtgaggatgagacatgacaagatcgtgattgtgctgaagaaccgcatctacgtgtacagcttcccagacaaccccaggaagctgtttgaatttgacacccgggacaaccccaaggccgcccaccccaccccccacctgcacaccctgggcctgtgtgacctgtgccccagcctggagaagcagctgctggtgtttcctggccacaagtgtggcagcctgcagctggtggacctggccagcaccaagccaggcaccagcagcgcccccttcaccatcaatgcccaccagagcgacatcgcctgtgtgtccctgaaccagcccggcaccgtggtggccagcgccagccagaagggcaccctcatccggctgtttgacacccagagcaaggagaagctggtggagctgcggcggggcacagatcctgccaccctgtactgcatcaacttcagccatgacagcagcttcctgtgtgccagcagtgacaagggcaccgtgcacatctttgccctgaaggacacccggctgaacagaagaagtgccctggcccgggtgggcaaggtgggccccatgattggccagtatgtggacagccagtggagcctggccagcttcaccgtgcctgctgagagcgcctgcatctgtgcctttggaagaaacaccagcaagaatgtgaacagcgtgattgccatctgtgtggatggcaccttccacaagtatgtgttcaccccagatggcaactgcaaccgggaggcctttgatgtgtacctggacatctgtgatgatgatgacttctag

SEQ ID NO: 29313 - DNA, 1083 bp, Artificial Sequence
  derived and/or modified sequence
atgacccagcagcccctgcggggcgtgaccagcctgcgcttcaaccaggaccagagctgcttctgctgtgccatggagactggagtgcgcatctacaacgtggagcccctgatggagaagggccacctggaccacgagcaggtgggctccatgggcctggtggagatgctgcacaggagcaacctgctggccctggtgggcggcggcagcagccccaagttcagcgagatctctgtgctgatctgggatgatgcccgggagggcaaggacagcaaggagaagctggtgctggagttcaccttcaccaagcctgtgctgtctgtgaggatgagacatgacaagatcgtgattgtgctgaagaaccgcatctacgtgtacagcttcccagacaaccccaggaagctgtttgaatttgacacccgggacaaccccaagggcctgtgtgacctgtgccccagcctggagaagcagctgctggtgtttcctggccacaagtgtggcagcctgcagctggtggacctggccagcaccaagccaggcaccagcagcgcccccttcaccatcaatgcccaccagagcgacatcgcctgtgtgtccctgaaccagcccggcaccgtggtggccagcgccagccagaagggcaccctcatccggctgtttgacacccagagcaaggagaagctggtggagctgcggcggggcacagatcctgccaccctgtactgcatcaacttcagccatgacagcagcttcctgtgtgccagcagtgacaagggcaccgtgcacatctttgccctgaaggacacccggctgaacagaagaagtgccctggcccgggtgggcaaggtgggccccatgattggccagtatgtggacagccagtggagcctggccagcttcaccgtgcctgctgagagcgcctgcatctgtgccttcggcaggaacaccagcaagaatgtgaacagcgtcatcgccatctgtgtggatggcaccttccacaagtatgtgttcaccccagatggcaactgcaaccgggaggcctttgatgtgtacctggacatctgtgatgatgatgacttctag

SEQ ID NO: 29314 - DNA, 168 bp, Artificial Sequence
  derived and/or modified sequence
atgacccagcagcccctgcggggcgtgaccagcctgcgcttcaaccaggaccagagctgcttctgctgtgccatggagactggagtgcgcatctacaacgtggagcccctgatggagaagggccacctggaccacgagcaggtgggctccatgggcctggtggagtag

SEQ ID NO: 29315 - DNA, 477 bp, Artificial Sequence
  derived and/or modified sequence
atgacccagcagcccctgcggggcgtgaccagcctgcgcttcaaccaggaccagagctgcttctgctgtgccatggagactggagtgcgcatctacaacgtggagcccctgatggagaagggccacctggaccacgagcaggtgggctccatgggcctggtggagatgctgcacaggagcaacctgctggccctggtgggcggcggcagcagccccaagttcagcgagatctctgtgctgatctgggatgatgcccgggagggcaaggacagcaaggagaagctggtgctggagttcaccttcaccaagcctgtgctgtctgtgaggatgagacatgacaagatcgtgattgtgctgaagaaccgcatctacgtgtacagcttcccagacaaccccaggaagctgtttgaatttgacacccgggacaaccccaaggccgcccaccccaccccccacctgcacaccctgggcctgtag

SEQ ID NO: 29316 - DNA, 879 bp, Artificial Sequence
  derived and/or modified sequence
atgacccagcagcccctgcggggcgtgaccagcctgcgcttcaaccaggaccagagctgcttctgctgtgccatggagactggagtgcgcatctacaacgtggagcccctgatggagaagggccacctgggcctgtgtgacctgtgccccagcctggagaagcagctgctggtgtttcctggccacaagtgtggcagcctgcagctggtggacctggccagcaccaagccaggcaccagcagcgcccccttcaccatcaatgcccaccagagcgacatcgcctgtgtgtccctgaaccagcccggcaccgtggtggccagcgccagccagaagggcaccctcatccggctgtttgacacccagagcaaggagaagctggtggagctgcggcggggcacagatcctgccaccctgtactgcatcaacttcagccatgacagcagcttcctgtgtgccagcagtgacaagggcaccgtgcacatctttgccctgaaggacacccggctgaacagaagaagtgcctacgtgcggcccctgcacaccctgctgagcgccctggtggtggccgtggccctgggcgtgctggtgtgggccgctgagaccagggctgctgtgcggcgctgcagaagaagccaccctgctgcctgcctggccgctgtgctggccgtgggcctgctggtgctgtgggtggccggcggggcctgcaccttcctgttcagcattgctggccctgtgctgctgatcctggtgcacgccagcctgcggctgaggaacctgaagaacaagattgagaacaagattgagagcatcggcctgaagaggacccccatgggcctgctgctggaggccctgggccaggagcaggaggccggcagctag

SEQ ID NO: 29317 - DNA, 1116 bp, Artificial Sequence
  derived and/or modified sequence
atgacccagcagcccctgcggggcgtgaccagcctgcggttcaaccaggaccagagctgtttctgttgcgccatggagacaggggtcaggatctataacgtggaacctctaatggagaaaggacatctggatcatgaacaagttgggagtatgggactggtggaaatgctccatcggagcaacttgctcgccttggtcggaggcgggtcttcaccaaagttctctgagatatctgtgctgatctgggacgatgctagagaagggaaagatagtaaagagaagctcgtgctagagttcacgttcacaaaaccagtgctctcagtgcgcatgcggcatgacaagatagttatcgtgctgaaaaacagaatctacgtctactctttccctgataatccaaggaaactatttgagttcgataccagggacaatcccaaggcagcccaccccacgcctcacttgcacacccttggactgtgcgacctatgtccctccttggagaagcagctacttgtcttccctggacataagtgtggcagtctccagctggtagacctggctagcacaaaaccggggacatctagcgcccctttcaccatcaacgcccatcaaagtgacatcgcctgtgtcagcctgaaccagccgggtacagtggtcgcttctgcttctcagaaggggacacttataagactattcgacacacaaagtaaggagaagcttgtggaacttagacgggggactgatcccgcgacactttactgtatcaacttcagccacgactcttccttcttatgtgcctcatccgataaagggactgttcacatcttcgcactcaaagatacccgattaaaccgccggtcagcgctagctcgagtggggaaggttggtcctatgattggccagtatgtcgacagccagtggagtctggcgtcttttacagttccggctgaatccgcttgtatctgcgctttcggtaggaacacgtctaagaatgtaaactcggtcatcgcaatttgtgttgacggaacatttcataaatacgtattcacacccgacggaaactgcaatagagaagcttttgatgtttaccttgatatctgtgatgacgatgatttttag

SEQ ID NO: 29318 - DNA, 1083 bp, Artificial Sequence
  derived and/or modified sequence
atgacccagcagcccctgcggggcgtgaccagcctgcggttcaaccaggatcaatcatgcttctgctgtgccatggagacgggtgtcaggatatacaacgtcgaacccctgatggagaagggccatctggatcacgagcaggttgggtctatgggtctggttgagatgctccacaggagtaatcttctcgcacttgttgggggcgggtcttcccccaagttcagtgaaatctctgtgctgatttgggatgatgcgcgcgagggtaaggactccaaagaaaagctggtgcttgagttcactttcactaaacctgtgttgagtgtcaggatgagacacgataaaatcgtcatagtgttaaagaatagaatctacgtttactcttttcctgacaatccgcgaaaacttttcgagtttgacactcgagacaaccctaaaggtctgtgcgatctgtgccccagcctagagaaacagctgctggttttccccgggcacaaatgcggctccctgcagctggtcgatctggctagtacgaagcccgggacctcatccgcacctttcaccatcaatgcacaccagagcgatatcgcctgcgtgtctcttaaccagcctggaacggtagtggcctccgcatctcagaaaggcacgcttatccgcctctttgatacccaatccaaagaaaaactggttgagttacgccgtggcaccgaccccgcaaccctgtactgtatcaatttttctcacgattcgtcctttctctgcgcttcgtctgataagggcacagttcacatttttgctttgaaagacacccggctgaacagacgtagcgctcttgcaagggtgggcaaagttggcccgatgattgggcagtatgtggactcccagtggtcgctcgcttcctttacagtgccagcagaatccgcttgcatctgtgctttcggacgtaatacatcaaaaaacgtaaacagcgtgatcgccatttgcgtggatggtactttccacaagtacgtcttcacaccagacggaaattgcaacagagaggcattcgatgtgtatctggacatttgtgatgacgatgacttctag

SEQ ID NO: 29319 - DNA, 168 bp, Artificial Sequence
  derived and/or modified sequence
atgacccagcagcccctgcggggcgtgaccagcctgcggttcaaccaggatcaatcctgtttctgctgtgcaatggaaaccggggtccgcatctacaacgttgagcccctcatggaaaagggtcacctggatcatgagcaggtcggctcgatgggcctggtggaatag

SEQ ID NO: 29320 - DNA, 477 bp, Artificial Sequence
  derived and/or modified sequence
atgacccagcagcccctgcggggcgtgaccagcctgcggttcaaccaagaccaatcttgcttctgctgcgccatggagacgggcgtacgcatttacaacgttgagcctctgatggaaaaggggcatctggaccatgagcaggtaggaagcatgggactggtggagatgctgcataggtccaatttgctcgccctcgtggggggggggagtagccctaagttttctgagattagcgtcttgatctgggatgacgctagagaaggcaaagacagcaaagaaaaactagtgctcgaattcaccttcaccaaacctgttctttcagtgcggatgcgccacgacaagattgtgatcgttctgaaaaaccggatttacgtgtatagcttcccagacaacccccgcaagctattcgaatttgacacgcgggacaaccccaaggcggcacatcccacgccacacctccacactctcggactatag

SEQ ID NO: 29321 - DNA, 879 bp, Artificial Sequence
  derived and/or modified sequence
atgacccagcagcccctgcggggcgtgaccagcctgcggttcaaccaggatcagagctgtttttgctgcgcaatggagacaggggtacgaatttacaacgttgagccattaatggagaaaggacatctaggactctgtgacctgtgtccctccctggagaagcagctgctggtatttcccggacacaagtgcggatcacttcagctcgtcgacctggctagcaccaaacccgggacctcttcggcacccttcacaatcaacgcacaccagagtgatatcgcctgcgtgagtctcaatcagccgggcaccgttgtcgcgtccgctagccagaaagggacactcatccgtctcttcgacacacaatccaaggaaaagttagtggagcttaggcgaggtacagaccctgcgactttatactgcatcaatttctctcatgatagcagtttcctctgtgcctccagcgacaagggcacagttcatatcttcgcgctaaaggatacccgtctgaacagacgatctgcttacgttcgacctctgcataccctgttgtctgcactggtggttgccgttgctctaggcgtgttggtgtgggctgccgaaacgcgtgccgccgtgagacggtgccggagatcccacccggctgcctgtctggcagcagtgctcgctgtgggacttctggtcctttgggttgcggggggagcatgtaccttcttgttcagtatcgccgggcccgtcctccttatacttgttcacgcttcccttaggcttaggaatctcaaaaacaaaatagaaaacaagattgagagcatcggtctgaaaagaacgcccatggggctgcttctggaggcccttggtcaggagcaagaggctggttcctag

SEQ ID NO: 29322 - DNA, 1116 bp, Artificial Sequence
  derived and/or modified sequence
atgacccaacagcccctacgcggtgtcacatccttgagattcaaccaagatcagtcatgcttttgttgtgcaatggaaaccggggtccggatctataacgtggagcctctgatggagaaaggccacctggatcatgagcaagtcggctcaatggggctggtggagatgctgcaccgcagtaacctgttggcgctcgtgggcggaggctctagtcccaagttcagtgagatcagcgtattgatatgggacgatgccagggagggaaaggattccaaggagaaactcgtcttagagtttaccttcacaaaaccagtgctgagcgtgcgaatgaggcacgataagatcgtgatcgtacttaaaaataggatttatgtgtatagttttccagataatcctcggaagctgttcgaatttgatacccgagataatccaaaggccgcacaccctacacctcatctccacaccctgggtctttgcgacctctgtccctcgctggaaaagcagctgctggtgttcccaggacacaaatgtggctcactgcaacttgttgacctggcctcgacaaaacctgggacgtcttccgccccattcaccatcaatgcgcatcaaagcgacatagcctgtgtatcccttaatcaacctggtactgtcgtcgcttcagcgtcacaaaaaggaacactgatacgcttatttgatactcagagcaaagaaaaactggtggagctccgccgaggcacagatcccgcaacgctctattgcattaatttttcccatgattccagcttcctctgcgcctcatccgataagggtactgtgcacatattcgcgttgaaagatacacgcctgaataggagaagtgctctagctcgggtgggaaaggtaggcccaatgatcgggcagtatgtggacagtcaatggtcactggccagctttaccgtgcctgctgaaagcgcttgtatctgcgccttcggaaggaacacctcgaaaaacgtgaatagcgtgatcgccatctgcgtcgatgggacctttcataagtacgtttttactcctgacggcaactgtaaccgggaggcgtttgatgtgtacctcgacatctgcgacgacgatgatttctag

SEQ ID NO: 29323 - DNA, 1083 bp, Artificial Sequence
  derived and/or modified sequence
atgactcagcagcctctccggggtgtcactagcttgcgtttcaaccaggatcagagctgcttctgttgtgcgatggagacgggtgtgcggatctacaatgtcgagcccctcatggaaaagggccatctggatcacgagcaggtgggctctatgggactggttgagatgctccataggtccaatctcttggcgcttgtcggcggagggtcctcccccaaattcagtgaaatttccgtactcatctgggacgatgctcgcgagggtaaggactctaaggagaaactcgtgcttgaatttacttttaccaagcctgtgttgtccgtgcggatgcggcacgataagattgtgattgtgctgaagaaccggatttatgtttactcatttcctgacaatcccaggaagctgtttgaattcgacaccagggataaccccaaagggctgtgcgacctgtgtcccagcttggagaagcagttacttgtctttcctggacacaaatgcggaagtctgcagctcgtggaccttgcttccacgaaaccgggaactagcagcgccccttttaccataaacgcacatcagagcgacattgcctgtgtcagcctgaaccagccgggaaccgtggtcgccagcgccagccaaaaaggaacattaatcagattgtttgacacccagtcaaaggagaaactggtggaactccgcagaggcacggatccagcaacactctattgcataaacttttcccacgacagctcatttttgtgcgcgagttctgacaaggggaccgtgcatatctttgcactcaaagacactcgactcaaccgacgttctgccctggccagagtgggtaaagtgggtcccatgattggacagtacgtggactctcagtggagcttggcatctttcacagtgcctgcagagagtgcctgcatttgtgcatttggaagaaacacttcaaagaacgttaattctgtaattgctatatgcgtcgacggaacctttcataaatacgtgtttacccctgacgggaattgcaacagggaggcatttgacgtctacttggacatatgcgatgatgatgatttttag

SEQ ID NO: 29324 - DNA, 168 bp, Artificial Sequence
  derived and/or modified sequence
atgactcagcagccacttcggggtgttacgagtctgagatttaatcaggatcaaagttgcttctgttgcgctatggagacgggggtgcgtatctacaatgtcgagccactgatggagaaggggcacttggatcacgagcaagtaggttctatgggactggtggagtag

SEQ ID NO: 29325 - DNA, 477 bp, Artificial Sequence
  derived and/or modified sequence
atgactcaacagccactgaggggagtcacgtctcttcgcttcaaccaggatcagtcatgtttctgttgtgctatggagacaggtgttagaatctataacgtcgaacccctaatggagaagggacatctggatcacgagcaggtgggaagtatgggattggttgagatgctccatcggtctaacctcctcgctctggttggcggaggctcatcacccaagttctccgaaatttccgttctcatctgggacgacgcgagggaggggaaggacagtaaggagaaactggtcctcgaattcaccttcaccaaacctgtgcttagcgttcgaatgagacacgataagattgtcattgttcttaaaaatagaatatatgtgtactcttttccagacaatccccgaaaactttttgagttcgatacacgagataatccgaaggcggctcatcctacccctcatctgcacacattaggtctttag

SEQ ID NO: 29326 - DNA, 879 bp, Artificial Sequence
  derived and/or modified sequence
atgacacaacagccacttcggggtgtgacttccctgaggttcaaccaggaccagagctgcttttgctgtgcaatggaaaccggagttcgaatatataatgtggagcctctcatggagaagggccatctaggactctgcgatctgtgccccagcctcgagaagcagctgctcgtgtttcctggtcataagtgcgggagcctccaactcgttgacttggcgtctactaagcccggaacatcttctgccccattcacaattaacgctcatcaatccgacattgcctgtgtgtctctgaatcagccaggaacggttgtggcttctgcaagccagaagggaacattgatacgcttatttgatacccagtcaaaagagaaacttgtcgaactccggaggggcacagatcccgcaactctttactgtatcaactttagtcacgattctagctttctgtgcgcctcctccgacaagggcacagttcatatctttgccctgaaagacactcgcttgaaccgcagatcagcgtacgtccgccctctccataccctcttgtcggccctggtggttgccgtggctcttggcgtcctggtgtgggcagccgagacccgtgccgcagttagacgatgtcgccgttctcaccccgctgcctgcctagccgctgtgctggccgtaggtttgctggtgttgtgggtggccggtggcgcatgtacatttctcttttcaatcgctggccctgtgctgctcatcctggtgcacgcatccttaaggctgcggaatctgaagaataagattgaaaataagatagaatcaatcggcctgaaacggactccgatgggcctgctgttggaggcactgggacaggagcaagaagccggatcttag

SEQ ID NO: 29327 - DNA, 1392 bp, Artificial Sequence
  derived and/or modified sequence
ccgggccgcgggcggcaccgacagctggggcccgggtcagggacacgcggaggtcaggccggtgaaggcggcaggaagctggagcacgatcccaggaggaacaatcctgcaccatgactcaacagccacttcgaggagtgaccagcctgcgtttcaaccaagaccaaagctgcttttgctgcgccatggagacaggtgtgcgcatctacaacgtggagcccttgatggagaaggggcatctggaccacgagcaggtgggcagcatgggcttggtggagatgctgcaccgctccaaccttctggccttggtgggcggtggtagtagtcccaagttctcagagatctcagtgctgatctgggacgatgcccgggagggcaaggactccaaggagaagctggtgctggagttcaccttcaccaagccagtgctttctgtgcgcatgcgccatgacaagatcgtgatcgtgctgaagaaccgcatctatgtgtactccttccccgacaatccccgaaagctgtttgagtttgatacccgggacaaccccaaggccgcccaccccaccccccatcttcacaccctagggctctgtgacctctgccccagcctggagaagcaactgctagtgttcccgggacacaagtgtgggagtctgcaacttgtggacctggcgagcacaaagcctggcacctcgtctgctccattcacgatcaatgcacatcagagtgacatagcctgtgtgtctctaaaccagccaggcactgtagtggcctcagcctcccagaagggtacccttattcgcctctttgacacacaatccaaggagaaactggtggagctgcgccgaggcactgaccctgccaccctctactgcattaacttcagccacgactcctccttcctctgcgcttccagtgataagggtactgtccatatctttgctctcaaggatacccgcctcaaccgccgctccgcgctggctcgcgtgggcaaggtggggcctatgattgggcagtacgtggactctcagtggagcctggcgagcttcactgtgcctgctgagtcagcttgcatctgcgccttcggtcgcaatacttccaagaacgtcaactctgtcattgccatctgcgtagatgggaccttccacaaatatgtcttcactcctgatggaaactgcaacagagaggctttcgacgtgtaccttgacatctgtgatgatgatgacttttaaggaccctgggggctgtgctagggacctgcagtggcagaactgcagagctgagccttggcagtggggcgtgcttggaagccaccagccagcaagcattaatggggctggtgcccactttccactcagcagagctatgtctaaataaagagctcacttcccccca

SEQ ID NO: 29328 - DNA, 1626 bp, Artificial Sequence
  derived and/or modified sequence
tccctcccccggaagtagggcctgatgtaaacacccgagccgggctccaaggcccgggaggtcagaaaaccgggccgcgggcggcaccgacagctggggcccgggtcagggacacgcggaggtcaggccggtgaaggcggcaggaagctggagcacgatcccaggaggaacaatcctgcaccatgactcaacagccacttcgaggagtgaccagcctgcgtttcaaccaagaccaaagctgcttttgctgcgccatggagacaggtgtgcgcatctacaacgtggagcccttgatggagaaggggcatctggaccacgagcaggtgggcagcatgggcttggtggagatgctgcaccgctccaaccttctggccttggtgggcggtggtagtagtcccaagttctcagagatctcagtgctgatctgggacgatgcccgggagggcaaggactccaaggagaagctggtgctggagttcaccttcaccaagccagtgctttctgtgcgcatgcgccatgacaagatcgtgatcgtgctgaagaaccgcatctatgtgtactccttccccgacaatccccgaaagctgtttgagtttgatacccgggacaaccccaaggggctctgtgacctctgccccagcctggagaagcaactgctagtgttcccgggacacaagtgtgggagtctgcaacttgtggacctggcgagcacaaagcctggcacctcgtctgctccattcacgatcaatgcacatcagagtgacatagcctgtgtgtctctaaaccagccaggcactgtagtggcctcagcctcccagaagggtacccttattcgcctctttgacacacaatccaaggagaaactggtggagctgcgccgaggcactgaccctgccaccctctactgcattaacttcagccacgactcctccttcctctgcgcttccagtgataagggtactgtccatatctttgctctcaaggatacccgcctcaaccgccgctccgcgctggctcgcgtgggcaaggtggggcctatgattgggcagtacgtggactctcagtggagcctggcgagcttcactgtgcctgctgagtcagcttgcatctgcgccttcggtcgcaatacttccaagaacgtcaactctgtcattgccatctgcgtagatgggaccttccacaaatatgtcttcactcctgatggaaactgcaacagagaggctttcgacgtgtaccttgacatctgtgatgatgatgacttttaaggaccctgggggctgtgctagggacctgcagtggcagaactgcagagctgagccttggcagtggggcgtgcttggaagccaccagccagcaagcattaatggggctggtgcccactttccactcagcagagctatgtctaaataaagagctcacttccccccagcacttcttgatgactgtgtgccccaagggccaggccagagacccaggaaggcagcgaccccttgggatccctaacctggaggaaattgccagggacccagagggagtgccctaatccaacctggggattttttaaaagcttcctaggaagagatgatctccgatgtgatgaatacgaataaaaggcccttaatggca

SEQ ID NO: 29329 - DNA, 501 bp, Artificial Sequence
  derived and/or modified sequence
aaccggtgcggctactctcggccgccgcggaggtccgcgtcttgttagcagggaaggtttactcccccattgtgggtgaccaaggggctgagggcttggccggtttcgctttgctgggggcaaggcacgctctctctccccacccttccgggttccctcagacagtctcggccttgaggaacccccttcgcctccggtcccccagccaaccttcctccgctccccgcgccctccccggagaaccccactgtcactcgcgatgctccgaagacccgggaactaggcgaggaaggcggtggccgcctttttccagctgggaggaacaatcctgcaccatgactcaacagccacttcgaggagtgaccagcctgcgtttcaaccaagaccaaagctgcttttgctgcgccatggagacaggtgtgcgcatctacaacgtggagcccttgatggagaaggggcatctggaccacgagcaggtgggcagcatgggcttggtggaga

SEQ ID NO: 29330 - DNA, 580 bp, Artificial Sequence
  derived and/or modified sequence
tccccggagaaccccactgtcactcgcgatgctccgaagacccgggaactaggcgaggaaggcggtggccgcctttttccagctgggaggaacaatcctgcaccatgactcaacagccacttcgaggagtgaccagcctgcgtttcaaccaagaccaaagctgcttttgctgcgccatggagacaggtgtgcgcatctacaacgtggagcccttgatggagaaggggcatctggaccacgagcaggtgggcagcatgggcttggtggagatgctgcaccgctccaaccttctggccttggtgggcggtggtagtagtcccaagttctcagagatctcagtgctgatctgggacgatgcccgggagggcaaggactccaaggagaagctggtgctggagttcaccttcaccaagccagtgctttctgtgcgcatgcgccatgacaagatcgtgatcgtgctgaagaaccgcatctatgtgtactccttccccgacaatccccgaaagctgtttgagtttgatacccgggacaaccccaaggccgcccaccccaccccccatcttcacaccctagggctctg

SEQ ID NO: 29331 - DNA, 1176 bp, Artificial Sequence
  derived and/or modified sequence
aaacacccgagccgggctccaaggcccgggaggtcagaaaaccgggccgcgggcggcaccgacagctggggcccgggtcagggacacgcggaggtcaggccggtgaaggcggcaggaagctggagcacgatcccaggaggaacaatcctgcaccatgactcaacagccacttcgaggagtgaccagcctgcgtttcaaccaagaccaaagctgcttttgctgcgccatggagacaggtgtgcgcatctacaacgtggagcccttgatggagaaggggcatctggggctctgtgacctctgccccagcctggagaagcaactgctagtgttcccgggacacaagtgtgggagtctgcaacttgtggacctggcgagcacaaagcctggcacctcgtctgctccattcacgatcaatgcacatcagagtgacatagcctgtgtgtctctaaaccagccaggcactgtagtggcctcagcctcccagaagggtacccttattcgcctctttgacacacaatccaaggagaaactggtggagctgcgccgaggcactgaccctgccaccctctactgcattaacttcagccacgactcctccttcctctgcgcttccagtgataagggtactgtccatatctttgctctcaaggatacccgcctcaaccgccgctccgcgtacgtgcggccacttcatacgctcctgagcgcgctggtagtggcggtggccctcggcgtgctggtgtgggcagctgagacccgcgcagctgtgcgccgctgccgccgcagccaccctgcagcctgcctggccgcagtgcttgccgtcggcctcctggtgctctgggtcgcgggcggcgcttgcaccttcctgttcagcatcgccgggccggtgcttctgatcctggtgcacgcctcgttgcgcctgcgcaaccttaagaacaagattgagaacaagatcgagagcattggtctcaagcggacgccaatgggcctgctactagaggcactgggacaagagcaggaggctggatcctaggcccctgggatctgtacccaggacctggagaataccaccccacccccagcccataattgggacccagagccctttcccagcacttaaaacaggagcctagagccccctgcccaaacaaaacaggacatctgtgaccgccctac

SEQ ID NO: 29332 - protein, 1231 aa, Artificial Sequence
  derived and/or modified sequence
MCKCCNLFSPNQSELLSHVSEKHMEEGVNVDEIIIPLRPLSTPEPPNSSKTGDEFLVMKRKRGRPKGSTKKSSTEEELAENIVSPTEDSPLAPEEGNSLPPSSLECSKCCRKFSNTRQLRKHICIIVLNLGEEEGEAGNESDLELEKKCKEDDREKASKRPRSQKTEKVQKISGKEARQLSGAKKPIISVVLTAHEAIPGATKIVPVEAGPPETGATNSETTSADLVPRRGYQEYAIQQTPYEQPMKSSRLGPTQLKIFTCEYCNKVFKFKHSLQAHLRIHTNEKPYKCPQCSYASAIKANLNVHLRKHTGEKFACDYCSFTCLSKGHLKVHIERVHKKIKQHCRFCKKKYSDVKNLIKHIRDAHDPQDKKVKEALDELCLMTREGKRQLLYDCHICERKFKNELDRDRHMLVHGDKWPFACELCGHGATKYQALELHVRKHPFVYVCAVCRKKFVSSIRLRTHIKEVHGAAQEALVFTSSINQSFCLLEPGGDIQQEALGDQLQLVEEEFALQGVNALKEEACPGDTQLEEGRKEPEAPGEMPAPAVHLASPQAESTALPPCELETTVVSSSDLHSQEVVSDDFLLKNDTSSAEAHAAPEKPPDMQHRSSVQTQGEVITLLLSKAQSAGSDQESHGAQSPLGEGQNMAVLSAGDPDPSRCLRSNPAEASDLLPPVAGGGDTITHQPDSCKAAPEHRSGITAFMKVLNSLQKKQMNTSLCERIRKVYGDLECEYCGKLFWYQVHFDMHVRTHTREHLYYCSQCHYSSITKNCLKRHVIQKHSNILLKCPTDGCDYSTPDKYKLQAHLKVHTALDKRSYSCPVCEKSFSEDRLIKSHIKTNHPEVSMSTISEVLGRRVQLKGLIGKRAMKCPYCDFYFMKNGSDLQRHIWAHEGVKPFKCSLCEYATRSKSNLKAHMNRHSTEKTHLCDMCGKKFKSKGTLKSHKLLHTADGKQFKCTVCDYTAAQKPQLLRHMEQHVSFKPFRCAHCHYSCNISGSLKRHYNRKHPNEEYANVGTGELAAEVLIQQGGLKCPVCSFVYGTKWEFNRHLKNKHGLKVVEIDGDPKWETATEAPEEPSTQYLHITEAEEDVQGTQAAVAALQDLRYTSESGDRLDPTAVNILQQIIELGAETHDATALASVVAMAPGTVTVVKQVTEEEPSSNHTVMIQETVQQASVELAEQHHLVVSSDDVEGIETVTVYTQGGEASEFIVYVQEAMQPVEEQAVEQPAQEL

SEQ ID NO: 29333 - DNA, 4006 bp, Artificial Sequence
  derived and/or modified sequence
gctgaatttgggtgaggaggaaggagaagcaggtaacgagtctgaccttgaactagaaaagaagtgtaaggaagatgatcgggaaaaagcctcgaaaagaccacggtcacagaaaacagagaaagtccagaagatctcaggaaaggaggccagacagctttctggggcgaagaaacccatcataagtgtggttttaactgcacacgaagcaattccaggtgctaccaagattgtgccagtggaggctgggccccctgaaacaggagctacaaattctgagaccacttcagcagacctggtgcctcggagaggctaccaggaatacgccattcagcagacaccttatgagcaaccaatgaagtcaagcaggctaggtcccactcagctcaaaatcttcacttgtgaatactgcaacaaggtcttcaagttcaagcactcgctgcaggcccacctgaggatccacaccaatgaaaagccatacaagtgcccccagtgcagctatgccagtgccatcaaggccaacctcaatgtgcacctgcgcaagcacactggagagaagttcgcctgcgactattgctcgttcacctgcctgagcaagggccacctcaaggtgcacatcgagcgagtgcacaagaagatcaagcagcactgccgcttctgcaagaagaagtactctgacgtcaagaacctcatcaagcacatccgagacgcgcatgacccacaggacaagaaggtcaaagaggccttggacgagctctgcctgatgacgagggagggcaagcggcagctgctctatgactgccacatctgtgagcgcaagttcaagaacgagctggaccgtgaccgccatatgctggtccacggagacaagtggccttttgcctgtgagctctgtggccatggggccaccaagtaccaggcgctggaactgcatgtcaggaagcaccccttcgtgtacgtctgtgccgtctgccgcaagaagttcgtcagctccatcaggctgcgcacccacatcaaagaggtgcacggggctgcccaggaggccttggtcttcaccagttccatcaaccagagcttctgcctcctggaacctggtggggacatccagcaagaagctctgggggaccagctacagctggtggaagaggagtttgccctccagggcgtgaatgcactcaaggaagaggcctgtcctggggacactcagctggaggagggccggaaggagccggaggcccctggggaaatgcctgccccagctgtgcacctggcctccccgcaggccgaaagcacagccctgccaccctgtgagctggaaaccaccgtggtctcctcctcagacctgcattctcaagaggtggtttcagatgattttttgttgaaaaatgatacctcctccgcagaggctcatgctgctcctgagaagcccccagacatgcagcacagaagctcagtccagacgcaaggtgaagtgatcacactactgctgtccaaggcccagagtgctgggtcagatcaggaaagccatggcgcccagagccccctaggggaagggcagaacatggctgtgctttcagctggtgacccagatcccagcaggtgtctcaggtcaaacccagctgaggcctcagacctcctccctccagtagctggtggtggggacaccatcacacatcagcctgactcttgcaaagctgcccctgagcaccggtcaggcatcaccgctttcatgaaggtcctgaacagtttacagaagaagcaaatgaacaccagcttgtgtgagcggatccggaaggtttatggagacctggagtgtgaatactgtggcaaacttttttggtaccaagtgcattttgatatgcatgtccgcacccacacccgggaacatctgtattattgctctcagtgtcattattcttccatcaccaaaaactgccttaaacgccacgtaattcagaaacacagtaacatcttgctgaagtgtcccaccgatggctgtgactactcaactccagataaatataagctacaggcacatcttaaagttcacacagcactggacaaaaggagttattcttgtcctgtttgtgaaaagtctttttcagaggatcgattgataaagtcacatatcaagaccaaccatcctgaggtctccatgagcaccatttctgaggttctcgggaggagggttcagctgaaagggctaattggaaagagagccatgaaatgcccatattgtgacttttatttcatgaagaatggctcagaccttcagcgtcatatttgggctcatgaaggtgtgaagcccttcaagtgttctttgtgtgagtatgcaactcgtagcaagagtaacctcaaggctcatatgaatcgtcacagcactgagaaaacccacctatgtgacatgtgtggcaagaaattcaaatcaaaagggacactgaaaagtcacaaactccttcacactgcagatgggaagcagtttaagtgcacggtgtgtgactacacagcggcccagaagccacagctgctgcggcacatggaacagcatgtctccttcaagcctttccgctgtgcccattgccattactcctgcaacatatctggctctctgaagcggcactacaacaggaagcaccctaatgaggagtatgccaacgtgggcaccggggagctggcagcggaggtgctcatccagcaaggtggtttgaagtgtcctgtttgcagctttgtatatggcaccaaatgggagttcaataggcacttgaagaacaaacatggcttgaaggtggtggaaattgatggagaccccaagtgggagacagcaacagaagctcctgaggagccctccacccagtatctccacatcacagaggccgaagaagacgttcaagggacacaggcagcggtggccgcgctccaggacctgagatacacctctgagagtggcgaccgactggaccccacggctgtgaacatcctgcagcagatcattgagctgggcgccgagacccatgacgccactgcccttgcctcggtggttgccatggcaccagggacggtgactgtggttaagcaggtcaccgaggaggagcccagctccaaccacacggtcatgatccaggagacggtccagcaagcgtccgtggagcttgccgagcagcaccacctggtggtgtcctccgacgacgtggagggcattgagacggtgactgtctacacgcagggcggggaggcctcggagttcatcgtctacgtgcaggaggccatgcagcctgtggaggagcaggctgtggagcagccggcccaggaactctagaggacatgtggcatcggatggccacagggcggggctgccaggctctgcaggcacccagggtggggaggccacccttcctgccctacccgcagaatggtgctctcctttgccctccctgcccagcagcctgataggactctcctagtccaacttggggtgggcaaggcagtcagcatcaccagcaacaccacaggaccctcaccccagcatagacacacaccccctgacccttaccatctgcttcctgaaagacttcagtgtcagctcccctacacacaccccacaccttcaccccttgcttcaagattcaaacagagactcccagtccccctcagcatcttccctgaatcacagccccagctccttgacccccatctaggtgccaaatgttcatctgcaaccgctatgcagtctggtgagagggagacagccatcacatagaaagtgaccgtacgggtttttaatcactgctgggtggggtgggggtagggggattgtcctggctttgtcgacaaagtcccacttccccgagtattaagggcccttggtatcaagtgaggtaaattcacccatcacagggtctcgccctaccatcctggaattatttcacttttaagataaatgcactatttcactgttcgcctcccattctaaggaggtgaggtggttggaataaaaacagttcctgtc

SEQ ID NO: 29334 - DNA, 3393 bp, Artificial Sequence
  derived and/or modified sequence
atgtgcaagtgctgcaacctgttcagccccaaccagagcgagctgctgagccacgtgagcgagaagcacatggaggagggcgtgaacgtggacgagatcatcatccccctgagacccctgagcacccccgagccccccaacagcagcaagaccggcgacgagttcctggtgatgaagagaaagagaggcagacccaagggcagcaccaagaagagcagcaccgaggaggagctggccgagaacatcgtgagccccaccgaggacagccccctggcccccgaggagggcaacagcctgccccccagcagcctggagtgcagcaagtgctgcagaaagttcagcaacaccagacagctgagaaagcacatctgcatcatcgtgctgaacctgggcgaggaggagggcgaggccggcaacgagagcgacctggagctggagaagaagtgcaaggaggacgacagagagaaggccagcaagagacccagaagccagaagaccgagaaggtgcagaagatcagcggcaaggaggccagacagctgagcggcgccaagaagcccatcatcagcgtggtgctgaccgcccacgaggccatccccggcgccaccaagatcgtgcccgtggaggccggcccccccgagaccggcgccaccaacagcgagaccaccagcgccgacctggtgcccagaagaggctaccaggagtacgccatccagcagaccccctacgagcagcccatgaagagcagcagactgggccccacccagctgaagatcttcacctgcgagtactgcaacaaggtgttcaagttcaagcacagcctgcaggcccacctgagaatccacaccaacgagaagccctacaagtgcccccagtgcagctacgccagcgccatcaaggccaacctgaacgtgcacctgagaaagcacaccggcgagaagttcgcctgcgactactgcagcttcacctgcctgagcaagggccacctgaaggtgcacatcgagagagtgcacaagaagatcaagcagcactgcagattctgcaagaagaagtacagcgacgtgaagaacctgatcaagcacatcagagacgcccacgacccccaggacaagaaggtgaaggaggccctggacgagctgtgcctgatgaccagagagggcaagagacagctgctgtacgactgccacatctgcgagagaaagttcaagaacgagctggtggaggaggagttcgccctgcagggcgtgaacgccctgaaggaggaggcctgccccggcgacacccagctggaggagggcagaaaggagcccgaggcccccggcgagatgcccgcccccgccgtgcacctggccagcccccaggccgagagcaccgccctgcccccctgcgagctggagaccaccgtggtgagcagcagcgacctgcacagccaggaggtggtgagcgacgacttcctgctgaagaacgacaccagcagcgccgaggcccacgccgcccccgagaagccccccgacatgcagcacagaagcagcgtgcagacccagggcgaggtgatcaccctgctgctgagcaaggcccagagcgccggcagcgaccaggagagccacggcgcccagagccccctgggcgagggccagaacatggccgtgctgagcgccggcgaccccgaccccagcagatgcctgagaagcaaccccgccgaggccagcgacctgctgccccccgtggccggcggcggcgacaccatcacccaccagcccgacagctgcaaggccgcccccgagcacagaagcggcatcaccgccttcatgaaggtgctgaacagcctgcagaagaagcagatgaacaccagcctgtgcgagagaatcagaaaggtgtacggcgacctggagtgcgagtactgcggcaagctgttctggtaccaggtgcacttcgacatgcacgtgagaacccacaccagagagcacctgtactactgcagccagtgccactacagcagcatcaccaagaactgcctgaagagacacgtgatccagaagcacagcaacatcctgctgaagtgccccaccgacggctgcgactacagcacccccgacaagtacaagctgcaggcccacctgaaggtgcacaccgccctggacaagagaagctacagctgccccgtgtgcgagaagagcttcagcgaggacagactgatcaagagccacatcaagaccaaccaccccgaggtgagcatgagcaccatcagcgaggtgctgggcagaagagtgcagctgaagggcctgatcggcaagagagccatgaagtgcccctactgcgacttctacttcatgaagaacggcagcgacctgcagagacacatctgggcccacgagggcgtgaagcccttcaagtgcagcctgtgcgagtacgccaccagaagcaagagcaacctgaaggcccacatgaacagacacagcaccgagaagacccacctgtgcgacatgtgcggcaagaagttcaagagcaagggcaccctgaagagccacaagctgctgcacaccgccgacggcaagcagttcaagtgcaccgtgtgcgactacaccgccgcccagaagccccagctgctgagacacatggagcagcacgtgagcttcaagcccttcagatgcgcccactgccactacagctgcaacatcagcggcagcctgaagagacactacaacagaaagcaccccaacgaggagtacgccaacgtgggcaccggcgagctggccgccgaggtgctgatccagcagggcggcctgaagtgccccgtgtgcagcttcgtgtacggcaccaagtgggagttcaacagacacctgaagaacaagcacggcctgaaggtggtggagatcgacggcgaccccaagtgggagaccgccaccgaggcccccgaggagcccagcacccagtacctgcacatcaccgaggccgaggaggacgtgcagggcacccaggccgccgtggccgccctgcaggacctgagatacaccagcgagagcggcgacagactggaccccaccgccgtgaacatcctgcagcagatcatcgagctgggcgccgagacccacgacgccaccgccctggccagcgtggtggccatggcccccggcaccgtgaccgtggtgaagcaggtgaccgaggaggagcccagcagcaaccacaccgtgatgatccaggagaccgtgcagcaggccagcgtggagctggccgagcagcaccacctggtggtgagcagcgacgacgtggagggcatcgagaccgtgaccgtgtacacccagggcggcgaggccagcgagttcatcgtgtacgtgcaggaggccatgcagcccgtggaggagcaggccgtggagcagcccgcccaggagctgtag

SEQ ID NO: 29335 - DNA, 3393 bp, Artificial Sequence
  derived and/or modified sequence
atgtgcaagtgttgtaacctgttctcaccaaaccagtcagagctgttgtcacatgtctctgagaaacacatggaagaaggcgtgaatgtagatgaaatcatcattcctctgagaccacttagcactccagagccccccaacagttctaagacaggtgacgaatttctggtaatgaaaagaaaaagaggacggcccaaaggctctaccaaaaaatcctcgaccgaggaggagctagccgagaatatcgtgagtccgacggaagactctcctctcgcccccgaagaggggaacagtctgcctccttcaagcctggagtgcagtaagtgttgcagaaagttcagcaatacgcggcaattgcgcaaacacatttgtatcatagtacttaacctcggcgaagaagagggagaagcaggaaacgagagtgacctcgaactagagaaaaaatgcaaagaagatgatcgagagaaggcttcaaagcggccacgctcacaaaaaaccgagaaagtccagaagatttcgggaaaggaggctcggcagctgagcggtgccaaaaaaccaatcatttcagtggttctcacagcccacgaagccattcccggtgccaccaaaattgtgcctgttgaagctggccctccggagacaggggccactaactcagaaactaccagcgcggacctggtgccgaggagggggtaccaggaatacgccattcagcagaccccctacgagcagccaatgaagtcctcccgcctcggaccaacacagttgaaaatattcacatgtgagtactgcaacaaggtgttcaagtttaaacattctctgcaggcccacttgcgcattcatacgaacgagaaaccatacaagtgcccacaatgtagctacgctagtgcaattaaagccaacctgaatgtgcatcttcgaaaacacacaggagagaaatttgcctgtgattactgttccttcacctgtctgagcaagggacacttgaaagtgcacatcgagagggttcataaaaagataaagcagcactgccgcttctgcaagaagaaatatagtgatgtcaaaaatctgatcaagcatatccgggatgcccacgatccacaagataagaaggtgaaggaggcgttagatgagttgtgcctgatgacacgagagggcaagcgacagttactgtacgactgccacatctgtgagaggaaattcaaaaatgaactcgtcgaagaggaattcgctctgcagggtgtgaacgcactgaaagaggaagcttgtcccggcgatacccagcttgaagagggccgaaaggagccggaagctccaggcgagatgcccgcaccggccgttcaccttgcgagcccccaggctgagagcacagccctccctccctgtgaactcgagactacagtcgtcagttccagcgatttacattcacaggaagtggtgtccgacgactttctactcaagaacgatacctcctctgctgaagctcatgctgccccagagaagcctcctgacatgcagcatcggtctagtgtgcagactcagggtgaagtaattaccctcttgctgtcaaaagcccagtcagctggttcagatcaggagagccacggggcccaatctccgttgggcgaaggacagaacatggcagtactgtctgccggtgatcccgacccctcacgatgcctgcgctctaaccccgctgaggctagcgacctgttaccccctgtagcaggcggaggtgacacaatcacccaccagccagattcctgcaaggcagcccccgagcataggtctggcatcactgctttcatgaaggtactaaattctttacagaaaaaacaaatgaacacaagcctgtgcgaacggattagaaaagtttatggcgaccttgagtgtgaatattgtggcaagctcttttggtatcaggtgcattttgatatgcatgtccgcacgcacaccagagaacacctgtactactgttcacagtgtcattattcttcaattacaaagaactgtttaaaaaggcacgttatacaaaaacattccaacatcttgctgaaatgcccgactgatgggtgcgattacagcactccggacaagtataaactgcaggcacaccttaaagtgcacacagctctggacaagaggtcatactcatgccctgtttgcgagaagtctttttccgaggacagactgatcaagtctcatatcaaaacaaaccatcctgaggtgtccatgtcgacaatttccgaggtgcttggacgccgggtgcagcttaagggcctgattgggaagcgggcaatgaaatgtccttactgtgacttttactttatgaagaatggcagtgacctccagcgccacatctgggcccacgagggcgtgaaaccgttcaaatgcagcctttgcgagtacgccacccgcagtaaatcaaacttgaaagcgcatatgaaccgacactcaaccgaaaaaacacacctgtgcgacatgtgcggcaaaaaattcaaaagtaagggaacactcaaatcgcacaaactgctgcacacggcagacggcaaacagttcaagtgtacagtgtgcgactacacagctgcacagaaaccacagctcctaagacacatggaacaacacgtgagctttaagccctttcggtgcgcccactgtcattactcttgtaatataagtggcagcctgaaaagacactataatcggaaacatcccaatgaagagtatgcgaacgtggggacaggagaacttgcggctgaagtgctcatccagcaggggggcctgaaatgtcccgtgtgttcattcgtgtatgggacaaagtgggaatttaatcggcacttaaagaataaacacggactgaaggtcgtggaaattgacggtgatccaaagtgggaaaccgccacagaggctccggaggagccgtcaacacagtacctgcacatcacagaggccgaggaagatgttcagggaacacaggccgcagtggcagctttacaggacttgagatacacaagtgaaagcggcgatcggcttgatcccactgctgtcaatatcttgcagcagatcatagaactgggtgcagaaacccatgatgctactgctttggcttccgtagtggccatggcaccagggacggtgacggtcgtgaaacaagtcactgaagaagaaccctcatcaaaccatactgttatgatacaggaaaccgtgcagcaagcatccgtcgaactcgcagagcagcaccaccttgtggtgtctagtgacgacgtggaaggcatcgaaaccgtcacagtatatactcagggtggagaagcatccgaattcatagtctatgtccaggaggcgatgcagcccgtggaagagcaggccgtagaacagcctgcccaggagctttag

SEQ ID NO: 29336 - DNA, 3393 bp, Artificial Sequence
  derived and/or modified sequence
atgtgcaagtgctgcaacctcttcagccccaaccagagcgagctgctgagccacgtgtctgagaagcacatggaggagggcgtgaatgtggatgagatcatcatccccctgcggcccctgagcaccccagagccccccaacagcagcaagacaggagatgagttcctggtgatgaagaggaagaggggccggcccaagggcagcaccaagaagagcagcacagaggaggagctggccgagaacatcgtgagccccacagaggacagccccctggcccctgaggagggcaacagcctgccccccagcagcctggagtgcagcaagtgctgcaggaagttcagcaacacccggcagctgaggaagcacatctgcatcatcgtgctgaacctgggggaggaggagggggaggccggaaatgaaagtgacctggagctggagaagaagtgcaaggaggatgaccgggagaaggccagcaagaggcccaggagccagaagacagagaaggtgcagaagatcagcggcaaggaggcccggcagctgagcggggccaagaagcccatcatctctgtggtgctgacagcccacgaggccatccctggggccaccaagatcgtgcctgtggaggccggccccccagagaccggggccaccaacagcgagaccaccagcgctgacctggtgccccggcggggctaccaggagtatgccatccagcagaccccctatgagcagcccatgaagagcagccggctgggccccacccagctgaagatcttcacctgtgagtactgcaacaaggtgttcaagttcaagcacagcctgcaggcccacctgcgcatccacaccaatgagaagccctacaagtgcccccagtgcagctatgccagcgccatcaaggccaacctgaatgtgcacctgaggaagcacactggagagaagtttgcctgtgactactgcagcttcacctgcctgagcaagggccacctgaaggtgcacatcgagcgggtgcacaagaagatcaagcagcactgccgcttctgcaagaagaagtacagtgatgtgaagaacctgatcaagcacatcagagatgcccatgacccccaggacaagaaggtgaaggaggccctggatgagctgtgcctgatgacccgggagggcaagaggcagctgctgtatgactgccacatctgtgagaggaagttcaagaatgagctggtggaggaggagtttgccctgcagggcgtgaatgccctgaaggaggaggcctgccctggggacacccagctggaggagggcaggaaggagcctgaggcccctggagagatgcctgccccagctgtgcacctggccagcccccaggccgagagcacagccctgcccccctgtgagctggagaccaccgtggtgagcagcagtgacctgcacagccaggaggtggtgtctgatgacttcctgctgaagaatgacaccagcagcgctgaggcccatgctgcccctgagaagcccccagacatgcagcacaggagctctgtgcagacccagggcgaggtgatcaccctgctgctgagcaaggcccagagcgctggcagtgaccaggagagccatggagcccagagccccctgggggagggccagaacatggctgtgctgtctgctggggaccctgaccccagccgctgcctgcggagcaacccagctgaggccagtgacctgctgccccctgtggccggcggcggggacaccatcacccaccagcctgacagctgcaaggccgcccctgagcacaggagcggcatcacagccttcatgaaggtgctgaacagcctgcagaagaagcagatgaacaccagcctgtgtgagcgcatcaggaaggtgtatggagacctggagtgtgagtactgtgggaagctgttctggtaccaggtgcactttgacatgcacgtgaggacccacacccgggagcacctgtactactgcagccagtgccactacagcagcatcaccaagaactgcctgaagagacatgtgatccagaagcacagcaacatcctgctgaagtgccccacagatggctgtgactacagcaccccagacaagtacaagctgcaggcccacctgaaggtgcacacagccctggacaagaggagctacagctgccctgtgtgtgagaagagcttcagcgaggacaggctcatcaagagccacatcaagaccaaccaccctgaggtgtccatgagcaccatcagcgaggtgctgggccggcgggtgcagctgaagggcctcatcggcaagagggccatgaagtgcccctactgtgacttctacttcatgaagaatggaagtgacctgcagaggcacatctgggcccacgagggcgtgaagcccttcaagtgcagcctgtgtgaatatgccaccaggagcaagagcaacctgaaggcccacatgaacagacacagcacagagaagacccacctgtgtgacatgtgtgggaagaagttcaagagcaagggcaccctgaagagccacaagctgctgcacacagcagatggcaagcagttcaagtgcaccgtgtgtgactacacagctgcccagaagccccagctgctgcggcacatggagcagcacgtgtccttcaagcccttccgctgtgcccactgccactacagctgcaacatcagcggcagcctgaagaggcactacaacaggaagcaccccaatgaggagtatgccaacgtgggcaccggggagctggccgctgaggtgctgatccagcagggcggcctgaagtgccctgtgtgcagctttgtgtatggcaccaagtgggagttcaacagacacctgaagaacaagcacggcctgaaggtggtggagattgatggagaccccaagtgggagacagccacagaggcccctgaggagcccagcacccagtacctgcacatcacagaggccgaggaggatgtgcagggcacccaggccgctgtggccgccctgcaggacctgcgctacaccagcgagagcggggaccggctggaccccacagctgtgaacatcctgcagcagatcatcgagctgggcgctgagacccatgatgccacagccctggcctctgtggtggccatggcccctggcaccgtgacagtggtgaagcaggtgacagaggaggagcccagcagcaaccacacagtgatgatccaggagaccgtgcagcaggcctctgtggagctggccgagcagcaccacctggtggtgtccagtgatgatgtggagggcatcgagaccgtgacagtgtacacccagggcggggaggccagcgagttcatcgtgtatgtgcaggaggccatgcagcctgtggaggagcaggccgtggagcagcctgcccaggagctgtag

SEQ ID NO: 29337 - DNA, 3393 bp, Artificial Sequence
  derived and/or modified sequence
atgtgcaagtgctgcaacctgttcagccccaaccagagcgagctgttaagccatgtcagcgagaagcacatggaagaaggcgtcaatgtggacgaaatcataatacccctcaggcccctctccactccggagcctccaaacagcagcaagaccggagacgagtttctagtgatgaagagaaaaaggggccggcctaaggggagtactaagaaatccagcactgaagaagagttagcagagaatattgtctctcccacagaagattccccattggccccagaggaaggaaactcattacctccctcttccctcgagtgctccaagtgctgtcggaaattcagcaacacacggcagctaagaaagcacatatgcattatcgtcttgaatctcggcgaagaggagggcgaagccggtaacgagtccgacctggagctagagaaaaaatgtaaggaagatgacagagagaaagcctccaaaagacctcgcagtcagaaaactgagaaagtccagaaaattagtggaaaggaggcaaggcagctatcaggcgcaaagaaacctattatctccgtggtgttgactgctcatgaggctatcccaggagcaactaagatcgtccccgtcgaggccgggccgcctgagaccggagcaactaactcagaaactacttcagccgatctcgtgcctagacgcggctatcaggaatacgccattcagcagactccttatgaacagccaatgaagtcctcgagacttggacctacccagttaaagatcttcacctgtgaatattgcaacaaggtgtttaagtttaagcactccctgcaggcacatcttcgaatccatactaacgaaaaaccatataaatgcccccagtgcagttatgcatccgccattaaagctaacctcaatgtgcacttgagaaagcacaccggagaaaaattcgcttgtgactactgcagctttacctgtttgtctaaggggcatttgaaagttcatatagagcgcgtgcacaaaaagattaaacagcattgccgtttctgcaaaaagaaatattcggacgtgaaaaacctgatcaagcatatcagggatgcccacgacccacaggacaagaaagtcaaagaggccttagatgagctgtgcctgatgaccagagaagggaaacgccagctgctatatgattgccatatctgtgagagaaaattcaaaaatgagctggtggaggaagagtttgccttgcaaggggtgaatgctttgaaggaggaggcatgtccaggcgacactcagctcgaggaggggaggaaagagcctgaggcccccggggaaatgccagccccggctgtccacttggcctccccccaagccgaaagtacagccctacccccttgcgagctggagactaccgtcgtttcctcctcagacctgcatagccaggaagttgtatccgacgatttcttactgaagaatgacacttcttccgcggaggctcatgcagccccagagaagccaccagacatgcagcatcggagctctgtgcagactcaaggagaagtgattacactgctcctcagcaaagcccagtccgccgggtctgatcaagagtcacatggcgcacaaagccccctaggggaaggacagaatatggcggttctatccgcaggagatccagacccttctaggtgtctgagatccaacccagccgaagctagcgacctgctgccccctgtcgctgggggaggagacactatcacccatcagcctgatagttgcaaggctgctccggaacatcggagcgggatcaccgcgttcatgaaagtgttgaactccctccagaagaaacagatgaacacaagcctatgtgagcggattcgaaaggtgtacggagatctggaatgcgaatattgtggcaaactgttttggtaccaggtgcatttcgatatgcatgttcgaacccatacaagagagcatctgtactactgctctcagtgtcactattcctcaatcaccaaaaattgtctgaagcgtcatgtaatccaaaaacattctaacatcttgcttaagtgcccgactgatggctgtgattacagtacaccggacaagtacaaattacaggcgcatctgaaagttcacaccgcgttggataaacgttcttattcgtgtcccgtctgtgaaaagagctttagcgaggaccgcctgataaaaagtcacatcaaaacaaaccatccagaggtgtctatgtccaccatcagcgaggtgttgggccgaagagttcaactgaaggggctgatcggcaaacgcgctatgaaatgcccatattgcgatttctactttatgaaaaacggcagcgacctccagcgccacatttgggctcacgagggagtgaaaccgttcaaatgctcactgtgtgaatacgccactagaagtaaaagcaatttgaaagcccacatgaatcgacacagtactgaaaaaacccatctgtgcgatatgtgtgggaagaaattcaaaagtaaaggaactcttaaatcccataagctactacacaccgcagatgggaagcaatttaaatgtacggtctgtgactacaccgccgcccagaagccacagctgctgcggcacatggaacagcacgtgtcctttaagcccttccgttgcgcacattgtcattactcatgtaatataagcggctctctgaagcgccactacaatcggaaacatccaaacgaagagtatgctaatgtgggtacaggtgaattagccgccgaagtcctcatccagcagggcggcttgaaatgtcccgtgtgtagtttcgtgtacgggacaaagtgggagttcaaccggcatctgaaaaataagcatgggctgaaggttgtggaaattgacggcgatcccaaatgggaaacggcaaccgaggcgccagaggagccaagtactcagtacctccatataactgaggcggaggaggacgtgcaggggacacaggcagctgttgcagcccttcaggacctgagatatactagcgaaagcggggacaggttagatccgaccgccgtgaatatcctacagcagataatcgagctaggcgcggaaacccacgacgctaccgcactcgcaagcgttgtggccatggcaccagggactgttacagtggttaaacaagtgacagaggaagagcctagcagcaaccacacagtgatgatccaggaaaccgtgcaacaggcatccgtggaactggccgagcagcaccatctagttgtgtcttccgacgatgtagagggcatcgaaaccgtgactgtgtatacacaaggcggcgaagcttcagaatttatagtgtacgtgcaagaggccatgcaaccagtagaggaacaagctgtggaacagcccgcccaggagctctag

SEQ ID NO: 29338 - DNA, 3393 bp, Artificial Sequence
  derived and/or modified sequence
atgtgcaaatgctgcaacctgttcagtccgaatcagtctgagttactctctcacgttagcgaaaaacatatggaagagggcgttaacgttgatgaaattataattccactgaggcctttatcaacacccgaaccgcctaattcctccaagaccggggatgagttcctggtcatgaaaaggaagcgtggcaggccaaaaggaagcaccaagaaaagctctacagaggaagagttggccgagaacattgtcagtccaacggaagattcacctctggcgccagaagaaggcaacagtctgcccccatcatctctggaatgcagcaagtgctgtagaaaattcagcaacacccgacagctgcgcaaacacatatgtattatagtgcttaatctgggggaggaagagggtgaggccggaaatgagtctgacttggaactggagaagaaatgtaaggaggatgaccgcgaaaaagcctctaaaaggccgcgatcccagaaaaccgaaaaagtccagaagatcagcggcaaggaagccaggcagctgagtggcgctaaaaaacctataatctctgtggtcttaaccgctcatgaggctatacctggggctacaaagattgtgcctgtggaggctggcccaccagaaactggcgctacgaactccgagacgaccagcgctgatttagtcccccgtcgcggatatcaggagtacgccatccagcagaccccctacgagcagcctatgaagtctagcaggcttggtcccacccagctaaagattttcacatgcgagtactgtaacaaggtgttcaagtttaagcacagtctgcaagctcatctgaggattcacacgaatgaaaaaccctataaatgccctcagtgttcttatgcttccgcaataaaagccaatctgaatgttcatctgcgcaagcatacaggggagaaatttgcctgcgattattgcagtttcacttgtctgtcaaaaggccaccttaaggtgcacatcgagagagtgcacaagaagatcaaacaacactgccgcttttgtaagaaaaaatacagtgacgtgaaaaatcttatcaagcacattagggacgcacatgaccctcaagataagaaagttaaagaagctctggatgagctttgtctgatgactcgcgaaggtaagcggcagttgctttacgactgccacatttgcgagaggaaattcaaaaacgagctggttgaagaagaattcgccctacagggcgtgaacgccttaaaggaggaagcctgccctggagatacccagctggaagagggccgtaaggagcctgaagcacctggtgaaatgccagcccctgccgtccacctggcctctcctcaggccgagtcaactgccctaccaccctgtgaactcgagaccactgtcgtgagcagctccgacttgcacagccaggaggtggtatctgacgatttcctgctgaaaaatgatacctcatctgcagaggctcacgccgctccggaaaagcctccggatatgcagcatcggtcctcggtccagacacagggcgaggttatcacattgctgctgagcaaggctcagagtgcgggatcagaccaagagagccacggggctcagtcccccctcggcgaaggacagaacatggcggtgctttccgctggcgaccccgatcccagccgctgtctgcggagcaatccagccgaggctagcgacctcctaccccctgtcgctggcggaggggacactatcacccatcaaccagactcctgtaaagctgctcctgaacaccgaagtggcatcaccgctttcatgaaggtgttaaacagcctgcagaaaaaacagatgaacacatcactatgtgagaggattcggaaagtttacggagacctggagtgtgagtattgtgggaaattattttggtaccaggtacattttgatatgcatgtaagaacacacacaagggagcatttgtactattgctcccaatgtcactactcctcaattaccaaaaactgcttaaagagacacgtaatacaaaaacacagcaacattctgttaaaatgcccaactgacggatgtgactattcaactccagacaaatataagttgcaggcacacctgaaggttcacacagcacttgataaacgctcttacagctgcccagtatgcgagaagtcctttagcgaggacagactcataaaatcacacataaagacaaatcacccagaggtatcaatgagtaccatctccgaggtccttggccgtcgggtccagttgaaagggttaattggaaaaagagccatgaaatgtccctactgcgacttctatttcatgaagaacgggtcagatttgcagcgtcacatctgggctcacgagggtgtcaagccattcaaatgctctctgtgtgaatatgctacacggtcaaagagtaacctgaaggctcacatgaacaggcatagtacggagaaaacccatctctgtgacatgtgcggaaagaagttcaagagcaaggggacccttaagtcccataaactgttacatacagccgatggtaaacagttcaaatgcacggtatgcgactacacagccgcacagaagccacagcttcttagacatatggaacaacacgtcagcttcaagccctttaggtgcgctcactgccactacagctgcaatatctcagggagcctcaagcggcactataatcgaaagcaccctaacgaggagtatgctaacgtgggaacaggcgaactcgccgcagaggtgctaatccagcaagggggactgaaatgccccgtgtgcagcttcgtgtacggaacaaaatgggaatttaatagacaccttaagaacaaacacgggctgaaagtcgtggaaattgatggcgatcccaaatgggagactgcaacagaagctcccgaggagccaagcacacagtatttgcatattacagaggccgaagaggatgtgcaggggacacaggccgcagttgccgctcttcaagacctacggtatacaagtgagtccggagacaggctggaccctacagccgtaaacattctccaacagataattgaactcggagccgagactcacgacgccaccgccctggctagtgtggttgcgatggcacctggtactgtgaccgtcgtgaaacaggtcactgaggaggaaccatcatcaaaccatacagtgatgattcaggagaccgtgcaacaggccagcgttgaacttgccgagcagcatcatttggtggtgagctcagacgacgtggagggcatcgagactgtgactgtgtatacccaggggggtgaagcctcagaatttattgtctatgtacaggaagcaatgcagccagtggaggagcaggctgtggagcagcctgctcaggagctctag

SEQ ID NO: 29339 - DNA, 3696 bp, Artificial Sequence
  derived and/or modified sequence
atgtgcaagtgctgcaacctgttcagccccaaccagagcgagctgctgagccacgtgagcgagaagcacatggaggagggcgtgaacgtggacgagatcatcatccccctgagacccctgagcacccccgagccccccaacagcagcaagaccggcgacgagttcctggtgatgaagagaaagagaggcagacccaagggcagcaccaagaagagcagcaccgaggaggagctggccgagaacatcgtgagccccaccgaggacagccccctggcccccgaggagggcaacagcctgccccccagcagcctggagtgcagcaagtgctgcagaaagttcagcaacaccagacagctgagaaagcacatctgcatcatcgtgctgaacctgggcgaggaggagggcgaggccggcaacgagagcgacctggagctggagaagaagtgcaaggaggacgacagagagaaggccagcaagagacccagaagccagaagaccgagaaggtgcagaagatcagcggcaaggaggccagacagctgagcggcgccaagaagcccatcatcagcgtggtgctgaccgcccacgaggccatccccggcgccaccaagatcgtgcccgtggaggccggcccccccgagaccggcgccaccaacagcgagaccaccagcgccgacctggtgcccagaagaggctaccaggagtacgccatccagcagaccccctacgagcagcccatgaagagcagcagactgggccccacccagctgaagatcttcacctgcgagtactgcaacaaggtgttcaagttcaagcacagcctgcaggcccacctgagaatccacaccaacgagaagccctacaagtgcccccagtgcagctacgccagcgccatcaaggccaacctgaacgtgcacctgagaaagcacaccggcgagaagttcgcctgcgactactgcagcttcacctgcctgagcaagggccacctgaaggtgcacatcgagagagtgcacaagaagatcaagcagcactgcagattctgcaagaagaagtacagcgacgtgaagaacctgatcaagcacatcagagacgcccacgacccccaggacaagaaggtgaaggaggccctggacgagctgtgcctgatgaccagagagggcaagagacagctgctgtacgactgccacatctgcgagagaaagttcaagaacgagctggacagagacagacacatgctggtgcacggcgacaagtggcccttcgcctgcgagctgtgcggccacggcgccaccaagtaccaggccctggagctgcacgtgagaaagcaccccttcgtgtacgtgtgcgccgtgtgcagaaagaagttcgtgagcagcatcagactgagaacccacatcaaggaggtgcacggcgccgcccaggaggccctggtgttcaccagcagcatcaaccagagcttctgcctgctggagcccggcggcgacatccagcaggaggccctgggcgaccagctgcagctggtggaggaggagttcgccctgcagggcgtgaacgccctgaaggaggaggcctgccccggcgacacccagctggaggagggcagaaaggagcccgaggcccccggcgagatgcccgcccccgccgtgcacctggccagcccccaggccgagagcaccgccctgcccccctgcgagctggagaccaccgtggtgagcagcagcgacctgcacagccaggaggtggtgagcgacgacttcctgctgaagaacgacaccagcagcgccgaggcccacgccgcccccgagaagccccccgacatgcagcacagaagcagcgtgcagacccagggcgaggtgatcaccctgctgctgagcaaggcccagagcgccggcagcgaccaggagagccacggcgcccagagccccctgggcgagggccagaacatggccgtgctgagcgccggcgaccccgaccccagcagatgcctgagaagcaaccccgccgaggccagcgacctgctgccccccgtggccggcggcggcgacaccatcacccaccagcccgacagctgcaaggccgcccccgagcacagaagcggcatcaccgccttcatgaaggtgctgaacagcctgcagaagaagcagatgaacaccagcctgtgcgagagaatcagaaaggtgtacggcgacctggagtgcgagtactgcggcaagctgttctggtaccaggtgcacttcgacatgcacgtgagaacccacaccagagagcacctgtactactgcagccagtgccactacagcagcatcaccaagaactgcctgaagagacacgtgatccagaagcacagcaacatcctgctgaagtgccccaccgacggctgcgactacagcacccccgacaagtacaagctgcaggcccacctgaaggtgcacaccgccctggacaagagaagctacagctgccccgtgtgcgagaagagcttcagcgaggacagactgatcaagagccacatcaagaccaaccaccccgaggtgagcatgagcaccatcagcgaggtgctgggcagaagagtgcagctgaagggcctgatcggcaagagagccatgaagtgcccctactgcgacttctacttcatgaagaacggcagcgacctgcagagacacatctgggcccacgagggcgtgaagcccttcaagtgcagcctgtgcgagtacgccaccagaagcaagagcaacctgaaggcccacatgaacagacacagcaccgagaagacccacctgtgcgacatgtgcggcaagaagttcaagagcaagggcaccctgaagagccacaagctgctgcacaccgccgacggcaagcagttcaagtgcaccgtgtgcgactacaccgccgcccagaagccccagctgctgagacacatggagcagcacgtgagcttcaagcccttcagatgcgcccactgccactacagctgcaacatcagcggcagcctgaagagacactacaacagaaagcaccccaacgaggagtacgccaacgtgggcaccggcgagctggccgccgaggtgctgatccagcagggcggcctgaagtgccccgtgtgcagcttcgtgtacggcaccaagtgggagttcaacagacacctgaagaacaagcacggcctgaaggtggtggagatcgacggcgaccccaagtgggagaccgccaccgaggcccccgaggagcccagcacccagtacctgcacatcaccgaggccgaggaggacgtgcagggcacccaggccgccgtggccgccctgcaggacctgagatacaccagcgagagcggcgacagactggaccccaccgccgtgaacatcctgcagcagatcatcgagctgggcgccgagacccacgacgccaccgccctggccagcgtggtggccatggcccccggcaccgtgaccgtggtgaagcaggtgaccgaggaggagcccagcagcaaccacaccgtgatgatccaggagaccgtgcagcaggccagcgtggagctggccgagcagcaccacctggtggtgagcagcgacgacgtggagggcatcgagaccgtgaccgtgtacacccagggcggcgaggccagcgagttcatcgtgtacgtgcaggaggccatgcagcccgtggaggagcaggccgtggagcagcccgcccaggagctgtag

SEQ ID NO: 29340 - DNA, 3696 bp, Artificial Sequence
  derived and/or modified sequence
atgtgtaaatgctgcaacttattttcacctaatcaatccgaactgcttagtcatgtttcagaaaagcacatggaggaaggagtcaatgtggatgagatcattattccactgagacccctctccactccagagcctcccaactcttccaaaaccggggacgagttcttggtgatgaagcggaaacgcggtcgcccaaaaggctctacaaaaaagtcttccacagaggaagaactggcagagaacatagttagtcctacggaggactcacctcttgctcctgaagaaggaaatagcttaccgccaagttctctcgagtgctctaaatgttgtagaaaattcagtaatactcggcagctacgtaaacatatttgcattatagtactgaaccttggcgaggaggaaggcgaagccggaaacgagtccgacttagagctcgagaagaaatgcaaagaggatgatcgcgaaaaagcgagcaagaggccgcgttctcagaagactgagaaagtgcagaaaattagtgggaaggaagccagacaactgagcggtgccaagaagcccatcataagtgtcgtcctgaccgcccacgaggccatccccggagctaccaagatcgtcccagtggaggctggccccccagagacgggcgccactaattctgaaaccacatccgccgacctcgtgcctcggcggggctatcaggaatatgccatccagcaaaccccttacgagcagcctatgaaaagcagtcggctgggtcctacccagcttaaaatctttacttgcgagtattgtaacaaggtctttaagtttaagcactcactgcaggcccatctcagaatccatactaacgagaagccatacaagtgccctcagtgtagttacgcctcagctatcaaagcaaatctgaatgtacacctccgaaaacacaccggggagaaatttgcctgtgattactgtagctttacctgtctcagtaaggggcacttgaaggtgcacatcgaacgtgtgcacaagaaaataaaacagcattgcaggttctgcaagaaaaagtatagtgatgtgaaaaacctgatcaagcacatccgcgacgctcatgatccacaggataagaaggtcaaggaggctcttgatgagctctgccttatgacaagggagggaaaacggcagctgctatatgattgtcacatttgcgaaaggaagttcaagaatgaactcgacagagatcgtcatatgctggtacatggtgacaaatggccatttgcatgcgaactctgcgggcacggcgcaacgaagtaccaggctctggaactgcacgttcgcaagcatccatttgtgtacgtgtgtgctgtttgtagaaagaagttcgttagcagtattcgtcttaggacccacatcaaagaagtgcacggagccgcccaagaggccctggtttttacatcttctattaaccagtccttctgtcttttggagcccgggggtgacatccagcaggaagccctcggtgaccaactgcaactcgtcgaagaggagttcgcgttacagggggtcaacgcactgaaagaggaggcctgtcccggagacacacagctggaagagggccgtaaggaaccggaagccccgggagaaatgcctgcccctgcagtgcacctcgcatccccacaagccgagtccacggcactccctccatgcgaattggaaacaactgtggtctcaagctccgatctacactcccaagaggtggtctctgacgactttctactgaagaatgacacgtcaagtgctgaagctcatgcagcccccgagaagcctcccgatatgcaacaccgcagtagtgttcagacccaaggtgaggtgattacactgcttctgtctaaagcacagtctgctggttctgaccaagaatcccatggggcgcagagccctctgggcgaaggccaaaacatggccgtactgagcgcgggagaccctgatccctcacggtgcttaagatctaaccccgccgaagcaagtgacctcctgccacccgtcgctggaggcggcgatacaattacgcaccagcctgacagctgtaaagccgcccccgagcatcgctctggtattacggcctttatgaaagtgctgaattccttgcagaaaaaacagatgaacacttctctgtgcgagaggataaggaaggtgtacggcgatttggaatgcgagtattgcggtaaactgttctggtatcaggtacattttgacatgcacgtccgtactcatactcgcgagcacctgtattactgtagtcagtgtcactactctagcatcactaagaactgtctgaagagacacgtcatccagaaacacagtaacatactgttgaaatgtccgacagacggatgtgactattctacgcctgacaagtataaactgcaggcccacctgaaggtccacactgcactcgacaaaagaagctatagctgtcccgtgtgcgagaagagcttttctgaggatcgtctgattaaaagccatattaagacaaaccatcccgaggtctcgatgtccaccattagcgaagtactgggaagaagagtccagctgaaaggtttgataggcaagagggccatgaaatgcccttactgtgacttctatttcatgaaaaatggatctgatctgcagcgccacatatgggcccatgagggtgtgaaaccttttaagtgttctttatgtgaatatgcaacacggagcaagtccaacctcaaagcgcatatgaaccggcattcgacggagaagactcacctctgtgatatgtgtggtaagaagtttaaaagcaagggcacactgaagagccacaaactcctgcatacagcggacggtaagcagttcaagtgtaccgtgtgtgactatactgctgcacaaaaaccacaactgctcagacatatggagcaacacgtgtctttcaaaccattccgatgcgcccactgtcactactcctgcaacattagcgggtccttaaagcgccactataatcggaagcatcctaatgaggagtatgctaacgtgggaacaggcgagctggccgccgaagtgttaattcagcaaggggggctcaaatgtccggtttgctcctttgtgtatggcaccaaatgggaatttaatagacacctgaaaaacaaacatggcctaaaagttgtcgagatagacggagaccccaagtgggaaacagccaccgaggccccggaggagccctctacccaatacctgcacattacagaggcggaagaggacgtccagggaactcaggccgccgtcgccgcgcttcaggacctgcgatacacatccgagtctggagataggctcgatccaaccgccgttaacatactccagcagattatcgagttaggggcagaaacgcacgatgcaactgcgctggcctcggtggtcgctatggctcctggcacagtgacagtggttaagcaggtgaccgaagaggagcccagcagcaaccatactgtcatgattcaggagaccgtgcagcaggctagcgtggagctcgccgaacagcatcacctggttgtgagttcagacgacgtggagggcatagagacggtgaccgtgtacacccaaggcggggaggcatccgaatttatcgtctatgtgcaggaagccatgcaacccgtcgaggaacaggccgtggaacaacctgcccaggagctttag

SEQ ID NO: 29341 - DNA, 3696 bp, Artificial Sequence
  derived and/or modified sequence
atgtgcaagtgctgcaacctcttcagccccaaccagagcgagctgctgagccacgtgtctgagaagcacatggaggagggcgtgaatgtggatgagatcatcatccccctgcggcccctgagcaccccagagccccccaacagcagcaagacaggagatgagttcctggtgatgaagaggaagaggggccggcccaagggcagcaccaagaagagcagcacagaggaggagctggccgagaacatcgtgagccccacagaggacagccccctggcccctgaggagggcaacagcctgccccccagcagcctggagtgcagcaagtgctgcaggaagttcagcaacacccggcagctgaggaagcacatctgcatcatcgtgctgaacctgggggaggaggagggggaggccggaaatgaaagtgacctggagctggagaagaagtgcaaggaggatgaccgggagaaggccagcaagaggcccaggagccagaagacagagaaggtgcagaagatcagcggcaaggaggcccggcagctgagcggggccaagaagcccatcatctctgtggtgctgacagcccacgaggccatccctggggccaccaagatcgtgcctgtggaggccggccccccagagaccggggccaccaacagcgagaccaccagcgctgacctggtgccccggcggggctaccaggagtatgccatccagcagaccccctatgagcagcccatgaagagcagccggctgggccccacccagctgaagatcttcacctgtgagtactgcaacaaggtgttcaagttcaagcacagcctgcaggcccacctgcgcatccacaccaatgagaagccctacaagtgcccccagtgcagctatgccagcgccatcaaggccaacctgaatgtgcacctgaggaagcacactggagagaagtttgcctgtgactactgcagcttcacctgcctgagcaagggccacctgaaggtgcacatcgagcgggtgcacaagaagatcaagcagcactgccgcttctgcaagaagaagtacagtgatgtgaagaacctgatcaagcacatcagagatgcccatgacccccaggacaagaaggtgaaggaggccctggatgagctgtgcctgatgacccgggagggcaagaggcagctgctgtatgactgccacatctgtgagaggaagttcaagaatgagctggaccgggacagacacatgctggtgcacggggacaagtggccctttgcctgtgagctgtgtggccatggagccaccaagtaccaggccctggagctgcacgtgaggaagcacccctttgtgtatgtgtgtgctgtgtgcaggaagaagtttgtgagcagcatccggctgcggacccacatcaaggaggtgcatggagctgcccaggaggccctggtgttcaccagcagcatcaaccagagcttctgcctgctggagcctggaggagacatccagcaggaggccctgggggaccagctgcagctggtggaggaggagtttgccctgcagggcgtgaatgccctgaaggaggaggcctgccctggggacacccagctggaggagggcaggaaggagcctgaggcccctggagagatgcctgccccagctgtgcacctggccagcccccaggccgagagcacagccctgcccccctgtgagctggagaccaccgtggtgagcagcagtgacctgcacagccaggaggtggtgtctgatgacttcctgctgaagaatgacaccagcagcgctgaggcccacgccgcccctgagaagcccccagacatgcagcacaggagctctgtgcagacccagggcgaggtgatcaccctgctgctgagcaaggcccagagcgctggcagtgaccaggagagccacggggcccagagccccctgggggagggccagaacatggctgtgctgtctgctggggaccctgaccccagccgctgcctgcggagcaacccagctgaggccagtgacctgctgccccctgtggccggcggcggggacaccatcacccaccagcctgacagctgcaaggccgcccctgagcacaggagcggcatcacagccttcatgaaggtgctgaacagcctgcagaagaagcagatgaacaccagcctgtgtgagcgcatcaggaaggtgtatggagacctggagtgtgagtactgcggcaagctgttctggtaccaggtgcactttgacatgcacgtgaggacccacacccgggagcacctgtactactgcagccagtgccactacagcagcatcaccaagaactgcctgaagagacatgtgatccagaagcacagcaacatcctgctgaagtgccccacagatggctgtgactacagcaccccagacaagtacaagctgcaggcccacctgaaggtgcacacagccctggacaagaggagctacagctgccctgtgtgtgagaagagcttctctgaagatagactcatcaagagccacatcaagaccaaccaccctgaggtgtccatgagcaccatcagcgaggtgctgggcagaagagtgcagctgaagggcctgattggcaagagggccatgaagtgcccctactgtgacttctacttcatgaagaatggaagtgacctgcagaggcacatctgggcccatgaaggagtgaagcccttcaagtgcagcctgtgtgaatatgccaccaggagcaagagcaacctgaaggcccacatgaacagacacagcacagagaagacccacctgtgtgacatgtgtgggaagaagttcaagagcaagggcaccctgaagagccacaagctgctgcacacagcagatggcaagcagttcaagtgcaccgtgtgtgactacacagctgcccagaagccccagctgctgcggcacatggagcagcacgtgtccttcaagcccttccgctgtgcccactgccactacagctgcaacatcagcggcagcctgaagaggcactacaacaggaagcaccccaatgaggagtatgccaacgtgggcactggagagctggccgctgaggtgctgatccagcagggcggcctgaagtgccctgtgtgcagctttgtgtatggcaccaagtgggagttcaacagacacctgaagaacaagcacggcctgaaggtggtggagattgatggagaccccaagtgggagacagccacagaggcccctgaggagcccagcacccagtacctgcacatcacagaagcagaagaagatgtgcagggcacccaggccgctgtggccgccctgcaggacctgcgctacaccagcgagagcggggaccggctggaccccacagctgtgaacatcctgcagcagatcatcgagctgggcgctgagacccatgatgccacagccctggcctctgtggtggccatggcccctggcaccgtgacagtggtgaagcaggtgacagaggaggagcccagcagcaaccacacagtgatgatccaggagaccgtgcagcaggcctctgtggagctggccgagcagcaccacctggtggtgtccagtgatgatgtggagggcattgaaacagtgacagtgtacacccagggcggggaggccagcgagttcatcgtgtatgtgcaggaggccatgcagcctgtggaggagcaggccgtggagcagcctgcccaggagctgtag

SEQ ID NO: 29342 - DNA, 3696 bp, Artificial Sequence
  derived and/or modified sequence
atgtgcaagtgctgcaacctgttcagccccaaccagagcgagctgctgtcacatgtgagcgaaaaacatatggaagaaggcgtgaacgtagacgaaattattattccactcaggcccctgagcactccagagcctcccaactctagcaagactggcgatgagttcctggtgatgaaacgcaagcgcggtcgccccaaaggctccacaaaaaagtccagtacagaagaggaactggctgagaacattgtgagccctactgaagatagtcctctggcacctgaagagggaaattccctgcctccaagttctttggagtgcagcaagtgctgtcgcaagtttagcaacacaaggcagctcaggaaacacatctgtatcatagttttgaatctaggcgaagaagaaggcgaggccggaaatgagtctgatctggagctggagaaaaagtgtaaagaggacgatagagaaaaagcttccaaacgacccagatctcagaaaaccgagaaggtgcagaagatttcaggcaaggaggctcggcagctgtctggcgcgaagaaacccatcatctctgttgtactgactgctcacgaggcgataccaggtgccactaaaattgtgcccgtggaagctggccctccagagaccggggcaaccaactcagaaacaacctcagctgatctggtgcctcgaagggggtatcaggaatacgccattcagcagaccccttacgaacagccaatgaagtccagtcgactcggacctacgcaattgaaaattttcacttgtgaatattgcaataaggtttttaaatttaaacactctcttcaggcccatctcaggattcacaccaacgaaaaaccatataagtgtccgcagtgcagttatgcttcggccatcaaggccaatctgaatgtccacttacgaaaacatactggcgaaaaattcgcatgcgactactgttcctttacttgcctgtccaagggacacctaaaagtccacattgaacgggtccataagaaaattaagcaacactgcagattttgcaaaaaaaagtatagcgacgtgaagaaccttattaaacatatcagggacgcccatgatcctcaggacaagaaggtgaaagaggcactggacgaattatgcttaatgacacgtgaaggaaagcgccagttgctctacgattgccacatctgtgaaaggaagttcaaaaacgaacttgacagggatcggcacatgttggtgcacggcgataagtggccttttgcttgcgagctgtgcgggcatggggcaactaagtaccaggcgctggagctgcacgtgagaaagcacccatttgtctacgtgtgtgcagtctgtcggaagaaatttgtgtcatctattcggcttcgtacacatataaaagaggttcatggcgccgctcaggaagccttggtcttcacgagctccatcaatcagtctttttgtctgctcgagccaggcggggatattcagcaggaagcattaggggatcagctccagcttgtggaggaagagttcgccctgcagggcgttaatgccctgaaagaggaagcatgtccaggtgacactcagctcgaagaagggcggaaggagcctgaggcgcctggtgagatgccggcaccggctgtgcacctcgccagccctcaggccgaaagcaccgccctccccccgtgcgaactcgaaaccaccgtggtctctagcagcgatctgcacagtcaggaagtggttagcgacgacttcttgctgaaaaatgatacgtcctctgccgaggcccatgcggccccggaaaaaccccctgacatgcagcaccggtcttccgtgcagacacagggcgaagtgatcactctgctgctctccaaagcccagtctgcagggtccgaccaggaatcccatggtgcccagagccctctcggcgagggccaaaacatggccgttctgagcgcaggggatcccgatccttcacgatgcttgaggtccaaccctgccgaggccagcgacctgttacccccggtggcaggtggaggggatacaatcacccaccaacctgattcttgtaaagcagcacctgagcacagaagcgggattaccgccttcatgaaggtactgaactccctccagaagaaacagatgaacacttctctctgcgaacgtatcagaaaggtgtacggagatcttgaatgcgagtactgtgggaagctattttggtatcaggtacactttgacatgcacgtcagaacgcacactcgggaacatttatattattgcagccagtgccactatagctccataaccaagaattgcctgaaacggcatgttatccagaagcactccaacatcctgctgaaatgccctactgacggctgcgattactctactcccgataagtacaagctacaggcccacttaaaggtgcacacggccttggacaagagatcctattcatgtcccgtttgtgagaagtccttttccgaggatcgtctaattaaatcacatatcaaaaccaaccacccagaggtatccatgtcaacaattagcgaagtgcttggtagaagagtgcagctcaaaggcctgatcggcaagcgcgcaatgaagtgcccttattgcgacttctactttatgaagaatggctccgaccttcaaagacacatctgggcacacgagggcgtgaagcccttcaaatgctctctgtgtgagtatgccacccgctcgaagagcaacctgaaagcccacatgaataggcactcaaccgagaagacccatctgtgcgacatgtgcgggaagaagtttaagagtaaggggaccctgaagtcacacaagctcctgcacaccgctgatgggaagcagttcaagtgtaccgtgtgcgattataccgccgctcaaaaaccccaacttctccgacacatggagcagcacgtgagcttcaagcccttcagatgcgcccattgtcactattcctgtaacatctccgggtccctcaagcgccactacaaccgcaaacatcccaacgaagagtacgcaaatgtgggaacgggcgagttagcagccgaggtgctgatccagcaaggagggttaaagtgccctgtgtgctcttttgtgtacggtactaagtgggagtttaacaggcacctaaaaaataaacacgggctgaaggtggtcgagattgatggtgaccccaagtgggagaccgcaacggaagcaccagaggagccctcaacgcaatatctgcatatcacagaagctgaggaggatgtccagggcacccaagcggcagtagcggccctccaggacctgaggtacacgtcagaaagcggggatagactggaccctaccgccgtgaatattctacagcagatcatcgaattaggggccgagacgcacgacgccactgctttagcttctgtggttgcaatggctccaggcacagtgacagttgtcaaacaggtgactgaggaagagccatcctctaaccataccgtcatgatccaggaaaccgtccagcaggctagcgtggaactagccgagcagcaccacctcgtagtgtcttccgacgatgtagaggggatcgaaacagtcacggtgtacacgcagggcggagaggccagcgaatttatcgtctatgtgcaggaggccatgcagcccgtggaagagcaggccgttgagcagccagcgcaggagctgtag

SEQ ID NO: 29343 - DNA, 3696 bp, Artificial Sequence
  derived and/or modified sequence
atgtgcaagtgctgcaatctcttttccccgaaccagagcgagcttctctcccatgttagtgaaaagcacatggaagaaggggtcaacgtggacgaaatcattataccacttaggccacttagtacgcccgaacctccaaattcatccaagaccggtgatgagtttttggtgatgaagcgcaagaggggcagacccaaagggagcactaagaaaagctccactgaagaggagctggcagaaaacatcgtaagtccgacagaggactctccgcttgcccctgaggaaggtaactctctgcccccttcttcacttgaatgtagcaagtgctgcagaaagttctcaaatacccgacagctacgtaagcacatatgtatcattgtgctgaatctgggagaggaggaaggggaggccggaaatgagtctgacctggagttggagaagaagtgtaaggaggacgaccgagaaaaggcgtccaaacgtccgaggagccaaaagacagaaaaggtccaaaagatcagcgggaaggaggccagacagctgtctggcgctaaaaagcctattatctctgtagtgctcacggcccatgaagcgatacccggagcaacaaagatcgtgccagtcgaagctggccctcccgagacaggcgcaacaaactccgagacaaccagcgccgatctggtgccacggcgtggctatcaggagtacgccattcagcaaacgccatacgagcagccaatgaagtcctcacgactgggtccaactcagttaaaaatcttcacctgtgagtactgcaacaaggtttttaaattcaaacattccctccaggcccatcttaggatccacaccaacgaaaagccttacaagtgtccacagtgctcttatgccagcgctattaaggccaatcttaatgtgcatcttaggaagcatactggggagaagttcgcgtgtgattactgctcatttacctgcctatccaaaggacacctaaaggttcacatcgagagggtgcataaaaaaattaagcagcactgcagattttgtaaaaagaaatatagtgacgttaaaaacctcatcaaacatatccgtgacgcccatgacccacaagataaaaaggtaaaggaggctctcgatgagctatgcctcatgacgcgcgaaggaaagaggcaactgctgtatgactgtcacatttgtgaaaggaaatttaaaaacgagctcgaccgtgaccggcacatgctcgttcatggagacaagtggccctttgcctgtgagttatgtgggcatggagctacaaagtaccaggcactggagctccatgtgcggaagcacccctttgtgtatgtttgcgccgtgtgccgcaaaaagttcgtaagctctattagactgagaactcacatcaaagaggtgcacggtgcagcccaggaagccctagtgtttaccagcagcattaatcagtccttttgtctgcttgagccaggaggggatatacagcaggaggcactgggagaccagctgcagctggtggaggaagagtttgctcttcagggagtgaacgcgctcaaagaggaagcatgccccggagatacccagctggaagagggacgaaaggagccggaagcacccggagagatgccagctccagcagtacacctggcgtccccccaggccgagtcaacagcccttccgccatgcgagcttgagacgaccgtggtctcatcttccgaccttcattcgcaggaagtcgtctctgatgactttctgctaaagaatgacacctcttctgccgaagctcatgcggcacctgaaaagccaccagacatgcaacaccgatccagtgtgcagacccagggggaagtcataactctcctgttgagcaaggcgcagagcgctggctccgatcaggaaagtcacggcgctcagtctcccctgggggagggccaaaacatggccgtgctatcggccggagatccagaccccagtagatgtctgagatccaaccccgctgaggccagtgacctattaccgccagtagctgggggtggagacacaataacacaccaaccagatagctgcaaagcagcccctgaacatagatccggcatcacagcctttatgaaagtgctcaactccctgcaaaaaaagcagatgaacacttctctgtgcgagcgaatcaggaaagtgtatggcgacctggaatgtgagtactgtggtaaactcttttggtaccaggtgcactttgatatgcatgtgcggacgcatacccgagaacatttgtactactgttctcagtgtcactatagctccatcaccaaaaattgtctgaagcgccacgttatccaaaaacattccaacatactgctgaagtgtcctacagacggctgcgattattcgacacccgacaaatacaagcttcaggcacacctgaaagtgcacaccgccctagacaaaaggagttactcatgtcctgtgtgcgagaaatcttttagcgaagatagattaatcaaatcccacatcaagaccaaccatcctgaggtgtcaatgtctaccatctcggaagtgctggggagacgcgtgcaactcaagggactgatcggcaagcgagccatgaagtgtccctattgtgatttttacttcatgaagaacggttctgatctccagcgccatatttgggcccacgagggagttaaaccgttcaaatgttccctttgcgaatatgccacaagatctaaatctaatctcaaagcccatatgaatcgccacagcacagaaaaaacacacctttgcgatatgtgcgggaaaaaattcaagtctaagggcaccctcaaatctcataagctcctccatactgctgatggaaagcagttcaagtgcacagtatgcgattacacagccgcacagaagccacagttattgcgacacatggagcagcacgtgagcttcaagcccttccgatgtgcccactgccattattcctgtaatatttcaggctcccttaaaagacattacaataggaagcatccgaacgaggagtatgcaaacgtagggacaggcgagctcgccgcagaagtgttgattcagcagggaggcctgaaatgtcccgtctgtagttttgtgtacggtaccaaatgggagttcaataggcaccttaaaaataagcacggccttaaggtggtcgagatcgatggcgatcctaaatgggagacggccactgaagctccagaggaaccatccacgcagtaccttcacattaccgaagcagaggaagacgtccagggtactcaggcagccgtggccgctctccaagacctccgatatacttccgagagcggggaccgactggatccaaccgccgtgaatattttgcagcagattattgagctaggagcagaaacccatgatgctacagccctcgctagtgtggtggccatggcaccaggaacagtgacagtggtgaaacaagtgacggaagaggagccatccagcaaccacacagttatgatacaggagacagttcagcaagccagcgtagagctggccgagcagcaccacctggtggttagttccgatgacgtggagggcattgaaaccgtgacggtgtatacccagggaggggaagcctcggagttcattgtctatgtgcaagaagccatgcagcctgtggaggaacaggccgttgagcagcctgctcaggaactttag

SEQ ID NO: 29344 - DNA, 3696 bp, Artificial Sequence
  derived and/or modified sequence
atgtgcaagtgctgtaacctgttcagcccaaatcagtctgagttgctgagccatgtgagcgagaagcacatggaagaaggcgtcaatgtcgacgagatcattatcccactgagacccctgtctacccccgaacctccaaacagcagtaaaaccggtgacgagttcctggtgatgaagcgaaagcggggacgccccaaaggatccaccaaaaagtcctcgacagaagaagaactggcggagaacattgtcagtccaacagaggactcacctttagctccagaggagggtaacagcctgcccccttcaagtctggaatgttcgaaatgttgcaggaagttttctaacactcgtcagttgcgcaagcatatttgcatcatcgttctcaacctaggcgaggaagagggcgaggcaggtaatgagagcgatctcgaacttgaaaagaagtgcaaagaagatgatagggaaaaagcctccaaacggcctcggtctcagaaaacagagaaggtgcaaaaaatctccgggaaggaggcaaggcagctgagtggagctaagaagccgattattagcgtggtgctcaccgcccatgaagcaatcccgggcgccaccaaaatcgtccccgtcgaggccggcccacctgagacaggtgccacaaactccgagactacaagtgccgatctggtgccaagacgcggataccaggaatacgccattcagcagaccccttacgaacagccaatgaagagcagtagattaggccccactcagcttaagatttttacttgtgagtattgtaacaaggtattcaaatttaagcactcattacaggcccaccttagaatccatacaaacgaaaagccttacaagtgcccgcagtgctcctacgcaagtgccatcaaagcaaacttgaacgtacacctgaggaaacatactggggagaagttcgcctgtgactattgcagcttcacgtgcttgtccaaaggccacctgaaagtgcatatcgaacgggttcataagaaaatcaaacaacactgcaggttttgtaagaagaagtactccgatgtcaagaacttgattaaacatattcgggacgcccacgacccccaagataagaaagtgaaagaggccttagatgagctttgcctgatgacgagagagggaaaacggcagcttctgtacgactgccacatctgtgagcgcaagttcaaaaacgagttagaccgcgaccggcacatgctggttcatggagacaagtggccgtttgcgtgcgagctatgcggacacggggcaaccaaataccaggctttggagttacacgtacgtaagcacccttttgtttacgtgtgtgcagtctgccgcaagaagttcgtcagttcaattcggctaaggacacatattaaagaggtacacggcgctgcccaagaggctctggtctttacttcaagcatcaaccagagtttttgcctgttggaacctggtggggatattcaacaggaggcacttggagaccagctgcagctcgtcgaggaagaattcgctctgcagggcgtgaatgctctcaaagaggaggcctgccctggggatacccagttggaggagggacgcaaggagccagaagctcctggagaaatgccagcccccgccgttcatctagctagccctcaggcagagagtacagcacttcctccgtgcgagctcgagactacagtcgtatcgtccagtgacctgcactcccaagaagtggtgagtgacgactttctgttgaagaacgatacttctagtgcagaggcacacgccgctcctgaaaagccccccgatatgcagcatagatcctccgtgcagacccagggcgaagtcatcactttgctgcttagcaaagctcaaagtgctggttccgatcaggaaagtcatggggcacagtcacctctgggagaaggacagaacatggcagtgttaagcgccggcgatcccgatcctagcagatgccttagaagcaacccagccgaagcctcggatctgctgcccccagtagcgggagggggcgatacaattacccaccagccagattcgtgtaaggctgcccctgaacacagatcgggcatcaccgccttcatgaaagtgctaaatagcctgcaaaagaagcaaatgaatacctcattgtgtgagcgaatccgaaaggtgtacggggacttggaatgcgaatactgcggcaaactattttggtaccaggtgcatttcgacatgcatgttcgcactcacacccgggagcacctctattactgctcacagtgccattattcgagtatcactaaaaattgtcttaagagacacgttattcagaaacatagtaatattcttctgaagtgccctaccgatggctgtgactattcaacacctgataaatataagctgcaagcgcacttgaaggtgcatactgcacttgataagcgaagctactcttgtcccgtgtgcgaaaagtcattctctgaagatcggctgatcaaatcgcatatcaaaacaaaccaccccgaggtgtctatgagcactatttcagaagttctggggcgcagagttcaactaaagggcttgatcgggaaaagggccatgaagtgcccttactgcgatttctactttatgaagaacggctccgatctgcaacgacatatttgggcccatgagggcgtgaagccgtttaaatgctccctgtgtgagtatgccactagatccaagagcaacttgaaagctcacatgaaccgccactctactgagaagacccatctatgcgatatgtgcggaaagaagtttaagtcaaagggcacactgaaatctcataagctcctgcataccgcagacggaaaacagttcaaatgtactgtgtgcgactataccgctgcacagaagccacaacttctcaggcacatggagcagcatgtgagttttaagcccttcagatgcgcccactgccactactcatgtaacatttctggttccctgaagcgccactacaaccgcaaacaccccaatgaagaatacgcaaatgtagggacaggcgagctggcagcagaggttctcatccagcaaggtggccttaagtgcccagtgtgttcttttgtttatggcacaaagtgggagtttaaccgccacctgaaaaataagcacggactcaaagtggtggagatagacggggatcctaagtgggaaacagccactgaggcacctgaggagcccagcacacaatacctgcacattaccgaggcagaagaggatgtgcaaggcacccaggcagccgttgcagcgctgcaagatttgcgctatacatccgaatccggtgaccggctcgaccccaccgccgttaacatcttacaacagattattgagctgggcgcagagacacacgatgctactgccctcgccagtgtcgtggccatggcaccaggtacggtcaccgtggtgaaacaggttacagaggaagaaccttctagcaatcacaccgtgatgatccaggagaccgtgcaacaggcctctgttgagctagccgagcagcaccacttagtcgtgtcatccgacgatgtggaagggattgaaaccgtgactgtgtacactcagggcggtgaggcctctgagtttatcgtttatgtacaggaagcgatgcagcccgtagaagagcaggccgttgaacagccagcccaggagctgtag

SEQ ID NO: 29345 - DNA, 3696 bp, Artificial Sequence
  derived and/or modified sequence
atgtgcaagtgctgcaacctgttcagccccaaccagagcgagctgctgtcgcatgtaagcgaaaagcatatggaagagggtgtaaacgtcgacgaaatcatcatccccctgaggccattatcaaccccggaaccacctaactccagcaaaacgggggatgagttcttagtaatgaagagaaagcggggacggccaaaaggcagtactaaaaaatctagcacagaggaagaactcgccgagaacatcgtttctcctacagaggactcacccttagcgcccgaggagggaaatagcttgcctcccagtagtttagaatgcagcaagtgctgccgaaaattcagtaacaccagacagctgagaaaacacatttgtatcatcgtactcaatttgggggaagaagaaggcgaagctgggaacgagagcgacctggagttggagaaaaagtgtaaagaggatgatagagaaaaggcatctaagcgccctcgttctcaaaagaccgagaaagtacagaaaatctctggaaaagaagcacgccagctgtcaggtgcaaaaaaaccgatcattagcgtggtgctgactgcccacgaagctatccccggggcaacaaaaatagtgccagtcgaggccggtcctccagagactggcgccaccaactccgagacaacaagcgccgatctagtcccccggcgaggctatcaggagtatgccatccaacaaaccccctacgagcagcccatgaaatcttcacggctgggaccgactcaactgaagatctttacatgcgagtattgcaataaagtgtttaaatttaaacactctctgcaggctcatcttcggattcacaccaacgagaagccctataaatgcccccagtgctcatatgctagcgcgataaaggccaacctgaatgtacaccttagaaagcacacaggcgagaagtttgcatgtgactactgttcattcacatgtctgtccaaaggacaccttaaagtgcatatcgaacgggtgcataagaagattaagcagcactgcaggttctgcaaaaagaaatattcagatgtgaagaaccttatcaaacatatacgcgatgcccatgatccacaagacaagaaggtcaaggaagctctagatgagctgtgcttgatgacacgggaagggaagaggcagctgctatatgactgccacatttgcgagagaaagttcaaaaatgagttggatagagacaggcatatgttggtgcatggggacaagtggcctttcgcatgtgagctgtgcgggcacggcgccaccaagtatcaagctcttgagctccatgttagaaaacacccctttgtatacgtctgtgcagtatgtcgcaagaaattcgtgtctagcataaggttgaggacccatataaaggaggtccacggggccgcacaggaggctcttgtgtttacaagcagcatcaatcagagtttctgcttgttagaaccaggaggggacatacaacaggaagcgttgggcgatcagctgcagttagtcgaagaggaattcgctctgcaaggcgtcaatgctttgaaggaggaagcttgccctggggatacccagctcgaggagggcagaaaggaaccagaggccccaggcgagatgcctgcaccagccgtccatctcgcctctccacaggcagagtccactgcgttaccaccctgcgagctggaaaccactgtggtctccagcagcgatcttcattcacaggaggtggtgagcgacgatttcttgctgaagaacgacactagttcagctgaggcccatgctgctccagaaaagccacccgacatgcaacatcggtccagcgtgcaaacacagggcgaggtgataactctgctgctcagtaaggcgcaatcagccggctctgatcaagagtcacacggcgcacaaagcccattaggggaaggccagaatatggctgtgcttagcgccggcgaccctgatccttcaagatgcctgcggagtaaccccgcggaagcctccgatctgctccccccggtcgcaggcgggggagatacgataactcatcagcccgactcttgcaaggccgcgcccgagcatcgctcaggaatcaccgcctttatgaaggtgcttaatagccttcagaagaagcagatgaatacttcactgtgtgagcgcatccgcaaagtgtatggcgacttagagtgtgaatactgcggcaaactattctggtatcaagtgcactttgacatgcatgttagaacccatacacgcgagcacctatactactgctctcaatgtcattactcaagtatcacaaagaattgtctgaagaggcatgtaatccagaaacactctaacatcctcttgaaatgtcctactgacggatgcgactattcaacccccgacaaatacaagctgcaagcgcacctaaaagtacacactgcgctggacaagagaagttattcgtgccccgtttgtgagaagagcttctctgaagacagactgatcaagtctcatattaagacaaaccaccctgaagtttccatgtctaccatctcagaagtgctaggaaggagagtccagcttaaaggcttgatcggaaaacgcgccatgaagtgcccctattgcgacttttacttcatgaagaacggttcagacctgcaacggcacatttgggcccacgagggtgtcaaaccttttaagtgctctctctgcgaatacgccactaggtccaaatcaaatctcaaagcccacatgaaccgtcactccacagagaagactcatctctgcgatatgtgtggcaagaaattcaagagtaagggtacactgaaatctcacaagttactccacaccgctgacggcaagcagtttaagtgtacagtatgcgactacactgccgcacagaaaccacaactattacgccatatggagcaacatgtttcattcaagcccttcagatgcgcccactgtcactattcctgcaacattagcggttctctgaaaaggcactacaaccgtaagcaccctaacgaggagtacgccaacgtgggaacaggggaattagctgcagaagtacttatacagcagggggggttgaaatgtcctgtttgttcctttgtttacggaaccaagtgggagttcaatagacacctgaagaacaaacatggcctcaaggtggtggagattgatggcgatcctaagtgggaaactgccactgaagcacctgaagaaccctccacacaatacctgcatatcacggaagccgaagaggatgtacagggcacccaagccgccgtcgcagccctccaggacctgcgctacacttctgaatcaggcgaccgcctcgaccccacggcggtcaacatactccaacagataatagaactaggagccgaaacacacgatgccaccgccttagcatcagtggttgccatggctccaggtacagtgacagtggtaaagcaagtcaccgaagaagaaccgtcctcaaatcatactgtgatgatccaggagaccgtgcaacaggcctcagtggaactagctgagcagcatcatttagtcgtgtctagcgacgatgtggaaggaatcgaaaccgtcacagtctacacacagggaggtgaggctagcgagttcattgtgtacgtacaggaagccatgcagccggtagaggagcaagccgtggagcagcccgcccaagagctctag

SEQ ID NO: 29346 - DNA, 3696 bp, Artificial Sequence
  derived and/or modified sequence
atgtgtaaatgctgtaacctgtttagtcccaatcagagcgagctcttgtcccatgtgtctgagaaacacatggaggagggtgtgaacgtggatgaaataatcatccctttgcgcccattgtcgacgccggagcctcccaacagtagcaagaccggcgacgaattcctcgtcatgaagcgtaagcggggacgcccaaaaggttcaacaaaaaaatcaagcacagaagaggagttggccgaaaacatcgtgtctcctactgaggactcccctttagcccctgaggagggcaattctctgcccccttcttctctcgagtgttctaagtgttgccgtaaattcagtaataccagacagctgaggaaacatatatgcattatcgtcctgaacttgggtgaggaggaaggagaagcagggaatgaatctgatctggagctcgagaagaaatgtaaagaagatgaccgggagaaggcttcgaagaggccacggtcccagaagacagagaaggtacagaagatttcaggaaaagaggcaagacagctcagcggagcaaagaaacctattatctccgttgtccttacagcccacgaagccattccaggagctactaagattgtacccgtcgaagccggtcctcctgagacaggcgcaaccaattctgagaccactagtgcagacctagtgcctaggagaggctaccaggaatacgctattcagcaaacaccatatgaacaaccaatgaagtcatcccgtttggggccaactcagcttaagatattcacttgtgaatactgtaataaagtattcaaatttaagcactcacttcaagctcacctaagaatacatactaatgagaaaccgtacaagtgccctcagtgtagctacgcatctgctatcaaggccaacctaaatgtgcacttacggaagcacacaggtgagaagttcgcatgcgactactgctcctttacatgcttgtcgaagggacatctgaaggttcatattgagcgggtgcacaaaaagatcaaacaacattgcaggttctgcaaaaaaaagtattcggatgtaaaaaacctaatcaaacatattcgtgacgcccacgatccccaagataagaaagtgaaagaggcactggacgaattatgcctgatgacgcgtgagggtaagcggcagctgctctacgattgccacatctgtgagcggaaatttaagaacgaactggaccgggaccgtcacatgcttgtgcacggtgataagtggcccttcgcctgcgagttatgcggccacggtgcaactaaataccaggcccttgagttgcacgtgaggaagcacccgttcgtgtatgtttgcgctgtttgtaggaaaaagtttgtatccagcataagactgcgaacccacattaaagaggttcatggtgccgctcaggaggctcttgtctttacatctagtatcaaccaaagtttctgtctcttggaacctggaggggacatacagcaggaggctctgggcgaccagctgcagctggtggaggaggaattcgcccttcagggtgtcaatgcgctcaaagaagaggcctgccccggagacacacagctggaagaggggaggaaagaacccgaggctcccggagagatgccagctccagctgtgcacttagcctctccccaggccgagtctaccgcactcccaccatgtgagctggagacaactgtggtaagctccagtgatcttcacagtcaggaggttgtctcggatgacttcctgttgaaaaatgatacatcctccgccgaagcacacgctgcccctgaaaagcctcccgatatgcaacatagaagcagcgtgcagacacagggagaagtcatcactctgctcctttcaaaagcacagagcgcaggttctgatcaggaatcacatggtgctcagtctccgttaggcgagggtcaaaatatggccgttctgagcgcaggtgaccccgatcccagccgctgtctgcgaagcaaccccgcagaggccagcgatctccttcccccagtggctgggggtggcgatactatcactcatcagcccgacagttgcaaagccgcacccgaacataggtccgggattacagcgttcatgaaggtgcttaacagtttgcaaaaaaaacagatgaatacttctctctgtgaaaggatcaggaaggtgtacggggacttagagtgcgaatattgcggtaaactgttttggtatcaggtccactttgatatgcatgtgaggactcacacacgagaacacttatattactgttcacagtgccactattcctcaattacgaaaaactgtctcaagcgacacgtgattcagaaacatagtaacatccttctaaaatgccccactgacgggtgcgactactctacacccgataagtacaagctgcaagctcatttgaaggtacatactgccctggacaagagatcgtacagttgtcctgtgtgcgagaagagctttagcgaagatagattaatcaaatcccacataaaaaccaatcaccccgaggtgagcatgtccactatatccgaagttcttggcagacgggtacaattaaaagggctgatagggaagcgcgctatgaagtgcccttattgcgatttttattttatgaagaacggcagcgatctccaaaggcatatatgggcacatgagggcgttaaaccctttaagtgcagtctttgcgaatatgcaacaaggagcaaaagcaacctgaaggctcacatgaacagacatagtacagagaagactcatctatgcgacatgtgtggtaaaaaatttaaatcaaagggtacattaaagtctcataagctcttgcacacagctgatggtaagcagtttaagtgcacagtttgcgattacacggctgcccagaaaccacagctgctaaggcatatggagcaacatgtctcatttaagccttttaggtgtgcccactgccactactcctgcaacatcagcggtagcctaaagagacactataacagaaagcacccaaatgaggagtacgcgaatgttggtaccggggagttagccgctgaagtgctcatacaacagggtggtctcaaatgtcccgtctgctcctttgtatacggcaccaaatgggagttcaacaggcacttaaaaaataaacatggtctcaaagtggtcgagatcgatggcgaccccaaatgggaaacggccaccgaggctccggaggagcccagtacacaatatttacacatcacagaggccgaagaggacgttcagggcacccaggctgcagtggccgctctgcaggatcttcgctacacatcggaatctggcgacagactggacccaacagccgttaatatactgcagcagataattgagctcggtgcagaaactcacgacgcgacagcattggccagtgtggtggcaatggcccctggcaccgttacggttgtcaaacaggtcaccgaagaggagccgagctctaaccacaccgtaatgatccaggaaaccgtgcagcaggcctccgtggaactggctgagcaacaccacctggtggtgtcgagcgacgatgtggagggcatcgaaactgtcaccgtctacacacagggcggagaggcctcagagtttatcgtgtacgtgcaggaggctatgcaacctgtggaggaacaagcggtcgagcagcctgcgcaagaattatag

SEQ ID NO: 29347 - protein, 85 aa, Artificial Sequence
  derived and/or modified sequence
MSVHMPAMKICEKLKKLDSQICELKYEKTLDLASVDLRKMRVAELKQILHSWGEECRACAEKTDYVNLIQELAPKYAATHPKTEL

SEQ ID NO: 29348 - protein, 187 aa, Artificial Sequence
  derived and/or modified sequence
MWCASPVAVVAFCAGLLVSHPVLTQGQEAGGRPGADCEVCKEFLNRFYKSLIDRGVNFSLDTIEKELISFCLDTKGKENRLCYYLGATKDAATKILSEVTRPMSVHMPAMKICEKLKKLDSQICELKYEKTLDLASVDLRKMRVAELKQILHSWGEECRACAEKTDYVNLIQELAPKYAATHPKTEL

SEQ ID NO: 29349 - DNA, 258 bp, Artificial Sequence
  derived and/or modified sequence
atgtccgtccatatgcctgcaatgaagatttgcgaaaaactgaagaagttggatagtcagatctgtgagttgaagtacgagaaaacgctcgatcttgcaagcgttgatctgcgaaagatgcgcgtcgcggagctaaaacagatcctgcatagttggggtgaagagtgcagagcttgcgccgaaaagactgactacgtcaatctgattcaggagcttgccccaaagtacgccgcaactcatcctaaaacagagctgtag

SEQ ID NO: 29350 - DNA, 564 bp, Artificial Sequence
  derived and/or modified sequence
atgtggtgtgctagtcctgtggctgtggtggcgttttgcgcgggtctgttagtgtctcaccctgttttaactcaggggcaagaagccggtgggaggccaggcgcagactgcgaggtgtgtaaagagttcctgaaccgattctataaatcgttgatcgaccgcggagttaacttcagtctggacacgattgaaaaggagctgatttccttctgcctggatacaaagggaaaagagaaccggctgtgctactaccttggagccaccaaggacgcagccaccaagatcctatctgaggttacaaggcctatgagcgtccacatgccagctatgaagatctgcgaaaagctgaagaagctcgactctcaaatttgtgagcttaagtatgagaaaactctggatttagcatctgttgatctgaggaaaatgagggtggcagaattaaagcaaatcctccattcctggggagaggagtgtagggcttgcgccgagaaaaccgattatgtcaatctcatccaggaactcgcacccaaatatgccgcaacccacccaaaaacagaactgtag

SEQ ID NO: 29351 - DNA, 258 bp, Artificial Sequence
  derived and/or modified sequence
atgtctgttcacatgcccgccatgaagatctgcgagaaactgaaaaaactggatagccaaatctgcgagctgaagtatgagaagacactggacctggcgtccgtcgacctgaggaagatgcgtgtcgcagaattaaaacaaattcttcactcttggggagaggagtgcagagcctgtgcagaaaaaaccgactatgtaaacctcatacaagagctagctcccaagtacgccgccacacatcctaagaccgagttatag

SEQ ID NO: 29352 - DNA, 564 bp, Artificial Sequence
  derived and/or modified sequence
atgtggtgcgccagccccgtggctgttgttgctttttgcgctggcctgcttgtcagccatcctgtgctgacccaggggcaagaagccggtgggcgtccaggtgccgactgcgaggtatgcaaggaattccttaaccgtttctacaagagtctcatagatagaggtgtgaacttttcgttggacacaatcgaaaaagagttgatatccttctgcctggataccaagggcaaggaaaatagattgtgttattatctgggagctacaaaggacgccgctacgaaaatcctgagcgaagtgacacgccccatgagtgttcacatgcctgccatgaagatttgcgaaaagttgaagaagttggacagccagatttgtgagctcaaatacgagaagacattggatcttgctagcgtagatctacggaaaatgagagtagcggagctcaaacaaattctgcacagctggggagaggaatgcagggcttgtgccgagaagacggactatgtgaacttgatccaggaattggcaccaaaatacgccgcaactcaccctaagaccgaattgtag

SEQ ID NO: 29353 - DNA, 690 bp, Artificial Sequence
  derived and/or modified sequence
gttgcgtcatttgtcctggcaactactggcagattctttccaacctcgaattctgctcagctcgctttggcagcttggtgggcggtgggcgcgggtggcggaggcgattgaagctgctggcccagcatgtggtgcgcgagcccagttgctgtggtggccttttgcgccgggcttttggtctctcacccggtgctgacgcagggccaggaggccggggggcggccaggggccgactgtgaagtatgtaaagaattcttgaaccgattctacaagtcactgatagacagaggagttaacttttcgctggacactatagagaaagaattgatcagtttttgcttggacaccaaaggaaaagaaaaccgcctgtgctattatctaggagccacaaaagacgcagccacaaagatcctaagtgaagtcactcgcccaatgagtgtgcatatgcctgcaatgaagatttgtgagaagctgaagaagttggatagccagatctgtgagctgaaatatgaaaaaacactggacttggcatcagttgacctgcggaagatgagagtggcagagctgaagcagatcctgcatagctggggggaggagtgcagggcctgtgcagaaaaaactgactatgtgaatctcattcaagagctggcccccaagtatgcagcgacacaccccaaaacagagctctga

SEQ ID NO: 29354 - DNA, 564 bp, Artificial Sequence
  derived and/or modified sequence
atgtggtgtgccagccctgtggcagtcgtcgctttttgcgcaggtttgttggtatcacaccctgtgttgacccaggggcaggaagccggcgggcgccccggggccgattgtgaggtgtgtaaagagtttctgaatcgattctataaatccttgattgataggggcgttaatttttcactcgatacaattgaaaaggagttgatctcattttgtctggataccaaaggcaaggaaaaccgcctgtgctactaccttggtgccacgaaagatgccgcaacaaagatactaagcgaagtgacaagacccatgagcgtccatatgcctgctatgaagatctgcgagaagctgaagaaactggatagtcagatctgtgagcttaagtacgaaaagacactggatctcgcatctgttgacctgagaaaaatgagagtagccgaactgaaacagatattgcacagctggggagaagaatgccgcgcttgcgctgagaagaccgactacgtaaatctcattcaggaactggcgcccaagtacgctgcaacccatcctaagaccgagctttag

SEQ ID NO: 29355 - DNA, 258 bp, Artificial Sequence
  derived and/or modified sequence
atgagcgtgcacatgcccgccatgaagatctgcgagaagctgaagaagctggacagccagatctgcgagctgaagtacgagaagaccctggacctggccagcgtggacctgagaaagatgagagtggccgagctgaagcagatcctgcacagctggggcgaggagtgcagagcctgcgccgagaagaccgactacgtgaacctgatccaggagctggcccccaagtacgccgccacccaccccaagaccgagctgtag

SEQ ID NO: 29356 - DNA, 564 bp, Artificial Sequence
  derived and/or modified sequence
atgtggtgcgccagccccgtggccgtggtggccttctgcgccggcctgctggtgagccaccccgtgctgacccagggccaggaggccggcggcagacccggcgccgactgcgaggtgtgcaaggagttcctgaacagattctacaagagcctgatcgacagaggcgtgaacttcagcctggacaccatcgagaaggagctgatcagcttctgcctggacaccaagggcaaggagaacagactgtgctactacctgggcgccaccaaggacgccgccaccaagatcctgagcgaggtgaccagacccatgagcgtgcacatgcccgccatgaagatctgcgagaagctgaagaagctggacagccagatctgcgagctgaagtacgagaagaccctggacctggccagcgtggacctgagaaagatgagagtggccgagctgaagcagatcctgcacagctggggcgaggagtgcagagcctgcgccgagaagaccgactacgtgaacctgatccaggagctggcccccaagtacgccgccacccaccccaagaccgagctgtag

SEQ ID NO: 29357 - DNA, 258 bp, Artificial Sequence
  derived and/or modified sequence
atgtccgtacacatgcctgctatgaaaatctgcgagaaactcaaaaagctggattcgcaaatctgtgaacttaagtatgaaaaaacgctggaccttgctagtgtggacctccggaaaatgagagtcgcggagctcaaacagatcctacactcatggggggaagagtgcagggcctgcgccgagaagaccgactacgtaaaccttattcaggagctcgccccaaagtatgctgccacacatcctaaaacagaactgtag

SEQ ID NO: 29358 - DNA, 564 bp, Artificial Sequence
  derived and/or modified sequence
atgtggtgcgcctcccctgttgccgtcgttgctttctgtgcaggcctgctggtttcccaccctgtgctcacccagggtcaggaagctggggggcggcctggtgctgattgcgaggtatgtaaggagtttttgaaccgattttacaagagcctcatcgatcggggtgtgaatttttcgctagacacaatcgagaaggagctgatcagcttctgcttggatacaaaaggaaaggaaaatcgcctatgctactacctgggagccacaaaagatgctgccactaaaattcttagcgaggtcacacggccaatgagtgtgcatatgccagctatgaaaatatgtgaaaaacttaagaaactggatagccagatttgtgaactgaaatacgaaaaaacacttgacctggcttctgttgacctccgcaagatgcgcgtagctgaattgaaacagattttgcactcgtggggagaggaatgccgggcatgcgcggagaagaccgactacgtgaatcttattcaggagctggctcctaagtatgctgcaacccatcccaagaccgagctgtag

SEQ ID NO: 29359 - DNA, 258 bp, Artificial Sequence
  derived and/or modified sequence
atgtctgtgcacatgcctgccatgaagatctgtgagaagctgaagaagctggacagccagatctgtgagctgaagtatgagaagaccctggacctggcctctgtggacctgaggaagatgagggtggccgagctgaagcagatcctgcacagctggggcgaggagtgccgggcctgtgccgagaagacagattatgtgaacctgatccaggagctggcccccaagtatgctgccacccaccccaagacagagctgtag

SEQ ID NO: 29360 - DNA, 564 bp, Artificial Sequence
  derived and/or modified sequence
atgtggtgtgccagccctgtggccgtggtggccttctgtgccggcctgctggtgagccaccctgtgctgacccagggccaggaggccggcggccggcctggagctgactgtgaggtgtgcaaggagttcctgaaccgcttctacaagagcctgattgacagaggagtgaacttcagcctggacaccatcgagaaggagctgatctccttctgcctggacaccaagggcaaggagaaccggctgtgctactacctgggcgccaccaaggatgctgccaccaagatcctgtctgaggtgacccggcccatgtctgtgcacatgcctgccatgaagatctgtgagaagctgaagaagctggacagccagatctgtgagctgaagtatgagaagaccctggacctggcctctgtggacctgaggaagatgagggtggccgagctgaagcagatcctgcacagctggggcgaggagtgccgggcctgtgccgagaagacagattatgtgaacctgatccaggagctggcccccaagtatgctgccacccaccccaagacagagctgtag

SEQ ID NO: 29361 - DNA, 1492 bp, Artificial Sequence
  derived and/or modified sequence
gccactccacgacatccctaggccggcgacacgccgctctcaagcctgtggatgacccagcgccagaaaaccgggtggccgtcatgaagccctagcccagctccgcagcccctcaccttatagacggccacacaggctgaggtgcagcccaggtaaagaagcttgtgtaatcgcagaggaaggacataacagtttgagcctcactctgtcacccaggttggagtacagtggaacagtctcagctcactgcaacttccgtcttccaggctcaagtgatcctccctcctcagcctcctgagtagctggactacagtatgtaaagaattcttgaaccgattctacaagtcactgatagacagaggagttaacttttcgctggacactatagagaaagaattgatcagtttttgcttggacaccaaaggaaaagaaaaccgcctgtgctattatctaggagccacaaaagacgcagccacaaagatcctaagtgaagtcactcgcccaatgagtgtgcatatgcctgcaatgaagatttgtgagaagctgaagaagttggatagccagatctgtgagctgaaatatgaaaaaacactggacttggcatcagttgacctgcggaagatgagagtggcagagctgaagcagatcctgcatagctggggggaggagtgcagggcctgtgcagaaaaaactgactatgtgaatctcattcaagagctggcccccaagtatgcagcgacacaccccaaaacagagctctgatctccaatgccagcacatttgtgacttgtaattagagagaaaagtgactctctaggatatggacatgttgattaaggataactgggaatgcatcatatttggtctcatgctttttgtgttggtattattcctcagaattttgttacgtgggtttatgagtgaaactaatactactgataacttacatttgcagtgtaccaaaagctaaaagttcctttctcataagtttcttggaatgactatgccagttttcattgcctgtctcctaaaagtgacctactgacaaattgatggagtaaattgattccaagaaagaagaaggcattcagagactcctctctggatgcaattttaaaatatattggactaaaacaaaagacacaacagtcagcttatctaatgcacaacttcaatcccaaatacagaatcaaaagtttttttcaagtgaattttctgttttcactctatattgtagctctctttggtatcagaaatggtcaggcaggagtactcgtttttcccattggaagaaaacccacttaaacctacttaaagaaaatagagagatcaagaaaccgtataagtatagccaatgtttggcaattatatcaacatttacattgttaattgaaccaagctcaaggtctttttcattccttacagtcacatatcagacaagtttttgatggaagattaaagcatattaaaaacactcataggcaacttggaa

SEQ ID NO: 29362 - DNA, 258 bp, Artificial Sequence
  derived and/or modified sequence
atgagcgtgcacatgcccgccatgaagatctgcgagaagctgaagaaattggactcacagatttgcgagctcaagtacgaaaaaacgttggatctagcctccgtcgatctgagaaagatgcgagtggcagaactgaagcaaattttgcactcatggggtgaagagtgcagggcgtgtgcagaaaagacggactacgtgaacttaatccaggagctggctccaaagtacgcggccacacaccccaagaccgaactgtag

SEQ ID NO: 29363 - DNA, 564 bp, Artificial Sequence
  derived and/or modified sequence
atgtggtgcgccagccccgtggccgtggtggccttctgcgccggcttactggtgagtcaccctgttctgacccagggccaggaggccggcggtcggcctggagcggactgtgaagtctgtaaagagtttctaaacagattctataagtccttgatcgatcggggcgtcaacttttctctggacacaatcgagaaggagctcatcagcttctgtcttgacacaaaaggcaaagaaaatagactctgctactatctgggtgctaccaaagatgctgccaccaaaattctttcagaggtgacaagacccatgtcagtccatatgccagcaatgaaaatctgtgagaaactgaaaaagctggactcacaaatctgtgaactgaaatacgagaaaaccttggacttagcttccgtggacttacgcaagatgcgggtagccgagctgaagcagatccttcactcctggggagaggaatgtcgagcctgcgctgagaagacagactatgttaatttgatccaggagttagctccaaagtatgccgcaacacaccctaagaccgagctttag

SEQ ID NO: 29364 - RNA, 258 nt, Artificial Sequence
  derived and/or modified sequence
augucuguucacaugcccgccaugaagaucugcgagaaacugaaaaaacuggauagccaaaucugcgagcugaaguaugagaagacacuggaccuggcguccgucgaccugaggaagaugcgugucgcagaauuaaaacaaauucuucacucuuggggagaggagugcagagccugugcagaaaaaaccgacuauguaaaccucauacaagagcuagcucccaaguacgccgccacacauccuaagaccgaguuauag

SEQ ID NO: 29365 - RNA, 564 nt, Artificial Sequence
  derived and/or modified sequence
auguggugcgccagccccguggcuguuguugcuuuuugcgcuggccugcuugucagccauccugugcugacccaggggcaagaagccggugggcguccaggugccgacugcgagguaugcaaggaauuccuuaaccguuucuacaagagucucauagauagaggugugaacuuuucguuggacacaaucgaaaaagaguugauauccuucugccuggauaccaagggcaaggaaaauagauuguguuauuaucugggagcuacaaaggacgccgcuacgaaaauccugagcgaagugacacgccccaugaguguucacaugccugccaugaagauuugcgaaaaguugaagaaguuggacagccagauuugugagcucaaauacgagaagacauuggaucuugcuagcguagaucuacggaaaaugagaguagcggagcucaaacaaauucugcacagcuggggagaggaaugcagggcuugugccgagaagacggacuaugugaacuugauccaggaauuggcaccaaaauacgccgcaacucacccuaagaccgaauuguag

SEQ ID NO: 29366 - RNA, 564 nt, Artificial Sequence
  derived and/or modified sequence
auguggugugccagcccuguggcagucgucgcuuuuugcgcagguuuguugguaucacacccuguguugacccaggggcaggaagccggcgggcgccccggggccgauugugagguguguaaagaguuucugaaucgauucuauaaauccuugauugauaggggcguuaauuuuucacucgauacaauugaaaaggaguugaucucauuuugucuggauaccaaaggcaaggaaaaccgccugugcuacuaccuuggugccacgaaagaugccgcaacaaagauacuaagcgaagugacaagacccaugagcguccauaugccugcuaugaagaucugcgagaagcugaagaaacuggauagucagaucugugagcuuaaguacgaaaagacacuggaucucgcaucuguugaccugagaaaaaugagaguagccgaacugaaacagauauugcacagcuggggagaagaaugccgcgcuugcgcugagaagaccgacuacguaaaucucauucaggaacuggcgcccaaguacgcugcaacccauccuaagaccgagcuuuag

SEQ ID NO: 29367 - protein, 65 aa, Artificial Sequence
  derived and/or modified sequence
MVRTKADSVPGTYRKVVAARAPRKVLGSSTSATNSTSVSSRKEHVLCNLITQMMKKNRTFSFIFE

SEQ ID NO: 29368 - DNA, 198 bp, Artificial Sequence
  derived and/or modified sequence
atggtaagaactaaagctgactccgttcccgggacttaccggaaggttgtcgccgctcgggcaccgaggaaggtcctgggatcttctacatctgcgacgaactctacctccgtgagcagtaggaaggaacatgtgttgtgcaatctgattacccagatgatgaaaaaaaatagaactttctccttcatcttcgagtag

SEQ ID NO: 29369 - DNA, 198 bp, Artificial Sequence
  derived and/or modified sequence
atggtgaggaccaaggctgacagcgtgcccggcacctacaggaaggtggtggccgcccgggcccccaggaaggtgctgggcagcagcaccagcgccaccaacagcacctctgtgagcagcaggaaggagcacgtgctgtgcaacctgatcacccagatgatgaagaagaacagaaccttctccttcatctttgaatag

SEQ ID NO: 29370 - DNA, 198 bp, Artificial Sequence
  derived and/or modified sequence
atggtgcggaccaaggccgacagcgtgcccggcacctaccggaaggtggtggccgcaagagctccaaggaaggtgttgggatcttcaacaagcgccaccaactccacatccgtctcctcccgaaaagagcatgttctgtgcaacctgataacacaaatgatgaaaaaaaatcgcactttctcattcatttttgaatag

SEQ ID NO: 29371 - DNA, 198 bp, Artificial Sequence
  derived and/or modified sequence
atggtccggaccaaggccgactctgttcccggaacctaccgaaaggtcgtcgcagccagagctccgaggaaggtgttgggttcatcaacttcagctaccaactcgacgtcagtatccagcagaaaagaacacgttctgtgtaacttgattactcagatgatgaagaagaatcgtactttctccttcattttcgaatag

SEQ ID NO: 29372 - DNA, 911 bp, Artificial Sequence
  derived and/or modified sequence
ggtccttgtccagtgaaacaccctcggctgggaagtcagttcgttctctcctctcctctcttcttgtttgaacatggtgcggactaaagcagacagtgttccaggcacttacagaaaagtggtggctgctcgagcccccagaaaggtgcttggttcttccacctctgccactaattcgacatcagtttcatcgaggaaagagcatgtcctttgcaacctgatcacacaaatgatgaaaaagaatagaactttctcattcatctttgaataacgtctccttgtttaccctggtattctagaatgtaaatttacataaatgtgtttgttccaattagctttgttgaacaggcatttaattaaaaaatttaggtttaaatttagatgttcaaaagtagttgtgaaatttgagaatttgtaagactaattatggtaacttagcttagtattcaatataatgcattgtttggtttcttttaccaaattaagtgtctagttcttgctaaaatcaagtcattgcattgtgttctaattacaagtatgttgtatttgagatttgcttagattgttgtactgctgccatttttattggtgtttgattattggaatggtgccatattgtcactccttctacttgctttaaaaagcagagttagatttttgcacattaaaaaattcagtattaattaaacattacttattctaccctcttttttggcaaggaggacaaatacgcaatgttggaaaaccttggatggatatcttctctttaaaaaaatgtaaagataatttggtcttgagggtttaaacggttgataatgcctctacaacaacaagaaaaaagataaaatactaggatagaatcatggtgggcacagtggcttctcaggaggctgaggagggaggtttgcttg

SEQ ID NO: 29373 - DNA, 198 bp, Artificial Sequence
  derived and/or modified sequence
atggtgagaaccaaggccgacagcgtgcccggcacctacagaaaggtggtggccgccagagcccccagaaaggtgctgggcagcagcaccagcgccaccaacagcaccagcgtgagcagcagaaaggagcacgtgctgtgcaacctgatcacccagatgatgaagaagaacagaaccttcagcttcatcttcgagtag

SEQ ID NO: 29374 - protein, 478 aa, Artificial Sequence
  derived and/or modified sequence
MAAALKCLLTLGRWCPGLGVAPQARALAALVPGVTQVDNKSGFLQKRPHRQHPGILKLPHVRLPQALANGAQLLLLGSAGPTMENQVQTLTSYLWSRHLPVEPEELQRRARHLEKKFLENPDLSQTEEKLRGAVLHALRKTTYHWQELSYTEGLSLVYMAARLDGGFAAVSRAFHEIRARNPAFQPQTLMDFGSGTGSVTWAAHSIWGQSLREYMCVDRSAAMLVLAEKLLKGGSESGEPYIPGVFFRQFLPVSPKVQFDVVVSAFSLSELPSKADRTEVVQTLWRKTGHFLVLVENGTKAGHSLLMDARDLVLKGKEKSPLDPRPGFVFAPCPHELPCPQLTNLACSFSQAYHPIPFSWNKKPKEEKFSMVILARGSPEEAHRWPRITQPVLKRPRHVHCHLCCPDGHMQHAVLTARRHGRYGGCDQNQWDVAGSCSPRQHLFPQGFVSLCPCQLLGRSFTCAYSVCVSSIYGSGSL

SEQ ID NO: 29375 - protein, 196 aa, Artificial Sequence
  derived and/or modified sequence
MVPRPWSGSPGPGECLHSLLSERLWICRDISAQRRSAPGSPRPSDCQQLSFLPGNQPTFLCLQALAALVPGVTQVDNKSGFLQKRPHRQHPGILKLPHVRLPQALANGAQLLLLGSAGPTMENQVQTLTSYLWSRHLPVEPEELQRRARHLEKKFLENPGPDFQSLFSPQTYLRQRRNFVEQCYTHYVKLPTIGKN

SEQ ID NO: 29376 - DNA, 1437 bp, Artificial Sequence
  derived and/or modified sequence
atggccgccgccctgaagtgcctgctgaccctgggcagatggtgccccggcctgggcgtggccccccaggccagagccctggccgccctggtgcccggcgtgacccaggtggacaacaagagcggcttcctgcagaagagaccccacagacagcaccccggcatcctgaagctgccccacgtgagactgccccaggccctggccaacggcgcccagctgctgctgctgggcagcgccggccccaccatggagaaccaggtgcagaccctgaccagctacctgtggagcagacacctgcccgtggagcccgaggagctgcagagaagagccagacacctggagaagaagttcctggagaaccccgacctgagccagaccgaggagaagctgagaggcgccgtgctgcacgccctgagaaagaccacctaccactggcaggagctgagctacaccgagggcctgagcctggtgtacatggccgccagactggacggcggcttcgccgccgtgagcagagccttccacgagatcagagccagaaaccccgccttccagccccagaccctgatggacttcggcagcggcaccggcagcgtgacctgggccgcccacagcatctggggccagagcctgagagagtacatgtgcgtggacagaagcgccgccatgctggtgctggccgagaagctgctgaagggcggcagcgagagcggcgagccctacatccccggcgtgttcttcagacagttcctgcccgtgagccccaaggtgcagttcgacgtggtggtgagcgccttcagcctgagcgagctgcccagcaaggccgacagaaccgaggtggtgcagaccctgtggagaaagaccggccacttcctggtgctggtggagaacggcaccaaggccggccacagcctgctgatggacgccagagacctggtgctgaagggcaaggagaagagccccctggaccccagacccggcttcgtgttcgccccctgcccccacgagctgccctgcccccagctgaccaacctggcctgcagcttcagccaggcctaccaccccatccccttcagctggaacaagaagcccaaggaggagaagttcagcatggtgatcctggccagaggcagccccgaggaggcccacagatggcccagaatcacccagcccgtgctgaagagacccagacacgtgcactgccacctgtgctgccccgacggccacatgcagcacgccgtgctgaccgccagaagacacggcagatacggcggctgcgaccagaaccagtgggacgtggccggcagctgcagccccagacagcacctgttcccccagggcttcgtgagcctgtgcccctgccagctgctgggcagaagcttcacctgcgcctacagcgtgtgcgtgagcagcatctacggcagcggcagcctgtag

SEQ ID NO: 29377 - DNA, 1437 bp, Artificial Sequence
  derived and/or modified sequence
atggccgctgccctgaagtgtcttctgacactcgggagatggtgccccggattaggcgtagcccctcaagcccgagctttagccgccttagtgccaggtgtgactcaggttgataacaaatctggctttctgcagaagagaccacatcgtcagcaccctggcatcttgaaactcccacatgtgagactgccacaggccctcgccaatggagcccagctcttgttgctgggttcagctgggccgactatggaaaaccaagttcagacattgacgagctacttgtggtcacgccatctgcccgtggagccggaggaattacagcgccgagctaggcacctggagaaaaaatttctggagaatccagatctgtcacagactgaggaaaaattgcgcggagccgtgctgcacgctctacgaaaaaccacctatcactggcaggagctgtcttacactgaagggctgagcttggtctatatggctgcccgcctggatgggggattcgccgccgtctccagggcattccatgaaataagggcaagaaaccctgcctttcagcctcagaccctcatggatttcggcagtggaacaggatctgtgacctgggctgcacactctatttgggggcagagcctcagagagtacatgtgtgtagaccgctccgccgctatgttagttctggcggagaagttgctgaagggagggagcgagagcggggaaccttacattcctggggtgttctttaggcagttcttacctgtgtcaccaaaggtgcagttcgacgtcgtggtttcagctttcagcctgagtgagctgccctccaaggctgatcgcacagaggtagttcagactctctggcggaaaaccgggcactttctcgtgttggtggaaaatggcaccaaggccggacactccctgttgatggacgctcgtgacctcgtcctgaagggcaaggagaaatctcccctcgatccgaggcctggttttgtgtttgctccgtgcccacacgaactgccatgcccccaattaactaacctcgcttgctctttctcccaggcttaccatccaatccctttctcatggaacaagaagcccaaagaagagaagttcagtatggtcattctggcacgggggtcccccgaagaggcccacagatggccaaggataacccaacccgtcctaaagcgcccgcgccacgtccactgccatctgtgttgccccgacggccacatgcagcatgccgtgctgaccgctaggcgccacggaaggtatgggggctgcgatcagaatcagtgggacgtcgccggctcgtgctcaccaaggcagcacctcttcccccaggggtttgtgtccctttgtccgtgtcagttattgggtaggtcctttacttgcgcatactccgtgtgcgtatcctccatttacggttccggatctctctag

SEQ ID NO: 29378 - DNA, 1437 bp, Artificial Sequence
  derived and/or modified sequence
atggctgctgccctgaagtgcctgctgaccctgggccgctggtgccccggcctgggcgtggccccccaggcccgggccctggccgccctggtgcctggggtgacccaggtggacaacaagagcggcttcctgcagaagaggccccaccggcagcaccctggcatcctgaagctgccccacgtgcggctgccccaggccctggccaatggagcccagctgctgctgctgggcagcgctggccccaccatggagaaccaggtgcagaccctgaccagctacctgtggagccgccacctgcctgtggagcctgaggagctgcagaggcgggcccggcacctggagaagaagttcctggagaacccagacctgagccagacagaggagaagctgcggggagctgtgctgcacgccctgaggaagaccacctaccactggcaggagctgagctacacagagggcctgagcctggtgtacatggccgcccggctggatggcggctttgctgctgtgtcccgggccttccacgagatccgggccaggaacccagccttccagccccagaccctgatggactttggcagcggcaccggctctgtgacctgggccgcccacagcatctggggccagagcctgcgggagtacatgtgtgtggacagatctgctgccatgctggtgctggccgagaagctgctgaagggcggcagcgagagcggggagccctacatccctggggtcttcttccggcagttcctgcctgtgagccccaaggtgcagtttgatgtggtggtgtctgccttcagcctgtctgagctgcccagcaaggctgacagaacagaggtggtgcagaccctgtggaggaagacaggccacttcctggtgctggtggagaatggcaccaaggccggccacagcctgctgatggatgcccgggacctggtgctgaagggcaaggagaagagccccctggacccccggcccggctttgtgtttgccccctgcccccatgagctgccctgcccccagctgaccaacctggcctgcagcttcagccaggcctaccaccccatccccttctcctggaacaagaagcccaaggaggagaagttctccatggtgatcctggcccggggcagccctgaggaggcccaccgctggccccgcatcacccagcctgtgctgaagaggcccaggcatgtgcactgccacctgtgctgcccagatggccacatgcagcacgctgtgctgacagcccggcggcacggccgctatggaggctgtgaccagaaccagtgggatgtggccggcagctgcagcccccggcagcacctgttcccccagggctttgtgtccctgtgcccctgccagctgctgggccgctccttcacctgtgcctacagcgtgtgtgtgagcagcatctacggcagcggcagcctgtag

SEQ ID NO: 29379 - DNA, 1586 bp, Artificial Sequence
  derived and/or modified sequence
gtttccggttcgcctccggagccatggcggcggcactgaagtgtctactgacattaggaagatggtgccccggccttggagtggctccccaggcccgggcgctcgccgccttagtacccggagtgacccaggtagataacaagtccggtttcctgcagaagaggcctcatcgccagcaccctggcatcctaaagctgccgcacgtgcggctgccacaggcactggctaacggtgcccagttattgctacttgggagcgctgggcccactatggagaatcaggtgcaaacactgaccagttatctctggagcagacatttgcctgtagagccagaggagttgcaaagacgggctaggcatcttgagaaaaaattcctggaaaacccagacttatctcagacagaggagaaacttcgtggagcagtgctacacgcactacgtaaaactacctaccattggcaagaactgagctacactgagggactgagcctggtgtatatggcagcaagactggatggtggctttgcagcagtctccagagcattccatgagatccgggctcgaaatccagcatttcagccacaaactttgatggactttggctcaggtactggttctgtcacctgggctgctcacagtatttggggccagagcctacgtgaatatatgtgtgtggacagatcagctgccatgttggttttggcagaaaaactactgaaaggtggttcagaatctggggagccttatattccaggtgtctttttcagacagtttctacctgtatcacccaaggtgcagtttgatgtagtagtgtcagctttttccttaagtgaactgcccagcaaggctgaccgcactgaggtagttcaaaccttatggcgtaagacaggtcatttcctggtactggtggagaatggaacaaaagctgggcacagccttctcatggatgccagggatctggtccttaagggaaaagagaagtcacctttggaccctcgacctggttttgtctttgccccgtgtccccatgaactcccttgtccccagttgaccaacctggcctgtagcttctcacaggcgtaccatcccatccccttcagctggaacaagaaaccaaaggaagaaaagttctctatggtgatccttgctcgggggtctccagaggaggctcatcgctggccccgtatcactcagcctgtccttaaacggcctcgccatgtgcattgtcacttgtgctgtccagatgggcacatgcagcatgctgtgctcacagcccgccggcacggcaggtatggggggtgtgaccaaaatcagtgggatgtggcaggaagctgcagcccacgccagcatctgtttccacagggatttgtatcgttgtgcccgtgtcagctcctggggagatcttttacctgtgcttactccgtctgcgtttcctccatctacggctcaggatccctctgagagttgatgaggatgtgtaacaagtattttcttctatcgtgcctgccagggctgaagctgcctggtatccaggaggggaatgctggtatccccatatgtctgtgtttgtttgagatttttaataat

SEQ ID NO: 29380 - DNA, 1437 bp, Artificial Sequence
  derived and/or modified sequence
atggccgccgccctgaagtgcctgctgaccctgggccggtggtgccctggtcttggggtggccccccaggcacgagcactagcggcactggtgcccggcgtcacccaggtcgacaataaatcagggttcctgcagaaacgaccccaccggcagcatccaggtattctgaaacttccccacgtcaggttgcctcaggccctcgcaaacggagcccagctccttctactgggctccgcagggccaacaatggagaatcaggtgcagacacttacctcctacctatggtcccgacacttgccagtggagcctgaggaactgcagcgacgtgcccgccacttggagaagaagtttctggagaatcctgatctctcccagacagaagaaaaactgagaggcgctgtacttcacgcattgcgtaagacaacctaccactggcaggagctatcttatacggagggcctgtctctcgtatacatggctgccaggttagacgggggattcgctgcagtttccagggcgtttcatgagatcagggcccgaaatcctgcatttcaacctcagacacttatggatttcgggagtggcactggtagtgtcacatgggcagctcactctatatgggggcagtctcttcgagaatacatgtgtgtggacagatccgctgctatgcttgtgctcgcggaaaagttgcttaaaggaggatctgagtcgggagaaccatatatccccggggtgttctttcggcagtttcttcccgtcagtcccaaagtgcagttcgacgtggtggtgagcgcttttagcctttcggaactgccctctaaggctgacagaacagaggtcgtgcagactctctggcggaaaacgggccattttttagtgctggtggagaatggaaccaaagctgggcacagcttgctgatggacgcccgagacttagtcctcaagggaaaagagaaatcgccactggatcctcgccccgggtttgtgtttgcaccctgcccccatgagcttccgtgtcctcaacttaccaaccttgcatgttccttctctcaggcctatcatccgatccccttctcctggaacaagaagcctaaagaagagaagtttagcatggtgattctagcgcgaggatccccagaggaggcccaccggtggcccaggataacacagcccgttcttaaacgcccccggcatgtacattgtcatctgtgctgtccggatggccacatgcagcacgccgtgctgaccgccagacgccacggccgctatgggggttgcgatcagaatcagtgggatgttgctgggtcatgcagccccagacagcatctattcccccaagggtttgtctcgctatgcccgtgccagctgctgggtcgatcgtttacatgtgcctactcagtctgtgtctcaagcatttatggctccgggtcactgtag

SEQ ID NO: 29381 - DNA, 1437 bp, Artificial Sequence
  derived and/or modified sequence
atggccgctgctctgaagtgcttactgacactagggaggtggtgtcctggcttgggtgttgcaccacaagctcgggcactcgcagctttggtgcccggtgtgactcaagtggataacaaatcaggattcttgcagaaaaggccacaccggcagcaccccggaattctcaagctcccccatgtccggctccctcaggcactcgccaacggagcgcaattattgctcctgggatctgcaggtccaacgatggaaaaccaggttcaaacgcttacatcctacctgtggagccggcatctgccagttgagcccgaagagctgcaacgaagagccagacacctggagaagaaatttctcgaaaaccccgacctgagtcagacagaagaaaaactgaggggggctgtgctccatgccctgcgcaagaccacttatcattggcaggagcttagttacacagaagggcttagcttagtgtatatggctgcccgacttgatggtgggtttgctgcggtgtctcgggcatttcacgaaattagagcacgcaacccagcattccagccgcaaactttaatggatttcggcagcggcactgggagcgtgacctgggctgcccattctatttggggtcagtccctgagagagtacatgtgtgtggatcgtagcgccgcaatgctcgtcttggccgagaagctgctgaaaggcggaagcgagtctggggaaccgtatatccctggcgttttcttccgtcagtttctccctgtctcccctaaggtacagtttgacgttgtggtcagcgctttttctttgagcgagctccccagtaaagccgataggactgaggtcgtgcagacattgtggaggaagacaggacacttcctggtgctcgtcgaaaacggtacgaaggccggtcacagcctcctgatggacgccagagacttagtactgaaagggaaagagaaatctcctcttgaccctaggcccggttttgtgttcgctccatgtccacacgagttgccttgcccacaactcacaaacttggcctgctctttcagccaggcctaccaccccatcccgttttcttggaacaagaagccgaaagaagaaaaattctccatggtcatcttagcccgtgggagtcccgaggaagcccatcgatggccaaggatcacccagcccgtcctgaagagaccccgtcacgtgcattgtcacctgtgttgccccgacggccatatgcaacatgccgtgctcacagccaggaggcatggacgatacggagggtgcgaccagaaccagtgggacgttgccggaagctgctctcctcgccagcatttattcccccaggggttcgtatctttgtgcccctgtcaactgctgggccgttctttcacttgcgcttattctgtttgcgtctcatctatctatggaagcggttccctgtag

SEQ ID NO: 29382 - DNA, 1202 bp, Artificial Sequence
  derived and/or modified sequence
gtttccggttcgcctccggagccatggcggcggcactgaagtgtctactgacattaggaagatggtgccccggccttggagtggctccccaggcccgggtgagtgcctacattccctgctgtcggagagactctggatctgcagagacatctccgcgcagaggaggagcgctcctggcagcccccgccctagcgattgccagcaactttcctttctgccaggaaatcaacctacctttctctgcctgcaggcgctcgccgccttagtacccggagtgacccaggtagataacaagtccggtttcctgcagaagaggcctcatcgccagcaccctggcatcctaaagctgccgcacgtgcggctgccacaggcactggctaacggtgcccagttattgctacttgggagcgctgggcccactatggagaatcaggtgcaaacactgaccagttatctctggagcagacatttgcctgtagagccagaggagttgcaaagacgggctaggcatcttgagaaaaaattcctggaaaacccaggtcctgacttccagtccttgttctcaccacagacttatctcagacagaggagaaacttcgtggagcagtgctacacgcactacgtaaaactacctaccattggcaagaactgagctacactgagggactgagcctggtgtatatggcagcaagactggatggtggctttgcagcagtctccagagcattccatgagatccgggctcgaaatccagcatttcagccacaaactttgatggactttggctcaggtactggttctgtcacctggtgagtaactttcttcagccctatcttggtcaattttagctctagaaagccatacttacaccactccaaaattaacagactggaaaaccagagggagaataggcaagttgggaatctataatgtttcttccatcagattaggcaaggcagaagaaggtatatggattggggccagaacttaaaagaaatgtcaagtaaaaaaaggcgcatgtgtagaaaaattaaaaagaaaaggaattatcaatcaaagttgtttttgcctacaaatagtattttgagtctaccttttttttttcttaggagttgtaaataaaacaagaaaataacactattagttattttattactaactatacaactactttaacataacactctcttttcccaggggtg

SEQ ID NO: 29383 - protein, 340 aa, Artificial Sequence
  derived and/or modified sequence
MRLLERMRKDWFMVGIVLAIAGAKLEPSIGVNGGPLKPEITVSYIAVATIFFNSGLSLKTEELTSALVHLKLHLFIQIFTLAFFPATIWLFLQLLSITPINEWLLKGLQTVGCMPPPVSSAVILTKAVGGNEAAAIFNSAFGSFLGIVITPLLLLLFLGSSSSVPFTSIFSQLFMTVVVPLIIGQIVRRYIKDWLERKKPPFGAISSSVLLMIIYTTFCDTFSNPNIDLDKFSLVLILFIIFSIQLSFMLLTFIFSTRNNSGFTPADTVAIIFCSTHKSLTLGIPMLKIVFAGHEHLSLISVPLLIYHPAQILLGSVLVPTIKSWMVSRQKGVKLTRPTV

SEQ ID NO: 29384 - DNA, 1023 bp, Artificial Sequence
  derived and/or modified sequence
atgagactgctggagagaatgagaaaggactggttcatggtgggcatcgtgctggccatcgccggcgccaagctggagcccagcatcggcgtgaacggcggccccctgaagcccgagatcaccgtgagctacatcgccgtggccaccatcttcttcaacagcggcctgagcctgaagaccgaggagctgaccagcgccctggtgcacctgaagctgcacctgttcatccagatcttcaccctggccttcttccccgccaccatctggctgttcctgcagctgctgagcatcacccccatcaacgagtggctgctgaagggcctgcagaccgtgggctgcatgcccccccccgtgagcagcgccgtgatcctgaccaaggccgtgggcggcaacgaggccgccgccatcttcaacagcgccttcggcagcttcctgggcatcgtgatcacccccctgctgctgctgctgttcctgggcagcagcagcagcgtgcccttcaccagcatcttcagccagctgttcatgaccgtggtggtgcccctgatcatcggccagatcgtgagaagatacatcaaggactggctggagagaaagaagccccccttcggcgccatcagcagcagcgtgctgctgatgatcatctacaccaccttctgcgacaccttcagcaaccccaacatcgacctggacaagttcagcctggtgctgatcctgttcatcatcttcagcatccagctgagcttcatgctgctgaccttcatcttcagcaccagaaacaacagcggcttcacccccgccgacaccgtggccatcatcttctgcagcacccacaagagcctgaccctgggcatccccatgctgaagatcgtgttcgccggccacgagcacctgagcctgatcagcgtgcccctgctgatctaccaccccgcccagatcctgctgggcagcgtgctggtgcccaccatcaagagctggatggtgagcagacagaagggcgtgaagctgaccagacccaccgtgtag

SEQ ID NO: 29385 - DNA, 1023 bp, Artificial Sequence
  derived and/or modified sequence
atgcgtctcctagaaagaatgcgcaaggactggtttatggtgggcatcgtgttagccattgccggagccaagcttgaaccaagtattggtgtcaatggcggcccccttaaacccgaaatcaccgtcagttacatcgcagtggccaccatctttttcaattcaggcctcagcttgaaaaccgaggaactgacctctgctctggtgcacctgaaactgcacctattcattcagatcttcacactggcttttttcccggctaccatctggctcttcctccagctgttgtccataacacctatcaatgagtggttgcttaagggcttacagacagtcggttgtatgcctccgcccgtttcctccgctgtgatacttaccaaggcggtgggcggcaatgaagccgcggcaatcttcaactccgccttcggaagctttctggggatcgtcataacccctctactgcttctacttttcctagggagctcatcctcggtcccatttacctctatattctctcaactgttcatgacagttgtcgtgccgctgatcatcggccagattgtgcgtcggtatattaaagattggctggagagaaagaaacctccgttcggagccattagcagcagtgtgttactgatgataatttacactactttctgtgatacttttagtaaccccaacatagacctcgataagttctctctggtactcatactattcataatcttctccatccagttgtcatttatgttgctaaccttcattttcagtacgcgaaataattctggctttactcctgccgacaccgtggctatcattttctgttcaacccacaagtctctaacattggggattcctatgctgaaaatcgtgttcgctggtcatgagcacctgtctctgatttccgtgcccctgctcatctatcaccccgcccagatactgctgggcagtgtactcgtccccactatcaaaagttggatggtcagtcgtcagaaaggggttaagctgaccagacctaccgtatag

SEQ ID NO: 29386 - DNA, 1023 bp, Artificial Sequence
  derived and/or modified sequence
atgaggctgctggagaggatgaggaaggactggttcatggtgggcatcgtgctggccatcgccggggccaagctggagcccagcattggagtgaatggaggccccctgaagccagagatcaccgtgtcctacatcgctgtggccaccatcttcttcaacagcggcctgagcctgaagacagaggagctgaccagcgccctggtgcacctgaagctgcacctgttcatccagatcttcaccctggccttcttccctgccaccatctggctgttcctgcagctgctgagcatcacccccatcaatgagtggctgctgaagggcctgcagacagtgggctgcatgcctcctcctgtgagcagcgctgtgatcctgaccaaggctgtgggcggcaatgaagctgctgccatcttcaacagcgccttcggcagcttcctgggcatcgtcatcacccccctgctgctgctgctcttcctgggcagcagcagctctgtgcccttcaccagcatcttcagccagctgttcatgacagtggtggtgcccctcatcatcggccagatcgtgcggcgctacatcaaggactggctggagaggaagaagcccccatttggagccatcagcagctctgtgctgctgatgatcatctacaccaccttctgtgacaccttcagcaaccccaacatcgacctggacaagttcagcctggtgctgatcctcttcatcatcttcagcatccagctgtccttcatgctgctgaccttcatcttcagcaccaggaacaacagcggcttcaccccagctgacacagtggccatcatcttctgcagcacccacaagagcctgaccctgggcatccccatgctgaagatcgtgtttgctggccacgagcacctgagcctcatctctgtgcccctgctgatctaccacccagcccagatcctgctgggctctgtgctggtgcccaccatcaagtcctggatggtgtcccggcagaagggcgtgaagctgacccggcccaccgtgtag

SEQ ID NO: 29387 - DNA, 1023 bp, Artificial Sequence
  derived and/or modified sequence
atgcggctgctggagcggatgcggaaggactggttcatggtgggcattgtgctggccatcgccggggcaaagttagaaccaagcattggcgtgaatgggggacctctgaagcccgagataactgtctcctacatcgccgtggctaccatcttttttaatagtgggctgtccctcaagaccgaagaactgacctctgccctcgtccacctgaagttacacctcttcatccagatctttactctggccttttttcccgctacaatttggctgttcctgcagctgttgtccataacccctatcaacgagtggctcttgaaaggactgcagacagtcggttgtatgcctccaccagtttctagcgccgtcatcctgaccaaggcagtaggtggcaacgaggctgccgccatttttaacagtgcttttggaagtttccttggtatcgtgatcacccccctccttttgttgctgtttctcggctccagctccagcgtaccttttacatctatttttagtcagctgtttatgaccgtagtggttcccttaatcatcggacagatcgttcgacggtacataaaggactggcttgaacgcaagaaaccgcccttcggtgctattagtagctccgtcctactgatgatcatctacaccaccttctgcgatactttctcgaatccaaacatcgacctggataagttcagtctagtcctgattctatttataatcttcagcatccagctctcctttatgttgcttacttttatattcagtacaaggaataacagtggcttcaccccggccgacacagtggctattattttttgctcaactcacaaatccctcacgctgggaattcccatgctaaaaatcgtttttgcaggccacgagcacttgtccctgattagcgtcccacttctgatttatcacccagctcagatactcctggggtcagtgttggtccctacaatcaagagctggatggtcagtaggcagaagggggttaagcttactaggcctactgtttag

SEQ ID NO: 29388 - DNA, 1023 bp, Artificial Sequence
  derived and/or modified sequence
atgcgcctactggagaggatgcggaaggattggtttatggtggggatcgtcctggctatcgcgggagccaagctagaacccagtatcggggttaacggcggacctcttaagcctgaaattaccgtatcatatatcgccgtggcgacaatcttctttaatagtggactgtcactgaagaccgaagaacttaccagcgccttggtgcatctgaaactgcacctgttcattcaaatcttcacattggccttttttcctgcaaccatttggttattcctccagctcctgtctataacacccattaacgaatggctgctgaaggggctgcagaccgtgggttgcatgcccccacctgtgtcttctgctgtgattctcaccaaagcggtggggggaaacgaggcagctgctatctttaactcagccttcggaagctttttaggcatagtcattaccccccttttgctattgctgttcctgggttccagcagctccgtgccgttcacctctattttcagccagttatttatgaccgtagtcgtgccgctcattataggtcagatcgtcagaagatacattaaagactggctggagaggaagaaaccaccattcggagctataagtagtagcgtactactgatgattatctacactacattctgcgacaccttttcaaatcccaatatcgacttggacaaatttagcctggtactgattctgtttatcattttttccattcaattgtccttcatgttgttgaccttcatctttagcactcgcaacaactcgggcttcacccctgcagacacagtggccattatattttgtagcacacataagagtctgaccctgggaattccaatgttgaaaatcgtctttgctggccacgaacacctgtcccttatctctgttcccctccttatctatcaccccgctcagattctcttgggcagcgttttagtccccactatcaaatcttggatggtctcacgccagaaaggcgtgaagctgactagaccaactgtctag

SEQ ID NO: 29389 - DNA, 1472 bp, Artificial Sequence
  derived and/or modified sequence
ttgctctgctgcatgtctggagggaccaaggaaagtgtggagacgctccaaggattaggtgatcggagcttgaaaagaaaaaaagccaaacaaataaacaaaacccacccaccctaacaaatatgaggctgctggagagaatgaggaaagactggttcatggtcggaatagtgctggcgatcgctggagctaaactggagccgtccataggggtgaatgggggaccactgaagccagaaataactgtatcctacattgctgttgcaacaatattctttaacagtggactatcattgaaaacagagtttgcagacagtaggttgcatgcctccgcctgtgtcttctgcagtgattttaaccaaggcagttggtggaaatgaggcagctgcaatatttaattcagcctttggaagttttttgggcatcgttataacacccctgctcctgctgctttttcttggttcatcttcttctgtgcctttcacatctattttttctcagctttttatgactgttgtggttcctctcatcattggacagattgtccgaagatacatcaaggattggcttgagagaaagaagcctccttttggtgctatcagcagcagtgtactcctcatgatcatctacacaacattctgtgacacgttctctaacccaaatattgacctggataaattcagccttgttctcatactgttcataatattttctatccagctgagttttatgcttttaactttcatcttttcaacaaggaataattcgggtttcacaccagcagacacagtggctatcattttctgttctacacacaaatcccttacattgggaattccgatgctgaagatcgtgtttgcaggccatgagcatctctctttaatatctgtacccttgctcatctaccacccagctcagatccttctgggaagtgtgttggtgccaacaatcaagtcttggatggtatcaaggcagaagggagtgaagctgacaaggccgacagtataacaaaggaggtggactttctgtagcaatgtatatatgtacaggattgtacatactagcaattctgaagacttgtacttgtgaatgttgcctcaatgcatattttatttttttacacaaaaatatgagatcctgtttaagtgccttaaaatgtatttgacaagagcgttatttccaaaatatgctttgttgattactgccaggggtggtacaatatttgggggttaattttgctttcctaatgcaggaatcagtcatggtaagtgacaaaaagcaaacatgctttccctgcagcacctttgtgcaatacaaccctatagtagttactgtaatgtttgaaatgaggtcacaccatcaggaaaatgcccttctgatgacagtgaaaatttccaaagtcttattcatgcatactttgatttactgtgtgattctttttttctacgactgtgacatgcctcttccttatc

SEQ ID NO: 29390 - DNA, 2798 bp, Artificial Sequence
  derived and/or modified sequence
gagactttcctgtcactggctactactactcccaaccctcctcaaagccgccggagcaacccccaggtctttactttacaatcggcaatttgacttgctctgctgcatgtctggagggaccaaggaaagtgtggagacgctccaaggattaggtgatcggagcttgaaaagaaaaaaagccaaacaaataaacaaaacccacccaccctaacaaatatgaggctgctggagagaatgaggaaagactggttcatggtcggaatagtgctggcgatcgctggagctaaactggagccgtccataggggtgaatgggggaccactgaagccagaaataactgtatcctacattgctgttgcaacaatattctttaacagtggactatcattgaaaacagaggagctgaccagtgctttggtgcatctaaaactgcatctttttattcagatctttactcttgcattcttcccagcaacaatatggctttttcttcagcttttatcaatcacacccatcaacgaatggcttttaaaaggtttgcagacagtaggttgcatgcctccgcctgtgtcttctgcagtgattttaaccaaggcagttggtggaaatgaggcagctgcaatatttaattcagcctttggaagttttttgggcatcgttataacacccctgctcctgctgctttttcttggttcatcttcttctgtgcctttcacatctattttttctcagctttttatgactgttgtggttcctctcatcattggacagattgtccgaagatacatcaaggattggcttgagagaaagaagcctccttttggtgctatcagcagcagtgtactcctcatgatcatctacacaacattctgtgacacgttctctaacccaaatattgacctggataaattcagccttgttctcatactgttcataatattttctatccagctgagttttatgcttttaactttcatcttttcaacaaggaataattcgggtttcacaccagcagacacagtggctatcattttctgttctacacacaaatcccttacattgggaattccgatgctgaagatcgtgtttgcaggccatgagcatctctctttaatatctgtacccttgctcatctaccacccagctcagatccttctgggaagtgtgttggtgccaacaatcaagtcttggatggtatcaaggcagaagggagtgaagctgacaaggccgacagtataacaaaggaggtggactttctgtagcaatgtatatatgtacaggattgtacatactagcaattctgaagacttgtacttgtgaatgttgcctcaatgcatattttatttttttacacaaaaatatgagatcctgtttaagtgccttaaaatgtatttgacaagagcgttatttccaaaatatgctttgttgattactgccaggggtggtacaatatttgggggttaattttgctttcctaatgcaggaatcagtcatggtaagtgacaaaaagcaaacatgctttccctgcagcacctttgtgcaatacaaccctatagtagttactgtaatgtttgaaatgaggtcacaccatcaggaaaatgcccttctgatgacagtgaaaatttccaaagtcttattcatgcatactttgatttactgtgtgattctttttttctacgactgtgacatgcctcttccttatcaactcagcaggggtcatagatcgaatagatgctgaaaagcgtaagatatatgcattccttgacatcatttttaaagacattccttcaaatagtttccacacagaaattcctcactcccattatgagagattgtggttatatgtcttaaatttattataagctgcttcaaagaaagggtctgaatgtttgaattatgagtgaaatcatgtgaaattttgagttaaactctgtgatttgattttcagggtctttaaaatatatcttaatatcttcttcctctttattcaataatttctgtcttgcacttacacactcataacagccaaatatgaggcacaaaaatgttacaatcagtttgaaagcagcatcaattaatggtagattctattcacattccacaacccagaccaaatttttttcctattacgcagatgtgctgagcactttccagattgcccctgttggccaaaagcagcctgttacatcctggaattaagcacacttaaggtatttgagacaatttattaatgaaaatttccttggcagatttgacaaatgttggcaatatttttttagaagttaaatcatattgctttcatgaataaatgaaaatataaaggtcatggatgcaaacaaatgttacatatacacattctgtctctccagatgaaaagaacatgcaaaaccatttaataaccaaaatatcaagtaaaattagttcccaacggggcagcagctttcaaatgagtgtccaatatttgcttctgctatagctgcaagaactgtaactggacccaagtagagaatgaagccacgtatagaactacgagaacacttttctgtgtttcccccatgccgtcctgtcacatcctcttacacgtcctctcttgatttgatagacaatattggcatcctgggtctcactgaggccgtgctatgtcctcagcagctgtttttgttgtttcgttattatgcccacaacaaaaaatcattccttagaaactcaccaagtttatctactgtgtaaatttatattattgttactaccaggtctcatcttttgtcaatgtcattgaataaatttcataagagtta

SEQ ID NO: 29391 - protein, 67 aa, Artificial Sequence
  derived and/or modified sequence
MGHQQLYWSHPRKFGQGSRSCRVCSNRHGLIRKYGLNMCRQCFRQYAKDIGFIKKDLSCLPWHCLWR

SEQ ID NO: 29392 - DNA, 204 bp, Artificial Sequence
  derived and/or modified sequence
atgggccaccaacagttgtattggtcccacccacggaagtttggccagggctcccgtagttgcagggtctgcagcaacagacacggacttatcagaaagtacggcttaaatatgtgtaggcaatgttttcgccagtatgcaaaggatatcgggttcattaaaaaggacttgtcctgtctcccatggcattgcctgtggcgatag

SEQ ID NO: 29393 - DNA, 204 bp, Artificial Sequence
  derived and/or modified sequence
atgggccaccagcagctgtactggagccaccccaggaagtttggccagggcagccgcagctgccgggtgtgcagcaacagacatggcctcatcagaaaatatggcctgaacatgtgccggcagtgcttccggcagtatgccaaggacatcggcttcatcaagaaggacctgagctgcctgccctggcactgcctgtggaggtag

SEQ ID NO: 29394 - DNA, 204 bp, Artificial Sequence
  derived and/or modified sequence
atgggccaccagcagctgtactggagccacccccggaagttcggccagggatcccggtcgtgccgagtctgttcaaataggcacggtctgataaggaaatacggactcaatatgtgtaggcagtgttttcgtcagtacgcaaaggatattgggtttatcaaaaaggacctgtcctgcctgccatggcactgcctgtggcgttag

SEQ ID NO: 29395 - DNA, 204 bp, Artificial Sequence
  derived and/or modified sequence
atgggccatcaacagctgtactggtcccaccccagaaagttcggccaggggtcaagatcatgccgggtttgctcaaataggcacggtctgatacggaagtacggcttgaatatgtgccggcagtgttttcggcagtacgcaaaggacattggatttatcaaaaaggacctgtcttgcctgccttggcattgtctatggagatag

SEQ ID NO: 29396 - DNA, 1374 bp, Artificial Sequence
  derived and/or modified sequence
cttttacctcgttgcactgctgagagcaagatgggtcaccagcagctgtactggagccacccgcgaaaattcggccagggttctcgctcttgtcgtgtctgttcaaaccggcacggtctgatccggaaatatggcctcaatatgtgccgccagtgtttccgtcagtacgcgaaggatatcggtttcattaagaaagacctgagctgtcttccttggcactgcctatggaggtgacacccatctcctccatcatggccatcctgagaccgctcgcgaagcccaagatcatcaaaaagagcaccaagttcactgggaaccagtcagactgatatgtcaaaattaagggtaactggtggaaacacagaggtattaacaacagggttcatagaaggtttgagggccagatctatgcccaacattggttatgggagaaacaaaaagacaaagcacatactgcccagtggcttctggaagttcctggtccacaacgttaaggagctggaagtactgctggtgagcaacaaatcttactgtgttgagatcactcatgatgtttcttccaagaactgcaaagccatcttggaaagagcagcccaggtggtcatcagagtcaccaatgccaatgccagcctgcacagtgcagaaagtgaatagacagtgaatgtgtttgttttattggggtttaaataaaaccaataaaactgtaaaaacaaaaacaacaaaaaccagagaccctggcttttggacagttgttcgtgtggctaatgcccccaacagttttattttttaaaattttatttatgtattgtttttgagatgaagtcttcctctgactggagtgcagtgatgcaagctcagctctctgcaacttccacctcccaggttcaagtgattcttctgtctcagcctcccaagtggctgggattacaggtgcccactaccacacctgactaatttttgtatttttgtagagatggggtttcatcctcttggccaggctggtttcgaactcctgacctcaagggatcctcccacctcagcttcccaaagtgctgggatcacaggcttgtattagttcattttcacactgctgataaagacatacctaagactgggaagaaaaataggtttattggactcacagttccatgtggctggggatgcctcacaattatggtagaaggcaaaaggcacttcttagatggcagcggcaagcaggaaatgaggaagacatgaaagcagatatcccttataaaaccatcagttctcgtgatacttactcactaccatgagaaagtatgggggaaaccgctcccatgattcagttatctcccaccgggtccctctcacaacatgtggggattatgcgagtac

SEQ ID NO: 29397 - DNA, 204 bp, Artificial Sequence
  derived and/or modified sequence
atgggccaccagcagctgtactggagccaccccagaaagttcggccagggcagcagaagctgcagagtgtgcagcaacagacacggcctgatcagaaagtacggcctgaacatgtgcagacagtgcttcagacagtacgccaaggacatcggcttcatcaagaaggacctgagctgcctgccctggcactgcctgtggagatag

SEQ ID NO: 29398 - protein, 442 aa, Artificial Sequence
  derived and/or modified sequence
MVSVNAPLGAPVESSYDTSPSEGTNLNAPNSLGVSALCAICGDRATGKHYGASSCDGCKGFFRRSVRKNHMYSCRFSRQCVVDKDKRNQCRYCRLKKCFRAGMKKEAVQNERDRISTRRSSYEDSSLPSINALLQAEVLSRQITSPVSGINGDIRAKKIASIADVCESMKEQLLVLVEWAKYIPAFCELPLDDQVALLRAHAGEHLLLGATKRSMVFKDVLLLGNDYIVPRHCPELAEMSRVSIRILDELVLPFQELQIDDNEYAYLKAIIFFDPDAKGLSDPGKIKRLRSQVQVSLEDYINDRQYDSRGRFGELLLLLPTLQSITWQMIEQIQFIKLFGMAKIDNLLQEMLLGGSPSDAPHAHHPLHPHLMQEHMGTNVIVANTMPTHLSNGQMSTPETPQPSPPGGSGSEPYKLLPGAVATIVKPLSAIPQPTITKQEVI

SEQ ID NO: 29399 - DNA, 1329 bp, Artificial Sequence
  derived and/or modified sequence
atggtgagcgttaatgcaccattaggcgcacctgtcgagagttcatatgatacatcaccatctgagggcaccaacctgaacgcccccaattcactgggggtatcagcattgtgtgccatctgcggcgatcgggccacgggaaagcactacggcgcctcttcttgcgacggctgtaaaggatttttccgccgcagcgtccgcaagaaccacatgtactcgtgcaggttcagcagacaatgcgtggttgacaaggacaagcgaaatcagtgccgatattgcagactgaagaagtgcttccgggctggaatgaagaaggaggccgttcagaacgaacgagataggatcagcactcgcaggtcgtcctatgaggactcatcgctcccctctattaatgctttgctgcaggctgaagttttgtccaggcaaatcactagccccgtcagcggcataaacggcgacatcagggcaaaaaaaatcgcttccattgcagacgtctgtgaaagcatgaaggaacagcttctggtgctggttgagtgggccaaatacataccagctttctgcgagctgcctctagacgatcaggtggccctcctgagagctcacgccggcgaacacttgctgctgggcgctacaaagcggagcatggtgttcaaggacgtcctccttctcggcaatgactacatcgtgcctcgccactgcccagagctcgctgagatgagccgtgtttcaatccgcatcctggacgagctagttctcccatttcaggagctgcagatcgacgacaatgagtatgcatatctgaaagccatcatcttttttgaccccgatgctaagggtctgtcggaccccggaaagataaaaagactgcgctctcaagtacaagtcagcttggaagattacatcaatgaccggcagtatgactcgaggggacgttttggagaactcctactcctcctgcccaccctccagtcaattacgtggcaaatgatcgaacaaattcagttcataaagctattcggaatggctaagattgacaatcttcttcaggaaatgctgttagggggaagccccagtgatgcccctcacgcccatcatcctttgcatcctcacttaatgcaggagcatatgggcaccaacgttatagttgcaaataccatgcctacacacttgagtaatggacagatgtcgactcccgaaactccgcaaccctcaccccctgggggctcaggctccgaaccctataagttgctccccggcgctgttgccaccattgttaaaccattgagcgccatacctcagcctactatcacgaagcaggaagttatatag

SEQ ID NO: 29400 - DNA, 1339 bp, Artificial Sequence
  derived and/or modified sequence
ggccatggtcagcgtgaacgcgcccctcggggctccagtggagagttcttacgacacgtccccatcagaaggcaccaacctcaacgcgcccaacagcctgggtgtcagcgccctgtgtgccatctgcggggaccgggccacgggcaaacactacggtgcctcgagctgtgacggctgcaagggcttcttccggaggagcgtgcggaagaaccacatgtactcctgcagatttagccggcagtgcgtggtggacaaagacaagaggaaccagtgccgctactgcaggctcaagaaatgcttccgggctggcatgaagaaggaagccgtccagaatgagcgggaccggatcagcactcgaaggtcaagctatgaggacagcagcctgccctccatcaatgcgctcctgcaggcggaggtcctgtcccgacagatcacctcccccgtctccgggatcaacggcgacattcgggcgaagaagattgccagcatcgcagatgtgtgtgagtccatgaaggagcagctgctggttctcgttgagtgggccaagtacatcccagctttctgcgagctccccctggacgaccaggtggccctgctcagagcccatgctggcgagcacctgctgctcggagccaccaagagatccatggtgttcaaggacgtgctgctcctaggcaatgactacattgtccctcggcactgcccggagctggcggagatgagccgggtgtccatacgcatccttgacgagctggtgctgcccttccaggagctgcagatcgatgacaatgagtatgcctacctcaaagccatcatcttctttgacccagatgccaaggggctgagcgatccagggaagatcaagcggctgcgttcccaggtgcaggtgagcttggaggactacatcaacgaccgccagtatgactcgcgtggccgctttggagagctgctgctgctgctgcccaccttgcagagcatcacctggcagatgatcgagcagatccagttcatcaagctcttcggcatggccaagattgacaacctgttgcaggagatgctgctgggagggtcccccagcgatgcaccccatgcccaccaccccctgcaccctcacctgatgcaggaacatatgggaaccaacgtcatcgttgccaacacaatgcccactcacctcagcaacggacagatgtccacccctgagaccccacagccctcaccgccaggtggctcagggtctgagccctataagctcctgccgggagccgtcgccacaatcgtcaagcccctctctgccatcccccagccgaccatcaccaagcaggaagttatctagcaagcc

SEQ ID NO: 29401 - DNA, 1329 bp, Artificial Sequence
  derived and/or modified sequence
atggtgtctgtgaatgcccccctgggcgcccctgtggagagcagctatgacaccagccccagcgagggcaccaacctgaatgcccccaacagcctgggcgtgtctgccctgtgtgccatctgtggggaccgggccaccgggaagcactacggggccagcagctgtgatggctgcaagggcttcttcagaagatctgtgaggaagaaccacatgtacagctgccgcttcagccggcagtgtgtggtggacaaggacaagaggaaccagtgccgctactgccgcctgaagaagtgcttccgggccggcatgaagaaggaggccgtgcagaatgaaagagaccgcatcagcacccggcgcagcagctatgaggacagcagcctgcccagcatcaatgccctgctgcaggccgaggtgctgagccggcagatcaccagccctgtgtctggcatcaatggagacatccgggccaagaagatcgccagcattgctgatgtgtgtgagagcatgaaggagcagctgctggtgctggtggagtgggccaagtacatcccagccttctgtgagctgcccctggatgaccaggtggccctgctgcgggcccacgccggggagcacctgctgctgggcgccaccaagaggtccatggtgttcaaggatgtgctgctgctgggcaatgactacatcgtgcccaggcactgcccagagctggccgagatgagccgggtgtccatccgcatcctggatgagctggtgctgcccttccaggagctgcagattgatgacaatgaatatgcctacctgaaggccatcatcttctttgatcctgatgccaagggcctgagtgaccccgggaagatcaagaggctgcggagccaggtgcaggtgtccctggaggactacatcaatgaccggcagtatgacagccggggccgctttggagagctgctgctgctgctgcccaccctgcagagcatcacctggcagatgattgagcagatccagttcatcaagctgtttggcatggccaagattgacaacctgctgcaggagatgctgctgggcggcagccccagtgatgccccccacgcccaccaccccctgcacccccacctgatgcaggagcacatgggcaccaacgtgattgtggccaacaccatgcccacccacctgagcaatggccagatgagcaccccagagaccccccagcccagccccccaggcggcagcggcagcgagccctacaagctgctgcccggggctgtggccaccatcgtgaagcccctgagcgccatcccccagcccaccatcaccaagcaggaggtgatctag

SEQ ID NO: 29402 - DNA, 1329 bp, Artificial Sequence
  derived and/or modified sequence
atggtgagcgtgaacgcccccctgggcgcccccgtggagagcagctacgacacctccccctctgagggcaccaatttgaatgcccccaactccctcggtgtcagtgcactatgtgcaatctgtggagatcgtgccaccggcaagcactatggggcgagcagttgcgacggctgcaaagggttcttccgccgaagcgttcgcaagaaccacatgtatagttgtcgtttcagcagacagtgtgtggttgataaagataagcgcaaccagtgccgctactgtagactgaaaaagtgcttccgggccgggatgaagaaagaggctgtgcaaaacgaacgcgatcgcatttctacaagacggtcatcctatgaggatagctccctccccagcattaacgcattgctgcaggcagaggtgctgagcagacagataacctcccctgtgtccggaattaatggtgatatccgggctaaaaaaatcgcaagtatcgctgatgtgtgtgagagcatgaaggagcagttgctggtgttagtggagtgggccaaatatatacctgccttctgcgaattgcccttggacgaccaagtggcccttttgagagcccatgcaggcgaacacctcttactcggagcgaccaagcggagcatggttttcaaggatgtgctgctactaggaaatgattacatcgtaccgagacactgtccagagttggctgagatgtctcgcgtcagcataagaattctggatgaacttgtgctcccctttcaggagctgcaaatcgatgataacgagtacgcatatctgaaggccataatattctttgaccccgatgccaagggactgtcagatccaggcaaaatcaaacgcttgcgctcgcaggtccaggtgtcactggaggactacattaatgaccgccagtacgattcaagaggtagatttggggagctgctgttgctactgcctacactgcagtctatcacatggcagatgatcgaacagatccaattcattaagctgttcggcatggccaaaatagacaacctgctccaagaaatgctattgggtggtagtccctcagacgcaccacacgcgcaccacccactgcacccgcaccttatgcaggaacacatggggaccaatgtcattgttgccaatactatgcccacacatctgagtaacggacagatgtctaccccggagaccccacagcccagccctccgggcggatccgggagcgagccttacaaactcctgcccggggcggttgccactattgtgaagcccctatccgcaattccgcagccaaccattacaaaacaggaggtgatttag

SEQ ID NO: 29403 - DNA, 1329 bp, Artificial Sequence
  derived and/or modified sequence
atggttagcgtaaacgcacctctcggcgcacccgttgagtcttcctacgatacttcccccagcgagggtaccaatctgaatgccccaaattcgttgggggtcagtgccctgtgcgcgatatgtggggatcgcgcaacagggaagcactacggggcatcttcttgtgatggatgtaaagggttttttagaagatcagtgagaaagaaccatatgtatagttgccgcttctctcggcagtgcgtggtggacaaagataaacggaatcaatgcagatattgccggctgaaaaagtgctttcgagccggaatgaaaaaagaagctgtgcagaatgaaagagatcgtattagcacacgtagaagttcttatgaggattcctcactgccatcaattaatgcactgttacaggcagaggtcctctcaagacagattacaagtccagtgtctggcatcaatggtgacattcgagcgaaaaagatcgcctcaatcgccgatgtttgcgaaagcatgaaggaacagcttctggtgttagtggagtgggccaaatacatcccagcgttctgtgagttgccacttgacgaccaggtggcactcttgagggctcatgcgggtgaacatctcttgttgggcgctacgaaaaggtctatggtctttaaggacgtcctactcctggggaatgactacattgtaccacgccattgcccagagctggcagaaatgagccgcgtgtccatccggattctcgacgaactggtgcttccattccaggagctgcagatcgacgacaatgagtacgcgtatttaaaggccattatctttttcgaccccgacgcgaagggcctctccgatcctgggaaaattaagcgtctaaggagccaggtccaggtatcccttgaagactatatcaacgatcggcagtacgattcgcggggacgcttcggagagctgctgttattgctgccgacattgcagagcatcacctggcaaatgatagagcaaatccagtttattaagctgtttggaatggccaaaatcgacaatctgctgcaagagatgctgctggggggatcacccagcgatgcaccgcatgcccaccacccactgcatccccatctgatgcaggagcatatggggaccaatgtgatcgtagctaacaccatgccaacccatctgagtaacggtcagatgagcactccagagaccccacagcctagccctcctggaggctctggatcagaaccctacaaacttctccccggtgccgtcgcaacaattgtcaagccgctctccgccataccacagcctactattacgaagcaagaagtcatttag

SEQ ID NO: 29404 - DNA, 1329 bp, Artificial Sequence
  derived and/or modified sequence
atggtgagcgtgaacgcccccctgggcgcccccgtggagagcagctacgacaccagccccagcgagggcaccaacctgaacgcccccaacagcctgggcgtgagcgccctgtgcgccatctgcggcgacagagccaccggcaagcactacggcgccagcagctgcgacggctgcaagggcttcttcagaagaagcgtgagaaagaaccacatgtacagctgcagattcagcagacagtgcgtggtggacaaggacaagagaaaccagtgcagatactgcagactgaagaagtgcttcagagccggcatgaagaaggaggccgtgcagaacgagagagacagaatcagcaccagaagaagcagctacgaggacagcagcctgcccagcatcaacgccctgctgcaggccgaggtgctgagcagacagatcaccagccccgtgagcggcatcaacggcgacatcagagccaagaagatcgccagcatcgccgacgtgtgcgagagcatgaaggagcagctgctggtgctggtggagtgggccaagtacatccccgccttctgcgagctgcccctggacgaccaggtggccctgctgagagcccacgccggcgagcacctgctgctgggcgccaccaagagaagcatggtgttcaaggacgtgctgctgctgggcaacgactacatcgtgcccagacactgccccgagctggccgagatgagcagagtgagcatcagaatcctggacgagctggtgctgcccttccaggagctgcagatcgacgacaacgagtacgcctacctgaaggccatcatcttcttcgaccccgacgccaagggcctgagcgaccccggcaagatcaagagactgagaagccaggtgcaggtgagcctggaggactacatcaacgacagacagtacgacagcagaggcagattcggcgagctgctgctgctgctgcccaccctgcagagcatcacctggcagatgatcgagcagatccagttcatcaagctgttcggcatggccaagatcgacaacctgctgcaggagatgctgctgggcggcagccccagcgacgccccccacgcccaccaccccctgcacccccacctgatgcaggagcacatgggcaccaacgtgatcgtggccaacaccatgcccacccacctgagcaacggccagatgagcacccccgagaccccccagcccagcccccccggcggcagcggcagcgagccctacaagctgctgcccggcgccgtggccaccatcgtgaagcccctgagcgccatcccccagcccaccatcaccaagcaggaggtgatctag

SEQ ID NO: 29405 - protein, 158 aa, Artificial Sequence
  derived and/or modified sequence
MAFMVKTMVGGQLKNLTGSLGGGEDKGDGDKSAAEAQGMSREEYEEYQKQLVEEKMERDAQFTQRKAERATLRSHFRDKYRLPKNETDESQIQMAGGDVELPRELAKMIEEDTEEEEEKASVLGQLASLPGLNLGSLKDKAQATLGDLKQSAEKCHVM

SEQ ID NO: 29406 - DNA, 2083 bp, Artificial Sequence
  derived and/or modified sequence
gggcgggcccgggcgggggcgggcggcgggcggtgccaagcgtggggcgcgggcccgcggcgggagctgtccgcgaaacctagtgctgaagtaggcgcggacgtgcccggtgcctggcgcgtggtagcaggcgcccggtgccccggccggcgaagaccatggcgttcatggtgaagaccatggtgggcggccagctgaagaacctcactgggagcctgggaggcggcgaggataagggagatggggacaagtcggcagccgaagctcagggcatgagccgggaggagtacgaggagtatcagaagcaactcgtggaagagaagatggagcgggatgcacagttcacacagaggaaggcagagcgggccacactgcggagccacttccgagacaaataccggctacccaagaacgagacagatgagagccagatccagatggcaggtggagacgtggagctgccccgggagctggccaagatgatcgaggaggacacagaggaggaggaggagaaggcctcagtccttgggcagctggccagccttcctggcttgaacctgggctcactcaaggacaaggcccaggccacactgggggatctcaagcaatcagctgagaagtgtcacgtcatgtgaccacttccccggggttacccactgggctgggcccccatgagggctaagagtgtgtcaacttccagggacccatactccatttggggctttgtttcccttgccccatcctagttccaagacctttcccatccatgccccaagcctatcttctggtttcttcctctccgctgggagtaaagtccccatcttcactctacccttcaggaccctccccaccagctcagcctgtggaggcctcccaagattgtaggaataggcccatccctctctggccatggccccaagttcctgcacacaggagcacccacagagagacacacacaggacacaaaacccctggcacgttcagagacagaagccacagatacatcccggcacagacagacacacacgaggccagctcccttgcgtgtccagcccctccagacaccaccactcagaaactctgagagagagcatgggcagacaccctcagcagacaggaggcctgagttccagtctccacctttattgttcttgaaagcccctgctctctctgagccttatttcatcatctgtaaaatgggaatgtcctgaatgacttctaaggctctttctggcttgaactgtcagagccaagcccacatccctccttgggcagggcagcagctgctgccacagcctccagcggctgccactgtgggctctgggagccggagcgatgctgtgtgagaggcagagtgccaaggatgaagctggcactgaacagtaagcggctccaggcctcctctgggcccagggcccagccaatttctgttctgttcctgtagaacgctctctggattccatagctggaatctcctctcttagctcagtgaaaaataaaaatcccaaatggtgtgcctaccttcccacttcttactggcttccaggagtcttggagttcatagccccccgagcctgccttaaaggggtgtcctccaccccccacctacagcttcacaggaggggagaaggcatccagtgctaggagtagaagtgtctccagctctgttctcttggggccctgggtgaaggtggggtctggggcttatgaaataggtctgggctttgaggaggatggagcagcctcattatgtggggaagatggggcctctggggcgtcactgagaccacaggtggggccggggctggaccgcagctgtcttgggtgcctgtgcctacacccctcctcaccctagagacggaagatgtgcaaaaagaaagaaggaagggcaactgcattccagccccacactgtgatgactttgagcctgtcctttccctccttgagcctgtcttgcttgtcccctgtaaaatgaacagtccccctctcccccaaatagtaataatacatgtttcaaagggtgaccatttataaagcatatgacaaaccatatcaataaatgtaactcattcttttaaaaaaa

SEQ ID NO: 29407 - DNA, 477 bp, Artificial Sequence
  derived and/or modified sequence
atggccttcatggtgaagaccatggtgggcggccagctgaagaacctgaccggcagcctgggcggcggcgaggacaagggcgacggcgacaagagcgccgccgaggcccagggcatgagcagagaggagtacgaggagtaccagaagcagctggtggaggagaagatggagagagacgcccagttcacccagagaaaggccgagagagccaccctgagaagccacttcagagacaagtacagactgcccaagaacgagaccgacgagagccagatccagatggccggcggcgacgtggagctgcccagagagctggccaagatgatcgaggaggacaccgaggaggaggaggagaaggccagcgtgctgggccagctggccagcctgcccggcctgaacctgggcagcctgaaggacaaggcccaggccaccctgggcgacctgaagcagagcgccgagaagtgccacgtgatgtag

SEQ ID NO: 29408 - DNA, 477 bp, Artificial Sequence
  derived and/or modified sequence
atggcctttatggttaagactatggtggggggccaattgaagaatctcacgggcagcctgggtggcggagaagacaagggagatggcgacaaatcagcggcagaagctcagggcatgagccgagaagaatatgaagagtaccaaaaacagctggtggaggagaagatggaacgcgatgcccagtttacccagcgcaaagctgaacgggctaccttgagatcacatttccgggataaataccgcctacctaagaacgaaactgatgaatcccaaatacagatggccgggggcgatgttgagctccccagagaactagctaagatgatcgaggaagataccgaggaagaagaggagaaggcatccgtgctcggccaactggcctccctgcctggcctcaatctgggctcccttaaggacaaggcacaggcaacgctaggagatctgaagcagagcgctgaaaagtgtcacgtgatgtag

SEQ ID NO: 29409 - DNA, 477 bp, Artificial Sequence
  derived and/or modified sequence
atggccttcatggtgaagaccatggtgggcggccagctgaagaacctgaccggcagcctgggcggcggggaggacaagggagatggagacaagtctgctgctgaggcccagggcatgagccgggaggagtatgaggagtaccagaagcagctggtggaggagaagatggagagagatgcccagttcacccagaggaaggccgagcgggccaccctgcggagccacttccgggacaagtaccgcctgcccaagaatgaaacagatgagagccagatccagatggctggaggagatgtggagctgccccgggagctggccaagatgattgaggaggacacagaggaggaggaggagaaggcctctgtgctgggccagctggccagcctgcccggcctgaacctgggcagcctgaaggacaaggcccaggccaccctgggggacctgaagcagagcgctgagaagtgccacgtgatgtag

SEQ ID NO: 29410 - DNA, 477 bp, Artificial Sequence
  derived and/or modified sequence
atggccttcatggtgaagaccatggtgggcggccagctgaagaacctaactgggtcccttgggggtggtgaagataagggagatggcgacaagtctgcagcagaagcccagggcatgagcagagaggaatacgaggagtatcagaagcaacttgtcgaagaaaaaatggaaagagacgcacaattcactcagaggaaagccgaacgggccacattgcggtcccattttagagataagtatcgtctcccaaaaaacgagactgatgagtctcagatccagatggctggcggagatgttgaactgccaagagaattggctaagatgatcgaagaggacactgaggaggaagaggagaaggcctcagtgctgggccagcttgctagcctgcctggactgaatctgggctccctgaaggataaagcacaagcgactctgggcgatctgaagcagtcagccgagaagtgccatgttatgtag

SEQ ID NO: 29411 - DNA, 477 bp, Artificial Sequence
  derived and/or modified sequence
atggccttcatggttaagaccatggtgggcggacagttaaagaacctgacgggatcattgggagggggagaagataaaggcgatggcgacaagagcgctgctgaagcgcaggggatgagtagagaagagtatgaagagtatcagaaacagctggttgaagaaaagatggagcgggacgcccaattcacccagcgtaaggccgagagagcaaccctgaggtctcacttccgtgacaaatacaggctccccaagaacgagacagacgaatcccagattcagatggccggaggagacgtagaactgccacgggagctggctaaaatgattgaggaggacacagaggaggaagaagagaaggcatcagttctcggccagttagctagcctgcctgggctgaacttaggaagcctgaaagataaggctcaagcgacactgggagacctcaagcagtcagccgagaagtgccatgtgatgtag

SEQ ID NO: 29412 - protein, 951 aa, Artificial Sequence
  derived and/or modified sequence
MTDSKYFTTNKKGEIFELKAELNNEKKEKRKEAVKKVIAAMTVGKDVSSLFPDVVNCMQTDNLELKKLVYLYLMNYAKSQPDMAIMAVNSFVKDCEDPNPLIRALAVRTMGCIRVDKITEYLCEPLRKCLKDEDPYVRKTAAVCVAKLHDINAQMVEDQGFLDSLRDLIADSNPMVVANAVAALSEISESHPNSNLLDLNPQNINKLLTALNECTEWGQIFILDCLSNYNPKDDREAQSICERVTPRLSHANSAVVLSAVKVLMKFLELLPKDSDYYNMLLKKLAPPLVTLLSGEPEVQYVALRNINLIVQKRPEILKQEIKVFFVKYNDPIYVKLEKLDIMIRLASQANIAQVLAELKEYATEVDVDFVRKAVRAIGRCAIKVEQSAERCVSTLLDLIQTKVNYVVQEAIVVIRDIFRKYPNKYESIIATLCENLDSLDEPDARAAMIWIVGEYAERIDNADELLESFLEGFHDESTQVQLTLLTAIVKLFLKKPSETQELVQQVLSLATQDSDNPDLRDRGYIYWRLLSTDPVTAKEVVLSEKPLISEETDLIEPTLLDELICHIGSLASVYHKPPNAFVEGSHGIHRKHLPIHHGSTDAGDSPVGTTTATNLEQPQVIPSQGDLLGDLLNLDLGPPVNVPQVSSMQMGAVDLLGGGLDSLLGSDLGGGIGGSPAVGQSFIPSSVPATFAPSPTPAVVSSGLNDLFELSTGIGMAPGGYVAPKAVWLPAVKAKGLEISGTFTHRQGHIYMEMNFTNKALQHMTDFAIQFNKNSFGVIPSTPLAIHTPLMPNQSIDVSLPLNTLGPVMKMEPLNNLQVAVKNNIDVFYFSCLIPLNVLFVEDGKMERQVFLATWKDIPNENELQFQIKECHLNADTVSSKLQNNNVYTIAKRNVEGQDMLYQSLKLTNGIWILAELRIQPGNPNYTLSLKCRAPEVSQYIYQVYDSILKN

SEQ ID NO: 29413 - protein, 688 aa, Artificial Sequence
  derived and/or modified sequence
MKFLELLPKDSDYYNMLLKKLAPPLVTLLSGEPEVQYVALRNINLIVQKRPEILKQEIKVFFVKYNDPIYVKLEKLDIMIRLASQANIAQVLAELKEYATEVDVDFVRKAVRAIGRCAIKVEQSAERCVSTLLDLIQTKVNYVVQEAIVVIRDIFRKYPNKYESIIATLCENLDSLDEPDARAAMIWIVGEYAERIDNADELLESFLEGFHDESTQVQLTLLTAIVKLFLKKPSETQELVQQVLSLATQDSDNPDLRDRGYIYWRLLSTDPVTAKEVVLSEKPLISEETDLIEPTLLDELICHIGSLASVYHKPPNAFVEGSHGIHRKHLPIHHGSTDAGDSPVGTTTATNLEQPQVIPSQGDLLGDLLNLDLGPPVNVPQVSSMQMGAVDLLGGGLDSLLGSDLGGGIGGSPAVGQSFIPSSVPATFAPSPTPAVVSSGLNDLFELSTGIGMAPGGYVAPKAVWLPAVKAKGLEISGTFTHRQGHIYMEMNFTNKALQHMTDFAIQFNKNSFGVIPSTPLAIHTPLMPNQSIDVSLPLNTLGPVMKMEPLNNLQVAVKNNIDVFYFSCLIPLNVLFVEDGKMERQVFLATWKDIPNENELQFQIKECHLNADTVSSKLQNNNVYTIAKRNVEGQDMLYQSLKLTNGIWILAELRIQPGNPNYTLSLKCRAPEVSQYIYQVYDSILKN

SEQ ID NO: 29414 - DNA, 2856 bp, Artificial Sequence
  derived and/or modified sequence
atgactgatagcaagtacttcacaactaataagaagggcgaaatctttgagttaaaggcagaactcaacaatgagaagaaggaaaaacgcaaggaggctgtgaaaaaagtgattgccgcaatgacagtgggcaaagatgtgagtagtctcttccctgatgtcgtgaattgcatgcagacagataatttggaactgaagaagctcgtctacctgtacctgatgaactacgctaagtcccaaccagatatggcaattatggccgtgaattcttttgtgaaggattgcgaggaccctaaccctttgatccgagcgttggcagttcgtacaatgggatgtatcagagttgacaagatcacagaatatctctgtgaaccgctgaggaaatgcctgaaagatgaggacccctacgtgaggaagaccgctgccgtctgtgtggcaaaactccatgacatcaacgctcagatggtggaagatcaaggcttcctggatagcctgcgcgacctcattgcagactccaacccgatggtagttgctaatgccgtggcggctctatctgagattagcgaatcccatcccaacagtaacctgctggacttgaacccccagaacatcaataagctgctcacggccctgaacgagtgtaccgagtggggtcagatcttcatccttgattgcctgtccaattacaatccgaaagatgatcgcgaggcccagtcaatttgcgagagggtgacccccagactgtcacacgctaattctgctgtagtgctctctgcagtgaaggtgcttatgaaattcctggagctcttgcctaaggatagcgactactacaatatgctgctaaaaaaacttgctccccccctcgtaactttactgtccggggaaccagaggtccagtacgtggcactcaggaacatcaatttgatagtccagaaacggcccgagattctcaagcaagagatcaaggttttttttgtaaaatataatgatcctatctacgtcaaacttgagaaacttgacatcatgatccgcctggccagtcaggctaatattgctcaggtgctggcagaactcaaagagtatgctacggaagtggatgtggatttcgtaaggaaagctgtcagagctatcggtaggtgtgctattaaggtggagcagagtgccgagaggtgcgtgagcactctgctagacctcatccagaccaaggtgaattacgtcgtccaggaggctatcgtggttattcgcgacatctttaggaagtatcctaataagtacgaatcaattatcgcaacattatgcgagaatcttgacagtctggacgaaccggacgccagggccgccatgatctggatcgtcggagagtatgccgaacggattgataacgctgatgagctgttagaatcctttctcgaaggtttccatgacgagtccacccaggttcagctcacactgttgacagctatcgttaagctgtttttgaagaagccttccgaaacacaggagctcgtccagcaggtactaagtcttgctacacaggactcagacaatcctgaccttcgtgaccgcggctatatttactggcggctgctttctaccgaccccgtgactgccaaggaagtcgtgctcagcgaaaagccgctcatcagcgaagaaaccgatcttattgagccaaccctactggatgaactcatctgtcatatcggtagtttggcgagcgtctaccacaagcctcccaacgcctttgtggagggatctcatggtatacaccgaaaacacttgcccatccaccacggttctaccgatgccggagatagccccgtcggtactaccaccgccactaatctggaacagccgcaggtcattccttcacagggcgatctgctcggcgatctcctgaatctagatctgggccccccagtgaatgtgccacaagtcagtagcatgcagatgggtgccgtggatctccttggaggcggactcgactccctcctgggttcagatctgggcgggggaatcgggggcagcccagccgttggtcagtccttcatcccctcctccgtcccagcaaccttcgcgccctcacctacccccgccgtcgtctcgtcgggcctgaacgatctgttcgaactctcgacaggtatcggcatggcgccagggggctacgtcgctcctaaggccgtctggttacctgctgttaaggcaaagggcctcgagatcagtggtacctttacacatcggcagggccatatttacatggagatgaatttcactaataaagccctgcagcatatgacagattttgctatccagttcaacaagaatagctttggcgtaataccaagcacccctctcgccatccatacgcctttgatgccaaaccagtccatagatgtctctctccccctgaacacactcggcccagtgatgaaaatggagcccctcaataatttgcaagttgccgttaagaataatatcgatgtcttttatttctcttgccttattccactgaatgtgttatttgtggaggatggcaagatggaaagacaggtgtttctggccacctggaaggacataccaaatgagaatgagcttcagttccagatcaaggaatgccatctcaatgccgacacggtaagtagcaagctgcagaataataatgtgtataccattgctaaacggaatgtggagggacaggacatgttgtatcagtcccttaagcttacaaacggcatttggatactggctgaactcaggattcagcctgggaaccccaattacaccctgtcattaaaatgtagggctcctgaggtgtctcaatatatctaccaggtttacgatagcattctcaaaaattag

SEQ ID NO: 29415 - DNA, 2856 bp, Artificial Sequence
  derived and/or modified sequence
atgactgattccaagtacttcacaacgaataagaagggggaaattttcgagttgaaagctgagctcaataatgagaagaaggagaagcgcaaagaggctgttaaaaaagtgatcgctgctatgacagtgggaaaggacgtgtcctcgttgttccccgacgtggtcaactgtatgcagactgataatttggagttaaaaaaactagtttatctctacctcatgaactatgctaagtcccagccagacatggctattatggcagtgaattcctttgtgaaggattgtgaagaccccaatccactaattcgcgctctggcagttcgaacgatgggttgtattcgcgttgataaaatcaccgaatacctgtgcgagccactgaggaaatgtctcaaggacgaagacccctatgttcgtaagaccgccgctgtctgcgttgcgaaactgcacgacatcaacgcccaaatggtcgaggatcagggatttcttgacagtctgcgagatctcatcgcggattctaaccccatggtagtggcaaacgccgtggctgccctatccgagatatcagaatcccaccctaactcaaatctcctagacctcaaccctcagaatatcaacaagctcctgaccgctttaaatgagtgtacagagtggggacaaattttcattctagactgtttatcaaactacaacccgaaagacgatagagaggcccagtccatctgcgagcgggtgacgccacgcctgtctcatgccaacagcgcggttgtgctctctgccgtaaaagtgctgatgaaattcctggagctgctgccgaaggattccgactattataatatgctcctcaagaagttagccccgcccctggtgacgctcttaagtggagaaccagaagtgcaatatgtagctcttaggaatattaatctaatcgtgcaaaagagaccagaaatccttaagcaggaaataaaggtgtttttcgttaagtacaatgacccgatttatgtcaaactcgagaaacttgacattatgattagactagcatcacaagcgaacatcgcgcaggtcctggcagagctgaaggagtacgccaccgaggtggatgtagatttcgtccggaaggccgtgcgcgctatcggacgctgtgccatcaaagtcgaacagagtgccgaacgatgcgtgagtacacttctagacctgatccagaccaaagtgaattatgtggtgcaggaagcgattgtagtaattcgcgacatcttccgaaagtaccccaataagtacgaatcaatcattgcgacgctgtgtgagaacctggactcgctggacgagccggatgcacgcgcggccatgatttggattgtcggtgaatatgcagagaggatcgataatgctgatgagctcctggaatctttcctggaagggttccacgacgagtcgacacaggtccagctgaccctgctgacagcaattgttaaactgtttctgaagaaaccatccgagactcaggaacttgtccaacaggttctcagccttgctacacaagactctgacaatcccgatctgagagaccgcggctatatttactggcgtctattatccaccgacccagtgacagccaaagaggtggtcctgagcgagaagcctctgatcagtgaggagacagacttgattgaacccaccctcttggacgagcttatctgtcacataggtagcttggcctctgtataccacaagccccctaacgccttcgtggagggttctcatggcattcacagaaagcatttgcccattcaccacggatcgactgacgctggagacagcccagtaggtaccaccactgccacaaatctcgaacagccacaggtcatcccttcacagggagatctactgggcgatcttctcaacctggacctcggtccccctgtcaacgtcccgcaggtctccagcatgcagatgggcgcggtagatcttttaggcggcggcctggatagtcttctcgggagtgatctaggaggcggcattggtggttcgcctgccgtcggacagtcgttcatcccttcgtcggtgccggccactttcgcaccttcaccaacgccagcggtggtttctagcggcctcaatgatttatttgaattaagtacaggcattggaatggctcctggtggctatgttgcgcccaaagcagtttggctgcctgccgtgaaagccaagggcctcgaaataagtggaacttttacacaccgccagggtcatatttatatggagatgaatttcaccaataaagctctgcagcacatgaccgactttgcaatacagtttaataagaacagcttcggggtgattccttctacccccctcgccatccacactcctctgatgcccaaccagtctattgacgtgtctctcccattgaatactttagggcccgtaatgaaaatggaacccctcaataatctccaggtggcagttaaaaacaatattgacgtcttctacttctcgtgtctgataccgctaaacgtgctattcgtcgaagacggaaaaatggaaagacaggtctttctcgctacatggaaggatattccaaatgaaaatgaactgcaatttcaaatcaaagagtgccacctgaacgcagatactgtgtcttcaaagctacagaataataatgtatacaccatagctaagcggaacgtggagggtcaagacatgctgtatcaaagcctcaagctaacaaacggtatatggattttggctgagctaaggatccagcctgggaatccgaactatactctgtcattgaagtgcagggcccctgaggtgtctcagtacatctatcaagtgtacgacagcatcctgaagaactag

SEQ ID NO: 29416 - DNA, 2067 bp, Artificial Sequence
  derived and/or modified sequence
atgaagtttttggagctcctacccaaagatagcgattactacaacatgctgctgaaaaaacttgctccacctttggtcactctcctcagtggagagcccgaggtgcaatatgttgcgttgaggaacataaatctcatagtccaaaagagaccggagatcctcaaacaggaaataaaggtgttttttgtgaagtataatgatcctatctatgttaaactggagaaactggacataatgataaggcttgcctcccaagccaatattgcccaggtgctggccgagttgaaggagtatgctactgaggtggatgtggactttgtgaggaaggcagtacgggcaatcgggagatgcgccatcaaagtagagcagagcgccgaaagatgtgtgtccaccctgttagaccttatccagacaaaagtgaactatgtggtgcaggaagcaatagtcgtgatccgggatattttccggaagtatccgaataagtacgaaagcattatcgccactctctgtgaaaatctggattccttggatgaaccagacgccagggctgccatgatctggatcgtgggggaatatgcagagcgcattgataatgctgatgagctgctcgagtcgtttctcgaaggctttcacgacgagagtacacaggtgcagctcactctgctcacagccatcgtaaagctgtttctcaagaagccaagtgagacccaggaacttgtgcaacaggtactgagtctggctacccaggacagcgataatcccgatctgcgggatagaggctacatctactggcggctgctgagtaccgatccggtcacggcaaaggaggttgtgctatccgagaagcccctgattagtgaggagacggacctgatcgagccaacattgctggatgagctgatctgccatatcggctctctggccagcgtgtatcataagcctccaaatgcatttgttgagggctcgcatgggatccaccgcaaacatctgccaatacaccatggatctactgacgccggtgattctcccgttggcaccacaacagccacaaatctggagcaaccgcaagtgatcccctctcagggggacctgctgggcgatctgcttaacctcgatctcggaccacccgtgaacgtccctcaggtatctagcatgcaaatgggcgcagtggatctccttgggggcggacttgacagcctgctgggaagtgatctgggggggggaatcggcgggtcaccagctgtgggtcagtcgtttataccaagcagtgttcccgcaacatttgctccgtcacctacccccgccgtggttagtagtggtcttaacgatctgttcgagctgtctactggcattggaatggcacctggaggctatgtggctcctaaggctgtgtggctcccagctgtgaaagccaaaggactcgaaatttctggcacatttacacacaggcagggtcacatttacatggaaatgaattttaccaacaaggctttacaacacatgacagacttcgctatccagtttaacaaaaacagttttggcgtgatacctagcacccccctggccattcacactcccctgatgcctaatcagtcaattgacgtgagtctacctctaaacacattaggcccagttatgaagatggagcccttgaataaccttcaggtggcagtgaaaaacaacatagatgtgttttacttctcttgcttaatacctctgaacgttctattcgtggaagacggtaagatggagcggcaggtgtttctcgctacatggaaggacattcctaacgagaatgagttgcagttccagatcaaagaatgccacctaaatgccgataccgtgtcctctaagttgcaaaataacaatgtatacaccattgcaaagcgtaacgtggaaggacaagatatgttatatcagtcactgaaactcaccaacggcatctggatattagcagaactacgtatacaaccggggaacccgaattataccttaagtcttaaatgcagggcccccgaagtcagtcagtatatctatcaagtttatgactcaatccttaaaaactag

SEQ ID NO: 29417 - DNA, 5761 bp, Artificial Sequence
  derived and/or modified sequence
gtcagagtttcctgcccaccatctttgtccctggcaaagtgggttttgcgcagtggcttagacctagaaaagaatcgtgacgggcaggaaaccattacaccaccacctgggctgtgctctccggctcccgccgccacccccgccctcgccttcgcctccgcctccggtgcacattaaagatccaaagtcatgactgactccaagtatttcacaaccaataaaaaaggagaaatatttgaactaaaagctgaactcaacaatgaaaagaaagaaaagagaaaggaggctgtgaagaaagtgattgctgctatgaccgtggggaaggatgttagttctctctttccagacgtagtgaactgtatgcagactgacaatctggaactaaagaagcttgtgtatctctacttgatgaactacgccaagagtcagccagacatggccatcatggctgtaaacagctttgtgaaggactgtgaagatcctaatcctttgattcgagccttggcagtcagaaccatggggtgcatccgggtagacaaaattacagaatatctctgtgagccgctccgcaagtgcttgaaggatgaggatccctatgttcggaaaacagcagcagtctgcgtggcaaaactccatgatatcaatgcccaaatggtggaagatcagggatttctggattctctacgggatctcatagcagattcaaatccaatggtggtggctaatgccgtagcggcattatctgaaatcagtgagtctcacccaaacagcaacttacttgatctgaacccacagaacattaataagctgctgacagccctgaatgaatgcactgaatggggccagattttcatcctggactgcctgtctaattacaaccctaaagatgatcgggaggctcagagcatctgtgagcgggtaactccccggctatcccatgccaactcagcagtggtgctttcagcggtaaaagtcctaatgaagtttctagaattgttacctaaggattctgactactacaatatgctgctgaagaagttagcccctccacttgtcactttgctgtctggggagccagaagtgcagtatgtcgccctgaggaacatcaacttaattgtccagaaaaggcctgaaatcttgaagcaggaaatcaaagtcttctttgtgaagtacaatgatcccatctatgttaaactagagaagttggacatcatgattcgtttggcatctcaagccaacattgctcaggttctggcagaactgaaagaatatgctacagaggtggatgttgactttgttcgaaaagctgtgcgggccattggacggtgtgccatcaaggtggagcaatctgcagagcgctgtgtaagcacattgcttgatctaatccagaccaaagtgaattatgtggtccaagaagcaattgttgtcatcagggacatcttccgcaaataccccaacaagtatgaaagtatcatcgccactctgtgtgagaacttagactcgctggatgagccagatgctcgagcagctatgatttggattgtgggagaatatgctgaaagaattgacaatgcagatgagttactagaaagcttcctggagggttttcacgatgaaagcacccaggtgcagctcactctgcttactgccatagtgaagctgtttctcaagaaaccatcagaaacacaggagctagtccagcaggtcttgagtttggcaacacaggattctgataatcctgaccttcgagaccggggctatatttattggcgccttctctcaactgaccctgttacagctaaagaagtagtcttgtctgagaagccactgatctctgaggagacggaccttattgagccaactctgctggatgagctaatctgccacattggttctttggcctctgtgtatcataagcctcccaatgcttttgtggaaggaagtcatggaattcatcgtaaacacttgccaattcatcatgggagcactgatgcaggtgacagccctgttggcactaccactgcaacgaacctggaacagcctcaggttatcccctctcaaggtgatcttctaggggatcttttaaaccttgacctcggtcccccagtcaatgtgccacaggtgtcctccatgcagatgggagcagtggatctcctaggaggaggactagatagtctgcttggcagtgaccttggcgggggcattggaggaagtccggcagtgggacaatccttcatcccatcatcggtgcctgcaacctttgctccttcacctacacctgctgtggtcagcagtggactgaatgacctgtttgaactctccacagggataggcatggcacctggtggatatgtggctcctaaggctgtctggctacctgcagtaaaggctaaaggcttggagatttccggaacatttactcaccgccaagggcacatctatatggaaatgaacttcaccaataaagctctgcagcacatgacagattttgcaatccagtttaacaaaaatagctttggtgtcatccccagcactcctctggccatccatacaccactgatgccaaaccagagcattgatgtctccctgcctctcaataccttgggcccagtcatgaagatggaacctctgaataacctccaggtggctgtgaaaaacaatatcgatgtcttctacttcagctgcctcatcccactcaatgtgctttttgtagaagatggcaaaatggagcgccaggtcttccttgcaacatggaaggatattcccaatgaaaatgaacttcagtttcagattaaggaatgtcatttaaatgctgacactgtttccagcaagttgcaaaacaacaatgtttatactattgccaagaggaatgtggaagggcaggacatgctgtaccaatccctgaagctcactaatggcatttggattttggccgaactacgtatccagccaggaaaccccaattacacgctgtcactgaagtgtagagctcctgaagtctctcaatacatctatcaggtctacgacagcattttgaaaaactaacaagactggtccagtacccttcaaccatgctgtgatcggtgcaagtcaagaactcttaactggaagaaattgtattgctgcgtagaatctgaacacactgaggccacctagcaaggtagtaactagtctaacctgtgctaacattagggcacaacctgttggatagttttagcttcctgtgaacatttgtaaccactgcttcagtcacctcccacctcttgccacctgctgctgctatctgtccttacttgtgggcttctccatgctgtgccaatggctggctttttctacaccctcttttgagtgtagtttggtattttgtaattgagagctcatttcaaaagcagaaaaagacaacaaatattaaagcaaggaaaagtgtaactgaaacactgcactttactgttttatacttttgtacatatgagaaatcaagggattagtgcaaccagtagaaagcattgaaatgactgtcattaaccacacagtcctggaggcagagatgcagttacctaccctagcttttgatgggttctcttacctgtagtagccttatccctggtcatttggattttcagtttgcttttttctttttttcccctccaaactccttttccttggccaagccttcatgcttccccctttccatattataatctcatttgattgctctgcagttgggaacggtgatcttcttgaatgatgtttcagtgtgcaaaaactatagagcctgtcagcaccaaagctgacagaagttataccttactcctttcctttcccctgaacaaacctgctaatcccactaattcaggaatttgagtagagatggggaacaagaacccagatgctgtcccctcaccccctctcctgtatttctcaggtccagttcaaatctaaaattctacttttagagttgaaacagagtaataacttatctaaccctcttttcctacaaaggagaaagataaaaggcacaaaggttaccgccaaggcccgtcagctgtgtagtggcaaagccgagaccgagtctcctaagtccccgtcagtgtggttttcaccacaggactgtctcttgtcgttttcccctaatgccttctcctgccttttctgtgcctagtttttggctcttcacatattccatattgattttgacgctctgtatattggcatcaggtggcagctgaatatcttttgaattactcgaaggtaaagccagatgccagaatgaaggtgtagccagtgtttcccatatgcccctggagccccacttattgaggccagcagaataggtgcagagatgaagtgagcttagagatgttgcaaatgctctttatcccttcagctctctgatctgctctttcttcatgatacttagtctgcagggcatattaagatcatcccagaggttcaggcagttcctgtcatctctgaaaagactgggggatatgaaatcttccccctaccccacttaatgcgttggatatgatttttcaaagaatgcttcatgcccaaaataccagcctgtttagcagtgttacactgtttgatctgcgggcacttgttgcattgcctggcacccaatattcagggtccatgactaagactggtcttctcagatgccctgcttaaatcaggggcacttcaggctccacaggcgtcatgttggactgagacctaactcactggactcagaggaggaatcgtggaaaacaagagcaaaactaccccacacccctatttcatgtctgaaataaccctgtttcataccagttgcaaagcttgtggggagcggtcccacaaagcactttcttaaaccttgagaatctccaagagaaaaatatttggggaaggagggaggaaatatgtcccttgcacaccacccctgaagcacatggcagtaggaaacagcataggattgtatgtgggaggtggataggtcggtgatgtgtggagcggaaaagcaggttggtaaagttcccttcttgggacttattcctggagtcagtggatacaagtagtgcagaaggttcacactgcaaatagtgttctcatctcaaagcaaactatcattccagaaggaaaagtgtgtcagggcaagcagacaacacaatttcctatcagaatatgtccctcaacccccgaaacaaggcttctctcagcctccccaccagtgatggataacagctcctattctcagctgacctgactgagccaacccatgaactcttcactccttggggaagccacctcccatcacacccctgagcagagttagggaggaattctacttcccataaaaggacctctcctgagaggcaaaacctgttgcctccaccacggcttccctcttggctcattccaagcttggccaaattggggaagtgggatggaggttgccctgcatcccccctcctctgcctgagtgtgtctttgtaatgtcagctggcatcatacaaagagcaggagaagcaaacacccagaactcttttgctggtcagagattccctgagtgtctgtcctcacccaagcctgctctgtgtctgtgttgtgaagcttgagactctggaaagaaatggggagggggggcaggggaaatgttgccctaagaatgcttctcattcctctgttcttattgggtcctgtttttcgggagggtgggggttgggggaagcttgaccttgtgtcttcgtcaataaactcacatttacacaaaatg

SEQ ID NO: 29418 - DNA, 3415 bp, Artificial Sequence
  derived and/or modified sequence
gaccggcggaggcgaggaaatcctaagagcgtgaccgttgatgatgcagggaaccgtcgggtgtgaccattgagagggaaaaggttggagaaagggtctctaccatgatgcctgtggtgcggtgagggaatcctcgggtgtggcagcaggtgcacattaaagatccaaagtcatgactgactccaagtatttcacaaccaataaaaaaggagaaatatttgaactaaaagctgaactcaacaatgaaaagaaagaaaagagaaaggaggctgtgaagaaagtgattgctgctatgaccgtggggaaggatgttagttctctctttccagacgtagtgaactgtatgcagactgacaatctggaactaaagaagcttgtgtatctctacttgatgaactacgccaagagtcagccagacatggccatcatggctgtaaacagctttgtgaaggactgtgaagatcctaatcctttgattcgagccttggcagtcagaaccatggggtgcatccgggtagacaaaattacagaatatctctgtgagccgctccgcaagtgcttgaaggatgaggatccctatgttcggaaaacagcagcagtctgcgtggcaaaactccatgatatcaatgcccaaatggtggaagatcagggatttctggattctctacgggatctcatagcagattcaaatccaatggtggtggctaatgccgtagcggcattatctgaaatcagtgagtctcacccaaacagcaacttacttgatctgaacccacagaacattaataagctgctgacagccctgaatgaatgcactgaatggggccagattttcatcctggactgcctgtctaattacaaccctaaagatgatcgggaggctcagagcatctgtgagcgggtaactccccggctatcccatgccaactcagcagtggtgctttcagcggtaaaagtcctaatgaagtttctagaattgttacctaaggattctgactactacaatatgctgctgaagaagttagcccctccacttgtcactttgctgtctggggagccagaagtgcagtatgtcgccctgaggaacatcaacttaattgtccagaaaaggcctgaaatcttgaagcaggaaatcaaagtcttctttgtgaagtacaatgatcccatctatgttaaactagagaagttggacatcatgattcgtttggcatctcaagccaacattgctcaggttctggcagaactgaaagaatatgctacagaggtggatgttgactttgttcgaaaagctgtgcgggccattggacggtgtgccatcaaggtggagcaatctgcagagcgctgtgtaagcacattgcttgatctaatccagaccaaagtgaattatgtggtccaagaagcaattgttgtcatcagggacatcttccgcaaataccccaacaagtatgaaagtatcatcgccactctgtgtgagaacttagactcgctggatgagccagatgctcgagcagctatgatttggattgtgggagaatatgctgaaagaattgacaatgcagatgagttactagaaagcttcctggagggttttcacgatgaaagcacccaggtgcagctcactctgcttactgccatagtgaagctgtttctcaagaaaccatcagaaacacaggagctagtccagcaggtcttgagtttggcaacacaggattctgataatcctgaccttcgagaccggggctatatttattggcgccttctctcaactgaccctgttacagctaaagaagtagtcttgtctgagaagccactgatctctgaggagacggaccttattgagccaactctgctggatgagctaatctgccacattggttctttggcctctgtgtatcataagcctcccaatgcttttgtggaaggaagtcatggaattcatcgtaaacacttgccaattcatcatgggagcactgatgcaggtgacagccctgttggcactaccactgcaacgaacctggaacagcctcaggttatcccctctcaaggtgatcttctaggggatcttttaaaccttgacctcggtcccccagtcaatgtgccacaggtgtcctccatgcagatgggagcagtggatctcctaggaggaggactagatagtctgcttggcagtgaccttggcgggggcattggaggaagtccggcagtgggacaatccttcatcccatcatcggtgcctgcaacctttgctccttcacctacacctgctgtggtcagcagtggactgaatgacctgtttgaactctccacagggataggcatggcacctggtggatatgtggctcctaaggctgtctggctacctgcagtaaaggctaaaggcttggagatttccggaacatttactcaccgccaagggcacatctatatggaaatgaacttcaccaataaagctctgcagcacatgacagattttgcaatccagtttaacaaaaatagctttggtgtcatccccagcactcctctggccatccatacaccactgatgccaaaccagagcattgatgtctccctgcctctcaataccttgggcccagtcatgaagatggaacctctgaataacctccaggtggctgtgaaaaacaatatcgatgtcttctacttcagctgcctcatcccactcaatgtgctttttgtagaagatggcaaaatggagcgccaggtcttccttgcaacatggaaggatattcccaatgaaaatgaacttcagtttcagattaaggaatgtcatttaaatgctgacactgtttccagcaagttgcaaaacaacaatgtttatactattgccaagaggaatgtggaagggcaggacatgctgtaccaatccctgaagctcactaatggcatttggattttggccgaactacgtatccagccaggaaaccccaattacacgctgtcactgaagtgtagagctcctgaagtctctcaatacatctatcaggtctacgacagcattttgaaaaactaacaagactggtccagtacccttcaaccatgctgtgatcggtgcaagtcaagaactcttaactggaagaaattgtattgctgcgtagaatctgaacacactgaggccacctagcaaggtagtaactagtctaacctgtgctaacattagggcacaacctgttggatagttttagcttcctgtgaacatttgtaaccactgcttcagtcacctcccacctcttgccacctgctgctgctatctgtccttacttgtgggcttctccatgctgtgccaatggctggctttttctacaccctcttttgagtgtagtttggtattttgtaattgagagctcatttcaaaagcagaaaaagacaacaaatattaaagcaaggaaaagtgtaactg

SEQ ID NO: 29419 - DNA, 2621 bp, Artificial Sequence
  derived and/or modified sequence
attttaagttttcattgaagagtgagagaaactcggcttacggaccaggaaaactgagagtgctgcctggtggtggctaatgccgtagcggcattatctgaaatcagtgagtctcacccaaacagcaacttacttgatctgaacccacagaacattaataagctgctgacagccctgaatgaatgcactgaatggggccagattttcatcctggactgcctgtctaattacaaccctaaagatgatcgggaggctcagagcatctgtgagcgggtaactccccggctatcccatgccaactcagcagtggtgctttcagcggtaaaagtcctaatgaagtttctagaattgttacctaaggattctgactactacaatatgctgctgaagaagttagcccctccacttgtcactttgctgtctggggagccagaagtgcagtatgtcgccctgaggaacatcaacttaattgtccagaaaaggcctgaaatcttgaagcaggaaatcaaagtcttctttgtgaagtacaatgatcccatctatgttaaactagagaagttggacatcatgattcgtttggcatctcaagccaacattgctcaggttctggcagaactgaaagaatatgctacagaggtggatgttgactttgttcgaaaagctgtgcgggccattggacggtgtgccatcaaggtggagcaatctgcagagcgctgtgtaagcacattgcttgatctaatccagaccaaagtgaattatgtggtccaagaagcaattgttgtcatcagggacatcttccgcaaataccccaacaagtatgaaagtatcatcgccactctgtgtgagaacttagactcgctggatgagccagatgctcgagcagctatgatttggattgtgggagaatatgctgaaagaattgacaatgcagatgagttactagaaagcttcctggagggttttcacgatgaaagcacccaggtgcagctcactctgcttactgccatagtgaagctgtttctcaagaaaccatcagaaacacaggagctagtccagcaggtcttgagtttggcaacacaggattctgataatcctgaccttcgagaccggggctatatttattggcgccttctctcaactgaccctgttacagctaaagaagtagtcttgtctgagaagccactgatctctgaggagacggaccttattgagccaactctgctggatgagctaatctgccacattggttctttggcctctgtgtatcataagcctcccaatgcttttgtggaaggaagtcatggaattcatcgtaaacacttgccaattcatcatgggagcactgatgcaggtgacagccctgttggcactaccactgcaacgaacctggaacagcctcaggttatcccctctcaaggtgatcttctaggggatcttttaaaccttgacctcggtcccccagtcaatgtgccacaggtgtcctccatgcagatgggagcagtggatctcctaggaggaggactagatagtctgcttggcagtgaccttggcgggggcattggaggaagtccggcagtgggacaatccttcatcccatcatcggtgcctgcaacctttgctccttcacctacacctgctgtggtcagcagtggactgaatgacctgtttgaactctccacagggataggcatggcacctggtggatatgtggctcctaaggctgtctggctacctgcagtaaaggctaaaggcttggagatttccggaacatttactcaccgccaagggcacatctatatggaaatgaacttcaccaataaagctctgcagcacatgacagattttgcaatccagtttaacaaaaatagctttggtgtcatccccagcactcctctggccatccatacaccactgatgccaaaccagagcattgatgtctccctgcctctcaataccttgggcccagtcatgaagatggaacctctgaataacctccaggtggctgtgaaaaacaatatcgatgtcttctacttcagctgcctcatcccactcaatgtgctttttgtagaagatggcaaaatggagcgccaggtcttccttgcaacatggaaggatattcccaatgaaaatgaacttcagtttcagattaaggaatgtcatttaaatgctgacactgtttccagcaagttgcaaaacaacaatgtttatactattgccaagaggaatgtggaagggcaggacatgctgtaccaatccctgaagctcactaatggcatttggattttggccgaactacgtatccagccaggaaaccccaattacacgctgtcactgaagtgtagagctcctgaagtctctcaatacatctatcaggtctacgacagcattttgaaaaactaacaagactggtccagtacccttcaaccatgctgtgatcggtgcaagtcaagaactcttaactggaagaaattgtattgctgcgtagaatctgaacacactgaggccacctagcaaggtagtaactagtctaacctgtgctaacattagggcacaacctgttggatagttttagcttcctgtgaacatttgtaaccactgcttcagtcacctcccacctcttg

SEQ ID NO: 29420 - DNA, 2856 bp, Artificial Sequence
  derived and/or modified sequence
atgacagacagcaagtacttcaccaccaacaagaagggggagatctttgagctgaaggccgagctgaacaatgagaagaaggagaagaggaaggaggccgtgaagaaggtgattgctgccatgacagtgggcaaggatgtgagcagcctcttcccagatgtggtgaactgcatgcagacagacaacctggagctgaagaagctggtgtacctgtacctgatgaactatgccaagagccagcctgacatggccatcatggctgtgaacagctttgtgaaggactgtgaggaccccaaccccctcatccgggccctggccgtgaggaccatgggctgcatccgggtggacaagatcacagagtacctgtgtgagcccctgaggaagtgcctgaaggatgaggacccctacgtgaggaagacagctgctgtgtgtgtggccaagctgcatgacatcaatgcccagatggtggaggaccagggcttcctggacagcctgcgggacctgattgctgacagcaaccccatggtggtggccaatgctgtggccgccctgtctgagatcagcgagagccaccccaacagcaacctgctggacctgaacccccagaacatcaacaagctgctgacagccctgaatgaatgtacagagtggggccagatcttcatcctggactgcctgagcaactacaaccccaaggatgaccgggaggcccagagcatctgtgagcgggtgaccccccggctgagccacgccaacagcgctgtggtgctgtctgctgtgaaggtgctgatgaagttcctggagctgctgcccaaggacagcgactactacaacatgctgctgaagaagctggccccacccctggtgaccctgctgtctggagagcctgaggtgcagtatgtggccctgaggaacatcaacctgattgtgcagaagaggcctgagatcctgaagcaggagatcaaggtgttctttgtgaagtacaatgaccccatctacgtgaagctggagaagctggacatcatgatccggctggccagccaggccaacatcgcccaggtgctggccgagctgaaggagtatgccacagaggtggatgtggactttgtgaggaaggctgtgcgggccatcggccgctgtgccatcaaggtggagcagagcgctgagcgctgtgtgtccaccctgctggacctgatccagaccaaggtgaactacgtggtgcaggaggccatcgtggtgatccgggacatcttcaggaagtaccccaacaagtatgagagcatcatcgccaccctgtgtgagaacctggacagcctggatgagccagatgcccgggccgccatgatctggatcgtgggggagtatgcagagagaattgacaatgctgatgagctgctggagagcttcctggagggcttccatgatgagagcacccaggtgcagctgaccctgctgacagccatcgtgaagctgttcctgaagaagcccagcgagacccaggagctggtgcagcaggtgctgagcctggccacccaggacagcgacaacccagacctgcgggaccggggctacatctactggaggctgctgagcacagatcctgtgacagccaaggaggtggtgctgtctgagaagcccctcatcagcgaggagacagacctgattgagcccaccctgctggatgagctgatctgccacatcggcagcctggcctctgtgtaccacaagcccccaaatgcctttgtggagggcagccacggcatccacaggaagcacctgcccatccaccacggcagcacagatgctggggacagccctgtgggcaccaccacagccaccaacctggagcagccccaggtgatccccagccagggcgacctgctgggggacctgctgaacctggacctgggcccccctgtgaatgtgccccaggtgtcctccatgcagatgggcgctgtggacctgctgggcggcggcctggacagcctgctgggcagtgacctgggcggcggcatcggcggcagccctgctgtgggccagagcttcatccccagctctgtgcctgccacctttgcccccagccccaccccagctgtggtgagcagcggcctgaatgacctgtttgagctgagcacaggcatcggcatggcccctgggggctacgtggcccccaaggctgtgtggctgcctgctgtgaaggccaagggcctggagatcagcggcaccttcacccaccggcagggccacatctacatggagatgaacttcaccaacaaggccctgcagcacatgacagactttgccatccagttcaacaagaacagctttggagtcatccccagcacccccctggccatccacacccccctgatgcccaaccagagcattgatgtgtccctgcccctgaacaccctgggccctgtgatgaagatggagcccctgaacaacctgcaggtggccgtgaagaacaacattgatgtgttctacttcagctgcctgatccccctgaatgtgctgtttgtggaggatggcaagatggagcggcaggtgttcctggccacctggaaggacatccccaatgaaaatgagctgcagttccagatcaaggagtgccacctgaatgctgacacagtgagcagcaagctgcagaacaacaacgtgtacaccatcgccaagagaaatgtggagggccaggacatgctgtaccagagcctgaagctgaccaacggcatctggatcctggccgagctgcgcatccagcccggcaaccccaactacaccctgagcctgaagtgccgggcccctgaggtgtcccagtacatctaccaggtgtatgacagcatcctgaagaactag

SEQ ID NO: 29421 - DNA, 2067 bp, Artificial Sequence
  derived and/or modified sequence
atgaagttcctggagctgctgcccaaggacagcgactactacaacatgctgctgaagaagctggccccacccctggtgaccctgctgagcggggagcctgaggtgcagtatgtggccctgaggaacatcaacctgattgtgcagaagaggcctgagatcctgaagcaggagatcaaggtgttctttgtgaagtacaatgaccccatctacgtgaagctggagaagctggacatcatgatccggctggccagccaggccaacatcgcccaggtgctggccgagctgaaggagtatgccacagaggtggatgtggactttgtgaggaaggctgtgcgggccatcggccgctgtgccatcaaggtggagcagagcgctgagcgctgtgtgtccaccctgctggacctgatccagaccaaggtgaactacgtggtgcaggaggccatcgtggtgatccgggacatcttcaggaagtaccccaacaagtatgagagcatcatcgccaccctgtgtgagaacctggacagcctggatgagccagatgcccgggccgccatgatctggatcgtgggggagtatgcagagagaattgacaatgctgatgagctgctggagagcttcctggagggcttccatgatgagagcacccaggtgcagctgaccctgctgacagccatcgtgaagctgttcctgaagaagcccagcgagacccaggagctggtgcagcaggtgctgagcctggccacccaggacagcgacaacccagacctgcgggaccggggctacatctactggaggctgctgagcacagatcctgtgacagccaaggaggtggtgctgtctgagaagcccctcatcagcgaggagacagacctgattgagcccaccctgctggatgagctgatctgccacatcggcagcctggcctctgtgtaccacaagcccccaaatgcctttgtggagggcagccacggcatccacaggaagcacctgcccatccaccacggcagcacagatgctggggacagccctgtgggcaccaccacagccaccaacctggagcagccccaggtgatccccagccagggcgacctgctgggggacctgctgaacctggacctgggcccccctgtgaatgtgccccaggtgtcctccatgcagatgggcgctgtggacctgctgggcggcggcctggacagcctgctgggcagtgacctgggcggcggcattggaggcagccctgctgtgggccagagcttcatccccagctctgtgcctgccacctttgcccccagccccaccccagctgtggtgagcagcggcctgaatgacctgtttgagctgagcactggaattggcatggcccctgggggctacgtggcccccaaggctgtgtggctgcctgctgtgaaggccaagggcctggagatcagcggcaccttcacccaccggcagggccacatctacatggagatgaacttcaccaacaaggccctgcagcacatgacagactttgccatccagttcaacaagaacagctttggagtcatccccagcacccccctggccatccacacccccctgatgcccaaccagagcattgatgtgtccctgcccctgaacaccctgggccctgtgatgaagatggagcccctgaacaacctgcaggtggccgtgaagaacaacattgatgtgttctacttcagctgcctgatccccctgaatgtgctgtttgtggaggatggcaagatggagcggcaggtgttcctggccacctggaaggacatccccaatgaaaatgagctgcagttccagatcaaggagtgccacctgaatgctgacacagtgagcagcaagctgcagaacaacaacgtgtacaccatcgccaagagaaatgtggagggccaggacatgctgtaccagagcctgaagctgaccaacggcatctggatcctggccgagctgcgcatccagcccggcaaccccaactacaccctgagcctgaagtgccgggcccctgaggtgtcccagtacatctaccaggtgtatgacagcatcctgaagaactag

SEQ ID NO: 29422 - DNA, 2856 bp, Artificial Sequence
  derived and/or modified sequence
atgaccgacagcaagtacttcaccaccaacaagaagggcgagatcttcgaactgaaagcagagcttaacaatgaaaagaaggagaagaggaaagaagctgtgaagaaggttatcgcagcgatgacagtggggaaagacgtcagctctctcttccccgacgtggtcaactgtatgcaaacggataacctggagctgaagaaattggtctatctgtacctgatgaattatgcaaagtctcagcccgacatggctatcatggccgtgaattcgtttgtcaaagattgcgaggaccctaatcctttgatccgcgcactggctgttagaacaatggggtgcatacgggttgacaaaatcaccgaatacctgtgcgaacctctgcggaaatgtctgaaagatgaggatccatatgtcaggaagacagccgctgtttgcgtcgcaaaactgcatgacattaatgcccagatggtcgaggaccaaggatttctggattccctccgagacctcattgcagactccaaccctatggtggttgcgaatgcagtcgctgccttatctgaaatatcggagtcccaccccaattctaatctactggacctcaatcctcagaatataaataaattgctgaccgctcttaacgaatgcacggagtggggacaaatctttatcctggattgtctgtcgaattataaccctaaggatgaccgggaagctcagagcatctgcgagcgagtgactccccgccttagccatgcaaatagtgcagttgtgctttcagccgttaaggtgctgatgaaattcttagagttacttccaaaagactccgactattacaacatgttgttgaaaaagttagccccacctctggtgaccttactatcaggtgagccagaggtgcagtacgttgctctgaggaatattaacctcatcgtgcagaagaggcctgaaattctcaagcaggagatcaaagtgtttttcgtcaaatacaatgaccctatatatgtgaagctggagaaactggacattatgataaggttagcctctcaagccaacatagcccaggtcttagccgaactcaaggagtatgctaccgaagtggacgtagatttcgtaagaaaggctgtgcgcgcaataggtcgctgtgccattaaggtggaacagtccgcagaacgctgcgtgagtacgctgctggatttaattcagacaaaggtaaactatgtggtgcaggaagcaatcgttgttatacgggatatttttcggaagtaccccaacaaatatgaatctattatcgctaccctttgtgaaaatctggattcccttgatgagccagatgctagggccgccatgatctggattgtgggggaatacgccgagaggatcgacaacgccgatgaactgctggaaagctttcttgaaggctttcacgatgaaagcactcaggttcagctaactctgttaacagccatcgttaagctgttcctgaaaaaaccgagcgaaacccaggaactggttcaacaggtgctaagcttggcgacacaggactcggataatccagacttacgagatcgtggatatatttattggcggctgctttccaccgaccccgtcaccgccaaggaagttgttctgagcgaaaagccgctgatctcagaggagacagatttaatagagcctacactgctcgacgaactcatctgccacattggatccctggcttccgtgtatcacaagcccccaaacgcctttgtggaggggagccatggcattcaccggaaacatctacccattcaccacggttctaccgacgcaggtgactcacccgtgggaaccactaccgccacaaatcttgagcagccccaggtaatcccttcacagggggacttgctgggggatctactgaatctggacctcggaccccctgtcaacgtgccacaggttagttccatgcagatgggagctgtggatcttctaggcggtggccttgactcattgctgggatcggacctggggggtgggatcggcggatcccccgcggtaggccagagtttcattccatcttctgtgccggccacttttgccccttccccaactcccgctgtggtgagcagcggtctgaatgacctgttcgaattatcaaccgggattggcatggcccccggcgggtacgtggccccaaaggcggtctggctcccagccgtcaaagctaagggattggagatatctggaacctttactcataggcaaggccatatatacatggaaatgaacttcactaacaaagctctacagcatatgacggattttgccatccaatttaataagaatagctttggggttattcctagcaccccactggccatacacacccctctaatgcctaaccaaagtatcgatgtgagcttacccctgaacacactgggccccgttatgaagatggagcccttaaataacctgcaggtggccgtgaagaacaatatcgacgttttctactttagctgcctgattccacttaacgtcctgttcgtggaagatgggaaaatggagcggcaagtattcctagccacttggaaagacatccccaacgaaaacgagttgcagtttcagattaaggagtgccacctgaatgctgacacagtgtcatcaaagcttcagaataataacgtatataccattgccaaacgcaatgttgaggggcaggacatgctttatcagtccctcaagctgacaaacggaatatggattctggcagagttaaggatccagccaggcaatcctaattacacactgagtctcaagtgcagagccccggaggtgtcccagtacatatatcaggtttatgatagtatacttaagaactag

SEQ ID NO: 29423 - DNA, 2856 bp, Artificial Sequence
  derived and/or modified sequence
atgaccgacagcaagtacttcaccaccaacaagaagggcgagatcttcgagctgaaggctgaacttaacaatgagaagaaagaaaaaaggaaggaagccgtgaagaaggtcatagcggcaatgacagtggggaaagacgtcagctctcttttccccgacgtagtgaattgtatgcagactgacaacctagagctgaagaaactcgtgtacttgtacctcatgaactacgcgaaatcccaaccagacatggccatcatggctgtcaacagtttcgtgaaagattgtgaggaccccaacccgctgatccgggccttagctgtcagaactatgggttgtatccgggtggacaagataacagaatacctgtgcgaacccttgcgcaagtgcctgaaggatgaagacccttacgttcggaaaaccgctgctgtttgcgtcgctaagctgcacgatatcaacgcccagatggtcgaggaccagggctttctcgattccttgcgcgatcttattgccgatagtaatccgatggtggtggccaacgccgtggcagccctcagcgaaatctccgaatcccaccctaattccaatttactggaccttaacccccagaatattaataagctactgacggcgctgaacgaatgcaccgagtggggccagatttttatcctggactgtctcagcaactacaacccgaaggatgacagagaagcccagtctatctgcgagcgggtgacgccgcgcctgtcccacgccaactcggccgttgtgctaagcgctgtgaaagtgttgatgaaatttctggagctgttacctaaagattccgactactacaatatgctcctcaagaagctggctccgccactggtgactctgctgagcggcgagcctgaggtccaatacgtggcccttagaaacataaacttgatcgtacagaaaagacctgaaatcctaaagcaggagatcaaggtgttcttcgtgaagtataatgaccccatatatgtgaagctcgaaaaactggacataatgattcggctggcgtctcaggccaatatagcccaggtgctggctgaacttaaggagtatgcaacggaggtcgacgtggatttcgtgcgcaaggccgtgcgtgctattggtcgttgtgcgatcaaggtggaacagtcagctgaacgctgtgtgtccacgctcctcgatttgatccagaccaaagttaattacgtggttcaggaagcgatcgtcgtaattagggacatatttcgcaagtatcctaataaatacgagagcattattgcaacactctgtgaaaatctggactcactggacgaacctgatgcacgcgcggccatgatatggatcgtgggagagtatgctgaacgaattgataatgccgatgagctcttggagtccttccttgagggcttccacgacgagtccacccaggttcaacttactttattaaccgcgattgttaagctttttctgaagaagccttctgaaacccaggagctcgtacagcaagtgttatcactggcaacccaggactcagataacccagatctacgggaccgtggctatatctattggcgtctgctctccactgaccccgttaccgccaaagaggtcgtgctctcggagaagcccctcatcagtgaagagaccgacctgattgaaccgacactgctagacgagctaatatgtcacatcggaagcttagccagcgtgtaccacaagcccccaaatgcctttgtggagggcagccacggaatccacaggaaacacctgcctatccaccacggatctacggacgccggcgatagccctgtgggtaccacaacagccactaaccttgagcagcctcaggtcattccgagccagggagacttgctcggtgacttgctgaacctggatttgggaccaccagtgaacgtgcctcaggtttcatctatgcagatgggcgctgttgacctgctcggaggaggacttgattctttacttggctccgacctcggaggaggcatcggcggctccccagcggtcggacagagctttatcccaagttctgtcccggccaccttcgccccatccccaactcccgccgtggtttctagtggactaaacgatctgtttgaattgtctacgggcataggaatggcacctggcggttacgtcgcacccaaagctgtgtggctgcctgccgtgaaagctaaagggctagagattagcggaacatttactcacagacagggacacatatatatggaaatgaattttaccaacaaggcgctgcagcatatgaccgattttgctatccagtttaataaaaacagctttggggtgatcccatccacacctcttgccattcacactcctctgatgcccaatcaatctattgacgtctctttgcccctcaataccctcggacccgttatgaaaatggaacccttgaacaatctgcaggtagccgtcaagaacaacattgatgtgttctactttagctgcttgatcccgctgaacgtgctgtttgtggaggatggtaaaatggaaaggcaggtcttcctggccacttggaaagacatccctaatgaaaatgagcttcaatttcagatcaaagaatgccacctaaatgccgataccgtgagcagcaaacttcaaaataataacgtctacaccatcgcaaagagaaacgtagaggggcaagatatgctctatcagagcttaaagctcacgaatggcatatggatcctggccgagctccgtattcaacccgggaatcctaactatactctctccctcaaatgcagggctcccgaggtgagccagtatatctatcaggtctatgactctatcctcaagaactag

SEQ ID NO: 29424 - DNA, 2067 bp, Artificial Sequence
  derived and/or modified sequence
atgaagttcctggagctgctgcccaaggacagcgactactacaacatgttactgaagaagttggccccccctctggttaccctgctctctggagagccggaagttcaatatgtcgctctgcgcaatataaacctgatagtgcagaagagaccagaaatcctgaaacaggaaatcaaggtcttctttgtaaaatacaatgaccccatctatgtcaaacttgaaaagctcgacattatgatccgtctggcttcacaggctaacatcgcgcaagtactggctgagctcaaggaatacgcaactgaggttgatgttgattttgtgcggaaagccgttcgcgccatcgggagatgtgctatcaaagtggaacaaagcgctgaacggtgtgtgtctaccctgcttgacctcattcagaccaaggtgaattatgtggtgcaggaggccattgtggtcataagggacatatttcggaagtatccaaacaagtacgaatccattatcgccacactttgcgaaaatctggactctctggacgaaccagatgcacgcgccgcgatgatttggatcgtgggagaatacgcagagcgtattgacaacgccgatgaattgctcgagtcatttctcgagggtttccatgatgagagcacacaggtacagctgaccctcctgactgcgatcgtaaagttgttcctcaaaaaaccttccgagacacaggagctggtgcagcaggtcctcagcctggccactcaggactcagacaatcctgatctccgggaccgcgggtacatatattggcggttactgagtaccgatccagtgactgcaaaggaggtggtcttgagcgaaaagcccctgatatctgaagagacagatttaattgagcccacactattagatgagctgatctgtcacatcggaagcctcgcctcagtatatcataagccgcctaatgcatttgttgaagggtcccacgggattcacagaaagcacctgcctatccaccacggcagtactgacgccggggactcccccgtcgggacaacaacagctacgaacctggaacagcctcaggtcattcccagccagggcgacctcctcggcgatctgctgaatctcgacctcggtccgccagtcaacgtgcctcaagtgtcttccatgcagatgggggcagtggacttgctgggcggcggcctcgatagtctgctgggttcagacctgggcggtggcatcggcgggtcgccagcagtggggcagagtttcattccatcttctgtgcccgccacctttgcccctagccctacacccgccgtggtgtctagcggcctgaacgatctgttcgagcttagcaccggtattggaatggcccctgggggttacgtagcccctaaagccgtgtggctgccagctgtgaaagcgaaaggcctagagatctctggaacattcacccacagacagggacacatctacatggagatgaacttcaccaacaaagctttacaacacatgactgattttgcaattcagtttaataagaatagtttcggcgtgattccctctacgcctctggcaatccatacccccttgatgcctaaccagtctattgacgttagtctccctctcaacacattgggaccagtgatgaagatggaacctctgaacaatctgcaggtcgctgtgaagaacaatattgacgtgttttatttttcgtgtctgatccctctcaacgtacttttcgtcgaagacgggaagatggagcgccaggtttttctggcaacatggaaagacataccaaacgaaaatgagctgcagtttcagattaaggagtgccatctcaacgccgatacagtttctagtaagctgcagaacaataatgtgtacaccattgcaaagcggaacgtcgagggccaggatatgttataccagtccctgaagctgacaaacggtatctggattttggctgagctgcgaattcagccaggcaacccaaactacactctgtcactgaagtgtagagctcctgaagtcagccagtatatctaccaggtctatgattccatcctgaagaactag

SEQ ID NO: 29425 - DNA, 2856 bp, Artificial Sequence
  derived and/or modified sequence
atgaccgattctaaatactttacaactaacaagaagggagagatatttgaattgaaggccgagcttaacaacgagaagaaagaaaaaaggaaggaggccgtgaagaaggttatcgccgcaatgacagtgggcaaagacgtctcttctttattccccgacgtggtgaactgcatgcagactgataatctggaactcaagaagttggtgtacctttatctcatgaactacgccaagagccagcccgatatggctatcatggctgtcaacagctttgtgaaagactgtgaggaccccaacccactgattagagccctggcagtgaggacgatggggtgcatacgtgttgacaagatcactgaatatctgtgcgagcctctgcgtaagtgtctcaaagacgaggacccttacgtcaggaagacagccgctgtgtgcgtagctaaattgcatgacattaacgctcaaatggtggaggaccagggcttccttgattcactgcgagatttaattgccgactctaacccaatggtcgtcgccaatgctgttgcagcgttgtcggagatttccgaatcccatcctaacagcaaccttctggacctgaatccacagaatattaacaaacttttgacagccctcaatgaatgtaccgaatggggacaaatttttattttggactgcctgtcgaactacaatccaaaagacgatagggaggcccagtccatttgcgaaagagttaccccaaggctatcccatgctaactccgcagttgtgttaagtgctgtaaaagtgctgatgaaattccttgaacttctgcctaaggatagcgattattataatatgttgctcaagaaactggcgcctccactggttactctgcttagtggcgagcccgaggttcagtatgtggcccttcgcaacatcaacctgatcgtccaaaaacgccctgaaatccttaagcaagagatcaaggtcttcttcgtcaaatacaacgatcccatatacgttaagctagaaaaactggacatcatgatccggctagcttcacaggccaacatcgctcaggtgttagcagagttgaaggagtacgccactgaggtggatgtggacttcgtcaggaaagccgttagggctataggcaggtgtgcaatcaaggtggagcagtccgcagagaggtgtgtcagcacactcctcgaccttatacagacgaaagtcaactacgttgttcaggaggctatcgtggtaattcgcgatatttttcgcaaatatcccaataagtatgagagcattattgccaccctgtgcgaaaacctcgatagcctagacgagccagacgcacgagctgctatgatttggattgtaggcgaatacgccgagcgtattgacaatgctgacgagctgctcgaaagctttctggagggtttccatgatgagtctacgcaggtccagctcaccttgctgactgcaatcgtcaagctttttttgaagaagcctagtgaaacccaggaacttgtccaacaggtcctgagtctggctactcaagattccgataaccccgacctacgggatcgaggttacatctactggagacttctttcaacggacccagtaaccgctaaggaggtggtcctgtcagagaagcccctcatttctgaggaaactgacctcatcgagccaacattactcgacgagctgatttgccatattggatctctagcctctgtgtaccataaacctcctaatgcatttgttgaaggctcccatggcatccatcgaaaacatctgccgattcatcacggtagcacagatgctggggatagccccgtgggcaccacaaccgccacaaatctcgagcaaccacaggttataccttcccagggggatctcctaggggacctgctgaacctcgacctcggacctcccgtgaacgtgcctcaggtgagctcaatgcagatgggagccgtggatcttctgggcggagggttggacagtctgctgggatctgacttgggcggagggatagggggaagcccagcggtggggcagtccttcataccctcatccgttcccgcaacctttgcaccctcacctacccccgctgtcgtcagttctgggctgaatgacctatttgagctgtctacgggcatcgggatggctcctggcggatacgtggccccaaaggccgtgtggctgcctgccgttaaggccaaagggctggaaatttctggtacatttactcatcggcaaggacatatttatatggaaatgaacttcacaaataaagccctccagcacatgaccgacttcgctatccagttcaacaagaatagttttggagtaattcccagcacgcctttggccatacacactccactgatgccgaatcaatcaattgatgtgtcactgcctctaaataccttaggacccgtgatgaagatggagccgctgaataacctccaagtcgccgttaagaataatattgacgtattctactttagctgtcttatacctcttaacgtgctcttcgtggaagacgggaagatggaacggcaggtcttcctggccacttggaaagatatccctaatgaaaatgaattacagttccagataaaagaatgtcacctgaatgccgacacggtaagctctaagctgcagaataacaacgtgtataccatcgctaagaggaatgtcgagggacaggacatgctgtaccagtcgctcaagctcaccaacggaatatggattctcgccgagttaaggatccagcctggaaaccctaactacactttgagtctgaagtgtcgggcaccagaagtatcacaatatatctatcaagtttacgatagtatcctgaagaattag

SEQ ID NO: 29426 - DNA, 2856 bp, Artificial Sequence
  derived and/or modified sequence
atgaccgattctaagtattttactaccaacaagaagggagagatattcgaactgaaagccgagctgaataatgaaaaaaaggaaaagcggaaagaggccgttaagaaggtgattgcagccatgaccgtcggtaaggatgtctccagtctctttccggacgtagttaattgtatgcagaccgataatctggagctgaagaagttagtatacttatacctgatgaattatgccaaaagtcagccagatatggccattatggccgttaacagcttcgtcaaggattgcgaggaccccaatccattaattcgtgccctggcagtccgaactatgggttgtatccgagtggacaagatcacagaatatctatgtgagccactccggaagtgcctgaaggacgaagatccttatgtgaggaagacggcggctgtctgcgtggctaagctccatgacatcaatgctcagatggtggaagatcaggggttcttagactctctccgggacttgattgccgacagtaaccctatggtagtggccaatgctgttgccgctctgtctgagatatccgagtctcacccaaatagcaatctgctggacctgaatcctcagaacattaacaagctacttacggccctgaacgagtgcacagaatggggacagattttcattctggactgtctctctaattacaaccctaaagacgaccgagaggctcagagtatttgtgagagggtcaccccaagattgtcccacgccaactctgccgttgttctcagcgctgtcaaagttctgatgaaatttcttgaactgttgcctaaggattccgactactacaacatgttactgaaaaaactagcaccaccactggtcactctcttgtcaggggaacctgaggtgcagtacgtagctctgaggaatattaacttgatagtgcagaagagaccagaaatcctgaagcaggaaatcaaggttttcttcgtcaagtacaatgaccccatctacgtaaaactggaaaaactggatatcatgattcgtttggcaagccaggctaatatcgctcaggtcctagccgagctgaaggagtacgccactgaggtggacgtggattttgtgcggaaggccgtgcgcgcaatcggccgatgtgctataaaagttgagcagagcgccgagcgctgtgtcagtaccctgttagatctgatccagacgaaggtgaactatgtggtacaggaggccattgtggtcatcagagacatctttaggaagtatcccaacaaatatgagtcaattatagccactctctgtgagaatttggactccctggacgagcctgacgcacgcgcagcaatgatctggattgttggcgaatatgctgagcggattgacaatgccgatgaactccttgaatccttcctggaagggtttcatgatgagagcacccaggtccaactaacactcctcaccgccatagttaaattgtttctgaaaaagccttccgagacccaagaattagtacagcaggtgttgagccttgcaacacaggacagtgacaaccccgatctgagagacaggggatacatatactggcgcctgctctcaaccgacccggtaacagcgaaagaggttgtactgtctgaaaagcctctgatatctgaagagaccgatctgatcgagccaacattgttggacgaattgatttgtcatatcggctctctcgcgagcgtgtaccacaagccccctaatgcgtttgtcgaaggctctcatggaatccaccgaaagcatctgccaattcaccatgggtcaacagatgccggtgacagcccggttgggacaacaacagcaactaacttggagcagcctcaggtgattcccagccagggggacctgctgggagacctgctgaacctcgacctcggaccacccgttaatgtgccccaggtatcatcgatgcagatgggagcggtggacctccttgggggaggattggactctctgttgggttccgaccttgggggagggattggcggtagtcctgctgttggacagtcctttatcccctcaagcgtgcctgccaccttcgcgccaagccccacccctgcagttgtcagctcaggactgaatgacctgtttgaactgtcaactggaatcggtatggcgcctggaggctacgtggcgccaaaggctgtgtggctcccggcagtgaaggccaaaggactggagatctcaggaacgtttactcaccgccagggacacatttacatggaaatgaattttaccaataaggccctgcagcacatgacagactttgcgattcagttcaacaagaattcgttcggggttataccttccacacccttggcaattcacacaccattaatgcctaaccagtcaattgacgtgtctttacccctgaacacgttgggacccgtgatgaagatggagcctctcaataatttgcaggtcgctgtgaaaaacaatattgacgtcttttacttctcctgtttgattccactgaacgtgctattcgtggaggatggcaagatggagcgccaggtatttctagctacttggaaggacatccctaacgagaatgagctgcagtttcaaattaaagaatgtcacctgaacgccgacaccgtttcttctaagctccagaacaacaacgtgtataccattgcaaagagaaatgtggaggggcaagatatgttgtatcagagtttaaagctgaccaatggaatttggattctcgctgagctgcgtatccagcctgggaaccccaactacaccctgtcacttaagtgcagggcaccagaagtctctcagtacatttaccaggtgtacgacagtatcttaaagaattag

SEQ ID NO: 29427 - DNA, 2067 bp, Artificial Sequence
  derived and/or modified sequence
atgaaattccttgagctactccctaaggattcagactactacaacatgctgctaaagaagctcgcacctccgctcgtgaccctcctctcaggtgagcccgaggttcaatacgtcgctctgcgtaatatcaacctgattgttcagaaaagacccgaaattcttaagcaggagattaaggtattctttgtgaaatacaatgatcccatctatgtaaagctggagaaactggacatcatgataaggttagcttctcaggcaaacattgcacaagtcctcgctgagctgaaggagtatgctacggaagttgacgtggactttgtgcggaaagctgtgcgagcaatcggcagatgtgctataaaagtagaacagtccgctgaacgctgcgtgagcaccctgctggacctaattcagacaaaggttaattacgttgtgcaggaggctatcgtggtcatcagagatatatttaggaaataccctaacaagtacgagtccattatagctactttatgtgaaaacctggacagtctggacgagcccgatgctagggccgcaatgatttggattgtcggggagtacgcagaacgcattgacaatgccgacgaactgctagaatcgttcctggagggtttccatgatgagtccactcaggtccagttgacactgctaaccgccatcgtcaaattattccttaagaaaccatctgagacacaagagctggtccaacaggtgcttagcctggcgacacaagactcggacaatcccgatctgcgcgatcggggttatatttattggaggctactgtccaccgacccagtgactgctaaagaggtggtgctcagcgaaaaaccattgatctcggaagaaacagatctcatcgaacccaccctgctagatgagctcatctgccacattggatccttggccagcgtttaccacaagccgccaaacgcattcgtcgagggtagccacggtattcacagaaagcacctgcctattcaccacggatccacggatgccggagattcccctgtagggaccaccactgccacaaatttggaacagcctcaggtcattcctagtcagggagatctgttgggggatcttctgaacctggacctgggacctcctgttaatgtgccacaggtgtcgagcatgcagatgggcgcagtcgatcttctggggggaggactggacagcctgcttggatctgacctgggcggaggtattggcggatctcccgctgtcggacagtcattcatcccttcttctgtccctgccacattcgcgccttctcctactcctgccgtcgtgtcatctggactcaacgatttatttgagctttctacagggattgggatggcccctggcggttacgtggcacccaaagccgtatggcttcctgccgttaaggcaaagggcctcgaaatctctggaactttcacacataggcagggacacatctacatggaaatgaacttcaccaacaaggcccttcagcatatgacagatttcgccattcagtttaacaagaactctttcggcgtgatcccatcaaccccgttggccattcacaccccgctgatgcccaatcagagcatcgatgtgtctttgcccctgaacacactcggccctgtgatgaagatggagcccctcaataatctccaggtggccgtgaagaataatatcgacgtattttacttctcttgtctaatcccactgaatgtcttattcgttgaagatggtaaaatggaacgacaggtgttcttggctacctggaaggacattccaaatgagaacgaactacaattccagatcaaagagtgtcacctgaacgcagataccgtcagttctaagcttcagaacaataatgtgtacacgattgcgaaacgcaacgtagaaggacaggacatgctctaccagagcctcaaactgacgaacggcatctggattctggcagagctcagaattcagcccggtaaccctaactacacactctctcttaagtgtcgggctcctgaggtttcccagtatatataccaggtttatgactctatactcaagaactag

SEQ ID NO: 29428 - DNA, 2856 bp, Artificial Sequence
  derived and/or modified sequence
atgaccgacagcaagtacttcaccaccaacaagaagggcgagatcttcgagctgaaggccgagctgaacaacgagaagaaggagaagagaaaggaggccgtgaagaaggtgatcgccgccatgaccgtgggcaaggacgtgagcagcctgttccccgacgtggtgaactgcatgcagaccgacaacctggagctgaagaagctggtgtacctgtacctgatgaactacgccaagagccagcccgacatggccatcatggccgtgaacagcttcgtgaaggactgcgaggaccccaaccccctgatcagagccctggccgtgagaaccatgggctgcatcagagtggacaagatcaccgagtacctgtgcgagcccctgagaaagtgcctgaaggacgaggacccctacgtgagaaagaccgccgccgtgtgcgtggccaagctgcacgacatcaacgcccagatggtggaggaccagggcttcctggacagcctgagagacctgatcgccgacagcaaccccatggtggtggccaacgccgtggccgccctgagcgagatcagcgagagccaccccaacagcaacctgctggacctgaacccccagaacatcaacaagctgctgaccgccctgaacgagtgcaccgagtggggccagatcttcatcctggactgcctgagcaactacaaccccaaggacgacagagaggcccagagcatctgcgagagagtgacccccagactgagccacgccaacagcgccgtggtgctgagcgccgtgaaggtgctgatgaagttcctggagctgctgcccaaggacagcgactactacaacatgctgctgaagaagctggccccccccctggtgaccctgctgagcggcgagcccgaggtgcagtacgtggccctgagaaacatcaacctgatcgtgcagaagagacccgagatcctgaagcaggagatcaaggtgttcttcgtgaagtacaacgaccccatctacgtgaagctggagaagctggacatcatgatcagactggccagccaggccaacatcgcccaggtgctggccgagctgaaggagtacgccaccgaggtggacgtggacttcgtgagaaaggccgtgagagccatcggcagatgcgccatcaaggtggagcagagcgccgagagatgcgtgagcaccctgctggacctgatccagaccaaggtgaactacgtggtgcaggaggccatcgtggtgatcagagacatcttcagaaagtaccccaacaagtacgagagcatcatcgccaccctgtgcgagaacctggacagcctggacgagcccgacgccagagccgccatgatctggatcgtgggcgagtacgccgagagaatcgacaacgccgacgagctgctggagagcttcctggagggcttccacgacgagagcacccaggtgcagctgaccctgctgaccgccatcgtgaagctgttcctgaagaagcccagcgagacccaggagctggtgcagcaggtgctgagcctggccacccaggacagcgacaaccccgacctgagagacagaggctacatctactggagactgctgagcaccgaccccgtgaccgccaaggaggtggtgctgagcgagaagcccctgatcagcgaggagaccgacctgatcgagcccaccctgctggacgagctgatctgccacatcggcagcctggccagcgtgtaccacaagccccccaacgccttcgtggagggcagccacggcatccacagaaagcacctgcccatccaccacggcagcaccgacgccggcgacagccccgtgggcaccaccaccgccaccaacctggagcagccccaggtgatccccagccagggcgacctgctgggcgacctgctgaacctggacctgggcccccccgtgaacgtgccccaggtgagcagcatgcagatgggcgccgtggacctgctgggcggcggcctggacagcctgctgggcagcgacctgggcggcggcatcggcggcagccccgccgtgggccagagcttcatccccagcagcgtgcccgccaccttcgcccccagccccacccccgccgtggtgagcagcggcctgaacgacctgttcgagctgagcaccggcatcggcatggcccccggcggctacgtggcccccaaggccgtgtggctgcccgccgtgaaggccaagggcctggagatcagcggcaccttcacccacagacagggccacatctacatggagatgaacttcaccaacaaggccctgcagcacatgaccgacttcgccatccagttcaacaagaacagcttcggcgtgatccccagcacccccctggccatccacacccccctgatgcccaaccagagcatcgacgtgagcctgcccctgaacaccctgggccccgtgatgaagatggagcccctgaacaacctgcaggtggccgtgaagaacaacatcgacgtgttctacttcagctgcctgatccccctgaacgtgctgttcgtggaggacggcaagatggagagacaggtgttcctggccacctggaaggacatccccaacgagaacgagctgcagttccagatcaaggagtgccacctgaacgccgacaccgtgagcagcaagctgcagaacaacaacgtgtacaccatcgccaagagaaacgtggagggccaggacatgctgtaccagagcctgaagctgaccaacggcatctggatcctggccgagctgagaatccagcccggcaaccccaactacaccctgagcctgaagtgcagagcccccgaggtgagccagtacatctaccaggtgtacgacagcatcctgaagaactag

SEQ ID NO: 29429 - DNA, 2067 bp, Artificial Sequence
  derived and/or modified sequence
atgaagttcctggagctgctgcccaaggacagcgactactacaacatgctgctgaagaagctggccccccccctggtgaccctgctgagcggcgagcccgaggtgcagtacgtggccctgagaaacatcaacctgatcgtgcagaagagacccgagatcctgaagcaggagatcaaggtgttcttcgtgaagtacaacgaccccatctacgtgaagctggagaagctggacatcatgatcagactggccagccaggccaacatcgcccaggtgctggccgagctgaaggagtacgccaccgaggtggacgtggacttcgtgagaaaggccgtgagagccatcggcagatgcgccatcaaggtggagcagagcgccgagagatgcgtgagcaccctgctggacctgatccagaccaaggtgaactacgtggtgcaggaggccatcgtggtgatcagagacatcttcagaaagtaccccaacaagtacgagagcatcatcgccaccctgtgcgagaacctggacagcctggacgagcccgacgccagagccgccatgatctggatcgtgggcgagtacgccgagagaatcgacaacgccgacgagctgctggagagcttcctggagggcttccacgacgagagcacccaggtgcagctgaccctgctgaccgccatcgtgaagctgttcctgaagaagcccagcgagacccaggagctggtgcagcaggtgctgagcctggccacccaggacagcgacaaccccgacctgagagacagaggctacatctactggagactgctgagcaccgaccccgtgaccgccaaggaggtggtgctgagcgagaagcccctgatcagcgaggagaccgacctgatcgagcccaccctgctggacgagctgatctgccacatcggcagcctggccagcgtgtaccacaagccccccaacgccttcgtggagggcagccacggcatccacagaaagcacctgcccatccaccacggcagcaccgacgccggcgacagccccgtgggcaccaccaccgccaccaacctggagcagccccaggtgatccccagccagggcgacctgctgggcgacctgctgaacctggacctgggcccccccgtgaacgtgccccaggtgagcagcatgcagatgggcgccgtggacctgctgggcggcggcctggacagcctgctgggcagcgacctgggcggcggcatcggcggcagccccgccgtgggccagagcttcatccccagcagcgtgcccgccaccttcgcccccagccccacccccgccgtggtgagcagcggcctgaacgacctgttcgagctgagcaccggcatcggcatggcccccggcggctacgtggcccccaaggccgtgtggctgcccgccgtgaaggccaagggcctggagatcagcggcaccttcacccacagacagggccacatctacatggagatgaacttcaccaacaaggccctgcagcacatgaccgacttcgccatccagttcaacaagaacagcttcggcgtgatccccagcacccccctggccatccacacccccctgatgcccaaccagagcatcgacgtgagcctgcccctgaacaccctgggccccgtgatgaagatggagcccctgaacaacctgcaggtggccgtgaagaacaacatcgacgtgttctacttcagctgcctgatccccctgaacgtgctgttcgtggaggacggcaagatggagagacaggtgttcctggccacctggaaggacatccccaacgagaacgagctgcagttccagatcaaggagtgccacctgaacgccgacaccgtgagcagcaagctgcagaacaacaacgtgtacaccatcgccaagagaaacgtggagggccaggacatgctgtaccagagcctgaagctgaccaacggcatctggatcctggccgagctgagaatccagcccggcaaccccaactacaccctgagcctgaagtgcagagcccccgaggtgagccagtacatctaccaggtgtacgacagcatcctgaagaactag

SEQ ID NO: 29430 - protein, 825 aa, Artificial Sequence
  derived and/or modified sequence
MPAPIRLRELIRTIRTARTQAEEREMIQKECAAIRSSFREEDNTYRCRNVAKLLYMHMLGYPAHFGQLECLKLIASQKFTDKRIGYLGAMLLLDERQDVHLLMTNCIKNDLNHSTQFVQGLALCTLGCMGSSEMCRDLAGEVEKLLKTSNSYLRKKAALCAVHVIRKVPELMEMFLPATKNLLNEKNHGVLHTSVVLLTEMCERSPDMLAHFRKNEKLVPQLVRILKNLIMSGYSPEHDVSGISDPFLQVRILRLLRILGRNDDDSSEAMNDILAQVATNTETSKNVGNAILYETVLTIMDIKSESGLRVLAINILGRFLLNNDKNIRYVALTSLLKTVQTDHNAVQRHRSTIVDCLKDLDVSIKRRAMELSFALVNGNNIRGMMKELLYFLDSCEPEFKADCASGIFLAAEKYAPSKRWHIDTIMRVLTTAGSYVRDDAVPNLIQLITNSVEMHAYTVQRLYKAILGDYSQQPLVQVAAWCIGEYGDLLVSGQCEEEEPIQVTEDEVLDILESVLISNMSTSVTRGYALTAIMKLSTRFTCTVNRIKKVVSIYGSSIDVELQQRAVEYNALFKKYDHMRSALLERMPVMEKVTTNGPTEIVQTNGETEPAPLETKPPPSGPQPTSQANDLLDLLGGNDITPVIPTAPTSKPSSAGGELLDLLGDINLTGAPAAAPAPASVPQISQPPFLLDGLSSQPLFNDIAAGIPSITAYSKNGLKIEFTFERSNTNPSVTVITIQASNSTELDMTDFVFQAAVPKTFQLQLLSPSSSIVPAFNTGTITQVIKVLNPQKQQLRMRIKLTYNHKGSAMQDLAEVNNFPPQSWQ

SEQ ID NO: 29431 - protein, 825 aa, Artificial Sequence
  derived and/or modified sequence
MPAPIRLRELIRTIRTARTQAEEREMIQKECAAIRSSFREEDNTYRCRNVAKLLYMHMLGYPAHFGQLECLKLIASQKFTDKRIGYLGAMLLLDERQDVHLLMTNCIKNDLNHSTQFVQGLALCTLGCMGSSEMCRDLAGEVEKLLKTSNSYLRKKAALCAVHVIRKVPELMEMFLPATKNLLNEKNHGVLHTSVVLLTEMCERSPDMLAHFRKESKLVPQLVRILKNLIMSGYSPEHDVSGISDPFLQVRILRLLRILGRNDDDSSEAMNDILAQVATNTETSKNVGNAILYETVLTIMDIKSESGLRVLAINILGRFLLNNDKNIRYVALTSLLKTVQTDHNAVQRHRSTIVDCLKDLDVSIKRRAMELSFALVNGNNIRGMMKELLYFLDSCEPEFKADCASGIFLAAEKYAPSKRWHIDTIMRVLTTAGSYVRDDAVPNLIQLITNSVEMHAYTVQRLYKAILGDYSQQPLVQVAAWCIGEYGDLLVSGQCEEEEPIQVTEDEVLDILESVLISNMSTSVTRGYALTAIMKLSTRFTCTVNRIKKVVSIYGSSIDVELQQRAVEYNALFKKYDHMRSALLERMPVMEKVTTNGPTEIVQTNGETEPAPLETKPPPSGPQPTSQANDLLDLLGGNDITPVIPTAPTSKPSSAGGELLDLLGDINLTGAPAAAPAPASVPQISQPPFLLDGLSSQPLFNDIAAGIPSITAYSKNGLKIEFTFERSNTNPSVTVITIQASNSTELDMTDFVFQAAVPKTFQLQLLSPSSSIVPAFNTGTITQVIKVLNPQKQQLRMRIKLTYNHKGSAMQDLAEVNNFPPQSWQ

SEQ ID NO: 29432 - protein, 565 aa, Artificial Sequence
  derived and/or modified sequence
MFGSCCHCCRRPRSCWFHSRFRAVSGVQSQAVGVEKRRQRSWARRGREPQGLLRLLEGRPRGLGPGGSARRGVPCCGVAPPRMPAPIRLRELIRTIRTARTQAEEREMIQKECAAIRSSFREEDNTYRCRNVAKLLYMHMLGYPAHFGQLECLKLIASQKFTDKRIGYLGAMLLLDERQDVHLLMTNCIKNDLNHSTQFVQGLALCTLGCMGSSEMCRDLAGEVEKLLKTSNSYLRKKAALCAVHVIRKVPELMEMFLPATKNLLNEKNHGVLHTSVVLLTEMCERSPDMLAHFRKESKLVPQLVRILKNLIMSGYSPEHDVSGISDPFLQVRILRLLRILGRNDDDSSEAMNDILAQVATNTETSKNVGNAILYETVLTIMDIKSESGLRVLAINILGRFLLNNDKNIRYVALTSLLKTVQTDHNAVQRHRSTIVDCLKDLDVSIKRRAMELSFALVNGNNIRGMMKELLYFLDSCEPEFKADCASGIFLAAEKYAPSKRWHIDTIMRVLTTAGSYVRDDAVPNLIQLITNSVEMHAYTVQRLYKAILGDYSPTFGTSGCMVYR

SEQ ID NO: 29433 - protein, 176 aa, Artificial Sequence
  derived and/or modified sequence
MPAPIRLRELIRTIRTARTQAEEREMIQKECAAIRSSFREEDNTYRCRNVAKLLYMHMLGYPAHFGQLECLKLIASQKFTDKRIGYLGAMLLLDERQDVHLLMTNCIKNDLNHSTQFVQGLALCTLGCMGSSEMCRDLAGEVEKLLKTSNSYLRKKEMIYKQTNVTGYILGGIPNS

SEQ ID NO: 29434 - DNA, 4792 bp, Artificial Sequence
  derived and/or modified sequence
tagtcctcggcagggtccgagttcttggataattcgagagaaaaggcacgataagttgcagtacgaggacacggaaacgaccaggagaggaggacagggagcgaagtttcctcaatagtgtgtgaagttagttaaaaactccctccttcctcaggatccctccgcctgcggtagcggtggtgaggccgagggagccgccattttggatgttcggttcctgctgccactgctgccgccgcccccggagctgctggtttcattcgaggtttcgggccgaggatgccagcccccatcagattgcgggagctgatccggaccatccggacagcccgaacccaagctgaagaacgagaaatgatccagaaagaatgtgctgcaatccggtcatcttttagagaagaagacaatacataccgatgtcggaatgtggcaaaattactgtatatgcacatgctgggctaccctgctcactttggacagttggagtgcctcaagcttattgcctctcaaaaatttacagacaaacgcattggctatttaggggcaatgctgctgttagatgaaagacaagatgtccatcttctcatgaccaactgtatcaagaatgatcttaatcatagcacgcaattcgtacaggggttagcactttgtaccctcggctgcatgggctcctcagagatgtgcagagatcttgcaggagaggtagagaagctcctgaaaacctccaactcttacttaagaaaaaaggcagcactgtgtgctgttcatgtcatcaggaaagttcctgaacttatggagatgtttttaccagcaacaaaaaatttattgaatgagaagaaccatggtgtcctccacacatctgtagtcctcctcacagaaatgtgtgagcgaagcccagacatgcttgcgcatttcagaaagaatgaaaagcttgtgccccaattagttcgtattttaaagaacctcatcatgtccggatattcaccagaacatgatgtttctggtatcagtgacccctttttgcaggtacgaattttgcggttattaagaattttaggacgaaatgatgatgattcaagtgaagctatgaatgatatattagcacaggttgccactaatactgagactagtaaaaatgtaggaaatgctattctttatgaaacggttttgactatcatggatattaagtcagagagtggattgcgagtcctagccataaatatcctgggtcgtttcttattgaacaatgacaagaatattagatatgtggctctgacatctttgttgaagactgtacagacagatcataatgcagtacagaggcacagaagcacaattgtggactgtcttaaagatttggatgtctcaataaaacggcgtgcaatggaattgagttttgccctggtaaatgggaataatatccgaggcatgatgaaagaattactttattttctggattcgtgtgagccagaatttaaagcagactgtgcatctggaatctttcttgctgcagaaaagtatgcaccttccaaacgatggcatatagacacaattatgcgtgttttgacaacggcaggaagttatgttcgtgatgatgcagtccccaatttaatccagttaataactaatagtgtggagatgcatgcctatactgtccagcgcctgtacaaagcaattcttggtgattattctcaacaacctttggtacaagtggctgcatggtgtataggtgaatatggtgatcttcttgtatctggccagtgtgaagaggaagagcctattcaggtaacagaggatgaagtgttggatattttagaaagtgtcctaatctctaatatgtccacctctgtgacacgaggttatgccctcactgccattatgaagctttccactcgattcacttgtactgtaaaccgaattaagaaagtggtttccatctacggaagcagcattgatgtggaactccagcagagggcagtagaatataatgcacttttcaagaaatatgaccacatgaggtctgccctacttgagagaatgcctgtcatggaaaaagtgaccacaaatggccctactgagattgtgcagacaaatggagagacagaaccagctccactagagaccaaaccgccaccctctgggccacagcccaccagccaggccaatgatttattggatttgttgggaggaaatgacataacacctgttattccaactgcgcctacaagcaaaccatcttctgctggtggagaacttcttgatttgctgggagacatcaaccttacaggtgctccagctgctgctcctgcccctgcctcagtcccacagatatcccagccccccttcttgttggatgggctttcatcacagcctctcttcaatgatattgctgcaggcatcccctccatcacagcatacagtaagaatggcttgaagatagaattcacctttgaacggtcaaataccaaccccagtgtaacagtgataacgatacaggcctccaacagcacagagctagatatgacggactttgttttccaagctgcagtaccaaagacattccagctgcagctcttgtctcctagcagcagcattgtcccagcatttaacacggggaccatcacacaagtcattaaagttctgaaccctcagaagcaacagctgcgaatgcggatcaagcttacatataatcacaagggctcagcaatgcaagatctagcagaggtgaacaactttccccctcagtcctggcaatgagggtttggcaccattctcattctttatcccactcaatcaaaggaactctgggaaggaggttgtgattgctggcaagtcccccccaactgtaccacgggcatgaggagctgaagagaactgctgaggaggattttcctaaagttactgctgaccttgaagcattgttaaagactaatgtcctctcctccactgttgaggctggctgcttctggaggctactttgcactcttcctcttctcctttttccgcacttctccacccctcccacatttacagccagaatcaacattccctgggcccctgaggaaataagcagctggtctggaggagaggactgcaatccatggcgaaaaaacactcactttgtctctgcagcaaagagttgccccttctttctactgttgtttctctgtggactgggcaaggtggggtatttattcctcactagctgggttaccatcttcaggcacttttaacatctggcattcggaatggaaatgtaataatggacattagggagccctgcctttttctactggttcccccaatgtttgaaagaggcattaggctcctggtagccttttctgtgcattgctgtatacacacagacacacacatgtatgtttgttaccaagaactggtcagaccttgcgagtttatttgtaaacactggacagatggagttaaaaagagcttttgttgagatttggcatgaaggatatggtgctctatttgtaatagaaacttccaaggctcttccagctcccctttctcgccattctttagctgtagtcatgaatagtctccatgattttcaaaattgattccctttaaagtgcaaaatggtcaccttctaaaagatatattcatagttattaatgaccctattcccaccacaaattttaaagtgctcctaagcccataacttgcctgtttgaactatggtaatgggtggaagaggagttcaccagtttcaaagatcagactctgtatcaaaagtacctttgcccttaggaagagtgagtattggagtcatcttatctattactccaaacctccctttttatttcttgagcctggcttggaccttggcattccgtttgaattccttctaactggaacatttgtgttgtatctgtaacactggcactgaaataaagaccacacggttaaagaaatctttccatattgtactttatggtgttggagtgaagccttgtagcttccatacccctatgtcagaggaggtcttacggacaccatagggtaggaatagcctttcctcagtctgagaaattggtctcttttaaaagacgaatctcatgaatattcacatcaaagacttgagctttttaaactagtgagagtgccaagtgctttttagaaaggacccatatgttatcaaactttgaaattgagttgctggaatgaagtagaggtgactctctctgtggtacacattgaatgtactatgtatgttcaagtattcaggcgccatgtcttatatactgaagaaagaaaaagtgaggcccaccttgctcttacaatgtttgcaattgttactgtattgaatacagtataatgactactatggcttcaatcttaaacctggaaacaaatatccctttttttccccttcatttcaccaagcctttacttaaaatcttcagtgtcttgtcaaatctagctctgtatcagatgctggaatattcctaacatttgacaaactggagttgaactaaaggctccacgggaaagtttctggtcttactagtgtgtatgagcaagatctgctaaaacttactccactgggtaaatggttgactgagtcaagaacaggataatatctcctgcatagttttcagtaatgtaagtgtggactagtgcatatttcagacaactgctctgcctgtgcaatgaaaaatagcctttaagggtttctttgcagactgatttcattggatggatacttaatgctgtgaaacatgataggattaacataatgttggtggatttcttgaatagaatttgtctt

SEQ ID NO: 29435 - DNA, 4792 bp, Artificial Sequence
  derived and/or modified sequence
tagtcctcggcagggtccgagttcttggataattcgagagaaaaggcacgataagttgcagtacgaggacacggaaacgaccaggagaggaggacagggagcgaagtttcctcaatagtgtgtgaagttagttaaaaactccctccttcctcaggatccctccgcctgcggtagcggtggtgaggccgagggagccgccattttggatgttcggttcctgctgccactgctgccgccgcccccggagctgctggtttcattcgaggtttcgggccgaggatgccagcccccatcagattgcgggagctgatccggaccatccggacagcccgaacccaagctgaagaacgagaaatgatccagaaagaatgtgctgcaatccggtcatcttttagagaagaagacaatacataccgatgtcggaatgtggcaaaattactgtatatgcacatgctgggctaccctgctcactttggacagttggagtgcctcaagcttattgcctctcaaaaatttacagacaaacgcattggctatttaggggcaatgctgctgttagatgaaagacaagatgtccatcttctcatgaccaactgtatcaagaatgatcttaatcatagcacgcaattcgtacaggggttagcactttgtaccctcggctgcatgggctcctcagagatgtgcagagatcttgcaggagaggtagagaagctcctgaaaacctccaactcttacttaagaaaaaaggcagcactgtgtgctgttcatgtcatcaggaaagttcctgaacttatggagatgtttttaccagcaacaaaaaatttattgaatgagaagaaccatggtgtcctccacacatctgtagtcctcctcacagaaatgtgtgagcgaagcccagacatgcttgcgcatttcagaaaggaaagcaagcttgtgccccaattagttcgtattttaaagaacctcatcatgtccggatattcaccagaacatgatgtttctggtatcagtgacccctttttgcaggtacgaattttgcggttattaagaattttaggacgaaatgatgatgattcaagtgaagctatgaatgatatattagcacaggttgccactaatactgagactagtaaaaatgtaggaaatgctattctttatgaaacggttttgactatcatggatattaagtcagagagtggattgcgagtcctagccataaatatcctgggtcgtttcttattgaacaatgacaagaatattagatatgtggctctgacatctttgttgaagactgtacagacagatcataatgcagtacagaggcacagaagcacaattgtggactgtcttaaagatttggatgtctcaataaaacggcgtgcaatggaattgagttttgccctggtaaatgggaataatatccgaggcatgatgaaagaattactttattttctggattcgtgtgagccagaatttaaagcagactgtgcatctggaatctttcttgctgcagaaaagtatgcaccttccaaacgatggcatatagacacaattatgcgtgttttgacaacggcaggaagttatgttcgtgatgatgcagtccccaatttaatccagttaataactaatagtgtggagatgcatgcctatactgtccagcgcctgtacaaagcaattcttggtgattattctcaacaacctttggtacaagtggctgcatggtgtataggtgaatatggtgatcttcttgtatctggccagtgtgaagaggaagagcctattcaggtaacagaggatgaagtgttggatattttagaaagtgtcctaatctctaatatgtccacctctgtgacacgaggttatgccctcactgccattatgaagctttccactcgattcacttgtactgtaaaccgaattaagaaagtggtttccatctacggaagcagcattgatgtggaactccagcagagggcagtagaatataatgcacttttcaagaaatatgaccacatgaggtctgccctacttgagagaatgcctgtcatggaaaaagtgaccacaaatggccctactgagattgtgcagacaaatggagagacagaaccagctccactagagaccaaaccgccaccctctgggccacagcccaccagccaggccaatgatttattggatttgttgggaggaaatgacataacacctgttattccaactgcgcctacaagcaaaccatcttctgctggtggagaacttcttgatttgctgggagacatcaaccttacaggtgctccagctgctgctcctgcccctgcctcagtcccacagatatcccagccccccttcttgttggatgggctttcatcacagcctctcttcaatgatattgctgcaggcatcccctccatcacagcatacagtaagaatggcttgaagatagaattcacctttgaacggtcaaataccaaccccagtgtaacagtgataacgatacaggcctccaacagcacagagctagatatgacggactttgttttccaagctgcagtaccaaagacattccagctgcagctcttgtctcctagcagcagcattgtcccagcatttaacacggggaccatcacacaagtcattaaagttctgaaccctcagaagcaacagctgcgaatgcggatcaagcttacatataatcacaagggctcagcaatgcaagatctagcagaggtgaacaactttccccctcagtcctggcaatgagggtttggcaccattctcattctttatcccactcaatcaaaggaactctgggaaggaggttgtgattgctggcaagtcccccccaactgtaccacgggcatgaggagctgaagagaactgctgaggaggattttcctaaagttactgctgaccttgaagcattgttaaagactaatgtcctctcctccactgttgaggctggctgcttctggaggctactttgcactcttcctcttctcctttttccgcacttctccacccctcccacatttacagccagaatcaacattccctgggcccctgaggaaataagcagctggtctggaggagaggactgcaatccatggcgaaaaaacactcactttgtctctgcagcaaagagttgccccttctttctactgttgtttctctgtggactgggcaaggtggggtatttattcctcactagctgggttaccatcttcaggcacttttaacatctggcattcggaatggaaatgtaataatggacattagggagccctgcctttttctactggttcccccaatgtttgaaagaggcattaggctcctggtagccttttctgtgcattgctgtatacacacagacacacacatgtatgtttgttaccaagaactggtcagaccttgcgagtttatttgtaaacactggacagatggagttaaaaagagcttttgttgagatttggcatgaaggatatggtgctctatttgtaatagaaacttccaaggctcttccagctcccctttctcgccattctttagctgtagtcatgaatagtctccatgattttcaaaattgattccctttaaagtgcaaaatggtcaccttctaaaagatatattcatagttattaatgaccctattcccaccacaaattttaaagtgctcctaagcccataacttgcctgtttgaactatggtaatgggtggaagaggagttcaccagtttcaaagatcagactctgtatcaaaagtacctttgcccttaggaagagtgagtattggagtcatcttatctattactccaaacctccctttttatttcttgagcctggcttggaccttggcattccgtttgaattccttctaactggaacatttgtgttgtatctgtaacactggcactgaaataaagaccacacggttaaagaaatctttccatattgtactttatggtgttggagtgaagccttgtagcttccatacccctatgtcagaggaggtcttacggacaccatagggtaggaatagcctttcctcagtctgagaaattggtctcttttaaaagacgaatctcatgaatattcacatcaaagacttgagctttttaaactagtgagagtgccaagtgctttttagaaaggacccatatgttatcaaactttgaaattgagttgctggaatgaagtagaggtgactctctctgtggtacacattgaatgtactatgtatgttcaagtattcaggcgccatgtcttatatactgaagaaagaaaaagtgaggcccaccttgctcttacaatgtttgcaattgttactgtattgaatacagtataatgactactatggcttcaatcttaaacctggaaacaaatatccctttttttccccttcatttcaccaagcctttacttaaaatcttcagtgtcttgtcaaatctagctctgtatcagatgctggaatattcctaacatttgacaaactggagttgaactaaaggctccacgggaaagtttctggtcttactagtgtgtatgagcaagatctgctaaaacttactccactgggtaaatggttgactgagtcaagaacaggataatatctcctgcatagttttcagtaatgtaagtgtggactagtgcatatttcagacaactgctctgcctgtgcaatgaaaaatagcctttaagggtttctttgcagactgatttcattggatggatacttaatgctgtgaaacatgataggattaacataatgttggtggatttcttgaatagaatttgtctt

SEQ ID NO: 29436 - DNA, 2966 bp, Artificial Sequence
  derived and/or modified sequence
gtcgctctgccaggagcagtcgcctcctccttggcaaatagtcctcggcagggtccgagttcttggataattcgagagaaaaggcacgataagttgcagtacgaggacacggaaacgaccaggagaggaggacagggagcgaagtttcctcaatagtgtgtgaagttagttaaaaactccctccttcctcaggatccctccgcctgcggtagcggtggtgaggccgagggagccgccattttggatgttcggttcctgctgccactgctgccgccgcccccggagctgctggtttcattcgaggtttcgggccgtttcaggggtccagtcccaggctgtgggtgttgagaagagaagacagagaagctgggccaggagaggccgggagccccaggggctgctccgacttctggagggccgaccccgaggcctcggaccgggaggttccgcgcgccgcggcgttccgtgttgtggcgttgccccgccgaggatgccagcccccatcagattgcgggagctgatccggaccatccggacagcccgaacccaagctgaagaacgagaaatgatccagaaagaatgtgctgcaatccggtcatcttttagagaagaagacaatacataccgatgtcggaatgtggcaaaattactgtatatgcacatgctgggctaccctgctcactttggacagttggagtgcctcaagcttattgcctctcaaaaatttacagacaaacgcattggctatttaggggcaatgctgctgttagatgaaagacaagatgtccatcttctcatgaccaactgtatcaagaatgatcttaatcatagcacgcaattcgtacaggggttagcactttgtaccctcggctgcatgggctcctcagagatgtgcagagatcttgcaggagaggtagagaagctcctgaaaacctccaactcttacttaagaaaaaaggcagcactgtgtgctgttcatgtcatcaggaaagttcctgaacttatggagatgtttttaccagcaacaaaaaatttattgaatgagaagaaccatggtgtcctccacacatctgtagtcctcctcacagaaatgtgtgagcgaagcccagacatgcttgcgcatttcagaaaggaaagcaagcttgtgccccaattagttcgtattttaaagaacctcatcatgtccggatattcaccagaacatgatgtttctggtatcagtgacccctttttgcaggtacgaattttgcggttattaagaattttaggacgaaatgatgatgattcaagtgaagctatgaatgatatattagcacaggttgccactaatactgagactagtaaaaatgtaggaaatgctattctttatgaaacggttttgactatcatggatattaagtcagagagtggattgcgagtcctagccataaatatcctgggtcgtttcttattgaacaatgacaagaatattagatatgtggctctgacatctttgttgaagactgtacagacagatcataatgcagtacagaggcacagaagcacaattgtggactgtcttaaagatttggatgtctcaataaaacggcgtgcaatggaattgagttttgccctggtaaatgggaataatatccgaggcatgatgaaagaattactttattttctggattcgtgtgagccagaatttaaagcagactgtgcatctggaatctttcttgctgcagaaaagtatgcaccttccaaacgatggcatatagacacaattatgcgtgttttgacaacggcaggaagttatgttcgtgatgatgcagtccccaatttaatccagttaataactaatagtgtggagatgcatgcctatactgtccagcgcctgtacaaagcaattcttggtgattattctccaacctttggtacaagtggctgcatggtgtataggtgaatatggtgatcttcttgtatctggccagtgtgaagaggaagagcctattcaggtaacagaggatgaagtgttggatattttagaaagtgtcctaatctctaatatgtccacctctgtgacacgaggttatgccctcactgccattatgaagctttccactcgattcacttgtactgtaaaccgaattaagaaagtggtttccatctacggaagcagcattgatgtggaactccagcagagggcagtagaatataatgcacttttcaagaaatatgaccacatgaggtctgccctacttgagagaatgcctgtcatggaaaaagtgaccacaaatggccctactgagattgtgcagacaaatggagagacagaaccagctccactagagaccaaaccgccaccctctgggccacagcccaccagccaggccaatgatttattggatttgttgggaggaaatgacataacacctgttattccaactgcgcctacaagcaaaccatcttctgctggtggagaacttcttgatttgctgggagacatcaaccttacaggtgctccagctgctgctcctgcccctgcctcagtcccacagatatcccagccccccttcttgttggatgggctttcatcacagcctctcttcaatgatattgctgcaggcatcccctccatcacagcatacagtaagaatggcttgaagatagaattcacctttgaacggtcaaataccaaccccagtgtaacagtgataacgatacaggcctccaacagcacagagctagatatgacggactttgttttccaagctgcagtaccaaagacattccagctgcagctcttgtctcctagcagcagcattgtcccagcatttaacacggggaccatcacacaagtcattaaagttctgaaccctcagaagcaacagctgcgaatgcggatcaagcttacatataatcacaagggctcagcaatgcaagatctagcagaggtgaacaactttccccctcagtcctggcaatga

SEQ ID NO: 29437 - DNA, 2478 bp, Artificial Sequence
  derived and/or modified sequence
atgcctgccccaattcggttgcgcgagctgataaggacgatcagaaccgcgcggacccaggcggaagaacgagaaatgattcagaaagaatgcgccgccatccgttcatccttcagagaagaggacaacacttatagatgccggaacgttgcaaaactgttatacatgcatatgttagggtaccccgcacattttggacaactcgaatgtttgaagctgatcgcttcccagaaattcaccgataaacgaatcggttacctgggagcaatgcttctgctggacgagcggcaagatgtacatcttctgatgacaaactgcataaaaaacgaccttaaccacagcacccaatttgtgcagggcctagctctgtgcaccctcggatgtatgggctcgagcgagatgtgccgggatcttgcgggtgaggtagaaaagctgcttaagactagcaattcgtacctgaggaagaaggcggccctgtgcgccgtgcatgtcatacgtaaggtgccagaactcatggagatgttcctacccgctacaaagaaccttctaaatgaaaaaaaccatggagtcttgcatacatcagttgtgcttctaacagaaatgtgtgagcggtcccccgacatgttggcacacttccgcaagaacgaaaaattggtgccgcagctcgtgcggatcctgaaaaacctcattatgtctggctactcgccagagcacgatgtatctggtatttccgacccatttctgcaggttcgtattctccggcttctgaggattctcgggcgaaatgacgacgatagcagcgaggcaatgaatgacatcctggcccaggttgccacaaatacagaaacatccaagaatgttggcaatgcgatcctttatgagaccgtgctgacaatcatggacattaaatccgaatcaggcctaagggtgctggcaattaacattttgggaaggtttttactgaacaacgataagaatatccgctatgtggctttaacaagcctgttaaagacagtgcagactgaccacaacgctgtacagcgacaccgctctaccattgtggactgcctgaaagacttagatgtctccatcaaacggagggccatggagctttcatttgctctggtcaatggaaacaatataagaggtatgatgaaggaattgctgtattttctggacagttgtgaacctgagttcaaagctgattgtgcatctggtattttccttgccgctgaaaaatacgccccctccaaaaggtggcatatcgacacaattatgagggtgctgacgaccgctggctcttacgtgagagacgatgctgtgccgaacttaatccagctgatcacaaacagcgtggaaatgcacgcatacacagtgcaacggctgtataaagccatcctgggcgattattcccaacagcccttggtgcaggttgccgcatggtgtatcggcgaatacggggatctcctggtatcaggccagtgtgaggaggaagaaccgatccaggtgactgaggatgaggttctcgacatactagaatccgtcttgatctccaatatgagtacaagcgtaacacgcggatacgcactgactgcaatcatgaaactgagcacacggttcacctgtacagtgaacagaatcaaaaaagtggtgagtatatacggcagcagcatagatgtggaactgcaacagcgcgctgtcgaatacaacgcattattcaaaaagtatgatcacatgcggtcagcccttcttgagcgtatgcctgtgatggagaaggtgacaacaaacggcccgacagagatcgtacagacaaacggagaaaccgaaccagcgcccctggagacaaagcctcctccttccggcccccaaccaacatcccaggccaacgatctccttgatctgttgggcggaaacgatataaccccagtgatacccacagcacctaccagcaaaccatcttcggccggaggcgagctcttggacctcttgggtgacattaacctcacaggagcacctgccgccgctccagcccctgcatccgtgccgcaaatctcccagccgcctttcctgctggatggcctgagttctcaacccctcttcaatgacatcgccgcagggatcccctcaataactgcatactccaagaatggcctcaagatcgagttcacctttgagcgctcaaacacaaacccatccgttacggtaatcacgatccaggcctccaattctaccgagctcgacatgaccgattttgtcttccaggcagctgttccgaagacctttcagctccagctcttatcaccatcctccagcatcgtgccggcttttaacacaggaaccattacacaagtgatcaaagtgttgaatcctcagaaacagcagttgaggatgcgtatcaagcttacatataatcacaaaggatccgcaatgcaggatctggccgaagtcaataactttcccccgcaaagctggcagtag

SEQ ID NO: 29438 - DNA, 2478 bp, Artificial Sequence
  derived and/or modified sequence
atgcctgctccaatcaggctaagggagttaatcaggacaattcggacagctagaactcaggcagaggaaagagagatgatccaaaaggagtgcgcagcaatcagatccagcttccgggaagaagacaacacctacagatgtaggaatgtggccaaacttttatacatgcatatgctgggatatcccgcccactttgggcaactggagtgtctcaaacttatcgcttcccagaagttcacagacaaaagaatcggttatctgggagctatgctcctgttggacgagcggcaggatgtgcacttgttgatgacaaattgcatcaagaatgacttgaaccacagcacccaattcgtgcagggattggcactgtgcacacttggatgcatgggttcctccgagatgtgtcgagacctggcaggtgaggtggagaagctgctgaaaacctccaactcatacttacgtaagaaggccgccctgtgcgccgtgcatgtgatcaggaaagtccccgagctaatggaaatgttccttcctgcaaccaagaacctgctgaatgaaaagaatcacggagtcttgcatacgagtgtggtcctactcaccgaaatgtgcgaacgctcccctgacatgttggctcacttccgaaaggaaagtaaattggttccccagcttgtccggatattgaaaaacctgataatgtccggatattcgccagaacacgatgtctctgggattagtgatccttttctgcaggtgagaatcctccggctcctgagaatcctgggtaggaatgatgacgattcaagtgaggcaatgaacgacatcttggcacaggttgccaccaacactgagacttccaaaaacgtaggcaatgcaatactgtacgagactgtgctgacaataatggacatcaagtccgaaagcggtctcagagttctcgccatcaacatactgggccggttcctgctgaacaatgacaagaatattcggtatgtcgcacttactagcctgctgaaaaccgtccagaccgatcacaatgccgtgcagagacatcgctcaacaatcgtcgactgcctgaaggacttggacgtgtctataaagcgaagggcaatggaattatcatttgccctggttaacggaaacaatatccgcgggatgatgaaagagcttttatattttcttgatagctgtgaaccagagtttaaagctgactgcgcgtcggggatcttcctggcggcagagaagtacgctccctcgaaacgctggcacatcgacacaattatgcgcgtgctcacgactgccggcagctacgtccgggatgacgccgtgccaaacctcatccagttaatcacaaattccgtagaaatgcacgcctacacagtgcaacgcctgtataaggcgatcttgggggactacagccagcaacccctcgtgcaggtggcggcttggtgcattggagagtacggggatttgttagtcagcggacagtgcgaggaagaggaaccaattcaggtgacagaagacgaagttctggacattttggaaagcgtgctaatctcaaacatgagcacgtctgtgaccagaggatatgctctgacggccatcatgaagctgtctactagatttacctgcacagtcaataggatcaagaaggtcgtgtctatttatggaagcagtatagacgtggaactgcagcaaagggccgtggaatacaatgccctctttaaaaaatatgaccacatgagatcagctttgctggagaggatgcccgtcatggagaaagtcaccactaatgggcccacagagattgttcagaccaatggcgagacagagcctgcccccttggaaactaaacctcctccctctggtccccaaccgacatcccaggcaaatgatctgcttgatctgctcggtgggaacgacatcacacccgtcatcccaacagctccaacttcaaagccttcatctgcagggggcgaattactcgacttactgggagatataaatctcactggcgcccccgccgccgctcccgccccagccagcgtcccgcaaatcagccagccacccttcctgctcgatgggttgagcagtcaacctctatttaacgatatagctgccggcattccgagcattactgcctactcaaaaaacggattgaaaattgagtttacattcgaacggagcaatactaacccctccgtgaccgtaattaccatccaagcatccaattctaccgagctcgacatgacggactttgtgtttcaggccgctgtcccaaagacattccaactgcaattactttccccatccagcagcatcgtccctgcctttaacactggaacaataacgcaggtcataaaagttcttaatccccagaaacagcagttgaggatgcgaattaagctgacctataaccacaaagggagtgccatgcaggacctggctgaggttaacaacttccctccacagtcctggcagtag

SEQ ID NO: 29439 - DNA, 1698 bp, Artificial Sequence
  derived and/or modified sequence
atgtttgggagctgctgccactgctgtagaagacctcgaagttgctggttccatagcagatttcgagcagtttccggtgtccaatcacaagccgtgggcgtggagaaaaggagacagcgatcatgggcccggcgaggcagggaaccgcagggcttgttgagattattggagggacgaccccggggattggggcccggcggctccgcaagaaggggagtgccttgttgcggagtggcccccccgcgcatgcccgcacccatccgcttacgtgagctcattcgaaccatccggacagcaagaactcaagccgaggaacgggaaatgatacagaaggaatgcgccgctattcgttccagctttagggaggaggacaatacctaccggtgtcgaaatgtggcaaagttattatacatgcacatgttagggtacccagcccacttcgggcaactagaatgtcttaaactgattgcctctcagaaattcaccgataagcgcataggctacttaggcgccatgttactgctcgacgagcgccaggacgtgcacctgttgatgaccaactgcatcaaaaatgatctaaaccactccacacagttcgtgcaggggctagctctatgtaccttgggatgtatgggatcttcagaaatgtgccgcgatcttgccggggaggtggaaaaactgctcaagacttccaactcttacctgaggaagaaagcagccctgtgcgctgttcatgtaatccggaaagtgcccgagctgatggaaatgtttcttcccgccacaaagaacctcctcaatgaaaaaaatcatggagtgctccacacatctgtggtcctgttgactgaaatgtgtgagagatctccggatatgttggctcactttcggaaagaatcgaaactggtcccacagctggtgcgaattctaaagaatcttatcatgtcaggttacagtccagagcacgacgtgtcagggatatccgatccatttctccaggtccggatcctgaggctgctgaggatactaggtaggaatgatgacgacagtagcgaagccatgaatgacatcctcgcccaggttgcaaccaacacagagacgtctaaaaacgtggggaatgcaattctctacgagaccgtgctcaccattatggacatcaaatctgaatccggcctgcgggttctagctatcaatattctgggacggtttctactaaacaatgacaagaacataaggtacgtggccctgacaagcctcctgaaaacagtccaaacagatcataatgcagttcagagacaccgttccaccatcgtcgactgcttgaaagacctggacgtttccataaagagaagggctatggaactgagctttgcgttggttaatgggaataatatccgaggcatgatgaaggaactgctttattttctagactcatgcgagcctgagttcaaggcggactgcgccagcggtatcttcttagctgcggagaaatacgctccctcgaagcgctggcacattgacactataatgagagtactgacaacagcaggaagttacgtgcgcgacgacgccgttcctaacctcattcagcttattacaaattctgtggaaatgcacgcctatacagtgcagaggttgtataaggcaatcttgggcgattatagccctaccttcggcacgagcggctgtatggtgtaccgctag

SEQ ID NO: 29440 - DNA, 2478 bp, Artificial Sequence
  derived and/or modified sequence
atgcctgcccccatccggctgcgggagctgatccgcaccatcagaacagcccggacccaggccgaggagcgggagatgatccagaaggaatgtgccgccatccgcagcagcttccgggaggaggacaacacctaccgctgcagaaatgtggccaagctgctgtacatgcacatgctgggctacccagcccacttcggccagctggagtgcctgaagctgattgccagccagaagttcacagacaagagaattggctacctgggcgccatgctgctgctggatgagcggcaggatgtgcacctgctgatgaccaactgcatcaagaatgacctgaaccacagcacccagtttgtgcagggcctggccctgtgcaccctgggctgcatgggcagcagcgagatgtgccgggacctggccggggaggtggagaagctgctgaagaccagcaacagctacctgaggaagaaggccgccctgtgtgctgtgcacgtgatcaggaaggtgcctgagctgatggagatgttcctgcctgccaccaagaacctgctgaatgagaagaaccacggcgtgctgcacacctctgtggtgctgctgacagagatgtgtgagaggagcccagacatgctggcccacttcaggaagaatgagaagctggtgccccagctggtgcgcatcctgaagaacctgatcatgagcggctacagccctgagcatgatgtgtctggcatcagtgaccccttcctgcaggtgcgcatcctgcggctgctgcgcatcctgggcagaaatgatgatgacagcagcgaggccatgaatgacatcctggcccaggtggccaccaacacagagaccagcaagaatgtgggcaatgccatcctgtatgaaacagtgctgaccatcatggacatcaagtctgagagcggcctgcgggtgctggccatcaacatcctgggccgcttcctgctgaacaatgacaagaacatccgctacgtggccctgaccagcctgctgaagacagtgcagacagaccacaatgctgtgcagaggcacaggagcaccatcgtggactgcctgaaggacctggatgtgtccatcaagaggcgggccatggagctgagctttgccctggtgaatggaaacaacatccggggcatgatgaaggagctgctgtacttcctggacagctgtgagcctgagttcaaggctgactgtgccagcggcatcttcctggccgctgagaagtatgcccccagcaagcgctggcacatcgacaccatcatgagggtgctgaccacagctggcagctatgtgagagatgatgctgtgcccaacctgatccagctgatcaccaacagcgtggagatgcacgcctacacagtgcagaggctgtacaaggccatcctgggggactacagccagcagcccctggtgcaggtggccgcctggtgcattggagaatatggagacctgctggtgtctggccagtgtgaggaggaggagcccatccaggtgacagaagatgaggtgctggacatcctggagagcgtgctgatcagcaacatgagcacctctgtgacccggggctacgccctgacagccatcatgaagctgagcacccgcttcacctgcaccgtgaaccgcatcaagaaggtggtgtccatctacggcagcagcattgatgtggagctgcagcagagagctgtggagtacaatgccctcttcaagaagtatgaccacatgaggtctgccctgctggagaggatgcctgtgatggagaaggtgaccaccaacggccccacagaaattgtgcagaccaatggagaaacagagcccgcccccctggagaccaagcccccacccagcggcccccagcccaccagccaggccaatgacctgctggacctgctgggcggcaatgacatcacccctgtgatccccacagcccccaccagcaagcccagcagcgctggaggagagctgctggacctgctgggggacatcaacctgactggagccccagctgctgccccagccccagcctctgtgccccagatcagccagccccccttcctgctggatggcctgagcagccagcccctcttcaatgacattgctgctggcatccccagcatcacagcctacagcaagaatggcctgaagattgagttcacctttgagaggagcaacaccaaccccagcgtgaccgtcatcaccatccaggccagcaacagcacagagctggacatgacagactttgtgttccaggccgctgtgcccaagaccttccagctgcagctgctgagccccagcagcagcatcgtgcctgccttcaacacaggcaccatcacccaggtgatcaaggtgctgaacccccagaagcagcagctgaggatgaggatcaagctgacctacaaccacaagggcagcgccatgcaggacctggccgaggtgaacaacttccccccccagagctggcagtag

SEQ ID NO: 29441 - DNA, 2478 bp, Artificial Sequence
  derived and/or modified sequence
atgcctgcccccatccggctgcgggagctgatccgcaccatcagaacagcccggacccaggccgaggagcgggagatgatccagaaggaatgtgccgccatccgcagcagcttccgggaggaggacaacacctaccgctgcagaaatgtggccaagctgctgtacatgcacatgctgggctacccagcccacttcggccagctggagtgcctgaagctgattgccagccagaagttcacagacaagagaattggctacctgggcgccatgctgctgctggatgagcggcaggatgtgcacctgctgatgaccaactgcatcaagaatgacctgaaccacagcacccagtttgtgcagggcctggccctgtgcaccctgggctgcatgggcagcagcgagatgtgccgggacctggccggggaggtggagaagctgctgaagaccagcaacagctacctgaggaagaaggccgccctgtgtgctgtgcacgtgatcaggaaggtgcctgagctgatggagatgttcctgcctgccaccaagaacctgctgaatgagaagaaccacggcgtgctgcacacctctgtggtgctgctgacagagatgtgtgagaggagcccagacatgctggcccacttcaggaaggagagcaagctggtgccccagctggtgcgcatcctgaagaacctgatcatgagcggctacagccctgagcatgatgtgtctggcatcagtgaccccttcctgcaggtgcgcatcctgcggctgctgcgcatcctgggcagaaatgatgatgacagcagcgaggccatgaatgacatcctggcccaggtggccaccaacacagagaccagcaagaatgtgggcaatgccatcctgtatgaaacagtgctgaccatcatggacatcaagtctgagagcggcctgcgggtgctggccatcaacatcctgggccgcttcctgctgaacaatgacaagaacatccgctacgtggccctgaccagcctgctgaagacagtgcagacagaccacaatgctgtgcagaggcacaggagcaccatcgtggactgcctgaaggacctggatgtgtccatcaagaggcgggccatggagctgagctttgccctggtgaatggaaacaacatccggggcatgatgaaggagctgctgtacttcctggacagctgtgagcctgagttcaaggctgactgtgccagcggcatcttcctggccgctgagaagtatgcccccagcaagcgctggcacatcgacaccatcatgagggtgctgaccacagctggcagctatgtgagagatgatgctgtgcccaacctgatccagctgatcaccaacagcgtggagatgcacgcctacacagtgcagaggctgtacaaggccatcctgggggactacagccagcagcccctggtgcaggtggccgcctggtgcattggagaatatggagacctgctggtgtctggccagtgtgaggaggaggagcccatccaggtgacagaagatgaggtgctggacatcctggagagcgtgctgatcagcaacatgagcacctctgtgacccggggctacgccctgacagccatcatgaagctgagcacccgcttcacctgcaccgtgaaccgcatcaagaaggtggtgtccatctacggcagcagcattgatgtggagctgcagcagagagctgtggagtacaatgccctcttcaagaagtatgaccacatgaggtctgccctgctggagaggatgcctgtgatggagaaggtgaccaccaacggccccacagaaattgtgcagaccaatggagaaacagagcccgcccccctggagaccaagcccccacccagcggcccccagcccaccagccaggccaatgacctgctggacctgctgggcggcaatgacatcacccctgtgatccccacagcccccaccagcaagcccagcagcgctggaggagagctgctggacctgctgggggacatcaacctgactggagccccagctgctgccccagccccagcctctgtgccccagatcagccagccccccttcctgctggatggcctgagcagccagcccctcttcaatgacattgctgctggcatccccagcatcacagcctacagcaagaatggcctgaagattgagttcacctttgagaggagcaacaccaaccccagcgtgaccgtcatcaccatccaggccagcaacagcacagagctggacatgacagactttgtgttccaggccgctgtgcccaagaccttccagctgcagctgctgagccccagcagcagcatcgtgcctgccttcaacacaggcaccatcacccaggtgatcaaggtgctgaacccccagaagcagcagctgaggatgaggatcaagctgacctacaaccacaagggcagcgccatgcaggacctggccgaggtgaacaacttccccccccagagctggcagtag

SEQ ID NO: 29442 - DNA, 1698 bp, Artificial Sequence
  derived and/or modified sequence
atgtttggcagctgctgccactgctgccggcggcccaggagctgctggttccacagccgcttccgggctgtgtctggagtgcagagccaggccgtgggcgtggagaagaggcggcagaggtcctgggcccggcggggccgggagccccagggcctgctgcggctgctggagggccggccccggggcctgggccctgggggcagcgcccggcggggcgtgccctgctgcggcgtggccccacccaggatgcctgcccccatccggctgcgggagctgatccgcaccatcagaacagcccggacccaggccgaggagcgggagatgatccagaaggaatgtgccgccatccgcagcagcttccgggaggaggacaacacctaccgctgcagaaatgtggccaagctgctgtacatgcacatgctgggctacccagcccacttcggccagctggagtgcctgaagctgattgccagccagaagttcacagacaagagaattggctacctgggcgccatgctgctgctggatgagcggcaggatgtgcacctgctgatgaccaactgcatcaagaatgacctgaaccacagcacccagtttgtgcagggcctggccctgtgcaccctgggctgcatgggcagcagcgagatgtgccgggacctggccggggaggtggagaagctgctgaagaccagcaacagctacctgaggaagaaggccgccctgtgtgctgtgcacgtgatcaggaaggtgcctgagctgatggagatgttcctgcctgccaccaagaacctgctgaatgagaagaaccacggcgtgctgcacacctctgtggtgctgctgacagagatgtgtgagaggagcccagacatgctggcccacttcaggaaggagagcaagctggtgccccagctggtgcgcatcctgaagaacctgatcatgagcggctacagccctgagcatgatgtgtctggcatcagtgaccccttcctgcaggtgcgcatcctgcggctgctgcgcatcctgggcagaaatgatgatgacagcagcgaggccatgaatgacatcctggcccaggtggccaccaacacagagaccagcaagaatgtgggcaatgccatcctgtatgaaacagtgctgaccatcatggacatcaagtctgagagcggcctgcgggtgctggccatcaacatcctgggccgcttcctgctgaacaatgacaagaacatccgctacgtggccctgaccagcctgctgaagacagtgcagacagaccacaatgctgtgcagaggcacaggagcaccatcgtggactgcctgaaggacctggatgtgtccatcaagaggcgggccatggagctgagctttgccctggtgaatggaaacaacatccggggcatgatgaaggagctgctgtacttcctggacagctgtgagcctgagttcaaggctgactgtgccagcggcatcttcctggccgctgagaagtatgcccccagcaagcgctggcacatcgacaccatcatgagggtgctgaccacagctggcagctatgtgagagatgatgctgtgcccaacctgatccagctgatcaccaacagcgtggagatgcacgcctacacagtgcagaggctgtacaaggccatcctgggggactacagccccaccttcggcaccagcggctgcatggtgtacagatag

SEQ ID NO: 29443 - DNA, 2478 bp, Artificial Sequence
  derived and/or modified sequence
atgcccgcccccatccggctgcgggagctgatccggaccatccggaccgcacgcacacaggccgaagagcgtgagatgatccaaaaagagtgcgccgcaatccggtccagcttcagagaggaggacaatacatatcgttgtaggaatgtggccaagctcctctacatgcacatgctcggctaccctgcccatttcggacaactcgagtgcctgaaactaatcgcatcccagaagttcaccgacaagcgcatcggttacctgggcgccatgctgctccttgatgagcggcaagacgtgcacctacttatgactaattgcatcaaaaacgacctgaatcattcgacacaattcgtgcaaggcttggccttgtgtaccttgggctgcatgggtagtagcgagatgtgccgcgatcttgctggagaagtggaaaaactgctgaagacctctaactcctatctgcggaagaaagctgcactgtgcgcggtgcacgtgattaggaaggtgcctgagctgatggagatgtttctgcctgctactaagaatctgttgaacgagaagaatcacggagtcttgcacacaagcgttgtactgctgaccgaaatgtgcgaacggagccccgatatgctggcccattttaggaaaaatgaaaaattggtaccgcagctggtccggattcttaaaaatttaatcatgagcggatactcaccagaacacgatgtgtctggcatctctgacccctttctgcaggtaagaatactgcgcctgctgcgtatcctgggaagaaatgatgatgactcctcagaagccatgaatgacatcttggcgcaggtggcgaccaacacagaaaccagcaaaaacgtcggtaacgctattctgtatgaaaccgttctgaccatcatggacattaagagtgagtccggcctccgagtgctggccataaatattctgggccggttcctcttaaataatgacaaaaacatccgctacgttgctctgacttctctgctgaaaacagtccaaaccgatcataatgcagttcaacgacatagatccaccatcgttgactgcctgaaagacctggatgtgtctatcaagcggagagccatggaattgtcattcgccctcgtgaacgggaataacatacgaggcatgatgaaagagcttctttactttttagatagttgtgagcccgaatttaaagccgattgcgcctctgggattttcctggccgccgagaaatacgccccatcaaagcggtggcacatagacaccataatgagagtgctgaccactgccggtagctacgtgcgggatgatgcagttccaaacctgattcagctcatcactaactctgtggagatgcacgcttatacagtccaacgtctgtataaggccattttaggcgactactcccaacagccccttgtccaagtagccgcttggtgcatcggggaatacggcgatctgctggtgagcggacaatgcgaagaagaagagcctatacaggttacagaagatgaggtactggatattctcgaatcggtcctcattagtaatatgtcaacgtcagtgacccgggggtacgccttgaccgctattatgaaactctccaccaggttcacatgtaccgttaaccgaatcaagaaggtcgtgagtatttatggttccagcatcgacgtcgaacttcagcaacgggccgtggaatacaatgcgctgtttaagaagtatgatcacatgcgctcagcactattagaaagaatgcccgtgatggaaaaggtgaccaccaacggtcctactgaaattgttcaaaccaacggagagactgaaccagcccctctggagacaaaacccccaccttctggccctcagccgaccagccaggccaacgacctgctagatctgttgggcgggaatgacataaccccagtgattcccactgccccaacgagcaaaccgtcttctgccggtggcgaacttctagatctattaggggatattaacctaactggcgcccctgcagctgcccctgccccggccagtgtccctcagatcagtcagccaccgtttttactggatggattgagtagtcaacctcttttcaacgatatcgcagcgggcatcccatctattactgcttattcaaagaacggcctgaaaatcgagtttacctttgaaaggtctaacacaaacccatctgttacagtgataacgatccaagcatccaattcaacggagctggatatgactgactttgtgtttcaggcggcggtacctaaaacctttcagctgcaattgctgtctcccagttcttcaattgtgcctgcttttaatacaggaaccattacacaagtgatcaaagtacttaatccacagaagcaacaattgcgcatgcgtattaaattaacctacaaccataagggcagtgctatgcaggatttggctgaagtgaataacttcccccctcagagctggcagtag

SEQ ID NO: 29444 - DNA, 2478 bp, Artificial Sequence
  derived and/or modified sequence
atgcccgcccccatccggctgcgggagctgatccggaccatccggaccgccaggacccaggctgaagagagggaaatgatccaaaaggaatgcgcagccatcagatcaagctttagggaggaggataacacttaccgatgtcgcaacgtcgctaagctcttgtacatgcacatgttgggctacccggcccacttcggccagctggagtgtctgaaactcatagcttcacagaagttcacagacaaacgcatcgggtatttaggggcaatgcttttgctggatgagcgccaagacgttcacctgttgatgactaactgcatcaaaaacgatctaaatcattcaacccagtttgtgcaaggactggctctgtgcacgctgggctgcatgggcagctctgagatgtgtagggatttggcaggcgaagtagaaaagttgcttaaaacaagcaattcatatctacggaagaaggcggccctttgcgccgttcatgtgatacgaaaagtcccagaactcatggaaatgttcttgccagcaacaaaaaatctcctgaatgagaagaatcatggggtgcttcacacgtccgtggtcctcctcaccgaaatgtgtgaacgaagccccgacatgctagcccattttaggaaagaatcgaaactcgtacctcagctggtgaggatcctcaaaaacctaattatgagcggctattccccagagcacgatgtatctgggatctcggacccattcttgcaagtgcgcattctaagactacttcgtatcctcggtcgaaacgacgatgattcatccgaagccatgaacgacattctagcccaggtcgccactaataccgagacgagtaagaatgtggggaatgcaatcctgtatgaaaccgttcttactattatggatattaaaagcgagtctggccttcgcgtgcttgcgatcaacattctgggtaggtttctgctgaacaacgacaagaacattcgttacgtggctctgacgtccctgcttaaaacggttcaaaccgatcataacgctgtgcaacgacatcggtccaccattgtagactgcctgaaggacctcgacgtgtctattaagcgccgggccatggaattgagctttgctctggtaaacggcaataatattcggggcatgatgaaagagctgttgtacttcctggatagttgtgaaccggagttcaaggctgattgcgcttcaggaattttcttggccgccgagaaatacgctccctcgaagcggtggcacattgataccatcatgcgcgtcttaacaactgctggttcttacgtgcgtgacgatgcagttcctaaccttattcagctgataacaaactcagttgagatgcacgcttacacggtgcaacgactttataaagccattctgggagattattcacaacagccactggtccaggtggcagcctggtgtattggagaatacggggaccttctggtgtcaggccagtgtgaagaagaagagccaattcaagtcaccgaagatgaggtacttgacatcctggaaagtgtgctcatctctaatatgtctacttctgtgacccgcggttacgccttgaccgctatcatgaagctgtccaccagattcacatgcacagtcaatcgcattaagaaggtggtgagcatttatggctcgtccatagatgtggaacttcagcaacgtgcagtggaatataatgccttgtttaaaaagtatgaccacatgcgcagtgctctcctggagcgcatgcctgtgatggaaaaagtgacaaccaatggaccgacagagattgttcagactaacggcgagactgagcctgcgccactggagaccaagccgccaccctccggaccccagccaacctctcaggctaatgacctgctggaccttttgggagggaacgatattacgcccgtcattcctacagcccccacctcaaaaccatccagcgcgggcggtgagctcctagacttgctgggggatataaacctgactggtgctccagccgctgcaccggcaccagctagtgtgccacagatctcccagcccccttttcttctggacggcctaagtagccaaccactttttaacgacattgcggccggcatcccgtcgataacagcctattccaagaacggcttgaaaatcgagttcaccttcgaaaggtcaaataccaacccaagtgtgaccgtcataaccattcaggccagcaatagtactgagctcgatatgacggattttgtgttccaggctgcagtgccaaaaacttttcaacttcagcttctgagtccttcttctagtatcgtaccggcctttaacactggaaccatcacgcaggtcattaaagtgctgaatcctcaaaaacagcagctaaggatgagaattaagttgacatataatcacaagggctcggccatgcaggatctggccgaggtgaacaattttcccccacagtcttggcaatag

SEQ ID NO: 29445 - DNA, 1698 bp, Artificial Sequence
  derived and/or modified sequence
atgttcggcagctgctgccactgctgccggcggccccggagctgctggttccattctaggttcagagccgttagcggtgtacagtcacaggctgttggagtggagaagcggagacagcgctcctgggcccggaggggaagagaacctcaaggattattgagacttctggagggtcggcctcggggcctcggaccgggcggcagtgcacggcgaggggtgccttgctgcggggtggcaccacctcggatgcccgcacccattagattaagggagctcatccgaaccatcagaaccgcccgaacacaggcagaggagagggagatgattcagaaagaatgcgctgccataaggagctcctttcgggaggaagataatacttataggtgcagaaatgtggctaaactcctgtacatgcacatgctcggttaccccgcacattttggccagctggagtgcctgaagttgatagcttcacaaaagtttacagataaaagaattgggtacctgggggcaatgttgttactcgacgaacgacaggacgtgcaccttctgatgactaattgtatcaagaacgatctcaaccactctacccagtttgtgcagggactggccctctgtacactgggatgcatgggtagctctgaaatgtgtagggaccttgccggagaggtcgagaaattgctgaagactagcaactcatatctgaggaaaaaagccgctctttgtgccgtgcacgtaataagaaaggtgcccgagctgatggagatgttcctgcctgctaccaagaatctgctgaatgagaagaaccatggcgtcctgcatacctcagtagttttgcttactgagatgtgcgagagaagtcccgacatgctggctcatttccgcaaagaaagcaaactggttccccagctggttcgcatcctgaagaacctcatcatgagcggatatagcccagaacatgatgtctcaggtattagcgatcccttcttgcaggtgcgaatcctccgattactgcgtatcttaggacggaatgacgacgactcttcagaagccatgaatgatattttggcgcaggtagcaactaataccgaaacctccaaaaatgtgggcaatgcaattctgtacgaaaccgttttgaccataatggacatcaagagcgaaagtggactgcgggtgcttgccatcaacatcctgggacggtttttgctgaataatgacaagaacattcggtacgtcgcccttacgagcctgcttaagactgtccagacagatcataacgccgttcagcggcacaggagcacaattgtcgattgtctgaaggatctggacgttagtatcaaacggcgtgcgatggagttgtcattcgctttggtgaacgggaataacatacgcggcatgatgaaggagctgctttattttctagatagttgtgagcctgagttcaaagccgattgcgcctcaggcatatttttagccgcagagaagtatgcaccatccaagcgctggcatatcgatacaatcatgagggttctgacaactgccggcagctacgtgagagacgatgccgttcccaaccttattcaactgattactaacagcgttgaaatgcatgcttacacggtgcagaggctttataaggcgatcctgggtgattacagtcccacatttggcacttccggctgcatggtttatagatag

SEQ ID NO: 29446 - DNA, 2478 bp, Artificial Sequence
  derived and/or modified sequence
atgccagcaccaattcgcctccgtgaactgatccgcacgatcaggaccgccagaacacaggccgaagaacgggagatgattcaaaaggaatgtgctgccatacgatcatcatttagggaagaagacaacacctaccgctgtagaaacgttgccaagcttctgtacatgcacatgcttggatatccggcacatttcggacagttggagtgcctgaagctgattgcaagccagaaatttacagataagcgcatcggctatctgggcgctatgctccttctggatgagagacaggacgtccaccttttgatgaccaactgtattaaaaatgacctcaaccactctactcagttcgtgcaggggctcgccctctgtaccctcggctgtatgggctcttccgaaatgtgtcgtgacctggctggcgaggtggaaaagctgctcaaaacttcgaattcatatctgcggaagaaggcagcgctttgcgcagttcatgtcattagaaaggttcctgaactgatggagatgttcctcccggctactaagaaccttctcaatgagaaaaaccatggcgtcctgcacacaagtgtggtccttctgactgaaatgtgcgaaagaagtccagatatgctggcccatttcaggaaaaatgagaaactggttccacaactcgtgcggatcctcaaaaatctgatcatgtctggatatagcccagaacacgacgttagcggcatcagtgacccttttctgcaggttagaattctgaggctcctgcgaatcctagggaggaacgatgacgactccagcgaggcgatgaacgatattctggctcaagtggctacaaatacagagactagcaaaaatgtgggaaacgctatcctttacgagaccgtgttaacaatcatggacattaaaagtgagtcaggacttagggtcctggcaatcaacatcctgggaaggttcctcctcaacaatgacaagaatatccgttacgtcgcattgacatccctgctaaagaccgtgcagacggatcataacgccgtgcagaggcaccgttccacaatcgtggattgcctcaaggacctggacgtctctattaagaggcgtgctatggaactgtcctttgcattagtcaacggaaataatattaggggaatgatgaaagaactcttatatttccttgattcttgcgaacccgagtttaaagcggattgcgcctctggaatcttcttagccgcagaaaagtatgccccttcgaagcgctggcacatcgacacgattatgcgggtgctgacgaccgcagggagctacgtcagggatgatgcagtccccaatcttattcaactcattacaaattccgtggaaatgcacgcatatactgtacaacgcttgtacaaggcaatcctgggcgattactctcagcagccactggtgcaagtggccgcttggtgtataggcgaatacggcgatctgctagttagtgggcagtgtgaagaggaggagcctatacaggtgacagaggatgaggtactcgatattctggaatctgtgctgatatctaacatgtccactagtgtgacacggggttatgcacttacggccatcatgaagctgtccactcgcttcacatgtactgtgaacagaataaaaaaagtggtttccatatacgggtcatctatagacgtggagctgcagcagcgagctgtggaatataatgcactctttaagaagtacgaccatatgagaagcgcgcttctggagaggatgcccgtgatggaaaaagtgacaactaacggtccaactgagatcgtgcagaccaacggcgagacagagccagcaccacttgaaactaagcctcctccgtccggtccccagccaacaagccaggccaacgatctgctagatctcctggggggaaacgacattaccccggtcattcctaccgccccaaccagcaaaccatcttccgccggaggagaactgctagatcttctgggggatataaatctgacaggcgcaccagcggctgcacctgctcccgcatcagtaccccaaattagtcaaccaccctttttactcgacggcctctcgtctcagcctctgtttaatgacatcgctgcgggaataccttctataactgcatactccaagaacggcctcaagattgaattcactttcgaaaggtccaatactaatcccagcgtgacagtgatcaccatacaggcgtctaactccactgagttagacatgaccgattttgtgtttcaggccgctgtcccaaaaacatttcagctgcagctgctctccccctccagttctattgtccccgcattcaataccgggacaataacccaggttatcaaggtcttgaacccccagaaacagcagctcagaatgcgaatcaagctgacgtataaccataaaggctccgcgatgcaggatctcgctgaggttaacaactttcccccacaaagttggcagtag

SEQ ID NO: 29447 - DNA, 2478 bp, Artificial Sequence
  derived and/or modified sequence
atgcctgctcccattcgcctaagagagttaatccgcaccattcgtacagccaggacccaagctgaggagcgtgaaatgatccaaaaggagtgcgcggctattcggtctagcttcagagaggaggacaacacctaccgatgtcggaatgtggcaaaattgctttacatgcacatgctcggttaccccgctcattttgggcagctggagtgcctgaagctgatcgcatcccagaaatttaccgacaaaaggattggctacctgggcgcaatgttattattggacgaaagacaggacgttcacttgctcatgaccaattgcattaaaaatgacctgaatcattccacacaatttgttcagggactcgccctttgcacactgggctgtatgggatcaagtgagatgtgccgtgacttggctggggaggtggagaaactgctgaaaactagtaattcttacctcagaaaaaaggcagccctgtgcgcagtccatgtgatccggaaggtcccagagctgatggagatgttcttacctgccactaaaaatctcttgaacgaaaaaaatcacggagttcttcatacaagtgttgttttgctgaccgaaatgtgcgagaggagcccagacatgctggcacacttccgcaaagagagtaagctcgtgcctcaactcgttcgaatacttaagaacttaattatgagtggctactcacctgaacacgatgtatcaggaatctcagaccccttcctccaggtgagaattcttaggttactccgcatcctgggccgtaacgacgacgactcatcagaggccatgaatgacatcctagcacaagtagccaccaacaccgaaactagtaaaaatgttgggaacgccattttgtacgagacagtgctgaccatcatggatattaaatccgagtctggtcttcgcgtcctggccattaacatcctcgggcgttttctgttgaataacgacaaaaatataaggtacgtggccctcacaagccttctgaagaccgtgcagacagaccataatgccgtgcaaagacatcgctcgaccatcgtcgattgcctgaaagacctggacgtttctattaagcgacgggctatggagctgtccttcgcccttgtgaacggcaacaatattaggggcatgatgaaggaactgttatattttctagactcctgcgagcccgagttcaaagcagactgtgccagcgggattttcctggctgccgaaaagtacgctccctcgaagcgctggcacattgacacaattatgcgtgtgctaaccaccgcaggctcctacgtgagggacgacgccgtgccgaatttgattcaactgattacgaattcggtcgaaatgcatgcttacactgtgcagagactgtacaaggcaatcttaggcgactatagccagcagcctctggtccaggttgctgcttggtgtatcggcgaatatggcgatctgctcgtgagcggccagtgtgaggaggaggaacctatccaggtgacagaagacgaagtgctagacatccttgagtctgtcttgatttcaaacatgagtactagcgtgacacggggatatgccctgaccgccatcatgaagctgtctacccgatttacttgtacggtgaataggataaagaaggtggtaagtatctacgggtcttccattgacgttgagctccagcagagggctgttgaatacaatgcgctgtttaagaagtatgatcacatgcgaagtgccctgttagagcggatgcccgtcatggaaaaggttaccaccaatgggcctaccgagatcgtgcagacgaatggggaaacagaaccagccccactggagacaaaaccaccccctagcgggcctcagccaacaagtcaagccaatgacctgctagatctgctgggaggtaacgacatcacacctgtgatcccgactgctcctacttccaagccaagctccgcaggcggtgagttgctggatctattaggggacataaaccttaccggagctcccgctgccgctcccgcacccgcttcggtgcctcagattagtcagcctcccttcttgctggatggtctttccagccaacctctttttaacgacatagcggcaggaattcccagtattacagcctacagtaaaaacggtctgaagatcgaattcacatttgagcgctctaacactaatcctagcgtgaccgtcattactattcaagccagtaatagtaccgaattggacatgactgacttcgtgttccaggctgctgtccccaagactttccagctccaactacttagtcccagttcttctattgtgccagcttttaacaccggtactattacgcaagttatcaaggtgctgaacccacagaaacagcaattgaggatgaggatcaagttaacctataaccataaagggagcgccatgcaggacctggcggaagttaacaactttcctccgcagtcttggcaatag

SEQ ID NO: 29448 - DNA, 1698 bp, Artificial Sequence
  derived and/or modified sequence
atgttcgggagctgttgccactgctgtcgcagaccacggtcttgctggtttcactcccggtttagggccgtcagcggcgtccaatcgcaggccgtcggtgtcgagaaaagacgtcagcgaagttgggcacggagagggagggaacctcagggcctcctgagactgctagagggaagaccacgagggctaggcccagggggttccgcacgaagaggtgtgccatgctgtggagtggcaccccctcgtatgcccgcacctataaggctgcgggagttgatccggacaattcggacggcgaggacacaggcagaggaacgagagatgatacagaaagaatgcgccgctattcgctcctccttccgagaagaggacaacacttacagatgcagaaacgtggcaaagctgttgtacatgcatatgctgggctatcccgcacactttggccagcttgagtgtctgaaactcatagccagccagaagtttacagacaagagaataggctatctcggcgctatgctattgctagatgagcggcaggacgtacaccttctaatgactaactgcatcaaaaatgacctcaaccacagtacccagtttgtgcagggtctggcactatgcacgctcgggtgcatgggaagctcggaaatgtgtcgagacctggccggagaggttgaaaagttgttgaaaacctctaatagttatttaaggaaaaaagcggcattgtgtgcagttcatgtgatacgaaaggtgcctgaactgatggaaatgttcctccctgccacaaagaaccttttaaacgagaagaaccacggagtactccacacttcagtggtactgctgactgagatgtgtgagcgctctccggatatgctggcacacttccgcaaagaaagcaaactcgtacctcagctggtgaggatcttgaaaaatcttatcatgagcggctattccccagagcacgatgtgtctggcattagcgaccctttcctgcaggtgagaatactgaggctgttaaggatcctggggcgaaacgatgatgactctagcgaggcaatgaacgacatcttggcccaagtggctacaaacactgaaacatcaaagaatgtggggaacgccatcctgtatgagacagttctgacaataatggatattaagtccgagtccgggctccgcgttctcgctattaatatattgggaagatttttgctcaacaatgacaaaaatataaggtacgtggctctgacatcgctgttaaagactgttcagaccgatcacaatgccgtccagcggcaccggtccactatcgtggactgcctgaaggacctggatgtgtcgatcaaacggagagccatggaattatccttcgcgctggtcaacgggaacaacattcgtgggatgatgaaagagcttctctatttcttagatagttgtgagcccgagttcaaggcagactgtgcctcggggattttccttgctgccgagaagtatgcaccatcgaaacggtggcacatcgataccatcatgcgcgtgctaaccacagctggctcctatgttcgcgacgatgccgtgcctaacctgattcagctgataaccaattccgtcgagatgcatgcctacacagtccagaggttatataaagcaatcctgggggactatagtccaaccttcggcactagtggctgtatggtctaccgttag

SEQ ID NO: 29449 - DNA, 2478 bp, Artificial Sequence
  derived and/or modified sequence
atgcccgcccccatcagactgagagagctgatcagaaccatcagaaccgccagaacccaggccgaggagagagagatgatccagaaggagtgcgccgccatcagaagcagcttcagagaggaggacaacacctacagatgcagaaacgtggccaagctgctgtacatgcacatgctgggctaccccgcccacttcggccagctggagtgcctgaagctgatcgccagccagaagttcaccgacaagagaatcggctacctgggcgccatgctgctgctggacgagagacaggacgtgcacctgctgatgaccaactgcatcaagaacgacctgaaccacagcacccagttcgtgcagggcctggccctgtgcaccctgggctgcatgggcagcagcgagatgtgcagagacctggccggcgaggtggagaagctgctgaagaccagcaacagctacctgagaaagaaggccgccctgtgcgccgtgcacgtgatcagaaaggtgcccgagctgatggagatgttcctgcccgccaccaagaacctgctgaacgagaagaaccacggcgtgctgcacaccagcgtggtgctgctgaccgagatgtgcgagagaagccccgacatgctggcccacttcagaaagaacgagaagctggtgccccagctggtgagaatcctgaagaacctgatcatgagcggctacagccccgagcacgacgtgagcggcatcagcgaccccttcctgcaggtgagaatcctgagactgctgagaatcctgggcagaaacgacgacgacagcagcgaggccatgaacgacatcctggcccaggtggccaccaacaccgagaccagcaagaacgtgggcaacgccatcctgtacgagaccgtgctgaccatcatggacatcaagagcgagagcggcctgagagtgctggccatcaacatcctgggcagattcctgctgaacaacgacaagaacatcagatacgtggccctgaccagcctgctgaagaccgtgcagaccgaccacaacgccgtgcagagacacagaagcaccatcgtggactgcctgaaggacctggacgtgagcatcaagagaagagccatggagctgagcttcgccctggtgaacggcaacaacatcagaggcatgatgaaggagctgctgtacttcctggacagctgcgagcccgagttcaaggccgactgcgccagcggcatcttcctggccgccgagaagtacgcccccagcaagagatggcacatcgacaccatcatgagagtgctgaccaccgccggcagctacgtgagagacgacgccgtgcccaacctgatccagctgatcaccaacagcgtggagatgcacgcctacaccgtgcagagactgtacaaggccatcctgggcgactacagccagcagcccctggtgcaggtggccgcctggtgcatcggcgagtacggcgacctgctggtgagcggccagtgcgaggaggaggagcccatccaggtgaccgaggacgaggtgctggacatcctggagagcgtgctgatcagcaacatgagcaccagcgtgaccagaggctacgccctgaccgccatcatgaagctgagcaccagattcacctgcaccgtgaacagaatcaagaaggtggtgagcatctacggcagcagcatcgacgtggagctgcagcagagagccgtggagtacaacgccctgttcaagaagtacgaccacatgagaagcgccctgctggagagaatgcccgtgatggagaaggtgaccaccaacggccccaccgagatcgtgcagaccaacggcgagaccgagcccgcccccctggagaccaagcccccccccagcggcccccagcccaccagccaggccaacgacctgctggacctgctgggcggcaacgacatcacccccgtgatccccaccgcccccaccagcaagcccagcagcgccggcggcgagctgctggacctgctgggcgacatcaacctgaccggcgcccccgccgccgcccccgcccccgccagcgtgccccagatcagccagccccccttcctgctggacggcctgagcagccagcccctgttcaacgacatcgccgccggcatccccagcatcaccgcctacagcaagaacggcctgaagatcgagttcaccttcgagagaagcaacaccaaccccagcgtgaccgtgatcaccatccaggccagcaacagcaccgagctggacatgaccgacttcgtgttccaggccgccgtgcccaagaccttccagctgcagctgctgagccccagcagcagcatcgtgcccgccttcaacaccggcaccatcacccaggtgatcaaggtgctgaacccccagaagcagcagctgagaatgagaatcaagctgacctacaaccacaagggcagcgccatgcaggacctggccgaggtgaacaacttccccccccagagctggcagtag

SEQ ID NO: 29450 - DNA, 2478 bp, Artificial Sequence
  derived and/or modified sequence
atgcccgcccccatcagactgagagagctgatcagaaccatcagaaccgccagaacccaggccgaggagagagagatgatccagaaggagtgcgccgccatcagaagcagcttcagagaggaggacaacacctacagatgcagaaacgtggccaagctgctgtacatgcacatgctgggctaccccgcccacttcggccagctggagtgcctgaagctgatcgccagccagaagttcaccgacaagagaatcggctacctgggcgccatgctgctgctggacgagagacaggacgtgcacctgctgatgaccaactgcatcaagaacgacctgaaccacagcacccagttcgtgcagggcctggccctgtgcaccctgggctgcatgggcagcagcgagatgtgcagagacctggccggcgaggtggagaagctgctgaagaccagcaacagctacctgagaaagaaggccgccctgtgcgccgtgcacgtgatcagaaaggtgcccgagctgatggagatgttcctgcccgccaccaagaacctgctgaacgagaagaaccacggcgtgctgcacaccagcgtggtgctgctgaccgagatgtgcgagagaagccccgacatgctggcccacttcagaaaggagagcaagctggtgccccagctggtgagaatcctgaagaacctgatcatgagcggctacagccccgagcacgacgtgagcggcatcagcgaccccttcctgcaggtgagaatcctgagactgctgagaatcctgggcagaaacgacgacgacagcagcgaggccatgaacgacatcctggcccaggtggccaccaacaccgagaccagcaagaacgtgggcaacgccatcctgtacgagaccgtgctgaccatcatggacatcaagagcgagagcggcctgagagtgctggccatcaacatcctgggcagattcctgctgaacaacgacaagaacatcagatacgtggccctgaccagcctgctgaagaccgtgcagaccgaccacaacgccgtgcagagacacagaagcaccatcgtggactgcctgaaggacctggacgtgagcatcaagagaagagccatggagctgagcttcgccctggtgaacggcaacaacatcagaggcatgatgaaggagctgctgtacttcctggacagctgcgagcccgagttcaaggccgactgcgccagcggcatcttcctggccgccgagaagtacgcccccagcaagagatggcacatcgacaccatcatgagagtgctgaccaccgccggcagctacgtgagagacgacgccgtgcccaacctgatccagctgatcaccaacagcgtggagatgcacgcctacaccgtgcagagactgtacaaggccatcctgggcgactacagccagcagcccctggtgcaggtggccgcctggtgcatcggcgagtacggcgacctgctggtgagcggccagtgcgaggaggaggagcccatccaggtgaccgaggacgaggtgctggacatcctggagagcgtgctgatcagcaacatgagcaccagcgtgaccagaggctacgccctgaccgccatcatgaagctgagcaccagattcacctgcaccgtgaacagaatcaagaaggtggtgagcatctacggcagcagcatcgacgtggagctgcagcagagagccgtggagtacaacgccctgttcaagaagtacgaccacatgagaagcgccctgctggagagaatgcccgtgatggagaaggtgaccaccaacggccccaccgagatcgtgcagaccaacggcgagaccgagcccgcccccctggagaccaagcccccccccagcggcccccagcccaccagccaggccaacgacctgctggacctgctgggcggcaacgacatcacccccgtgatccccaccgcccccaccagcaagcccagcagcgccggcggcgagctgctggacctgctgggcgacatcaacctgaccggcgcccccgccgccgcccccgcccccgccagcgtgccccagatcagccagccccccttcctgctggacggcctgagcagccagcccctgttcaacgacatcgccgccggcatccccagcatcaccgcctacagcaagaacggcctgaagatcgagttcaccttcgagagaagcaacaccaaccccagcgtgaccgtgatcaccatccaggccagcaacagcaccgagctggacatgaccgacttcgtgttccaggccgccgtgcccaagaccttccagctgcagctgctgagccccagcagcagcatcgtgcccgccttcaacaccggcaccatcacccaggtgatcaaggtgctgaacccccagaagcagcagctgagaatgagaatcaagctgacctacaaccacaagggcagcgccatgcaggacctggccgaggtgaacaacttccccccccagagctggcagtag

SEQ ID NO: 29451 - DNA, 1698 bp, Artificial Sequence
  derived and/or modified sequence
atgttcggcagctgctgccactgctgcagaagacccagaagctgctggttccacagcagattcagagccgtgagcggcgtgcagagccaggccgtgggcgtggagaagagaagacagagaagctgggccagaagaggcagagagccccagggcctgctgagactgctggagggcagacccagaggcctgggccccggcggcagcgccagaagaggcgtgccctgctgcggcgtggccccccccagaatgcccgcccccatcagactgagagagctgatcagaaccatcagaaccgccagaacccaggccgaggagagagagatgatccagaaggagtgcgccgccatcagaagcagcttcagagaggaggacaacacctacagatgcagaaacgtggccaagctgctgtacatgcacatgctgggctaccccgcccacttcggccagctggagtgcctgaagctgatcgccagccagaagttcaccgacaagagaatcggctacctgggcgccatgctgctgctggacgagagacaggacgtgcacctgctgatgaccaactgcatcaagaacgacctgaaccacagcacccagttcgtgcagggcctggccctgtgcaccctgggctgcatgggcagcagcgagatgtgcagagacctggccggcgaggtggagaagctgctgaagaccagcaacagctacctgagaaagaaggccgccctgtgcgccgtgcacgtgatcagaaaggtgcccgagctgatggagatgttcctgcccgccaccaagaacctgctgaacgagaagaaccacggcgtgctgcacaccagcgtggtgctgctgaccgagatgtgcgagagaagccccgacatgctggcccacttcagaaaggagagcaagctggtgccccagctggtgagaatcctgaagaacctgatcatgagcggctacagccccgagcacgacgtgagcggcatcagcgaccccttcctgcaggtgagaatcctgagactgctgagaatcctgggcagaaacgacgacgacagcagcgaggccatgaacgacatcctggcccaggtggccaccaacaccgagaccagcaagaacgtgggcaacgccatcctgtacgagaccgtgctgaccatcatggacatcaagagcgagagcggcctgagagtgctggccatcaacatcctgggcagattcctgctgaacaacgacaagaacatcagatacgtggccctgaccagcctgctgaagaccgtgcagaccgaccacaacgccgtgcagagacacagaagcaccatcgtggactgcctgaaggacctggacgtgagcatcaagagaagagccatggagctgagcttcgccctggtgaacggcaacaacatcagaggcatgatgaaggagctgctgtacttcctggacagctgcgagcccgagttcaaggccgactgcgccagcggcatcttcctggccgccgagaagtacgcccccagcaagagatggcacatcgacaccatcatgagagtgctgaccaccgccggcagctacgtgagagacgacgccgtgcccaacctgatccagctgatcaccaacagcgtggagatgcacgcctacaccgtgcagagactgtacaaggccatcctgggcgactacagccccaccttcggcaccagcggctgcatggtgtacagatag

SEQ ID NO: 29452 - protein, 129 aa, Artificial Sequence
  derived and/or modified sequence
TRSSVLADALNAINNAEKTGKRQVLIRPSSKVIIKFLQVMQKHGYIGEFEYIDDHRSGKIVVQLNGRLNKCGVISPRFNVKIGDIEKWTANLLPARQFGYVILTTSAGIMDHEEARRKHVSGKILGFVY

SEQ ID NO: 29453 - protein, 130 aa, Artificial Sequence [sequence omitted]

SEQ ID NO: 29454 - DNA, 393 bp, Artificial Sequence
  derived and/or modified sequence
atggtgcggatgaatgtcctggctgacgcgctgaagagcatcaataatgccgagaaaaggggcaagaggcaggttctgatccgcccttgctcgaaagtcattgtgagattccttacagtgatgatgaagcatggctacatcggagagttcgaaattatcgatgatcaccgggccggcaaaatcgtcgtaaacttgaccggacgtctcaacaaatgcggcgtgatcagtcctcgctttgatgtgcaactgaaagaccttgagaagtggcaaaataatctcctgccgagtagacaattcggtttcattgtgttgaccactagcgcaggcattatggatcacgaggaggctcgcagaaaacatacgggtgggaaaatcctcggattcttcttctag

SEQ ID NO: 29455 - DNA, 393 bp, Artificial Sequence
  derived and/or modified sequence
atggtgaggatgaacgtgctcgcagacgccttgaaatcaatcaacaatgccgagaagagaggaaaacggcaggtgctcatcaggccttgtagcaaggtaatcgttcgcttcctgacagtcatgatgaagcatggttatattggtgagtttgaaatcattgatgaccacagagcagggaagatcgtggtgaatctgactggccgccttaacaagtgcggtgtgatcagcccccggttcgacgtccagctaaaagatctggagaagtggcaaaacaatctccttcctagtagacagttcggatttattgtgttaacgacatctgcaggaatcatggaccatgaggaagccaggcgtaagcataccggaggcaagatccttggcttcttcttttag

SEQ ID NO: 29456 - DNA, 393 bp, Artificial Sequence
  derived and/or modified sequence
atggtgaggatgaatgtgctggctgatgccctgaagagcatcaacaatgctgagaagaggggcaagaggcaggtgctgatccggccctgcagcaaggtgattgtgcgcttcctgactgtgatgatgaagcacggctacatcggggagtttgagatcattgatgaccaccgggccggcaagatcgtggtgaacctgaccggccgcctgaacaagtgtggggtcatcagccccaggtttgatgtgcagctgaaggacctggagaagtggcagaacaacctgctgcccagccggcagtttggcttcatcgtgctgaccaccagcgctggcatcatggaccacgaggaggcccggaggaagcacactggaggcaagatcctgggcttcttcttctag

SEQ ID NO: 29457 - DNA, 393 bp, Artificial Sequence
  derived and/or modified sequence
atggtgcggatgaacgtgctggccgacgccctgaagagcatcaacaacgccgaaaaacgcgggaaacgtcaggtgttgattagaccttgctcaaaggtcatcgtgaggtttttgactgtgatgatgaagcacggctacattggcgaattcgagatcattgacgaccatagagcgggcaagattgtcgtcaatttgacgggtagactgaacaagtgcggcgtaatcagtcccaggtttgatgtccagctgaaggacctcgagaagtggcagaacaatctcctaccaagccggcagtttgggtttatcgtgttgaccacttctgctggaataatggatcacgaggaagccaggcggaagcacactggcgggaagattctgggctttttcttttag

SEQ ID NO: 29458 - DNA, 393 bp, Artificial Sequence
  derived and/or modified sequence
atggtgcggatgaacgtgctggccgacgccctgaagagcatcaacaatgccgaaaaacgcggcaagcgtcaagttctcatccgaccatgttcaaaggtgatcgttaggttcctgacggtcatgatgaagcacggatacatcggcgaatttgaaatcatagacgaccatagggcagggaaaattgtcgttaatctcacaggaaggctgaataaatgcggcgttatcagcccccgcttcgacgtccagcttaaagaccttgagaaatggcagaacaacttgttacccagccgccaattcggctttatcgtgctgacaacgtccgctggcattatggatcatgaggaggcccggcggaagcatactgggggtaaaatcctgggattctttttttag

SEQ ID NO: 29459 - DNA, 393 bp, Artificial Sequence
  derived and/or modified sequence
atggttcggatgaacgtgttggcagatgcactcaaaagtatcaacaatgctgagaaaagaggaaagcgccaggtattaatccgtccttgttccaaagtcatcgtcaggtttctgaccgtgatgatgaagcacgggtacatcggagagtttgagattattgacgaccatcgggcagggaagatcgtggtgaacctgactggccgtctgaacaagtgcggcgtgatcagtccccgttttgatgtgcagctgaaggacttagagaagtggcaaaataacctactgccatctcgccagttcgggtttattgtgctgactaccagcgcaggcatcatggaccacgaggaggccagacggaagcatacaggcggtaagatcctagggtttttcttctag

SEQ ID NO: 29460 - DNA, 393 bp, Artificial Sequence
  derived and/or modified sequence
atggtccgtatgaatgtgttagccgacgccctgaaatccatcaataacgccgaaaaaagaggaaagaggcaggtactgattcgaccatgcagcaaggtcatcgtgcggttcctcactgtgatgatgaagcacggatacataggagaatttgagatcattgacgaccatagggcgggtaagattgtggtcaatctcacaggacggttgaacaagtgtggggtgatcagccccaggtttgacgtgcagctaaaggatctggagaagtggcagaataatctgctcccatctcggcaattcggattcatcgtgcttaccacgtccgccggaataatggaccacgaggaagctaggcgcaaacacacaggcggaaagatcctgggttttttcttctag

SEQ ID NO: 29461 - DNA, 2203 bp, Artificial Sequence
  derived and/or modified sequence
ctctttccgccatctttccgcgccggtgagtagcactctctgagagctccaatttcatccgtctgccatcggcgccatcctgcaatctaagccacaatggtgcgcatgaatgtcctggcagatgctctcaagagtatcaacaatgccgaaaagagaggcaaacgccaggtgcttattaggccgtgctccaaagtcatcgtccggtttctcactgtgatgatgaagcatggttacattggcgaatttgaaatcattgatgaccacagagctgggaaaattgttgtgaacctcacaggcaggctaaacaagtgtggggtgatcagccccagatttgacgtgcaactcaaagacctggaaaaatggcagaataatctgcttccatcccgccagtttggtttcattgtactgacaacctcagctggcatcatggaccatgaagaagcaagacgaaaacacacaggagggaaaatcctgggattctttttctagggatgtaatacatatatttacaaataaaatgcctcatggactctggtgcttccacttggtcgttttgagcctttacagcagtgtagccacagcttctgcggcagcatgcagttgcttcgtttatcggtgaatgcgattccctgaagtgactaatacagccaagggaaaaagttcttatgaaaccagtatgcctaagaaacagtcacccctgctgtctgccaaaaccaggtatttgacactaaatattttagttgtatttcagtttttttttttttttttcttttttggagacagagtctgactctattgctcaggctggagtgcagtggcgcgatcttggcccactgcaacctccacctcccgggttcaagtgattgtcctgtctcagccgcctgagtaactgggattacaagtgtgtgtcgccacatccggctaatttttatattttagtagagacagggtttcgccatgttgcccaggctggtcttgagttctgggcctcaagtgatcagcctacctcggcctcccgaagtgctgggattacagccacgagccattacacctggcctatatttcagtattttctattagtttttgatgaatttgttttgcctggctaggattattctgtagataggattttagatctggcttttgtcactgactgctgtaataaatacttgctaggaatttttttttttttttttttttttttaagacaaagtcgctctgtcacacaggctggagtgcagtggcatgatcttggctcactgcacctccgcttcccagattcaagtagttctcgtgcctcagcctcctgagtagctgggattacaggtgtgtgccaccatgtctggctgatttttgtatttttagtagaggtggggtttcaccatgttggccaggctggtctcgaactcctgatctcaagtgatctgcctgccttggtctcccaaagtgctgggattacaggtgtgaccaccacgccctgccttaagaattgttccaagagaatctggtgccacttgcaggtgcccattgaagtgcaatgggcactgttgatcactgaggaggtagtgggtgctgacccggtgctggggcctgtcccctagtctctgctttgcccttggctagctaggtggtgtgccaagtggggagagaagctaccttattaaggggcatggatcagcttcctgaaaggagggcctgcctctgtaagatatgggaagtcgctgagaatgttacagaacggccctagagatggggcagataacggcccccatttgtgagaagtgagttgggaggcatgtttggggcctctgatgtttgggaggctgtgggtaattaacatgagttttggggtccagcagcagaattcaggtttcctcttccactcagtaacctcagcatccgtatctgtaatgggaatgatacaaaacctatccccaagttgagggaaaaatgagattgtgtaaagcgcacttggcacatgacagtcacaagcatggggacagtgagtccagaaggattttcttatgccagcattgtaagccctaggatcacagggctctggcttgtttaaccatcgtgtctctggtccctagcctgcaaacctggtgtgtagggatgcctcagtcgcttacatgttgattgagtgaatcgtcggtttctttctggacactgacttcaaaaataaaataggatatgaaaatgg

SEQ ID NO: 29462 - DNA, 797 bp, Artificial Sequence
  derived and/or modified sequence
ctctttccgccatctttccgcgccgccacaatggtgcgcatgaatgtcctggcagatgctctcaagagtatcaacaatgccgaaaagagaggcaaacgccaggtgcttattaggccgtgctccaaagtcatcgtccggtttctcactgtgatgatgaagcatggttacattggcgaatttgaaatcattgatgaccacagagctgggaaaattgttgtgaacctcacaggcaggctaaacaagtgtggggtgatcagccccagatttgacgtgcaactcaaagacctggaaaaatggcagaataatctgcttccatcccgccagtttggtttcattgtactgacaacctcagctggcatcatggaccatgaagaagcaagacgaaaacacacaggagggaaaatcctgggattctttttctagggatgtaatacatatatttacaaataaaatgcctcatggactctggtgcttccacttggtcgttttgagcctttacagcagtgtagccacagcttctgcggcagcatgcagttgcttcgtttatcggtgaatgcgattccctgaaattcaagtagttctcgtgcctcagcctcctgagtagctgggattacaggtgtgtgccaccatgtctggctgatttttgtatttttagtagaggtggggtttcaccatgttggccaggctggtctcgaactcctgatctcaagtgatctgcctgccttggtctcccaaagtgctgggattacaggtgtgaccaccacgccctgccttaagaattgttccaagagaatctg

SEQ ID NO: 29463 - DNA, 393 bp, Artificial Sequence
  derived and/or modified sequence
atggtgagaatgaacgtgctggccgacgccctgaagagcatcaacaacgccgagaagagaggcaagagacaggtgctgatcagaccctgcagcaaggtgatcgtgagattcctgaccgtgatgatgaagcacggctacatcggcgagttcgagatcatcgacgaccacagagccggcaagatcgtggtgaacctgaccggcagactgaacaagtgcggcgtgatcagccccagattcgacgtgcagctgaaggacctggagaagtggcagaacaacctgctgcccagcagacagttcggcttcatcgtgctgaccaccagcgccggcatcatggaccacgaggaggccagaagaaagcacaccggcggcaagatcctgggcttcttcttctag

SEQ ID NO: 29464 - protein, 89 aa, Artificial Sequence
  derived and/or modified sequence
MISSVKLNLILVLSLSTMHVFWCYPVPSSKVSGKSDYFLILLNSCPTRLDRSKELAFLKPILEKMFVKRSFRNGVGTGMKKTSFQRAKS

SEQ ID NO: 29465 - DNA, 270 bp, Artificial Sequence
  derived and/or modified sequence
atgataagtagcgtcaagctgaacctgattctggtgctgtccctctctaccatgcacgttttttggtgctaccccgtcccctcctcaaaggtgtccgggaaaagtgattactttctgatcctgcttaatagctgcccgactcgtctggacaggtcgaaggaactagctttcctgaagcctatcctagagaagatgttcgtgaaacgttcgttccggaatggcgtgggcacagggatgaaaaaaacctcattccagcgggccaagtcttag

SEQ ID NO: 29466 - DNA, 270 bp, Artificial Sequence
  derived and/or modified sequence
atgatcagctctgtgaagctgaacctgatcctggtgctgagcctgagcaccatgcacgtgttctggtgctaccctgtgcccagcagcaaggtgtctgggaagagtgactacttcctgatcctgctgaacagctgccccacccggctggacaggagcaaggagctggccttcctgaagcccatcctggagaagatgtttgtgaagaggagcttcagaaatggagtgggcaccggcatgaagaagaccagcttccagagggccaagagctag

SEQ ID NO: 29467 - DNA, 270 bp, Artificial Sequence
  derived and/or modified sequence
atgatcagcagcgtgaagctgaacctgatcctggtgctgagcctgagcactatgcacgttttttggtgttatcccgtaccctcctccaaggtgagcggaaagtctgattacttcctaattctcctcaattcttgtccaacaaggctggacagatcaaaggaactggcctttctgaaacctattctcgagaagatgtttgtgaaaagatcattcagaaacggagtcggcactggtatgaaaaagacctccttccagagggccaaatcatag

SEQ ID NO: 29468 - DNA, 322 bp, Artificial Sequence
  derived and/or modified sequence
cagattttgggaagtccaaaatgattagctcagtaaaactcaatctcatcctagttctgtcgctgtccacaatgcatgtgttttggtgttatccagttccatcttctaaggtgtctggaaaatctgattactttctcattctgctgaacagctgcccaaccagattggacaggagcaaagaactagcttttctaaagccaattttggagaagatgtttgtgaaaaggtcctttcgcaatggagttggcacagggatgaaaaaaacttcctttcaaagagcaaaatcatgactaagtgtgcaaaggactcggggaattaatct

SEQ ID NO: 29469 - DNA, 270 bp, Artificial Sequence
  derived and/or modified sequence
atgattagctcggtgaagctaaacctgatactggtgctcagtcttagcactatgcacgtgttttggtgctacccggtcccgagtagcaaggtcagtggtaaatccgactacttcttaattctcctcaatagttgtcccaccagactcgaccgatcaaaggaactcgcctttctcaagcccatattggagaagatgtttgttaagcgctcgttccgaaacggagtcggaacagggatgaagaaaacaagctttcaacgggctaaaagttag

SEQ ID NO: 29470 - DNA, 270 bp, Artificial Sequence
  derived and/or modified sequence
atgatcagcagcgtgaagctgaacctgatcctggtgctgagcctgagcaccatgcacgtgttctggtgctaccccgtgcccagcagcaaggtgagcggcaagagcgactacttcctgatcctgctgaacagctgccccaccagactggacagaagcaaggagctggccttcctgaagcccatcctggagaagatgttcgtgaagagaagcttcagaaacggcgtgggcaccggcatgaagaagaccagcttccagagagccaagagctag

SEQ ID NO: 29471 - protein, 489 aa, Artificial Sequence
  derived and/or modified sequence
MNPPSGPRVPPSPTQEPSCMATPAPPSWWDSSQSSISSLGRLPSISPTAPGTWAAAWVPLPTVDVPDHAHYTLGTVILLVGLTGMLGNLTVIYTFCRAVLRGVTVMMQSRSLRTPANMFIINLAVSDFLMSFTQAPVFFTSSLYKQWLFGETGCEFYAFCGALFGISSMITLTAIALDRYLVITRPLATFGVASKRRAAFVLLGVWLYALAWSLPPFFGWSAYVPEGLLTSCSWDYMSFTPAVRAYTMLLCCFVFFLPLLIIIYCYIFIFRAIRETGRALQTFGACKGNGESLWQRQRLQSECKMAKIMLLVILLFVLSWAPYSAVALVAFAGYAHVLTPYMSSVPAVIAKASAIHNPIIYAITHPKYRVAIAQHLPCLGVLLGVSRRHSRPYPSYRSTHRSTLTSHTSNLSWISIRRRQESLGSESEVGWTHMEAAAVWGAAQQANGRSLYGQGLEDLEAKAPPRPQGHEAETPGKTKGLIPSQDPRM

SEQ ID NO: 29472 - protein, 495 aa, Artificial Sequence
  derived and/or modified sequence
MNPPSGPRVPPSPTQEPSCMATPAPPSWWDSSQSSISSLGRLPSISPTAPGTWAAAWVPLPTVDVPDHAHYTLGTVILLVGLTGMLGNLTVIYTFCRAVLRGVTVMMQSRSLRTPANMFIINLAVSDFLMSFTQAPVFFTSSLYKQWLFGETGCEFYAFCGALFGISSMITLTAIALDRYLVITRPLATFGVASKRRAAFVLLGVWLYALAWSLPPFFGWSAYVPEGLLTSCSWDYMSFTPAVRAYTMLLCCFVFFLPLLIIIYCYIFIFRAIRETGRALQTFGACKGNGESLWQRQRLQSECKMAKIMLLVILLFVLSWAPYSAVALVAFAGYAHVLTPYMSSVPAVIAKASAIHNPIIYAITHPKYRVAIAQHLPCLGVLLGVSRRHSRPYPSYRSTHRSTLTSHTSNLSWISIRRRQESLGSESEVGWTHMEAAAVWGAAQQANGRSLYGQGLEDLEAKAPPRPQGHEAETPGKRRASSGRSQRPERQRAAP

SEQ ID NO: 29473 - DNA, 1470 bp, Artificial Sequence
  derived and/or modified sequence
atgaacccccccagcggccccagagtgccccccagccccacccaggagcccagctgcatggccacccccgccccccccagctggtgggacagcagccagagcagcatcagcagcctgggcagactgcccagcatcagccccaccgcccccggcacctgggccgccgcctgggtgcccctgcccaccgtggacgtgcccgaccacgcccactacaccctgggcaccgtgatcctgctggtgggcctgaccggcatgctgggcaacctgaccgtgatctacaccttctgcagagccgtgctgagaggcgtgaccgtgatgatgcagagcagaagcctgagaacccccgccaacatgttcatcatcaacctggccgtgagcgacttcctgatgagcttcacccaggcccccgtgttcttcaccagcagcctgtacaagcagtggctgttcggcgagaccggctgcgagttctacgccttctgcggcgccctgttcggcatcagcagcatgatcaccctgaccgccatcgccctggacagatacctggtgatcaccagacccctggccaccttcggcgtggccagcaagagaagagccgccttcgtgctgctgggcgtgtggctgtacgccctggcctggagcctgccccccttcttcggctggagcgcctacgtgcccgagggcctgctgaccagctgcagctgggactacatgagcttcacccccgccgtgagagcctacaccatgctgctgtgctgcttcgtgttcttcctgcccctgctgatcatcatctactgctacatcttcatcttcagagccatcagagagaccggcagagccctgcagaccttcggcgcctgcaagggcaacggcgagagcctgtggcagagacagagactgcagagcgagtgcaagatggccaagatcatgctgctggtgatcctgctgttcgtgctgagctgggccccctacagcgccgtggccctggtggccttcgccggctacgcccacgtgctgaccccctacatgagcagcgtgcccgccgtgatcgccaaggccagcgccatccacaaccccatcatctacgccatcacccaccccaagtacagagtggccatcgcccagcacctgccctgcctgggcgtgctgctgggcgtgagcagaagacacagcagaccctaccccagctacagaagcacccacagaagcaccctgaccagccacaccagcaacctgagctggatcagcatcagaagaagacaggagagcctgggcagcgagagcgaggtgggctggacccacatggaggccgccgccgtgtggggcgccgcccagcaggccaacggcagaagcctgtacggccagggcctggaggacctggaggccaaggccccccccagaccccagggccacgaggccgagacccccggcaagaccaagggcctgatccccagccaggaccccagaatgtag

SEQ ID NO: 29474 - DNA, 1488 bp, Artificial Sequence
  derived and/or modified sequence
atgaacccccccagcggccccagagtgccccccagccccacccaggagcccagctgcatggccacccccgccccccccagctggtgggacagcagccagagcagcatcagcagcctgggcagactgcccagcatcagccccaccgcccccggcacctgggccgccgcctgggtgcccctgcccaccgtggacgtgcccgaccacgcccactacaccctgggcaccgtgatcctgctggtgggcctgaccggcatgctgggcaacctgaccgtgatctacaccttctgcagagccgtgctgagaggcgtgaccgtgatgatgcagagcagaagcctgagaacccccgccaacatgttcatcatcaacctggccgtgagcgacttcctgatgagcttcacccaggcccccgtgttcttcaccagcagcctgtacaagcagtggctgttcggcgagaccggctgcgagttctacgccttctgcggcgccctgttcggcatcagcagcatgatcaccctgaccgccatcgccctggacagatacctggtgatcaccagacccctggccaccttcggcgtggccagcaagagaagagccgccttcgtgctgctgggcgtgtggctgtacgccctggcctggagcctgccccccttcttcggctggagcgcctacgtgcccgagggcctgctgaccagctgcagctgggactacatgagcttcacccccgccgtgagagcctacaccatgctgctgtgctgcttcgtgttcttcctgcccctgctgatcatcatctactgctacatcttcatcttcagagccatcagagagaccggcagagccctgcagaccttcggcgcctgcaagggcaacggcgagagcctgtggcagagacagagactgcagagcgagtgcaagatggccaagatcatgctgctggtgatcctgctgttcgtgctgagctgggccccctacagcgccgtggccctggtggccttcgccggctacgcccacgtgctgaccccctacatgagcagcgtgcccgccgtgatcgccaaggccagcgccatccacaaccccatcatctacgccatcacccaccccaagtacagagtggccatcgcccagcacctgccctgcctgggcgtgctgctgggcgtgagcagaagacacagcagaccctaccccagctacagaagcacccacagaagcaccctgaccagccacaccagcaacctgagctggatcagcatcagaagaagacaggagagcctgggcagcgagagcgaggtgggctggacccacatggaggccgccgccgtgtggggcgccgcccagcaggccaacggcagaagcctgtacggccagggcctggaggacctggaggccaaggccccccccagaccccagggccacgaggccgagacccccggcaagagaagagccagcagcggcagaagccagagacccgagagacagagagccgccccctag

SEQ ID NO: 29475 - DNA, 1470 bp, Artificial Sequence
  derived and/or modified sequence
atgaaccctccctcagggcccagggtccccccctcccccacccaggagccatcctgcatggccacccccgcaccaccctcatggtgggacagcagccagtcctcaatcagctctctgggtcgcttgcctagcattagccctaccgcacctgggacatgggccgccgcttgggtccctttgcctacagttgacgttcctgatcacgcacactacactcttgggaccgtgattttactggtaggtctaacagggatgctcgggaacctgacagttatctacacgttctgcagggctgtgctgagaggcgtgactgtgatgatgcagtcgcgatcactcagaacacctgcaaatatgtttattattaaccttgcagtatccgattttctaatgtcttttactcaagccccagtgttctttacgagctcactgtacaaacaatggctgttcggcgaaacaggctgcgagttttacgccttttgtggtgctctgtttggcatctcaagcatgatcactcttaccgcgattgctcttgatagatatcttgttatcacccgccccctcgccacatttggcgtagctagcaaacgacgtgcagcgtttgtcttgttgggagtgtggctttacgccctggcctggtctctgcctcctttctttggttggtctgcctatgtcccagagggactgttaacgtcctgtagctgggactatatgtctttcaccccagcggtgcgtgcatataccatgctgctctgttgctttgtattctttcttccgctactgatcatcatttattgctacatattcatctttagggcaatcagagagactggtcgcgctctgcagacatttggagcctgcaagggcaacggggagagcttatggcagcgacagcggctgcagagcgagtgtaaaatggccaaaattatgctgttggtaattctgctctttgtgttgtcctgggctccatactcagccgtcgccctagtggccttcgctgggtacgcgcacgttctcacaccatatatgagcagcgttcctgccgtaatagccaaagcgtccgctatacacaatcccattatctacgctatcacccatcccaagtacagggtagccattgcccaacacctgccatgcctcggcgtcctgctgggggtgtctcggaggcactctcgaccttacccttcctacaggagcacccaccggagtacactgaccagccacacgtccaacctgtcttggatcagtattagaaggagacaagaatcactcggcagcgaatctgaggtcggctggacacacatggaggccgccgccgtatggggcgctgctcagcaagccaatggccgttctttgtacgggcaaggcctggaagatctggaggccaaagccccacctagaccccagggacacgaagcagaaacacctgggaagacaaaaggactgattccttcccaggatccccgaatgtag

SEQ ID NO: 29476 - DNA, 1488 bp, Artificial Sequence
  derived and/or modified sequence
atgaaccccccaagtggcccacgggttccaccttctccgacccaggagcccagctgtatggctactcctgctccaccatcctggtgggacagttcgcagtctagcatttcttcgctgggtcggctgccaagcatctcaccaacagcacccggcacatgggctgccgcatgggtacctctcccaacagttgatgttcctgaccacgcgcactacactctaggcaccgtgatcctgcttgtgggcttgaccggcatgttaggaaacctgaccgtgatatacaccttctgtagagccgtgctcagaggagtaaccgtgatgatgcagagccgcagcttacgcacgccggctaatatgtttattattaatctggccgtaagcgactttctaatgtcattcacccaggccccggtcttcttcacatctagtctgtataaacagtggctgttcggagagacggggtgcgaattttatgccttctgcggagcgctctttgggatatcctcaatgataacgctgaccgcaattgctctagataggtacctcgtaattacgaggcctttggcaactttcggcgtcgcatctaagagacgggccgcgtttgtactgctcggtgtctggctctatgcactggcatggagcctgccacctttcttcggctggtctgcttatgtacctgaggggttactaacatcctgttcttgggactacatgtcattcacacctgccgtccgggcttacactatgctgctgtgctgcttcgtattctttctgcctctgctgatcataatttattgttatatttttatttttcgagccatacgcgaaactggacgtgctctgcagacattcggcgcctgtaagggtaatggagagtccctttggcagaggcagaggctgcagtctgagtgcaagatggccaagatcatgttgttagtaattcttctctttgtgctgtcttgggccccatactcagcagtcgctctagtagcatttgcaggttacgctcacgtactcacaccatatatgtcaagcgtgccagccgtgattgccaaggcctccgctatacacaaccctattatctatgccattactcacccgaaatacagggttgcgatcgcccagcacctgccttgtctaggtgtgctgctgggtgtttcacggcgtcactctcgtccataccctagttaccgctccacccaccggtctacccttacctctcacacaagtaatctgtcctggatatcaatccgtcgtagacaggagtccctcggctctgagagcgaagtggggtggacacacatggaggccgctgctgtttggggagcagctcaacaggccaacgggcggtctttgtatggtcaggggctcgaggacctagaagcgaaggctcctccacgcccccaggggcacgaggccgaaactcctggtaagcggcgcgccagttcgggccgaagccagcggccggaaaggcaacgggccgccccttag

SEQ ID NO: 29477 - DNA, 1470 bp, Artificial Sequence
  derived and/or modified sequence
atgaaccccccatctggcccccgggtgccccccagccccacccaggagcccagctgcatggccaccccagcccctccttcctggtgggacagcagccagagcagcatcagcagcctgggccgcctgcccagcatcagccccacagcccctggcacctgggccgccgcctgggtgcccctgcccaccgtggatgtgcctgaccacgcccactacaccctgggcaccgtcatcctgctggtgggcctgaccggcatgctgggcaacctgaccgtcatctacaccttctgcagagctgtgctgcggggcgtgacagtgatgatgcagagccgcagcctgcggaccccagccaacatgttcatcatcaacctggccgtgtctgacttcctgatgtccttcacccaggcccctgtgttcttcaccagcagcctgtacaagcagtggctgtttggagagaccggctgtgagttctacgccttctgtggggccctgtttggcatcagctccatgatcaccctgacagccatcgccctggaccgctacctggtgatcacccggcccctggccaccttcggcgtggccagcaagaggcgggccgcctttgtgctgctgggcgtgtggctgtatgccctggcctggagcctgccccccttcttcggctggagcgcctacgtgcctgagggcctgctgaccagctgctcctgggactacatgtccttcaccccagctgtgcgggcctacaccatgctgctgtgctgctttgtgttcttcctgcccctgctgatcatcatctactgctacatcttcatcttccgggccatccgggagaccggccgggccctgcagacctttggagcctgcaagggaaatggagagagcctgtggcagaggcagaggctgcagagcgagtgcaagatggccaagatcatgctgctggtgatcctgctgtttgtgctgtcctgggccccctacagcgctgtggccctggtggcctttgctggctacgcccacgtgctgaccccctacatgagctctgtgcctgctgtgattgccaaggccagcgccatccacaaccccatcatctatgccatcacccaccccaagtacagagtggccatcgcccagcacctgccctgcctgggcgtgctgctgggcgtgtccagaagacacagccggccctaccccagctaccgcagcacccacaggagcaccctgaccagccacaccagcaacctgtcctggatcagcatcagaagacggcaggagagcctgggcagcgagagcgaggtgggctggacccacatggaggccgctgctgtgtggggcgccgcccagcaggccaacggccgcagcctgtatggccagggcctggaggacctggaggccaaggccccaccccggccccagggccacgaggccgagaccccaggcaagaccaagggcctcatccccagccaggaccccaggatgtag

SEQ ID NO: 29478 - DNA, 1488 bp, Artificial Sequence
  derived and/or modified sequence
atgaaccccccatctggcccccgggtgccccccagccccacccaggagcccagctgcatggccaccccagcccctccttcctggtgggacagcagccagagcagcatcagcagcctgggccgcctgcccagcatcagccccacagcccctggcacctgggccgccgcctgggtgcccctgcccaccgtggatgtgcctgaccacgcccactacaccctgggcaccgtcatcctgctggtgggcctgaccggcatgctgggcaacctgaccgtcatctacaccttctgcagagctgtgctgcggggcgtgacagtgatgatgcagagccgcagcctgcggaccccagccaacatgttcatcatcaacctggccgtgtctgacttcctgatgtccttcacccaggcccctgtgttcttcaccagcagcctgtacaagcagtggctgtttggagagaccggctgtgagttctacgccttctgtggggccctgtttggcatcagctccatgatcaccctgacagccatcgccctggaccgctacctggtgatcacccggcccctggccaccttcggcgtggccagcaagaggcgggccgcctttgtgctgctgggcgtgtggctgtatgccctggcctggagcctgccccccttcttcggctggagcgcctacgtgcctgagggcctgctgaccagctgctcctgggactacatgtccttcaccccagctgtgcgggcctacaccatgctgctgtgctgctttgtgttcttcctgcccctgctgatcatcatctactgctacatcttcatcttccgggccatccgggagaccggccgggccctgcagacctttggagcctgcaagggaaatggagagagcctgtggcagaggcagaggctgcagagcgagtgcaagatggccaagatcatgctgctggtgatcctgctgtttgtgctgtcctgggccccctacagcgctgtggccctggtggcctttgctggctacgcccacgtgctgaccccctacatgagctctgtgcctgctgtgattgccaaggccagcgccatccacaaccccatcatctatgccatcacccaccccaagtacagagtggccatcgcccagcacctgccctgcctgggcgtgctgctgggcgtgtccagaagacacagccggccctaccccagctaccgcagcacccacaggagcaccctgaccagccacaccagcaacctgtcctggatcagcatcagaagacggcaggagagcctgggcagcgagagcgaggtgggctggacccacatggaggccgctgctgtgtggggcgccgcccagcaggccaacggccgcagcctgtatggccagggcctggaggacctggaggccaaggccccaccccggccccagggccacgaggccgagaccccaggcaagaggcgggccagcagcggccgcagccagaggcctgagcggcagagagctgccccctag

SEQ ID NO: 29479 - DNA, 1470 bp, Artificial Sequence
  derived and/or modified sequence
atgaacccccccagcggcccccgggtgccccccagccccacccaggaacctagctgtatggccaccccagccccgccaagctggtgggattccagtcaatcgtccatttcctcccttggtcggttgcccagcatctctcctactgcccctggtacgtgggccgctgcctgggtcccacttcctactgttgatgtgcctgatcatgcacattacactctggggacagtgatcctgcttgttggtcttacaggcatgctggggaacttgactgtcatctataccttctgccgtgccgttctcagaggggtcactgtgatgatgcagtctcggtcgttaagaacaccggctaatatgttcatcattaatttggccgtcagcgacttccttatgtcctttacccaggctcctgtattctttacgtcaagcctctacaagcagtggctctttggagagacaggttgcgaattttatgccttctgtggagcactgtttggtatttcttcgatgataactctgactgcgatcgctttagacagatacctcgtgatcacccgacccttagccactttcggtgtcgcatcaaaacgccgcgccgccttcgtcctcctcggggtgtggctgtacgccttggcctggtcactgcctcctttctttgggtggagcgcctacgtgcccgagggactgcttaccagttgttcttgggactatatgagtttcacgcccgccgtaagggcttataccatgttgctttgctgcttcgtgtttttcctgcccctgttgataataatttactgctatatattcatattcagagcaatcagggagactggccgcgccttgcaaacctttggagcatgcaagggcaacggtgagagtctatggcagcgtcaacggttgcagtccgagtgcaagatggccaagatcatgctacttgtgatcctactgttcgtgctctcttgggctccctatagcgcagttgctctggtcgcattcgccggttacgcccatgtcctgacaccttatatgtcatctgtccccgccgtgatagcaaaggcctcagcaattcataacccaatcatatacgctattactcatccgaagtatagagtagctatcgcccaacacctgccttgtctgggtgttctgttgggcgtcagccgtcggcactctagaccctatccttcctacaggagcactcaccgcagcacgctgacgagccacacctccaatctgagttggatttcaatcagacggcgccaagagagtctgggatcggaatcagaagtgggttggacccacatggaagcagcagccgtgtggggagctgctcagcaggccaacggacgatccctttatggacagggtttggaagatttggaggcaaaagccccaccccgtccccaaggacacgaggcagaaacccccggaaagaccaaaggacttatcccgtctcaagatccaaggatgtag

SEQ ID NO: 29480 - DNA, 1488 bp, Artificial Sequence
  derived and/or modified sequence
atgaacccccccagcggcccccgggtgccccccagccccacccaggagccctcctgtatggccacacccgccccacccagctggtgggacagctcccagtcctctattagctcactgggcaggctgccaagtataagtcctaccgctcccgggacttgggcggcggcctgggtaccccttccgacagtggatgtgccagaccacgcgcactacaccctgggcactgttattctgctcgtgggcctgaccggcatgctgggcaacctgactgtcatatacaccttctgcagagctgtactgaggggcgtcaccgtaatgatgcaatctcggtcactgcggaccccagcaaatatgttcattatcaacctggccgtttcggacttcctgatgtctttcactcaggcccccgtctttttcacaagcagtctgtataaacagtggctattcggggaaacaggttgcgaattttatgcattttgcggagctctgtttggtatctcatcaatgatcacactcactgccatcgccttggataggtatttggttatcactaggccactagcgacctttggagtcgcttctaagcggagagccgcctttgtgctgctgggcgtttggttgtatgccctggcttggtctctgccaccattctttggatggtcagcttacgtgcctgagggacttctaacctcatgtagctgggattatatgtcctttacgccagccgtcagagcctatactatgttgctgtgttgctttgtcttcttccttcctctgttaattattatctactgctacatcttcatttttcgcgctatccgtgaaacagggcgagctctgcagacctttggggcatgcaaaggcaacggcgaatcattgtggcagaggcagcgtctgcagtctgaatgtaaaatggcaaaaataatgctgctcgtaatactgctgttcgtgcttagctgggcaccttactctgctgtagcactggtagcattcgctggttacgcccatgtgctcacaccctacatgtctagcgtgccagccgtgattgccaaagcgtcggccatacataaccctataatctatgctatcactcacccaaagtacagagtggcgatagcccagcacttgccctgtttgggtgtactgttaggcgtttctagaaggcacagccgcccctacccttcctaccgctcaacccaccgctctacccttacctcacacacctctaacctatcctggatctccataagaagacggcaggaatcattgggtagcgaatctgaggttgggtggacgcatatggaggcagccgccgtttggggagctgcccagcaagctaatgggagaagcctgtatggccagggactggaagacctagaggccaaggcgcccccacgaccacagggccatgaggcagaaacgcctgggaaacgaagggcgtccagtggccggagtcagaggccggagagacagcgcgctgccccgtag

SEQ ID NO: 29481 - DNA, 2401 bp, Artificial Sequence
  derived and/or modified sequence
ataactgcgacactcactcatttgcgcttcaccagacacagagcaaccgccagccccaagagcagctccaggctggatctgcgccggacacaggagaaagcagcgggtaggctaagcaggggtgctgaggatggaggaaagttgggaggctgagcacagctgaagtcctgagctccctgtgcccttgacttctctgtgggctcgagcaaggaccatcccaactcaggatgaaccctccttcggggccaagagtcccgcccagcccaacccaagagcccagctgcatggccaccccagcaccacccagctggtgggacagctcccagagcagcatctccagcctgggccggcttccatccatcagtcccacagcacctgggacttgggctgctgcctgggtccccctccccacggttgatgttccagaccatgcccactataccctgggcacagtgatcttgctggtgggactcacggggatgctgggcaacctgacggtcatctataccttctgcagagctgtgcttcgtggagtcactgtgatgatgcagagcagaagcctccggacacctgccaacatgttcattatcaacctcgcggtcagcgacttcctcatgtccttcacccaggcccctgtcttcttcaccagtagcctctataagcagtggctctttggggagacaggctgcgagttctatgccttctgtggagctctctttggcatttcctccatgatcaccctgacggccatcgccctggaccgctacctggtaatcacacgcccgctggccacctttggtgtggcgtccaagaggcgtgcggcatttgtcctgctgggcgtttggctctatgccctggcctggagtctgccacccttcttcggctggagcgcctacgtgcccgaggggttgctgacatcctgctcctgggactacatgagcttcacgccggccgtgcgtgcctacaccatgcttctctgctgcttcgtgttcttcctccctctgcttatcatcatctactgctacatcttcatcttcagggccatccgggagacaggacgggctctccagaccttcggggcctgcaagggcaatggcgagtccctgtggcagcggcagcggctgcagagcgagtgcaagatggccaagatcatgctgctggtcatcctcctcttcgtgctctcctgggctccctattccgctgtggccctggtggcctttgctgggtacgcacacgtcctgacaccctacatgagctcggtgccagccgtcatcgccaaggcctctgcaatccacaaccccatcatttacgccatcacccaccccaagtacagggtggccattgcccagcacctgccctgcctgggggtgctgctgggtgtatcacgccggcacagtcgcccctaccccagctaccgctccacccaccgctccacgctgaccagccacacctccaacctcagctggatctccatacggaggcgccaggagtccctgggctcggagagtgaggtgggctggacacacatggaggcagcagctgtgtggggagctgcccagcaagcaaatgggcggtccctctacggtcagggtctggaggacttggaagccaaggcaccccccagaccccagggacacgaagcagagactccagggaagaccaaggggctgatccccagccaggaccccaggatgtaggacgcccactggctctccctttcttctgagacacatccagcccccccacgtctccctcatatacacagacccaggattatgctgtgagcctgcaggctttggaagtggccctgtcacccgtgctgcacgggattcacagccccagccccatggcccctctccacacctcaaaactcctgccccataacgtcctccgcatccactttccagctcagcagccgcacccgaggctcagcctgaggggtatgtgcccaggccctcccacttcccgagttgtctgcctctcctcaaatgctgtgtgctgcaattgtccaggcgatgacaatggtgatggctccagagaacacaccagctatttatgagcctctgcccccaggctgggcctgtcactggcataggaaggccagccccgcatctcccactgccaacagctgaagccgagcacagacctccctttgcacgctggaacagttactcacctgtggcttcttcccccagtgtaccgttccactgtggcccacattcttgtgcacgcgggcatttgcaggcacgctctcgcgtagttacctatctgaatgcacaccaagcacatgcgtgcacactctgcgtctgtgattcatttcatgtagtggtctaagctcctcccagggctgtgtggatctgacagggtataggaaaataaaaagcggagaaggtgtcttcag

SEQ ID NO: 29482 - DNA, 1653 bp, Artificial Sequence
  derived and/or modified sequence
agcagctccaggctggatctgcgccggacacaggagaaagcagcgggtaggctaagcaggggtgctgaggatggaggaaagttgggaggctgagcacagctgaagtcctgagctccctgtgcccttgacttctctgtgggctcgagcaaggaccatcccaactcaggatgaaccctccttcggggccaagagtcccgcccagcccaacccaagagcccagctgcatggccaccccagcaccacccagctggtgggacagctcccagagcagcatctccagcctgggccggcttccatccatcagtcccacagcacctgggacttgggctgctgcctgggtccccctccccacggttgatgttccagaccatgcccactataccctgggcacagtgatcttgctggtgggactcacggggatgctgggcaacctgacggtcatctataccttctgcagagctgtgcttcgtggagtcactgtgatgatgcagagcagaagcctccggacacctgccaacatgttcattatcaacctcgcggtcagcgacttcctcatgtccttcacccaggcccctgtcttcttcaccagtagcctctataagcagtggctctttggggagacaggctgcgagttctatgccttctgtggagctctctttggcatttcctccatgatcaccctgacggccatcgccctggaccgctacctggtaatcacacgcccgctggccacctttggtgtggcgtccaagaggcgtgcggcatttgtcctgctgggcgtttggctctatgccctggcctggagtctgccacccttcttcggctggagcgcctacgtgcccgaggggttgctgacatcctgctcctgggactacatgagcttcacgccggccgtgcgtgcctacaccatgcttctctgctgcttcgtgttcttcctccctctgcttatcatcatctactgctacatcttcatcttcagggccatccgggagacaggacgggctctccagaccttcggggcctgcaagggcaatggcgagtccctgtggcagcggcagcggctgcagagcgagtgcaagatggccaagatcatgctgctggtcatcctcctcttcgtgctctcctgggctccctattccgctgtggccctggtggcctttgctgggtacgcacacgtcctgacaccctacatgagctcggtgccagccgtcatcgccaaggcctctgcaatccacaaccccatcatttacgccatcacccaccccaagtacagggtggccattgcccagcacctgccctgcctgggggtgctgctgggtgtatcacgccggcacagtcgcccctaccccagctaccgctccacccaccgctccacgctgaccagccacacctccaacctcagctggatctccatacggaggcgccaggagtccctgggctcggagagtgaggtgggctggacacacatggaggcagcagctgtgtggggagctgcccagcaagcaaatgggcggtccctctacggtcagggtctggaggacttggaagccaaggcaccccccagaccccagggacacgaagcagagactccagggaagaggcgagcttcatcaggcaggagccagaggccagagagacagcgtgcagctccag

SEQ ID NO: 29483 - DNA, 1470 bp, Artificial Sequence
  derived and/or modified sequence
atgaacccacctagcggacccagagtgcccccaagtccaacgcaggagcccagctgtatggctactccagccccaccctcctggtgggacagtagtcaatcaagcatttcatcgctcgggcgactgccatccattagtcctactgcacccggtacctgggccgctgcatgggtgcccctgcctaccgtcgatgtgcccgaccacgcccattatacgctgggtacagtgatcctgctagtgggactcaccgggatgctggggaaccttaccgtgatctacacattctgtcgcgcagtcctccgcggtgtaacagtcatgatgcagtcccgttcgttacggaccccggcaaacatgttcattatcaatctcgctgtgtcagacttcttgatgtctttcacccaggcccctgtgttttttacatccagtctgtacaaacagtggttgtttggtgaaaccggctgtgagttttacgcattctgcggagccctcttcggcatttcatctatgataacactgacagcaatcgcactggaccgctacctcgtgatcactcgtccattagccacctttggcgtggcgagtaagcgcagggctgcttttgttctcttaggagtgtggttgtacgcccttgcttggtccctcccaccctttttcggctggagcgcatatgtgcccgaaggcctgctcacaagctgctcatgggactacatgagcttcacgcctgcggtgcgggcttataccatgcttctgtgctgctttgtcttcttcctccccctgctaattatcatctactgctacatcttcatttttcgagcaatacgagagaccggcagggccctgcagacttttggtgcgtgtaaaggtaatggagagagtctgtggcagcgccagcgcctgcagtcagaatgtaagatggccaagatcatgctgctcgtaatccttctctttgtactatcatgggctccatacagtgccgtagcacttgtagcattcgctggctatgctcatgtgctgacaccctacatgtcctctgtgcccgcagtaattgctaaggcttctgctatccataaccccattatctatgcaatcacccacccgaagtaccgggtcgccatcgcccaacatcttccttgtctgggcgtgctcttgggtgtatccaggcgtcactccagaccatatcctagttatcgatcaacacacagatccacgctcacctctcatacttcaaacctgagctggatctcaattaggcggaggcaggagtcacttggcagtgaatctgaggtaggctggacccatatggaggcagccgcagtttggggggctgcgcaacaggctaacggacggtccctgtacgggcaggggctggaagacctggaggccaaagcccctcctcgcccacagggccatgaggcagaaacaccgggaaagaccaagggtcttataccaagccaggaccctcgcatgtag

SEQ ID NO: 29484 - DNA, 1488 bp, Artificial Sequence
  derived and/or modified sequence
atgaatcccccttctggacctagggtcccaccaagccccacacaagaacccagttgtatggcaacgcctgcgcctccttcttggtgggacagttcgcagtccagcatcagctcgctgggaagactgccaagtatttccccaacagcacccggaacttgggccgctgcatgggttcccctcccaactgtggatgttcctgaccacgctcattacactctgggcacagtgattctgctcgttggcctgacaggtatgttgggtaacctgactgtaatttacactttctgtcgtgcagtcctgcgaggagtcaccgtgatgatgcagagccgttccctaaggactccggcaaacatgttcattatcaacctagctgtgtccgatttccttatgagctttactcaggccccagtgttctttaccagcagtctttacaagcagtggctctttggagaaacagggtgcgagttctatgcgttttgtggtgccttgtttggcataagctctatgattactttaacggctatcgccctcgaccgctacctggtcataactcgccctctggctaccttcggagtcgccagcaaacggcgagctgcttttgtactgctcggagtctggttgtacgcacttgcgtggtccttaccaccattttttggttggtccgcttacgtcccagaaggactgttaacatcttgtagttgggactatatgtctttcaccccagctgtgagggcttatactatgcttttgtgctgcttcgttttctttctgcccctattgatcatcatttactgctatatttttatcttccgcgcaatacgtgagacaggcagggccttacaaaccttcggggcatgcaaaggcaatggagaaagtctgtggcagcgccagcgtctgcagagcgaatgtaagatggccaagatcatgcttctcgtgattctgctgttcgtcctatcgtgggcaccatatagcgccgtggccctggtggcatttgctgggtacgcccatgttttgactccttatatgagcagcgtgcctgccgtaatcgccaaagcgtctgcgatacacaaccctattatttatgccatcactcaccctaaatatagagtagcaatagcacagcatctgccttgcctgggtgttctcttgggcgtgagccgtcgacacagtcgaccttacccaagctatcgctctactcaccgatccaccttgacatcccacacatctaatctcagctggatatcaatcaggaggcgacaggagagcctgggatcagaatccgaagtcgggtggacgcatatggaggccgcagctgtgtggggtgcagcccagcaagcaaatggccgatccctctatggacaaggtctggaggacttagaagctaaagcccctcccagaccccaggggcatgaggctgaaactcctgggaaacggcgtgcaagtagtgggcgtagccaacggcctgagcgccaacgagccgcaccctag

SEQ ID NO: 29485 - DNA, 405 bp, Artificial Sequence
  derived and/or modified sequence
atggccgactcagagctccagctcgtggaacagcgtatccgttcattcccagactttccgacaccgggagtggtctttcgtgacatcagcccagtgcttaaggaccctgctagctttcgggccgcaataggccttttagctcggcatcttaaggcgacacacgggggacggatcgactatatcgccggcttagattctagaggcttcctctttgggccttctctggcccaggagctagggctgggttgcgtgctgatccgcaagcggggtaagctgcccgggcctaccctgtgggccagctattcactggagtacgggaaagccgagctggagattcagaaagatgctcttgagccggggcagagagtcgtcgtggtagacgacctcctggctaccggggtctag

SEQ ID NO: 29486 - DNA, 673 bp, Artificial Sequence
  derived and/or modified sequence
gcgctcgggctgccgctggctcttcgcacgcggccatggccgactccgagctgcagctggttgagcagcggatccgcagcttccccgacttccccaccccaggcgtggtattcagggacatctcgcccgtcctgaaggaccccgcctccttccgcgccgccatcggcctcctggcgcgacacctgaaggcgacccacgggggccgcatcgactacatcgcaggcctagactcccgaggcttcctctttggcccctccctggcccaggagcttggactgggctgcgtgctcatccgaaagcgggggaagctgccaggccccactctgtgggcctcctattccctggagtacgggaaggctgagctggagattcagaaagacgccctggagccaggacagagggtggtcgtcgtggatgatctgctggccactggtgtatgagtgaccacagggcctcccagcccaacatctccagctggatcccagggaaatatcagccttgggcaactgcagtgaccaggggcaccggctgcccacagggaacacattcctttgctggggttcagcgcctctcctggggctggaagtgccaaagcctggggcaaagctgtgtttcagccacactgaacccaattacacacagcgggagaacgcagtaaacagctttcccacaa

SEQ ID NO: 29487 - DNA, 405 bp, Artificial Sequence
  derived and/or modified sequence
atggctgacagcgagctgcagctggtggagcagaggatccgctccttcccagacttccccaccccaggagtggtgttccgggacatcagccctgtgctgaaggaccctgccagcttccgggccgccatcggcctgctggcccggcacctgaaggccacccacggcggcagaattgactacatcgccggcctggacagccggggcttcctgtttggccccagcctggcccaggagctgggcctgggctgtgtgctgatcaggaagaggggcaagctgcccggccccaccctgtgggccagctacagcctggagtatggcaaggccgagctggagatccagaaggatgccctggagcccggccagagggtggtggtggtggatgacctgctggccaccggggtgtag

SEQ ID NO: 29488 - DNA, 405 bp, Artificial Sequence
  derived and/or modified sequence
atggccgacagcgagctgcagctggtggagcagcggatccggagcttccccgactttcctactccaggcgtggtgtttagggacatttctccggtcctgaaggatcctgcgtcttttcgcgctgccatcggcctcctcgcacgacatctcaaggccactcatggcggccgaatcgactatatcgctgggttggactctagagggtttttgttcggcccaagcctcgcccaggagctggggcttggctgtgtgctcatcaggaaaaggggtaagcttcctgggcccacactgtgggcctcatattctctcgaatatggcaaagctgagctagagattcagaaggacgccctggagcccggccagagagtggtcgtggtggatgacctgctcgctacaggcgtgtag

SEQ ID NO: 29489 - DNA, 405 bp, Artificial Sequence
  derived and/or modified sequence
atggccgattccgagctacagttggtggagcaacgaattcgaagtttccctgacttcccaacgcccggagtggtctttcgggacattagtccagtgctgaaggatcctgcttcgtttagagccgctatcgggctccttgccaggcatctcaaagcgacacatggtggccgaatcgactacattgccggtctggacagcaggggattcctgtttggaccctccctggctcaggagctggggctcgggtgcgtgctgattcgcaaaagggggaaattacccggtcccactctgtgggcatcctattcattagaatacgggaaggcggaactggaaattcaaaaagatgctttggaacccggtcagagggtagtggtcgtggacgacttactagctacaggcgtatag

SEQ ID NO: 29490 - DNA, 405 bp, Artificial Sequence
  derived and/or modified sequence
atggccgacagcgagctgcagctggtggagcagagaatcagaagcttccccgacttccccacccccggcgtggtgttcagagacatcagccccgtgctgaaggaccccgccagcttcagagccgccatcggcctgctggccagacacctgaaggccacccacggcggcagaatcgactacatcgccggcctggacagcagaggcttcctgttcggccccagcctggcccaggagctgggcctgggctgcgtgctgatcagaaagagaggcaagctgcccggccccaccctgtgggccagctacagcctggagtacggcaaggccgagctggagatccagaaggacgccctggagcccggccagagagtggtggtggtggacgacctgctggccaccggcgtgtag

SEQ ID NO: 29491 - protein, 357 aa, Artificial Sequence
  derived and/or modified sequence
MSGKTKARRAAMFFRRCSEDASGSASGNALLSEDENPDANGVTRSWKIILSTMLTLTFLLVGLLNHQWLKETDVPQKSRQLYAIIAEYGSRLYKYQARLRMPKEQLELLKKESQNLENNFRQILFLIEQIDVLKALLRDMKDGMDNNHNWNTHGDPVEDPDHTEEVSNLVNYVLKKLREDQVEMADYALKSAGASIIEAGTSESYKNNKAKLYWHGIGFLNHEMPPDIILQPDVYPGKCWAFPGSQGHTLIKLATKIIPTAVTMEHISEKVSPSGNISSAPKEFSVYGITKKCEGEEIFLGQFIYNKTGTTVQTFELQHAVSEYLLCVKLNIFSNWGHPKYTCLYRFRVHGTPGKHI

SEQ ID NO: 29492 - protein, 281 aa, Artificial Sequence
  derived and/or modified sequence
  misc_feature (1)..(1): Xaa can be any naturally occurring amino acid
XYAIIAEYGSRLYKYQARLRMPKEQLELLKKESQNLENNFRQILFLIEQIDVLKALLRDMKDGMDNNHNWNTHGDPVEDPDHTEVLDEEVSNLVNYVLKKLREDQVEMADYALKSAGASIIEAGTSESYKNNKAKLYWHGIGFLNHEMPPDIILQPDVYPGKCWAFPGSQGHTLIKLATKIIPTAVTMEHISEKVSPSGNISSAPKEFSVYGITKKCEGEEIFLGQFIYNKTGTTVQTFELQHAVSEYLLCVKLNIFSNWGHPKYTCLYRFRVHGTPGKHI

SEQ ID NO: 29493 - DNA, 1074 bp, Artificial Sequence
  derived and/or modified sequence
atgagcggcaagaccaaggccagaagagccgccatgttcttcagaagatgcagcgaggacgccagcggcagcgccagcggcaacgccctgctgagcgaggacgagaaccccgacgccaacggcgtgaccagaagctggaagatcatcctgagcaccatgctgaccctgaccttcctgctggtgggcctgctgaaccaccagtggctgaaggagaccgacgtgccccagaagagcagacagctgtacgccatcatcgccgagtacggcagcagactgtacaagtaccaggccagactgagaatgcccaaggagcagctggagctgctgaagaaggagagccagaacctggagaacaacttcagacagatcctgttcctgatcgagcagatcgacgtgctgaaggccctgctgagagacatgaaggacggcatggacaacaaccacaactggaacacccacggcgaccccgtggaggaccccgaccacaccgaggaggtgagcaacctggtgaactacgtgctgaagaagctgagagaggaccaggtggagatggccgactacgccctgaagagcgccggcgccagcatcatcgaggccggcaccagcgagagctacaagaacaacaaggccaagctgtactggcacggcatcggcttcctgaaccacgagatgccccccgacatcatcctgcagcccgacgtgtaccccggcaagtgctgggccttccccggcagccagggccacaccctgatcaagctggccaccaagatcatccccaccgccgtgaccatggagcacatcagcgagaaggtgagccccagcggcaacatcagcagcgcccccaaggagttcagcgtgtacggcatcaccaagaagtgcgagggcgaggagatcttcctgggccagttcatctacaacaagaccggcaccaccgtgcagaccttcgagctgcagcacgccgtgagcgagtacctgctgtgcgtgaagctgaacatcttcagcaactggggccaccccaagtacacctgcctgtacagattcagagtgcacggcacccccggcaagcacatctag

SEQ ID NO: 29494 - DNA, 1074 bp, Artificial Sequence
  derived and/or modified sequence
atgagcggtaagactaaagcccgacgtgcagcaatgttctttaggcgctgctccgaagatgcctcaggctccgctagtgggaatgccctgctatcagaggacgagaatcccgacgcgaatggagtaacacgaagctggaaaattattctaagtaccatgctcacattaactttcctactggttggactgttgaaccatcagtggctcaaagagaccgacgtgcctcagaagagtcggcagttgtacgcaataatcgccgagtatgggtctagactatacaaatatcaggcccgtctgagaatgccaaaggaacaacttgagttgctgaaaaaggagtcccaaaatctggagaataatttcagacagatcctgtttctaatcgagcaaattgatgtgctaaaggcccttctccgtgatatgaaagacggcatggataacaaccataactggaatacccacggagatccagtagaggatcccgatcatacagaagaggtgagcaacctggtgaattacgtgctgaagaaactgagagaagaccaggtcgaaatggccgattacgcactgaagtctgcaggcgctagcatcattgaagcagggaccagtgagtcttacaagaataataaggccaagctgtactggcacgggattggcttccttaaccacgagatgcccccagacatcattctacagcccgatgtataccctggcaaatgttgggcctttcccggaagccaggggcacactctcattaagctggcgaccaagatcattcctacagctgtgacaatggaacatatttcggaaaaagtgtctccaagtggtaacatctcatctgccccaaaggaattctcggtttatggaatcaccaagaaatgtgaaggtgaggagatctttttagggcaattcatctataataaaacagggactaccgtccagaccttcgagctgcaacatgccgtcagtgaatatcttctgtgtgtgaagctgaatatcttcagcaactggggacatccgaaatatacatgtctgtaccgctttagggttcatgggaccccaggcaaacatatttag

SEQ ID NO: 29495 - DNA, 1074 bp, Artificial Sequence
  derived and/or modified sequence
atgtccggaaagaccaaggcacgccgtgcagccatgttttttagaagatgcagcgaggacgcgagcggtagtgcctctggtaatgcccttttaagcgaggacgagaatcccgatgccaacggcgtcacacgttcctggaagattatattgtctactatgcttactctgacctttctactcgtcgggctgctgaatcatcagtggctgaaggagacagacgtgccccagaagagcagacagttatatgcaatcatcgccgagtacggctcccgcctctacaagtaccaggcaaggctgagaatgcccaaggaacaactagagttgctgaagaaagagtcccagaacctcgagaataatttcagacagatcttgttcctaatcgagcagatagacgtgcttaaggcactgttacgggatatgaaggacggtatggataacaaccataattggaatacccacggcgatccggtcgaagatcccgaccatactgaagaggtgtctaatttggtaaattacgttcttaaaaagctcagagaggatcaggtggaaatggctgactacgctctgaaatctgccggggcatccatcatcgaagcggggacaagtgagtcctacaaaaataataaagctaaattgtactggcatggcattggctttctgaatcatgaaatgccaccagacatcatccttcagccggatgtgtacccaggtaagtgctgggcctttcctggaagtcaggggcacacgctgattaagctggccacaaagattatcccaaccgccgtgacgatggagcacatatccgaaaaggtttcacccagcgggaatatctccagcgccccaaaggaattcagcgtgtatggaataaccaagaagtgtgagggcgaggagatcttcctaggccagttcatttataacaagactggcacaacagtgcagacattcgaactgcagcacgcagtttctgagtacctgctctgcgtcaagctaaacatttttagcaattgggggcaccccaagtatacctgtctttaccggttccgggtgcacgggacaccaggaaaacatatttag

SEQ ID NO: 29496 - DNA, 1074 bp, Artificial Sequence
  derived and/or modified sequence
atgtctgggaagaccaaggcccggcgggccgccatgttcttccgccgctgcagtgaagatgccagcggcagcgccagcggaaatgccctgctgtctgaagatgaaaatccagatgccaacggggtgaccaggtcctggaagatcatcctgagcaccatgctgaccctgaccttcctgctggtgggcctgctgaaccaccagtggctgaaggagacagatgtgccccagaagagccggcagctgtatgccatcatcgccgagtatggcagccggctgtacaagtaccaggcccggctgaggatgcccaaggagcagctggagctgctgaagaaggagagccagaacctggagaacaacttccggcagatcctcttcctgattgagcagattgatgtgctgaaggccctgctgcgggacatgaaggatggcatggacaacaaccacaactggaacacccatggagaccctgtggaggaccctgaccacacagaggaggtgagcaacctggtgaactacgtgctgaagaagctgcgggaggaccaggtggagatggctgactatgccctgaagtctgctggggccagcatcattgaagctggcaccagcgagagctacaagaacaacaaggccaagctgtactggcatggaattggcttcctgaaccacgagatgcccccagacatcatcctgcagccagatgtgtacccaggcaagtgctgggccttccctggcagccagggccacaccctcatcaagctggccaccaagatcatccccacagctgtgaccatggagcacatcagcgagaaggtgagccccagcggcaacatcagcagcgcccccaaggagttctctgtgtatggcatcaccaagaagtgtgagggggaggagatcttcctgggccagttcatctacaacaagacaggcaccaccgtgcagacctttgagctgcagcacgctgtgtctgagtacctgctgtgtgtgaagctgaacatcttcagcaactggggccaccccaagtacacctgcctgtaccgcttccgggtgcacggcaccccaggcaagcacatctag

SEQ ID NO: 29497 - DNA, 1074 bp, Artificial Sequence
  derived and/or modified sequence
atgagcggcaagaccaaggcccggcgggccgccatgttcttccggaggtgttccgaagacgcaagcggttcagcatcagggaacgccttactttctgaggatgagaatcccgacgcaaacggggtgactcgaagttggaaaattatcctgtccacgatgttaactctcacctttctcttagttggcttgttgaatcaccaatggctaaaagaaactgatgtgccacagaagagcagacagctgtacgcaattatcgccgaatacggatctcgtttgtataagtatcaggcacgattgaggatgcctaaagagcagcttgaactcctgaagaaagagagtcagaatttagagaacaactttcggcagatactcttcttaattgagcagattgacgtgttaaaggcattgttaagggacatgaaagacgggatggataataatcataactggaatacacatggtgaccctgtggaagaccctgaccacaccgaagaagtgagcaatcttgtcaattatgtcctcaaaaaactgagggaggaccaggtggaaatggctgactatgccctgaagtctgctggtgcgagtatcattgaggccgggacttccgaaagctacaagaacaacaaggccaagctctactggcacggaattggtttcctaaaccatgagatgcctccagatatcatccttcagccagacgtgtatcccgggaagtgctgggctttcccagggagccagggtcatactctgattaagctcgctaccaagattatccccaccgccgttacaatggagcacataagtgagaaagtgagtccctcaggcaacattagctccgccccgaaagagttcagcgtatatggaatcactaagaagtgtgagggagaggaaatctttctgggacagttcatctataataaaacaggaacaacggttcagacgtttgaactgcagcatgctgtgagcgaatacctgctgtgtgtgaagctgaatatattcagtaattggggtcaccctaaatatacatgtctgtacaggttcagggtgcatggtacacccggcaaacatatatag

SEQ ID NO: 29498 - DNA, 1074 bp, Artificial Sequence
  derived and/or modified sequence
atgagcggcaagaccaaggcccggcgggccgccatgttcttccggcgatgttccgaggacgcatctggctcagctagcggcaacgccctgctctcagaggacgaaaaccccgacgccaatggcgtgacccgctcctggaagattatcctgagcaccatgctgaccctaacctttctcttagtggggctgctgaatcatcagtggttgaaggagaccgacgttcctcagaagagtagacagctgtacgctatcattgcggagtacggatctagactgtacaagtatcaagcccgcctcagaatgcccaaagaacagctggagctcctgaagaaggaaagccagaaccttgagaacaattttaggcagattctcttcctgatcgagcagatcgatgtcctgaaggcattactgagagatatgaaggatgggatggacaacaaccataattggaacacacacggcgacccagtggaagacccagaccacaccgaagaggtatccaatttagtgaattatgtgcttaagaaacttcgtgaggatcaggtcgagatggctgactatgccttaaaatcagctggggcctcgatcattgaggccggaaccagcgagagctataagaacaataaggcgaagctgtattggcacggaatcgggttcctgaatcatgaaatgccacctgatataatccttcagcctgatgtttatcctgggaaatgttgggctttccccgggtcccaaggacacacgctaatcaaattggctacaaagatcatccccaccgcggtcacaatggagcacatctccgaaaaagtgagtcccagcggtaacatctcctccgcacccaaggaattctccgtctacggaattacgaaaaagtgtgaaggggaggagatcttccttgggcagttcatttataacaaaacaggtacaactgttcaaaccttcgaactccaacatgcggtttcagagtacctcctgtgcgttaagttgaacatcttcagcaactgggggcaccccaagtatacatgtctgtataggttccgggtccacggcacacccggaaagcacatctag

SEQ ID NO: 29499 - DNA, 1074 bp, Artificial Sequence
  derived and/or modified sequence
atgtccggtaaaactaaagctcgaagagccgcaatgttctttcgcaggtgcagcgaagatgccagtggctccgcatcaggcaacgccttgctgtctgaggacgaaaatcccgacgcgaacggggttaccaggagctggaagataatcctgagtactatgctaacccttacatttttgctcgtgggattattgaatcaccagtggcttaaagagaccgacgtccctcagaagtcccggcagctgtatgccatcatcgcggagtacggatcccggctgtataagtaccaagcccgattgcggatgcctaaagaacagcttgaacttctcaaaaaggaaagccagaacctggagaacaatttcagacagatattattccttatcgaacagattgatgtgctaaaagccctactaagagatatgaaagacggtatggacaacaatcacaactggaacacccatggcgaccctgtcgaagatcctgatcatacagaggaagtctccaacctggtgaattatgtgctcaagaaactccgggaggaccaggtggagatggcagactacgcacttaagtctgcaggcgcatctatcatcgaagctgggacatctgagtcatataagaacaataaagcaaagctctactggcacggcattggattcttgaaccatgaaatgccccctgacatcattttgcagcctgatgtttatcccggaaaatgctgggcattccctggctctcaagggcacacgctgattaagttggcgaccaagatcattcccactgccgtgacgatggaacacatctcggaaaaagtctcccccagcggcaacatcagcagtgcacctaaggagttctccgtatatggaatcaccaagaaatgtgaaggagaagaaatctttctgggccaatttatctacaacaaaacaggaacgactgtgcagacattcgagctccaacacgctgtgtccgaatatctcctgtgcgtgaaactgaatatcttttccaattggggccaccccaagtatacatgtttgtatcgattccgcgtacatggaacccctgggaaacatatttag

SEQ ID NO: 29500 - DNA, 1074 bp, Artificial Sequence
  derived and/or modified sequence
atgtccggcaaaaccaaagcgagaagagctgccatgttcttccggaggtgttctgaagatgctagcgggtcagccagtggcaacgccctcttatctgaggatgagaatcccgacgcaaatggcgtgacaaggtcatggaaaataatcctttcaacaatgctaaccttaacgtttctgctcgtgggcctgcttaaccaccagtggttaaaggagactgatgtccctcaaaagtctcgccagctttatgctattatcgctgaatatgggtctcgcttgtataagtaccaggccagactgcggatgccgaaggaacagttagaattactgaagaaggagtctcagaatctcgagaacaactttcgacaaattctttttctgatcgagcagattgatgttctgaaggcattgctaagagacatgaaggacgggatggacaataaccacaactggaatacacatggagatcccgtcgaagatccagatcatacggaagaggtttccaacctggtcaactacgtgttgaagaaactccgggaggaccaggtggagatggctgactacgcactgaaaagcgctggggcttctatcattgaggcgggaacctcagaaagctacaagaacaacaaagcaaaactctactggcacggcataggatttctcaaccacgaaatgcctccagacatcattcttcagccagatgtttatcctgggaagtgttgggccttccctggttcacagggacacacattgattaagttggctactaagattatcccgactgctgtgacgatggaacacatctcagaaaaggtatccccatctggaaatatttccagtgccccaaaagagtttagcgtatacggcattacaaaaaaatgtgaaggggaggagattttccttggacaatttatttacaacaaaaccggtaccacggtgcaaacattcgaactgcagcacgccgtctcagagtacctgttgtgcgtgaaacttaatatcttcagcaactgggggcacccaaaatacacatgtttatacaggtttcgagtccacggcacccccggaaagcatatctag

SEQ ID NO: 29501 - DNA, 1416 bp, Artificial Sequence
  derived and/or modified sequence
tcaaaattccgtcttcaagaagaaacacccgtggaggaagaagacattatacaaaacaaatttagaaactgtatgtatagcttcatgtttttcataaaataggaatgaggacaaatgttgctcttcatcctaccagctgtttgttctttggtaggggatcatgagtggaaaaacaaaggcaagaagggctgccatgttttttagacgttgctctgaagacgccagcggtagcgccagtggcaatgctttgttatcagaggacgaaaatcctgatgcgaatggggtaactcgatcatggaagattattctaagtacaatgcttacactgacttttcttcttgtaggactcctaaatcatcagtggcttaaagaaacagatgttcctcagaaatccagacaattatatgccataattgcagaatatggttcaaggctttataaatatcaggccagacttcgtatgcctaaagagcaactggaacttttaaagaaggaaagccagaatctggaaaacaattttcgtcaaattctatttttgatcgaacaaatagatgtcctgaaggcattgctaagagatatgaaggatggtatggacaataatcacaactggaacacccatggagaccctgtggaggacccggaccacacagaggaagtgtcaaacttggtcaattatgtacttaaaaagttgagagaagaccaagtcgagatggctgattatgccctgaagtcggccggagcctccatcattgaagctgggacctcagaaagttataaaaataataaagcaaaattgtactggcatgggataggtttcctaaatcatgaaatgcctccagatattattcttcagccggatgtctaccctggaaagtgctgggcttttccaggttcccagggtcataccctaatcaagcttgctacaaagatcataccaactgctgttaccatggagcacatctcagagaaggtgtctccgtcaggaaacatctccagtgcacccaaggaattttctgtctatggcatcacaaaaaaatgtgaaggagaagaaattttcctaggtcagtttatatataacaaaacaggaaccaccgttcaaacatttgaactccagcatgcagtttctgaatatttattatgtgtgaaacttaatatctttagcaactggggacacccgaagtatacttgtttatatcgattcagggtccatggcacaccaggcaagcacatctagaagagttggtacagaaggccatgccacatgtccagaatattcaagaatgcttattctcttagatgataccgcacccataggaattgagaattgggagtgggaagaaaacctcaaagtggttcatacttgcctgtaaaaagtaaatgcattttactaataaaaaaatatggaagtaaattaaa

SEQ ID NO: 29502 - DNA, 1348 bp, Artificial Sequence
  derived and/or modified sequence
aacagaagaatcagaagcttttcaaaattccgtcttcaagaagaaacacccgtggaggaagaagacattatacaaaacaaatttagaaactgggatcatgagtggaaaaacaaaggcaagaagggctgccatgttttttagacgttgctctgaagacgccagcggtagcgccagtggcaatgctttgttatcagaggacgaaaatcctgatgcgaatggggtaactcgatcatggaagattattctaagtacaatgcttacactgacttttcttcttgtaggactcctaaatcatcagtggcttaaagaaacagatgttcctcagaaatccagacaattatatgccataattgcagaatatggttcaaggctttataaatatcaggccagacttcgtatgcctaaagagcaactggaacttttaaagaaggaaagccagaatctggaaaacaattttcgtcaaattctatttttgatcgaacaaatagatgtcctgaaggcattgctaagagatatgaaggatggtatggacaataatcacaactggaacacccatggagaccctgtggaggacccggaccacacagaggaagtgtcaaacttggtcaattatgtacttaaaaagttgagagaagaccaagtcgagatggctgattatgccctgaagtcggccggagcctccatcattgaagctgggacctcagaaagttataaaaataataaagcaaaattgtactggcatgggataggtttcctaaatcatgaaatgcctccagatattattcttcagccggatgtctaccctggaaagtgctgggcttttccaggttcccagggtcataccctaatcaagcttgctacaaagatcataccaactgctgttaccatggagcacatctcagagaaggtgtctccgtcaggaaacatctccagtgcacccaaggaattttctgtctatggcatcacaaaaaaatgtgaaggagaagaaattttcctaggtcagtttatatataacaaaacaggaaccaccgttcaaacatttgaactccagcatgcagtttctgaatatttattatgtgtgaaacttaatatctttagcaactggggacacccgaagtatacttgtttatatcgattcagggtccatggcacaccaggcaagcacatctagaagagttggtacagaaggccatgccacatgtccagaatattcaagaatgcttattctcttagatgataccgcacccataggaattgagaattgggagtgggaagaaaacctcaaagtggttcatacttgcctgtaaaaagtaaatgcattttactaataaaaaaatatggaagtaaa

SEQ ID NO: 29503 - protein, 238 aa, Artificial Sequence
  derived and/or modified sequence
MWVPVVFLTLSVTWIGAAPLILSRIVGGWECEKHSQPWQVLVASRGRAVCGGVLVHPQWVLTAAHCIRNKSVILLGRHSLFHPEDTGQVFQVSHSFPHPLYDMSLLKNRFLRPGDDSSHDLMLLRLSEPAELTDAVKVMDLPTQEPALGTTCYASGWGSIEPEEFLTPKKLQCVDLHVISNDVCAQVHPQKVTKFMLCAGRWTGGKSTCSWVILITELTMPALPMVLHGSLVPWRGGV

SEQ ID NO: 29504 - DNA, 717 bp, Artificial Sequence
  derived and/or modified sequence
atgtgggttcctgtggttttcctcacactgtctgtcacctggataggggctgctcccctcatactctcccggatcgttggcggatgggagtgtgaaaagcactcgcagccttggcaggtccttgttgcctcaagaggcagagcagtgtgtggcggggtcctggtccatccgcaatgggtgctgacggctgctcactgcatccgaaataaatccgtcattctgctcggacgacacagtctatttcaccccgaagacacaggtcaggtgtttcaagttagccattcattccctcatccgctttacgacatgagtctactgaagaatcggttcttgcgcccgggagacgacagtagtcatgacctcatgcttctccggttgagcgaaccagccgagttaaccgatgccgtgaaggtcatggacctgcctacacaggagccggcccttggtactacctgctatgcaagtggatggggctcgatagaacctgaagaattcctaacaccgaagaagctgcagtgcgttgatctgcacgtcatctctaatgacgtctgcgcccaggtccatcctcaaaaggtcactaaattcatgctctgtgccggacgatggacagggggtaaaagcacatgttcttgggtaattctgatcacggagctgactatgccagccctgcctatggttctgcatggcagcctggtgccatggcgtggcggagtctag

SEQ ID NO: 29505 - DNA, 1906 bp, Artificial Sequence
  derived and/or modified sequence
agccccaagcttaccacctgcacccggagagctgtgtcaccatgtgggtcccggttgtcttcctcaccctgtccgtgacgtggattggtgctgcacccctcatcctgtctcggattgtgggaggctgggagtgcgagaagcattcccaaccctggcaggtgcttgtggcctctcgtggcagggcagtctgcggcggtgttctggtgcacccccagtgggtcctcacagctgcccactgcatcaggaacaaaagcgtgatcttgctgggtcggcacagcctgtttcatcctgaagacacaggccaggtatttcaggtcagccacagcttcccacacccgctctacgatatgagcctcctgaagaatcgattcctcaggccaggtgatgactccagccacgacctcatgctgctccgcctgtcagagcctgccgagctcacggatgctgtgaaggtcatggacctgcccacccaggagccagcactggggaccacctgctacgcctcaggctggggcagcattgaaccagaggagttcttgaccccaaagaaacttcagtgtgtggacctccatgttatttccaatgacgtgtgtgcgcaagttcaccctcagaaggtgaccaagttcatgctgtgtgctggacgctggacagggggcaaaagcacctgctcgtgggtcattctgatcaccgaactgaccatgccagccctgccgatggtcctccatggctccctagtgccctggagaggaggtgtctagtcagagagtagtcctggaaggtggcctctgtgaggagccacggggacagcatcctgcagatggtcctggcccttgtcccaccgacctgtctacaaggactgtcctcgtggaccctcccctctgcacaggagctggaccctgaagtcccttccccaccggccaggactggagcccctacccctctgttggaatccctgcccaccttcttctggaagtcggctctggagacatttctctcttcttccaaagctgggaactgctatctgttatctgcctgtccaggtctgaaagataggattgcccaggcagaaactgggactgacctatctcactctctccctgcttttacccttagggtgattctgggggcccacttgtctgtaatggtgtgcttcaaggtatcacgtcatggggcagtgaaccatgtgccctgcccgaaaggccttccctgtacaccaaggtggtgcattaccggaagtggatcaaggacaccatcgtggccaacccctgagcacccctatcaaccccctattgtagtaaacttggaaccttggaaatgaccaggccaagactcaagcctccccagttctactgacctttgtccttaggtgtgaggtccagggttgctaggaaaagaaatcagcagacacaggtgtagaccagagtgtttcttaaatggtgtaattttgtcctctctgtgtcctggggaatactggccatgcctggagacatatcactcaatttctctgaggacacagataggatggggtgtctgtgttatttgtggggtacagagatgaaagaggggtgggatccacactgagagagtggagagtgacatgtgctggacactgtccatgaagcactgagcagaagctggaggcacaacgcaccagacactcacagcaaggatggagctgaaaacataacccactctgtcctggaggcactgggaagcctagagaaggctgtgagccaaggagggagggtcttcctttggcatgggatggggatgaagtaaggagagggactggaccccctggaagctgattcactatggggggaggtgtattgaagtcctccagacaaccctcagatttgatgatttcctagtagaactcacagaaataaagagctgttatactgtg

SEQ ID NO: 29506 - DNA, 717 bp, Artificial Sequence
  derived and/or modified sequence
atgtgggtgcctgtggtgttcctgaccctgtctgtgacctggattggagctgcccccctcatcctgagcagaattgtgggcggctgggagtgtgagaagcacagccagccctggcaggtgctggtggccagccggggccgggctgtgtgtggcggcgtgctggtgcacccccagtgggtgctgacagctgcccactgcatccggaacaagagcgtcatcctgctgggccgccacagcctcttccaccctgaggacaccggccaggtgttccaggtgagccacagcttcccccaccccctgtatgacatgagcctgctgaagaaccgcttcctgcggcctggagatgacagcagccatgacctgatgctgctgcggctgtctgagcctgctgagctgacagatgctgtgaaggtgatggacctgcccacccaggagcccgccctgggcaccacctgctacgccagcggctggggcagcattgagcctgaggagttcctgacccccaagaagctgcagtgtgtggacctgcacgtgatcagcaatgatgtgtgtgcccaggtgcacccccagaaggtgaccaagttcatgctgtgtgccggccgctggacaggaggcaagagcacctgctcctgggtgatcctgatcacagagctgaccatgcctgccctgcccatggtgctgcacggcagcctggtgccctggagaggaggagtgtag

SEQ ID NO: 29507 - DNA, 717 bp, Artificial Sequence
  derived and/or modified sequence
atgtgggtgcccgtggtgttcctgaccctgagcgtgacctggatcggcgcagccccgcttattctctccagaatagtgggtgggtgggaatgcgagaagcactctcagccctggcaggtgctggtggcaagcagaggcagggccgtgtgtggaggagttttggtgcatccacaatgggttctgacggctgcccattgcatcagaaacaaaagcgttatcctgctgggcaggcatagcttgtttcacccagaggacactggccaggtttttcaggtgagtcatagttttccgcacccactgtacgacatgagcctcctgaaaaaccgtttcctgcgacctggcgatgactcatcccacgaccttatgttactccggctgtcggagcccgctgagctcaccgatgctgtaaaggtcatggatctgcctactcaggaacccgcactcgggacaacctgttacgccagcgggtggggttccatcgagccggaagagttcttgacccctaaaaaactgcagtgtgtagacctgcacgtgattagcaacgacgtgtgcgctcaggtgcacccacagaaagtgacaaagttcatgctgtgcgcgggtcgctggaccggcgggaagtcaacatgtagctgggtgatcctgattacggaactcactatgcctgcactccccatggtccttcacgggagcttagtgccttggagagggggtgtttag

SEQ ID NO: 29508 - DNA, 717 bp, Artificial Sequence
  derived and/or modified sequence
atgtgggtgccggtagtgtttttgaccttgagcgtaacatggatcggtgcagctcccctcattctgtcacgtatagtggggggatgggagtgcgaaaaacatagccagccgtggcaggtcctggttgccagccgtggaagggctgtgtgtggaggtgttctcgtgcacccacagtgggtcttgaccgccgctcattgtatacggaacaagagcgtcatactgctcggcagacactctctcttccacccagaggataccggtcaggtcttccaagtatcccacagcttcccccacccactttatgatatgagtctgttgaagaatcgcttcttgcggccaggcgacgattcgtctcacgaccttatgctattgaggctcagcgagccagccgagctgacggacgcagtcaaagtcatggatttgccaacccaggaaccagcactgggaaccacatgttacgcctctggatggggatcaatcgagcctgaagaatttcttacaccaaagaagctgcagtgtgtggatctccacgttattagtaacgatgtgtgcgcacaggtgcacccgcagaaggttaccaagttcatgttgtgcgccggacgatggaccggcggtaaatccacatgttcttgggtaattttaatcaccgagcttacaatgccggcacttcctatggtgctgcacggttccttggtgccctggaggggaggcgtatag

SEQ ID NO: 29509 - DNA, 717 bp, Artificial Sequence
  derived and/or modified sequence
atgtgggtgcccgtggtgttcctgaccctgagcgtgacctggatcggcgccgcccccctgatcctgagcagaatcgtgggcggctgggagtgcgagaagcacagccagccctggcaggtgctggtggccagcagaggcagagccgtgtgcggcggcgtgctggtgcacccccagtgggtgctgaccgccgcccactgcatcagaaacaagagcgtgatcctgctgggcagacacagcctgttccaccccgaggacaccggccaggtgttccaggtgagccacagcttcccccaccccctgtacgacatgagcctgctgaagaacagattcctgagacccggcgacgacagcagccacgacctgatgctgctgagactgagcgagcccgccgagctgaccgacgccgtgaaggtgatggacctgcccacccaggagcccgccctgggcaccacctgctacgccagcggctggggcagcatcgagcccgaggagttcctgacccccaagaagctgcagtgcgtggacctgcacgtgatcagcaacgacgtgtgcgcccaggtgcacccccagaaggtgaccaagttcatgctgtgcgccggcagatggaccggcggcaagagcacctgcagctgggtgatcctgatcaccgagctgaccatgcccgccctgcccatggtgctgcacggcagcctggtgccctggagaggcggcgtgtag

SEQ ID NO: 29510 - protein, 218 aa, Artificial Sequence
  derived and/or modified sequence
MWVPVVFLTLSVTWIGAAPLILSRIVGGWECEKHSQPWQVLVASRGRAVCGGVLVHPQWVLTAAHCIRKPGDDSSHDLMLLRLSEPAELTDAVKVMDLPTQEPALGTTCYASGWGSIEPEEFLTPKKLQCVDLHVISNDVCAQVHPQKVTKFMLCAGRWTGGKSTCSGDSGGPLVCNGVLQGITSWGSEPCALPERPSLYTKVVHYRKWIKDTIVANP

SEQ ID NO: 29511 - protein, 69 aa, Artificial Sequence
  derived and/or modified sequence
MWVPVVFLTLSVTWIGAAPLILSRIVGGWECEKHSQPWQVLVASRGRAVCGGVLVHPQWVLTAAHCIRK

SEQ ID NO: 29512 - DNA, 657 bp, Artificial Sequence
  derived and/or modified sequence
atgtgggtgcccgtggtgttcctgaccctgagcgtgacctggatcggcgccgcccccctgatcctgagcagaatcgtgggcggctgggagtgcgagaagcacagccagccctggcaggtgctggtggccagcagaggcagagccgtgtgcggcggcgtgctggtgcacccccagtgggtgctgaccgccgcccactgcatcagaaagcccggcgacgacagcagccacgacctgatgctgctgagactgagcgagcccgccgagctgaccgacgccgtgaaggtgatggacctgcccacccaggagcccgccctgggcaccacctgctacgccagcggctggggcagcatcgagcccgaggagttcctgacccccaagaagctgcagtgcgtggacctgcacgtgatcagcaacgacgtgtgcgcccaggtgcacccccagaaggtgaccaagttcatgctgtgcgccggcagatggaccggcggcaagagcacctgcagcggcgacagcggcggccccctggtgtgcaacggcgtgctgcagggcatcaccagctggggcagcgagccctgcgccctgcccgagagacccagcctgtacaccaaggtggtgcactacagaaagtggatcaaggacaccatcgtggccaacccctag

SEQ ID NO: 29513 - DNA, 657 bp, Artificial Sequence
  derived and/or modified sequence
atgtgggtgcccgtggtcttcctcacattatcagtcacatggatcggtgccgcccctttaatcctttccaggatcgtcggaggatgggaatgcgaaaagcacagccaaccatggcaggtcttagtggcaagcagggggcgggcggtgtgtggcggagttctggttcacccacagtgggtactgacagctgctcattgtatccgtaaaccaggcgatgactcgagccatgacctgatgcttttgcgtttgtctgaacccgctgaactgactgatgccgttaaagttatggacctccccacgcaggagccggccctcggcacaacttgttatgcgtctgggtggggctcaatcgagccagaggaattcctcacacccaagaagctgcagtgcgtggatttgcatgtgatatctaacgatgtgtgtgcccaggtacaccctcaaaaagtgactaagtttatgttgtgtgctgggaggtggactggaggcaagtctacctgctccggagattcaggaggaccccttgtatgtaatggcgttctacagggaattacgagttggggctccgagccatgtgccttgccggagaggccttccctctacactaaggtcgttcattatcgcaaatggatcaaggatacaattgtggcgaacccctag

SEQ ID NO: 29514 - DNA, 657 bp, Artificial Sequence
  derived and/or modified sequence
atgtgggtgcctgtggtgttcctgaccctgtctgtgacctggattggagctgcccccctcatcctgagcagaattgtgggcggctgggagtgtgagaagcacagccagccctggcaggtgctggtggccagccggggccgggctgtgtgtggcggcgtgctggtgcacccccagtgggtgctgacagctgcccactgcatcaggaagccaggagatgacagcagccatgacctgatgctgctgcggctgtctgagcctgctgagctgacagatgctgtgaaggtgatggacctgcccacccaggagcccgccctgggcaccacctgctacgccagcggctggggcagcattgagcctgaggagttcctgacccccaagaagctgcagtgtgtggacctgcacgtgatcagcaatgatgtgtgtgcccaggtgcacccccagaaggtgaccaagttcatgctgtgtgccggccgctggacaggaggcaagagcacctgcagcggggacagcggcggccccctggtgtgcaatggagtgctgcagggcatcacctcctggggcagcgagccctgtgccctgcctgagcggcccagcctgtacaccaaggtggtgcactacaggaagtggatcaaggacaccatcgtggccaacccctag

SEQ ID NO: 29515 - DNA, 969 bp, Artificial Sequence
  derived and/or modified sequence
tgtcaccatgtgggtcccggttgtcttcctcaccctgtccgtgacgtggattggtgctgcacccctcatcctgtctcggattgtgggaggctgggagtgcgagaagcattcccaaccctggcaggtgcttgtggcctctcgtggcagggcagtctgcggcggtgttctggtgcacccccagtgggtcctcacagctgcccactgcatcaggaagccaggtgatgactccagccacgacctcatgctgctccgcctgtcagagcctgccgagctcacggatgctgtgaaggtcatggacctgcccacccaggagccagcactggggaccacctgctacgcctcaggctggggcagcattgaaccagaggagttcttgaccccaaagaaacttcagtgtgtggacctccatgttatttccaatgacgtgtgtgcgcaagttcaccctcagaaggtgaccaagttcatgctgtgtgctggacgctggacagggggcaaaagcacctgctcgggtgattctgggggcccacttgtctgtaatggtgtgcttcaaggtatcacgtcatggggcagtgaaccatgtgccctgcccgaaaggccttccctgtacaccaaggtggtgcattaccggaagtggatcaaggacaccatcgtggccaacccctgagcacccctatcaaccccctattgtagtaaacttggaaccttggaaatgaccaggccaagactcaagcctccccagttctactgacctttgtccttaggtgtgaggtccagggttgctaggaaaagaaatcagcagacacaggtgtagaccagagtgtttcttaaatggtgtaattttgtcctctctgtgtcctggggaatactggccatgcctggagacatatcactcaatttctctgaggacacagataggatggggtgtctgtgttatttgtggggtacagagatgaaagaggggtgggatcc

SEQ ID NO: 29516 - DNA, 657 bp, Artificial Sequence
  derived and/or modified sequence
atgtgggtgcccgtggtgttcctgaccctgagcgtgacctggatcggcgccgccccgctcatcctgagtcgaattgtgggaggctgggaatgcgaaaagcactcacagccctggcaagttctagtcgcgtcaaggggccgggccgtttgcggcggtgtgttagtgcatccacaatgggtgctgacggccgcacactgcatccgcaagcccggcgatgatagctctcacgacctcatgttgctgcgcctatcagaacctgccgagttgactgacgctgtgaaagtgatggatcttcctactcaggaaccagccctcggaactacatgctatgcttctggctgggggtctattgaacctgaggagttccttacccccaagaaattgcagtgcgtcgatttacatgttattagtaatgatgtgtgtgctcaggtacacccacagaaagtgaccaaatttatgttgtgcgccgggcgttggacaggcggaaagagtacttgtagtggagactcaggaggtcccctcgtttgcaacggagttttacaggggattactagttggggaagcgagccctgtgcgctgcctgaaagaccgagcttatacacaaaggttgtacattacagaaaatggatcaaagacaccattgtggcgaacccctag

SEQ ID NO: 29517 - DNA, 657 bp, Artificial Sequence
  derived and/or modified sequence
atgtgggtcccggttgttttccttacactgtcagtcacttggatcggggctgctccgctgatcttgtctcggatcgtgggcggttgggagtgtgaaaagcacagtcaaccgtggcaggtgttggtggcctcgcgaggacgggcagtttgcggaggcgttctggttcatcctcagtgggtcctcactgcagctcactgcattcggaagccaggagacgattcatcccacgatttgatgctgctgcgtctgtcagagccagcggagctgacagacgccgtgaaggtcatggatctgccgactcaggagcccgctctgggcaccacctgctatgcctcaggatggggctcaatcgagcccgaagaatttttgacacccaagaaactgcaatgcgtggacctccacgtgatttctaatgacgtatgcgcgcaggtgcacccacaaaaggttactaagtttatgctgtgtgcaggccgatggaccggaggcaaatctacttgctcaggggacagcggagggccactggtctgcaatggggtgctccaggggattacctcatggggaagcgagccttgcgcactgccagagcggccatctttgtatacaaaggtggtgcactatcgcaagtggattaaggacactatcgtggccaacccttag

SEQ ID NO: 29518 - DNA, 657 bp, Artificial Sequence
  derived and/or modified sequence
atgtgggtgccagtggtgtttctgaccctgtccgttacctggataggagccgctccactcattctgtcacgcatcgtgggcggctgggaatgtgaaaaacattcacaaccttggcaggttctggttgctagcagggggcgggccgtatgcggaggtgtattggtgcatccccagtgggtcctcactgctgcccactgcattaggaagccaggcgacgactcttcacacgacctcatgctcctgagactgtccgagccagccgaactgacagacgctgtaaaagtaatggatctcccaacccaggaaccagccttgggaacaacatgttacgcgtccggttgggggagcatcgagcccgaggaattcctgacccctaagaagctgcagtgtgtggatctgcacgtgatcagtaacgatgtatgtgcccaggtacatccacagaaagtgactaaatttatgctttgcgctggccgttggactggtgggaagagtacctgttctggagactctggtggtcccctggtgtgtaacggtgtgctccagggcataacttcctgggggagcgagccatgcgcgcttcctgaacgcccttccctgtacaccaaggtcgtgcactaccgcaagtggatcaaggatactatcgtggccaacccttag

SEQ ID NO: 29519 - DNA, 210 bp, Artificial Sequence
  derived and/or modified sequence
atgtgggtgccggtggtattcttaacactgtcagttacttggatcggagccgcgcctctcatacttagcagaattgtgggcggatgggagtgtgaaaagcactcccaaccttggcaggtgctcgtagcaagtcggggtcgagctgtatgcggcggagtgctggtccacccccagtgggtgctcaccgctgcccattgcataaggaaatag

SEQ ID NO: 29520 - DNA, 1335 bp, Artificial Sequence
  derived and/or modified sequence
agccccaagcttaccacctgcacccggagagctgtgtcaccatgtgggtcccggttgtcttcctcaccctgtccgtgacgtggattggtgctgcacccctcatcctgtctcggattgtgggaggctgggagtgcgagaagcattcccaaccctggcaggtgcttgtggcctctcgtggcagggcagtctgcggcggtgttctggtgcacccccagtgggtcctcacagctgcccactgcatcaggaagccaggtgatgactccagccacgacctcatgctgctccgcctgtcagagcctgccgagctcacggatgctgtgaaggtcatggacctgcccacccaggagccagcactggggaccacctgctacgcctcaggctggggcagcattgaaccagaggagttcttgaccccaaagaaacttcagtgtgtggacctccatgttatttccaatgacgtgtgtgcgcaagttcaccctcagaaggtgaccaagttcatgctgtgtgctggacgctggacagggggcaaaagcacctgctcgggtgattctgggggcccacttgtctgtaatggtgtgcttcaaggtatcacgtcatggggcagtgaaccatgtgccctgcccgaaaggccttccctgtacaccaaggtggtgcattaccggaagtggatcaaggacaccatcgtggccaacccctgagcacccctatcaaccccctattgtagtaaacttggaaccttggaaatgaccaggccaagactcaagcctccccagttctactgacctttgtccttaggtgtgaggtccagggttgctaggaaaagaaatcagcagacacaggtgtagaccagagtgtttcttaaatggtgtaattttgtcctctctgtgtcctggggaatactggccatgcctggagacatatcactcaatttctctgaggacacagataggatggggtgtctgtgttatttgtggggtacagagatgaaagaggggtgggatccacactgagagagtggagagtgacatgtgctggacactgtccatgaagcactgagcagaagctggaggcacaacgcaccagacactcacagcaaggatggagctgaaaacataacccactctgtcctggaggcactgggaagcctagagaaggctgtgagccaaggagggagggtcttcctttggcatgggatggggatgaagtaaggagagggactggaccccctggaagctgattcactatggggggaggtgtattgaagtcctccagacaaccctcagatttgatgatttcctagtagaactcacagaaataaagagctgttatactgtg

SEQ ID NO: 29521 - DNA, 555 bp, Artificial Sequence
  derived and/or modified sequence
agccccaagcttaccacctgcacccggagagctgtgtcaccatgtgggtcccggttgtcttcctcaccctgtccgtgacgtggattggtgctgcacccctcatcctgtctcggattgtgggaggctgggagtgcgagaagcattcccaaccctggcaggtgcttgtggcctctcgtggcagggcagtctgcggcggtgttctggtgcacccccagtgggtcctcacagctgcccactgcatcaggaagtgagtaggggcctggggtctggggagcaggtgtctgtgtcccagaggaataacagctgggcattttccccaggataacctctaaggccagccttgggactgggggagagagggaaagttctggttcaggtcacatggggaggcagggttggggctggaccaccctccccatggctgcctgggtctccatctgtgttcctctatgtctctttgtgtcgctttcattatgtctcttggtaactggcttcggttgtgtctctccgtgtgactattttgttctctctctccctctcttctctgtcttcagt

SEQ ID NO: 29522 - DNA, 210 bp, Artificial Sequence
  derived and/or modified sequence
atgtgggtgcctgtggtgttcctgaccctgtctgtgacctggattggagctgcccccctcatcctgagcagaattgtgggcggctgggagtgtgagaagcacagccagccctggcaggtgctggtggccagccggggccgggctgtgtgtggcggcgtgctggtgcacccccagtgggtgctgacagctgcccactgcatcaggaagtag

SEQ ID NO: 29523 - DNA, 657 bp, Artificial Sequence
  derived and/or modified sequence
atgtgggtgcccgtggtgttcctgaccctgagcgtgacctggatcggggcggctccgctcattctgagtcgtattgtgggcgggtgggagtgcgagaaacattctcagccttggcaagtgctggtggcttccagaggcagggctgtgtgtgggggagtcctcgtccaccctcaatgggttctgacagctgcgcattgtattaggaaaccgggagatgacagctcccacgatttgatgctgctgaggctcagcgagcctgccgaattaaccgacgcggtgaaggttatggacctgcccacacaggaacccgctttaggaacaacctgctacgccagtgggtggggctccatcgagcctgaagagtttctgacacccaagaaactccaatgcgttgacctccatgtgatcagtaatgacgtgtgcgcacaggtgcacccccagaaagtgaccaagtttatgctgtgcgccggacgctggacaggcggcaaaagcacctgtagtggcgactctggtgggccattggtctgtaacggggtgctgcaagggatcacgtcttggggctccgaaccatgtgcacttccagaaaggcctagtttatacacaaaagtagtccactatagaaagtggatcaaagatacaatcgtggccaatccgtag

SEQ ID NO: 29524 - DNA, 210 bp, Artificial Sequence
  derived and/or modified sequence
atgtgggtgcccgtggtgttcctgaccctgagcgtgacctggatcggggctgcacccttgatcctctccagaatagtcgggggctgggaatgcgagaaacactctcagccctggcaggtcttggtggcgtccagggggagggccgtgtgtggtggcgtactagtgcatccacagtgggtgttaaccgctgcccattgtattcggaaatag

SEQ ID NO: 29525 - DNA, 657 bp, Artificial Sequence
  derived and/or modified sequence
atgtgggtgccggttgtgtttttaacactttccgttacgtggataggcgctgcgcctcttatcctgagcagaatagtcggcggttgggaatgcgaaaagcactcccagccatggcaggtgctggttgcaagtagaggacgggcagtttgcggaggggtcctggtgcacccccagtgggtgctgaccgcggctcattgcatccgcaagcctggagacgattctagtcacgatctgatgctcctgagattatcagagccagctgaactgacagacgccgtgaaggtgatggatcttccaacacaggaacccgctctgggtaccacgtgctatgccagcgggtggggatcgatagagccagaagaatttctgacaccgaaaaagctgcagtgcgtagatctgcacgtaatcagcaacgatgtgtgcgcccaggttcacccgcaaaaagtgacaaaattcatgttatgcgccggacgctggactgggggaaaatctacctgcagcggagactccggcggacccctggtgtgcaatggggtgcttcagggcattacgagttggggcagcgagccatgcgcactgccggagcggccatctctctacaccaaggtggtccattaccgcaagtggatcaaggacactatcgtggccaacccatag

SEQ ID NO: 29526 - DNA, 210 bp, Artificial Sequence
  derived and/or modified sequence
atgtgggtaccagttgtgtttctgacgctgtctgtcacttggatcggagccgctcccttgattctgtccagaatcgttggcggttgggagtgcgagaaacatagtcagccctggcaggtcctcgtcgcatcaaggggtagagcagtctgcggcggtgtgctcgtgcaccctcagtgggttctcaccgcagcccactgcatccggaagtag

SEQ ID NO: 29527 - DNA, 210 bp, Artificial Sequence
  derived and/or modified sequence
atgtgggtgcccgtggtgttcctgaccctgagcgtgacctggatcggcgccgcccccctgatcctgagcagaatcgtgggcggctgggagtgcgagaagcacagccagccctggcaggtgctggtggccagcagaggcagagccgtgtgcggcggcgtgctggtgcacccccagtgggtgctgaccgccgcccactgcatcagaaagtag

SEQ ID NO: 29528 - protein, 173 aa, Artificial Sequence
  derived and/or modified sequence
MCTNIVYEWLKALQLPQYAESFVDNGYDDLEVCKQIGDPDLDAIGVLAPAHRRRILEAVRRLREQDANAAGLYFTLEPQPAPPGPPADAVPTGRRGEPCGGPAQGTRGDSRGHTTAPRSRELVSYPKLKLKIMIRDKLVRDGIHLSKPPYSRKVPMAGILEYLMNWPKSSQSR

SEQ ID NO: 29529 - DNA, 522 bp, Artificial Sequence
  derived and/or modified sequence
atgtgcaccaacatcgtgtacgagtggctgaaggccctgcagctgccccagtacgccgagagcttcgtggacaacggctacgacgacctggaggtgtgcaagcagatcggcgaccccgacctggacgccatcggcgtgctggcccccgcccacagaagaagaatcctggaggccgtgagaagactgagagagcaggacgccaacgccgccggcctgtacttcaccctggagccccagcccgccccccccggcccccccgccgacgccgtgcccaccggcagaagaggcgagccctgcggcggccccgcccagggcaccagaggcgacagcagaggccacaccaccgcccccagaagcagagagctggtgagctaccccaagctgaagctgaagatcatgatcagagacaagctggtgagagacggcatccacctgagcaagcccccctacagcagaaaggtgcccatggccggcatcctggagtacctgatgaactggcccaagagcagccagagcagatag

SEQ ID NO: 29530 - DNA, 522 bp, Artificial Sequence
  derived and/or modified sequence
atgtgcaccaacatcgtgtacgaatggctgaaggccctgcagcttccgcagtatgccgagagctttgttgataatggctacgatgatctcgaggtctgcaaacagattggtgatcctgatctggatgccatcggcgtgctcgcacccgctcacaggaggcgcatactggaggctgtacgacggctgcgtgagcaggacgctaacgctgctggtctctacttcacattagaacctcaacccgcgccacccggcccacctgccgacgcagttcccaccgggcgaagaggggaaccatgcggggggccggcacaaggcacccgaggggatagtagaggtcacaccaccgcacctcgaagtagggagctagttagttacccaaagctgaaactcaagattatgatacgcgacaagttggtgagagatggcatccaccttagcaagcccccctacagcagaaaagtgcctatggcgggcattctcgagtatctaatgaattggcccaaatcctctcagagccgttag

SEQ ID NO: 29531 - DNA, 522 bp, Artificial Sequence
  derived and/or modified sequence
atgtgcaccaacatcgtgtatgagtggctgaaggccctgcagctgccccagtatgcagagagctttgtggacaatggctatgatgacctggaggtgtgcaagcagatcggggaccctgacctggatgccatcggcgtgctggccccagcccacagaagacgcatcctggaggccgtgcggcggctgcgggagcaggatgccaatgctgctggcctgtacttcaccctggagccccagcctgcccctcctggccccccagcagatgctgtgcccaccggccggcggggggagccctgtggcggccctgcccagggcaccaggggggacagccggggccacaccacagcccccaggagccgggagctggtgtcctaccccaagctgaagctgaagatcatgatccgggacaagctggtgagagatggcatccacctgagcaagccaccctacagcaggaaggtgcccatggccggcatcctggagtacctgatgaactggcccaagagcagccagagcaggtag

SEQ ID NO: 29532 - DNA, 522 bp, Artificial Sequence
  derived and/or modified sequence
atgtgcaccaacatcgtgtacgagtggctgaaggccctgcagctgccacaatatgctgagagcttcgtggacaatggatatgacgacctcgaagtatgtaaacaaataggggatccagaccttgacgcaattggcgtgctggctcccgcgcatcgtcgcagaattctggaagcagttagacggctccgtgaacaggacgccaatgccgctggtctgtatttcactctcgagcctcaacccgcaccgcccggtcctcccgccgacgcggtgccgacaggcaggcggggcgaaccctgcggcggtccagcacagggaacaagaggcgacagtcgaggccatacaactgctccgcggagccgtgaattggtgtcctaccccaaactgaagttgaaaattatgattagagacaagctagtgagggacgggatccatttgagcaaacccccgtattcgcgcaaagtgcctatggcaggcatcctcgagtatctgatgaactggcctaagtcgtcacagtctaggtag

SEQ ID NO: 29533 - DNA, 522 bp, Artificial Sequence
  derived and/or modified sequence
atgtgcacaaatatagtgtatgaatggttaaaggcgctgcagttgccccaatatgccgagtctttcgtggacaacggatacgacgatctagaggtctgtaagcagataggcgaccccgacctcgacgcaattggtgtgctcgctccagcacataggcgaagaatcctcgaggctgtaagacgattacgcgagcaggatgccaatgctgctgggttatattttaccctggagccgcaacccgctccccctggcccaccggcagacgccgttcccactggtaggaggggagagccctgcggaggtcccgctcagggcacaaggggagattccagagggcacaccacagcccctcggagccgagaactcgtctcctaccccaagctcaagctcaaaatcatgattcgagataagttggttcgtgatgggattcatttgtcaaagccaccttacagcagaaaggtccccatggcaggtattttagaatacctcatgaactggcccaagtcgagccagagtagatag

SEQ ID NO: 29534 - DNA, 6089 bp, Artificial Sequence
  derived and/or modified sequence
ccatgtgcaccaacatagtttacgagtggctcaaagcgctgcagcttccgcagtacgcggagtccttcgtggataacggctacgatgacctggaggtgtgcaagcagatcggggacccggacctggatgccatcggggtgctggcgcccgcgcaccgccgccgtatcctggaggccgtgcgccggctgcgggagcaggacgccaacgccgccggcctctacttcacgcttgagccgcagccggcgccccccgggccgcccgccgacgccgtccccaccggccgccggggggagccgtgcggcggcccggcccagggcacccgcggggactctcgcggccacacgaccgccccccgcagcagggagctggtgagctaccccaaactgaagctgaagatcatgatcagggataagctcgtccgtgacggcatccacctgagcaagcccccgtactcccgcaaggtcccaatggctggcatcctagagtacttaatgaattggccgaagtcatcacagagccgctagatatcatttttgagacctcgtggaggactgatgaggtgcctgaagactggaaaagggcatatttagaaccttctttcaaaaagggaaatggatgatgaccctggaaatactcatcagcttaactttttgcttggacaaattctggaataatcaacttagtaaactgggtaactggcttataacagctagaaataaggcagtgaactatcacgcataaagaagtattgagttcatttttttaagaagatatcatgatgagatacagtcttatgcatttcttggcattctcccttccattcttaatgaaaacagatgaggttggctaaggcatttgagtcataacttagtttaagtacaatataacaaaaaggtagatttctgacagtaagtagtaattatattatttccaaatttgcttttaacttgagaacagtagctttaatttttatattcaagcatacattctacttcatttcatataggaccatgtttttataagataagatacataattctatgtagaatagtttggtgaaggaattcttattttaaggtgcttttatatagttattttgtatattggtacaatgttaaaggtgatgaattaaggaacatcaccaagagaggacaatttcttctaacttctctttttaaatttaatctggctgaggtttagtattaggactaatacaagtgtcttgctctgacatgcatcaagcaagagctagctattttacttcatagctagtttcttgcactctgtggagactgccagggccgcagctcacagcctgttctgagctgcagtgctttatcccaccttgctctccaggcttctgacttcaggcctgtgggggccgggaggtgggcagcggcagtggcctgaggagccctgtagaactacggctgaaaaagaaagtagattgaggtggggggaggaaattaacaggaatctagagtttttctaattcttatcgtcttatcgttcttgtgtttggatgctggtagtttttttttttttagacagagtctcgctctgtcacccaggctggagtgtagtggcacaatcttggctcacagtgactttcgcctcccaggttcaaggaattctcctgcctcggcctcttggtagctgggattacaggcacgcatcaccacacccagctaatttttttgtatttttagtagagatggggttttaccatgttggccaggctgttcttgaactcctggcctcaaatgatccactcgccgtggcctccagtagcgctgggattacaggcgtgagccatcacacccggcctggatgctggtagttttattttctgcttagaaaacgcaaccatgttgatgggaccaaaaacttagttgaaagaagccatggcaaaagatgttgacgtacaactggctcctgaggctgtcaattgtttagagctcccaagtagtactgcattacggaatctactacttagaagaatgtacaagatgtaagttcccatcggcaccgtcatggtaagaagaataagaaactctcaaaggaaaagaaacttacattcactttttcctggtccattttggttcctaagaatagataggccattaagaaggatattaggtttctaaggacaattttaacacaatactgctttaaaaatctgaagtttaaatagtttagctatttctgtaggttaattcaggcactgactaaaatcagtctcattatcatatacaaatgtaaggaagttaaattttaaaagcatgtataggttgtccttaaattatacaaaagcttttagtttcatcaggattatattccagttaacctttcatcttttttttttttccaaatgaactagggtctttaaaattcctaagtagattcttttgagtggtaggggagtctgtatagattacagatataatttattgtgataacaaatggcttcctgtttgacctcatttccaggtgtcgcatccgtggctgatttatttcacagatgtacatttgcatgtacttgttgaactttgctaggaaggactcaatttttgaaaaatctgttattttcactgtgggccttatgaggcaatctactgcaatggaaaaagggttccttggtcatttcaagttttattttctattagagtaatatctaacttcaattattttgccaggtttaaaccttctctctgtgtctgtggttagaatttgaaaataacaatgctctgcttaaagtaagagtcacagtcagcaaaaaaagccaatggattttaaaaagacatcttagttaaagctagaggaagaaaacttcaaataagcaaagaagtattgaaggatgcccacgaattcctttgcattaaaatcaagatgaggtaagaggtagaatataagagaaagggattatttttaccatgaattgtatctggggacagttagtcttagaaggagtaattttttcagcgtttttcctctgtatctaaacaccaataatatacttaatttttgaatataaaagaagtagcaattgactaagaataaatatgttataaaaactaggggattatcttgatttacatttcctagagtattaaaagagattaattacagactttcacttgataatattgaggagtctggagggtcatagcaaaattttctttagttcatcttaaaatttagggaggtaaaaaaagattttattcacataaaagatttcttggcatagggaaggcgtaatgttaagggcttcttccttacccaagtgggagctgaaccagtaattgtggggaaaactgaatttatagcaacaaaggatagtagtttctcaactgggagcatacgagcaatttctcagttcagagatatttatagcatcttggtgttatgcaataaacaatgacaacaacaagcattgagctttcactttggagttactcagatctgagtttaaattctaaaattattctagtagtattttcctgcggtgaatctgttaaggatgtaagctatagtgtagcttggggaatcatcttgaacagttatgaaactcattaaagcttcttttcccttgtctgtaaaatgggaaaaataaatacctctatagctcttaagaggcttaagagttctatggcttacacccacatacagtccttggctcagtgctaggcatgtagcaggtgctgactgcctctctcccttcccttctttactctcagttgtcttatttcttcttatgcagaagagattaccttaaagctgactagaaaactcagacataaattgacatttccttatcattgcctgaaacccactgaataagtcccctttgatttctctcaggaaggataaaaaaggctacagtacctgctcataggagttcagtaaatgtttattgattgaatgaaaagaatttgatttaaggaaacaataacactccatcctgggcaacagagcaagatcccgtctcaaaacaaaacaaaacaaaacaaaacagcaaattcataaaggccagcagttttcaagtctggggaaataggcacatggacagattatatgaaggtatttcattagctttcttctctttatggcagcttcagattgatgaatttgaggtacaaatgagtgagtgacatatgtatattttcctctgattttatgactgatttacaaattaggagtgcaaatgggctgttccccgatagcatcttctgggaagaatccaaccaagatacaaagcagatgatggtggatcggcaaactcttttctatgaaaagaaaaaccagatataccagggactggaaagcacctgcttgaaaattgatatgagcatgtctgaatttttcccttataagagcctgagtattgtaacaggtctcttgcacagggggttgaaaaataaaaaaagaagttaacataattaaaatgcttggacaaaacatttgctttatatagattcttacaagtaatatttgattaggtatcaaaataggtttaggcaggtggaagttctgaatttcaaggcaaataaggcatgaagggtggaacattgcatctagggaaaataagagaaataagtgaaagtctgaccctacattgccaattctcagaccaagtacaaagtattaggaattttttatatcagctgacatcttgtgcttacagtaaagccatatagatgcacacatagtgactttattaaatcaaatgagttgtgcagagcagagcaaatctattaggctttctcttttagagttttctaattttactcttattagctccctcagttgtcatcaattacatattcctacatcagatattttacactatcagattctttgattaaaaaatcatcttcagctttacattattaatctctgaggacataaaatcaaataactttctagtccatgatcattaatccctactattttagatatttccataaaaggcttaaagggaaaaaaaaatggtaggtagttcagaaaaaaatggctgggcacggtggctcacgcctgtaatcccagcactttgggaggccggggtgggcagatcatttgaggtcaggagtttgagaccagcctggccaacatggtgaaaccctgtgtctactaaaaatacaaaaaaaattagctgagtgtggtggtgtgcgcctgtaatcccagctactaaggcaggagaatggcttgaacccaggaggtggaggtcgcagtgagctgagatcgcgccagtgcgctccagcctgggcaacagagtgagactctgtctaaaaaaaaaaaaaaaagaaaagaaaaaagaaaaattgaagaacataacttttctacttatgaaatagataattttttaaaattgtttaaactcctggaaattaagtgttattttttattactgcagttgagagataccttttcagaggaaaacaagaggctaaattccatgttaagagctaagtagtatttttttcttaacaattttgccaaaatttcttctactggaccaaaaggaaataaatctacaataaatctactttctaaatattatttaagatgggaaatgtcttttataggtatattctgtataatacccttaattagatgaattatcccttatcattccaaaaatgaaatgctgtgttaaatatctccagggcaaagtggtatgttgactgggacaaacgttagaaattgtattgttcattgcacttgttgccctgttccccaagcttgtcaatgtttagagatactattcgggttgctaaagccattattcatagaaaatttctgcccctacagaagtgtgtgcatgggccttggaaaatctacatgtgtatatctgagtagcgaagcacagattcactctaattgaaagcagcagtttggttttgtaaatgtaattgcaattgacactttcttttccctttcagttattattttttttaaaggacgttatgagaaggcactatgaaaagcctaattggaatagcattatgaaccatgtaatgcatgcccatgcacactgtgatttgcaaacatatgtccgctcttcaataaatgttacggctttcacagcg

SEQ ID NO: 29535 - protein, 625 aa, Artificial Sequence
  derived and/or modified sequence
MADQRMDISSTISDFMSPGPTDLLSSSLGTSGVDCNRKRKGSSTDYQESMDTDKDDPHGRLEYTEHQGRIKNAREAHSQIEKRRRDKMNSFIDELASLVPTCNAMSRKLDKLTVLRMAVQHMKTLRGATNPYTEANYKPTFLSDDELKHLILRAADGFLFVVGCDRGKILFVSESVFKILNYSQNDLIGQSLFDYLHPKDIAKVKEQLSSSDTAPRERLIDAKTGLPVKTDITPGPSRLCSGARRSFFCRMKCNRPSVKVEDKDFPSTCSKKKDRKSFCTIHSTGYLKSWPPTKMGLDEDNEPDNEGCNLSCLVAIGRLHSHVVPQPVNGEIRVKSMEYVSRHAIDGKFVFVDQRATAILAYLPQELLGTSCYEYFHQDDIGHLAECHRQVLQTREKITTNCYKFKIKDGSFITLRSRWFSFMNPWTKEVEYIVSTNTVVLANVLEGGDPTFPQLTASPHSMDSMLPSGEGGPKRTHPTVPGIPGGTRAGAGKIGRMIAEEIMEIHRIRGSSPSSCGSSPLNITSTPPPDASSPGGKKILNGGTPDIPSSGLLSGQAQENPGYPYSDSSSILGENPHIGIDMIDNDQGSSSPSNDEAAMAVIMSLLEADAGLGGPVDFSDLPWPL

SEQ ID NO: 29536 - protein, 23 aa, Artificial Sequence
  derived and/or modified sequence
MADQRMDISSTISDFMSPGPTDL

SEQ ID NO: 29537 - DNA, 2812 bp, Artificial Sequence
  derived and/or modified sequence
ggaaagtaggttagtggtgcgacatttagggaaggcagaaagtaggtcagggacggaggtgcctgtttacccgcgccggactcaccgccgccgccgccgcgggatccgagtgcgggcgcgggcgcgggcgctcccggcgagccacggtggtgctggctagagtgtatacgtttggacccaagcttaacttttccaatgtggaatcctgggccttcattggttccgatgtcataggaatctacgctagagggcttcctgtgtgccgggcactgtggtttttggaagaagctgaccgcctgaaaagaaattataaaacatgaaaatcgctttgaggtgaccaagtccagaggcccctaactcctcccaagctggatctggggtgtaagaactgtgacttcagatcatccaatggcagaccagagaatggacatttcttcaaccatcagtgatttcatgtccccgggccccaccgacctgctttccagctctcttggtaccagtggtgtggattgcaaccgcaaacggaaaggcagctccactgactaccaagaaagcatggacacagacaaagatgaccctcatggaaggttagaatatacagaacaccaaggaaggataaaaaatgcaagggaagctcacagtcagattgaaaagcggcgtcgggataaaatgaacagttttatagatgaattggcttctttggtaccaacatgcaacgcaatgtccaggaaattagataaacttactgtgctaaggatggctgttcagcacatgaaaacattaagaggtgccaccaatccatacacagaagcaaactacaaaccaacttttctatcagacgatgaattgaaacacctcattctcagggcagcagatggatttttgtttgtcgtaggatgtgaccgagggaagatactctttgtctcagagtctgtcttcaagatcctcaactacagccagaatgatctgattggtcagagtttgtttgactacctgcatcctaaagatattgccaaagtcaaggagcagctctcctcctctgacaccgcaccccgggagcggctcatagatgcaaaaactggacttccagttaaaacagatataacccctgggccatctcgattatgttctggagcacgacgttctttcttctgtaggatgaagtgtaacaggccttcagtaaaggttgaagacaaggacttcccctctacctgctcaaagaaaaaagatcgaaaaagcttctgcacaatccacagcacaggctatttgaaaagctggccacccacaaagatggggctggatgaagacaacgaaccagacaatgaggggtgtaacctcagctgcctcgtcgcaattggacgactgcattctcatgtagttccacaaccagtgaacggggaaatcagggtgaaatctatggaatatgtttctcggcacgcgatagatggaaagtttgtttttgtagaccagagggcaacagctattttggcatatttaccacaagaacttctaggcacatcgtgttatgaatattttcaccaagatgacataggacatcttgcagaatgtcataggcaagttttacagacgagagaaaaaattacaactaattgctataaatttaaaatcaaagatggttcttttatcacactacggagtcgatggttcagtttcatgaacccttggaccaaggaagtagaatatattgtctcaactaacactgttgttttagccaacgtcctggaaggcggggacccaaccttcccacagctcacagcatccccccacagcatggacagcatgctgccctctggagaaggtggcccaaagaggacccaccccactgttccagggattccagggggaacccgggctggggcaggaaaaataggccgaatgattgctgaggaaatcatggaaatccacaggataagagggtcatcgccttctagctgtggctccagcccattgaacatcacgagtacgcctccccctgatgcctcttctccaggaggcaagaagattttaaatggagggactccagacattccttccagtggcctactatcaggccaggctcaggagaacccaggttatccatattctgatagttcttctattcttggtgagaacccccacataggtatagacatgattgacaacgaccaaggatcaagtagtcccagtaatgatgaggcagcaatggctgtcatcatgagcctcttggaagcagatgctggactgggtggccctgttgactttagtgacttgccatggccgctgtaaacactacatgttgctttggcaacagctatagtatcaaagtgcattactggtggagttttacagtctgtgaagcttactggataaggagagaatagcttttatgtactgacttcataaaagccatctcagagccattgatacaagtcaatcttactatatgtaacttcagacaaagtggaactaagcctgctccagtgtttcctcatcattgattattgggctagctgtggatagcttgcattaattgtatattttggattctgtttgtgttgaattttttaatcattgtgcacagaagcatcattggtagcttttatatgcaaatggtcatttcagatgtatggtgtttttacactacaaagaagtcccccatgtggatatttcttatactaattgtatcataaagccgtttattcttccttgtaagaatcctttactataaatatgggttaaagtataatgtactagacagttaaatatttttaataaatgtttcccttgttctataaaaaaaaaaaaaaaaaaa

SEQ ID NO: 29538 - DNA, 1527 bp, Artificial Sequence
  derived and/or modified sequence
atggccgatcagagaatggacatatccagcactatttcagatttcatgtccccaggccccacagatctgctgtcgtcttccctgggaacctctggtgtcgattgcaatagaaaacgtaagggaagctcaacagattaccaggagagcatggatacggataaggatgatccccacgggcgactggagtacaccgagcatcaaggtcgtattaagaatgctcgggaagcacactcccagatagagaaaagaagacgagataaaatgaacagctttatcgacgaactggcctccctagtgcctacctgcaacgcaatgtcacgcaagctcgataaactgacagtattgcgaatggccgtgcagcacatgaaaacactgcgaggcgcaaccaacccttacacggaggccaactataagcctacctttttaagcgacgacgaactgaaacacctgattcttagagctgccgatggatttctgttcgtcgtgggctgcgaccgcggcaagatcctgttcgtaagtgagagcgtgttcaagattctaaactattcacagaatgatctgattggacagtctctcttcgattatttgcatcctaaggacatcgccaaggtaaaggaacaactgagctctagcgataccgccccccgtgaaaggttgatcgatgccaagaccgggcttcccgtcaaaaccgacataacccccggtccatcaaggctgtgcagcggagccaggcgcagctttttctgccgaatgaagtgtaatcggccatcagtcaaagtggaagacaaggacttcccctccacctgcagcaagaagaaagtgctgcagacccgcgagaaaattaccaccaactgctacaagttcaagattaaggacggatcatttattacccttagatctagatggttttcatttatgaacccatggactaaagaagtggagtatatcgtgtccacaaacactgttgtcctggccaacgtgctcgagggaggggacccaacattccctcaactcaccgcctctccccactccatggactcaatgctgccctcaggagaaggaggtcctaagagaacgcatcctactgtcccaggtataccgggcggtacgcgggctggggccgggaaaatcggcagaatgatagccgaggaaatcatggagatccaccggattcgcggctcttccccatccagctgtggctcctcccctcttaatattacatccaccccacctcctgatgcgtcatcaccgggcggtaagaagatcctgaacggcgggacccccgacattcctagctctgggctcttaagtgggcaggctcaagaaaacccaggatacccttactcagatagctcatccattctgggggagaacccacacattggcatagacatgattgataacgatcaggggagttcttctccgagtaacgatgaggccgccatggccgtgattatgtcactgctggaagctgacgccggtctgggaggccccgtggatttcagcgacctgccatggcctttatag

SEQ ID NO: 29539 - DNA, 1878 bp, Artificial Sequence
  derived and/or modified sequence
atggctgaccagagaatggatatttcatctacaatatcagactttatgtctccaggcccaacggatctgctgtcgagttctcttggcacctctggcgtcgactgcaacaggaaaagaaagggttcttccaccgactaccaggaatctatggatacggataaggacgaccctcatggacggctggagtacacagaacatcaaggtcggattaagaacgctcgggaggcccacagtcaaattgagaaacgcagacgtgataagatgaactcattcatcgatgaattggctagtctggtcccgacttgtaatgctatgagccgcaagctcgataagcttacagttcttagaatggctgtgcagcacatgaaaactttacggggagctaccaatccttacacggaggctaactacaaacctaccttcttatctgacgacgaactcaaacatcttattctcagagccgccgatgggtttctcttcgtcgtgggatgtgacaggggcaaaatcctgttcgtgagcgagtccgtgtttaagatcctgaactatagtcaaaacgatcttatcggacagtcacttttcgattatcttcaccctaaagacatcgccaaagttaaagaacagctgagttccagtgacacagcgccccgcgagaggctcattgatgccaagaccgggctccctgttaaaactgacattacgcctgggccctcccggttatgtagtggtgctcgcagaagttttttctgccgaatgaagtgcaacagaccctccgtgaaagttgaagataaagattttccttcaacgtgctccaaaaagaaagaccgcaaaagtttctgtactatccattcaacgggatacttaaagtcctggccccctacaaagatgggcttggacgaagacaatgaacctgacaatgaaggttgcaatctttcatgcctggtagcgatcggccgcttgcattctcacgtggttccacagccagtgaacggggagatccgggtgaagtcaatggaatacgtgtcccgacacgccattgatgggaagtttgtgttcgtggaccagagggccacagcaatcctcgcatatctgcctcaggagctgctgggaacatcatgctatgagtacttccaccaggacgacatcggtcacctggccgagtgccaccgacaggtgctgcagacccgcgaaaaaataacgactaattgttacaagttcaagattaaagatgggtcattcatcactctgcgcagtcgctggtttagcttcatgaacccatggacgaaagaggtcgagtatattgtttccacaaatactgtggtactcgctaacgtgttggaggggggcgatcctactttccctcagcttaccgcttctccccactctatggattctatgctcccttcaggagaaggtggaccgaaaaggacccaccccacagtgcctggcatcccagggggcacccgggcaggtgccggaaaaattggaagaatgattgcggaggagatcatggagatacacagaattcggggctcttccccaagcagctgcgggtccagcccgcttaacattacatcaacccctccccctgacgcatcctcccccggtggcaaaaagatccttaatggagggactcccgatattcctagtagcggcttgctcagtggacaggcccaagaaaatcccgggtatccctattctgattcttcatctatcctgggggaaaaccctcatatcggtatcgatatgatagataatgatcagggtagtagcagcccgtctaatgacgaggccgccatggccgtgataatgagccttctagaggccgatgcaggacttggggggcccgtcgatttcagcgacctcccctggccactctag

SEQ ID NO: 29540 - DNA, 1878 bp, Artificial Sequence
  derived and/or modified sequence
atggcagatcagcgaatggatatatcttccacaatctccgactttatgtcacccggtccgacagacctcctctcctcttccctgggaaccagtggagtggattgtaatcggaagagaaagggaagtagcactgactaccaggaaagcatggacactgacaaggacgaccctcatggacggctcgagtatacggagcatcaaggtcggatcaaaaatgctcgggaagcccatagccagatcgaaaagcggaggagggacaaaatgaactcctttatcgatgagcttgctagtctagttcccacatgtaatgccatgtccagaaaattagataaattaaccgtgctacgcatggccgtgcagcacatgaaaactctgcgaggagctacgaatccgtataccgaggctaactacaagcccacattcctgagtgacgacgaactgaaacatttgatcctgcgcgccgcagacggcttcctgttcgttgtcggatgcgacaggggcaaaatcctgtttgtgagtgagtcagttttcaagatcctcaactattcccaaaacgacctgatcgggcaatccctatttgactacttgcacccaaaagatattgcaaaagtcaaagagcaattgtcttcgagcgacaccgccccgagggaacgactgatcgatgctaaaaccgggttaccagtgaagactgacattacccccgggccgagccggctgtgcagcggcgcccggagatcttttttttgccgcatgaaatgcaatcgcccatcggtgaaagtggaggacaaagatttccccagcacatgcagcaaaaagaaggataggaagtctttttgtaccattcattcaaccggatacctgaagtcttggcctccgaccaaaatgggactcgacgaggacaatgaacctgacaatgagggctgtaatttgtcctgcctcgtggctataggccgcttacatagccacgtagtcccccagcccgtcaatggggaaatccgcgttaagagcatggagtatgttagtcgacacgcaatcgacggtaagtttgtctttgtggaccaacgggccaccgctatcttggcatacctgccacaggagctgctgggcacgtcatgctacgagtactttcatcaagatgatattggccacttggccgaatgtcaccggcaggtcttgcagaccagagagaagataacaaccaactgttacaaatttaagatcaaagatgggtccttcatcacactgcgaagtcgatggttttctttcatgaatccatggacaaaggaggttgagtatatcgtgagcacaaatacggtggtgctggctaacgtgctggagggtggtgatccaaccttcccccaactaacagcctccccccacagcatggactccatgctgcctagtggagagggcggcccaaagcggacccacccgactgttcccggaattcccggcggaacgcgcgcaggcgccggtaagataggtcgcatgatcgccgaggagattatggaaattcaccgcataagggggtcttccccatcttcatgcgggagctcacccctgaatataacgtccacacctcctcccgatgcatctagccctggaggcaagaagattctgaacggtggtacccccgacatccccagttctgggctgctctcaggacaggcccaggagaatcccggctatccgtactctgactctagcagcatcttaggcgaaaacccacacatcgggattgacatgatcgataatgaccagggcagttcatccccttctaacgacgaggccgcgatggccgtgatcatgagtctgttggaggcagacgctggcctggggggccctgtagactttagcgatctaccttggccactatag

SEQ ID NO: 29541 - DNA, 231 bp, Artificial Sequence
  derived and/or modified sequence
atggccgatcaaaggatggacattagttccacaatctccgacttcatgagccctggtccaacagatttactaagctcctcccttggcacctccggcgtggattgcaacaggaaaaggaagggcagctccactgactatcaggaatccatggataccgataaagatgaccctcatggtcggctcgagtacaccgagcatcagggccgcattaaaaacgctcgcgaggcctag

SEQ ID NO: 29542 - DNA, 408 bp, Artificial Sequence
  derived and/or modified sequence
atggccgatcaaagaatggacatttcttccaccattagcgattttatgagcccgggtcccaccgatctccttagctcttccctagggactagcggcgtggattgcaaccgaaaacggaaaggctcgtccacagattatcaggagagtatggataccgataaggacgatccccacggacggcttgagtacaccgaacaccagggtcgaattaagaatgcaagagaggctcactctcagatcgagaagaggagaagggataagatgaatagctttatcgacgagctggctagcttggtaccaacatgtaatgccatgtcccggaagctcgataagctcaccgtgctcagaatggccgttcagcacatgaagactctgcgtggtgccacaaacccctacaccgaagcctag

SEQ ID NO: 29543 - DNA, 306 bp, Artificial Sequence
  derived and/or modified sequence
atggcagaccaacgcatggacataagttccacgatttctgactttatgagccccgggcccactgatcttctgagcagcagcttaggcacttctggtgtcgattgcaatcggaagcgtaagggttcaagcacggactatcaggagtccatggacaccgacaaggacgatcctcacgggcgactggagtacaccgagcaccagggcagaattaagaacgctagagaggctcactcacagatcgagaagaggcgcagagacaaaatgaattcattcatcgacgagctcgccagtcttgtgccaacctag

SEQ ID NO: 29544 - DNA, 180 bp, Artificial Sequence
  derived and/or modified sequence
atggccgaccaacgtatggacatttccagcacgatatccgattttatgtccccaggtcctaccgacctgctatccagctcactaggaaccagcggggtagattgcaaccggaagaggaaaggctccagcactgattatcaagagagtatggacaccgacaaagacgatccgcatggatag

SEQ ID NO: 29545 - DNA, 1527 bp, Artificial Sequence
  derived and/or modified sequence
atggctgaccagaggatggacatcagcagcaccatcagtgacttcatgagccctggccccacagacctgctgagcagcagcctgggcaccagcggcgtggactgcaacaggaagaggaagggcagcagcacagactaccaggagagcatggacacagacaaggatgacccccacggccgcctggagtacacagagcaccagggccgcatcaagaatgcccgggaggcccacagccagatcgagaagagaagaagagacaagatgaacagcttcattgatgagctggccagcctggtgcccacctgcaatgccatgagcaggaagctggacaagctgactgtgctgaggatggctgtgcagcacatgaagaccctgcggggggccaccaacccctacacagaggccaactacaagcccaccttcctgagtgatgatgagctgaagcacctgatcctgcgggctgctgatggcttcctgtttgtggtgggctgtgaccggggcaagatcctgtttgtgtctgagagcgtcttcaagatcctgaactacagccagaatgacctgattggccagagcctgtttgactacctgcaccccaaggacatcgccaaggtgaaggagcagctgagcagcagtgacacagccccccgggagcggctgattgatgccaagacaggcctgcctgtgaagacagacatcaccccaggccccagccggctgtgcagcggggcccggcgctccttcttctgcaggatgaagtgcaaccggcccagcgtgaaggtggaggacaaggacttccccagcacctgcagcaagaagaaggtgctgcagacccgggagaagatcaccaccaactgctacaagttcaagatcaaggatggcagcttcatcaccctgcggagccgctggttctccttcatgaacccctggaccaaggaggtggagtacatcgtgtccaccaacacagtggtgctggccaacgtgctggagggcggggaccccaccttcccccagctgacagccagcccccacagcatggacagcatgctgcccagcggggagggcggccccaagaggacccaccccaccgtgcccggcatccctgggggcacccgggccggggccggcaagattggaaggatgattgctgaggagatcatggagatccaccgcatccggggcagcagccccagcagctgtggcagcagccccctgaacatcaccagcaccccacctccagatgccagcagccctgggggcaagaagatcctgaatggaggcaccccagacatccccagcagcggcctgctgagcggccaggcccaggagaaccctggctacccctacagcgacagcagcagcatcctgggggagaacccccacatcggcatcgacatgattgacaatgaccagggcagcagcagccccagcaatgatgaggccgccatggctgtgatcatgagcctgctggaggctgatgctggcctgggcggccctgtggacttcagtgacctgccctggcccctgtag

SEQ ID NO: 29546 - DNA, 1878 bp, Artificial Sequence
  derived and/or modified sequence
atggctgaccagaggatggacatcagcagcaccatcagtgacttcatgagccctggccccacagacctgctgagcagcagcctgggcaccagcggcgtggactgcaacaggaagaggaagggcagcagcacagactaccaggagagcatggacacagacaaggatgacccccacggccgcctggagtacacagagcaccagggccgcatcaagaatgcccgggaggcccacagccagatcgagaagagaagaagagacaagatgaacagcttcattgatgagctggccagcctggtgcccacctgcaatgccatgagcaggaagctggacaagctgactgtgctgaggatggctgtgcagcacatgaagaccctgcggggggccaccaacccctacacagaggccaactacaagcccaccttcctgagtgatgatgagctgaagcacctgatcctgcgggctgctgatggcttcctgtttgtggtgggctgtgaccggggcaagatcctgtttgtgtctgagagcgtcttcaagatcctgaactacagccagaatgacctgattggccagagcctgtttgactacctgcaccccaaggacatcgccaaggtgaaggagcagctgagcagcagtgacacagccccccgggagcggctgattgatgccaagacaggcctgcctgtgaagacagacatcaccccaggccccagccggctgtgcagcggggcccggcgctccttcttctgcaggatgaagtgcaaccggcccagcgtgaaggtggaggacaaggacttccccagcacctgcagcaagaagaaggacaggaagagcttctgcaccatccacagcacaggctacctgaagtcctggccacccaccaagatgggcctggatgaagataatgaaccagacaatgaaggctgcaacctgagctgcctggtggccatcggccgcctgcacagccacgtggtgccccagcctgtgaatggagagatccgggtgaagtccatggagtatgtgtccagacatgccattgatggcaagtttgtgtttgtggaccagagggccacagccatcctggcctacctgccccaggagctgctgggcaccagctgctatgagtacttccaccaggatgacatcggccacctggccgagtgccaccggcaggtgctgcagacccgggagaagatcaccaccaactgctacaagttcaagatcaaggatggcagcttcatcaccctgcggagccgctggttctccttcatgaacccctggaccaaggaggtggagtacatcgtgtccaccaacacagtggtgctggccaacgtgctggagggcggggaccccaccttcccccagctgacagccagcccccacagcatggacagcatgctgcccagcggggagggcggccccaagaggacccaccccaccgtgcccggcatccctgggggcaccagggctggagctgggaagattggccgcatgattgctgaggagatcatggagatccaccgcatccggggcagcagccccagcagctgtggcagcagccccctgaacatcaccagcaccccacctccagatgccagcagccctgggggcaagaagatcctgaatggaggcaccccagacatccccagcagcggcctgctgagcggccaggcccaggagaaccctggctacccctacagcgacagcagcagcatcctgggggagaacccccacatcggcatcgacatgattgacaatgaccagggcagcagcagccccagcaatgatgaagctgccatggccgtcatcatgagcctgctggaggctgatgctggcctgggcggccctgtggacttcagtgacctgccctggcccctgtag

SEQ ID NO: 29547 - DNA, 231 bp, Artificial Sequence
  derived and/or modified sequence
atggctgaccagaggatggacatcagcagcaccatcagtgacttcatgagccctggccccacagacctgctgagcagcagcctgggcaccagcggcgtggactgcaacaggaagaggaagggcagcagcacagactaccaggagagcatggacacagacaaggatgacccccacggccgcctggagtacacagagcaccagggccgcatcaagaatgcccgggaggcctag

SEQ ID NO: 29548 - DNA, 408 bp, Artificial Sequence
  derived and/or modified sequence
atggctgaccagaggatggacatcagcagcaccatcagtgacttcatgagccctggccccacagacctgctgagcagcagcctgggcaccagcggcgtggactgcaacaggaagaggaagggcagcagcacagactaccaggagagcatggacacagacaaggatgacccccacggccgcctggagtacacagagcaccagggccgcatcaagaatgcccgggaggcccacagccagatcgagaagagaagaagagacaagatgaacagcttcattgatgagctggccagcctggtgcccacctgcaatgccatgagcaggaagctggacaagctgactgtgctgaggatggctgtgcagcacatgaagaccctgcggggggccaccaacccctacacagaggcctag

SEQ ID NO: 29549 - DNA, 306 bp, Artificial Sequence
  derived and/or modified sequence
atggctgaccagaggatggacatcagcagcaccatcagtgacttcatgagccctggccccacagacctgctgagcagcagcctgggcaccagcggcgtggactgcaacaggaagaggaagggcagcagcacagactaccaggagagcatggacacagacaaggatgacccccacggccgcctggagtacacagagcaccagggccgcatcaagaatgcccgggaggcccacagccagatcgagaagagaagaagagacaagatgaacagcttcattgatgagctggccagcctggtgcccacctag

SEQ ID NO: 29550 - DNA, 180 bp, Artificial Sequence
  derived and/or modified sequence
atggctgaccagaggatggacatcagcagcaccatcagtgacttcatgagccctggccccacagacctgctgagcagcagcctgggcaccagcggcgtggactgcaacaggaagaggaagggcagcagcacagactaccaggagagcatggacacagacaaggatgacccccacggctag

SEQ ID NO: 29551 - DNA, 1527 bp, Artificial Sequence
  derived and/or modified sequence
atggccgaccagcggatggacatcagcagcaccatcagcgacttcatgtctcccggtccaaccgatttgttatcctctagcctcggtacctcaggtgtggactgcaaccgaaagcgaaaaggctcttctaccgactatcaggagagtatggatacagataaggatgacccccacggcaggctggaatacaccgaacaccagggacggatcaaaaacgcccgagaagcccacagtcagattgagaaaaggcgccgggacaaaatgaacagttttatagatgaactcgcttctctagtcccaacttgcaatgccatgtcccgtaaactggataagctgactgtgctgagaatggcggtgcagcacatgaaaacactccgtggagccactaatccatacaccgaggctaactataaacccaccttcttaagcgacgatgaactcaagcacctgatccttcgggccgccgatggctttctcttcgtggtcgggtgtgatcgaggtaagatcctcttcgtttctgaatctgtgttcaagattctcaactactcccaaaacgaccttatcggccagtcactgttcgactatctccaccccaaggacatcgccaaagtcaaggagcaactgtcgagtagtgacactgccccccgggaaagacttatcgacgctaagaccgggcttccagtgaaaaccgacattacaccaggcccctctaggctgtgtagtggggcgcggcgtagttttttctgtagaatgaaatgcaatagaccatccgtcaaggtagaggataaagattttccctcaacctgctcaaagaagaaagttctgcagactcgcgagaagatcactaccaactgttacaagtttaagataaaagacgggagttttataaccttacgctcccgttggttctcctttatgaacccttggacaaaggaggttgagtatatcgtgtccaccaatacagtggtcctggccaatgtcttggagggaggagaccccaccttcccgcagctcacggctagcccccactccatggactctatgttgccttccggcgagggcggacctaagaggactcaccccacagtgcccggaatacccgggggcacaagagcaggcgctggaaaaatcggacgcatgatagcagaggaaatcatggaaatccacagaataaggggctccagcccgtcatcctgcgggtctagtcctctgaatatcacctctacccctcctcccgatgccagttccccaggcggaaaaaaaattctcaacggaggaacccccgacatcccaagttctggcctgctgtctggacaggctcaggagaaccctggctacccctactctgacagctcgagtatcctgggtgagaatccccacatcggaatagacatgatcgacaacgatcagggctcctctagtccctctaatgacgaggcagccatggctgttatcatgtctctcctggaggcggatgcgggcctgggcgggccagtggacttctcagatttaccttggccactttag

SEQ ID NO: 29552 - DNA, 1878 bp, Artificial Sequence
  derived and/or modified sequence
atggccgaccagcggatggacatcagcagcaccatcagcgacttcatgtcccctggccccacagatttattgagttcaagcctgggcacatctggggtagactgtaacaggaaacgcaagggatcctctactgattatcaagaaagtatggatactgataaagacgacccacacggccgattagaatatactgagcaccaaggtcgcataaagaatgcacgggaggcacacagccagatcgagaaacgccgccgggacaagatgaattcctttatcgacgaattggccagcctcgtgcccacgtgcaatgcaatgagtcgaaaactcgacaaattaacggtgctgcgcatggcagtccagcacatgaagacgctgaggggtgctacaaacccatataccgaggccaactacaaacctaccttccttagcgatgacgagctgaaacacttgattctgcgcgccgctgatggatttttgttcgtggtgggctgtgatcggggcaaaattctgttcgtgagcgaatccgtcttcaaaatcttgaactacagccagaacgatttaattggtcagagtctgttcgactacttacatccgaaggatatcgctaaagtaaaggagcagctctcttccagtgataccgcaccacgagagaggttgatagacgcaaaaactggactccccgtgaagacagatatcacgcccggaccgtcccggctgtgttctggtgccaggcgaagttttttttgccgcatgaagtgtaacagaccttccgtgaaggttgaggacaaagacttcccttcaacatgcagcaagaagaaggacagaaaaagtttctgtacaattcattctacgggatacctcaagagctggcctccaacaaagatgggcctcgacgaagacaacgagcctgataatgaggggtgtaacctgagctgcttggtcgctatcgggcggctgcatagccacgtagtgccacaacccgttaatggtgaaatccgtgttaaatcaatggaatatgttagccgccacgctatcgatggcaaatttgtgttcgtggaccaaagggccacggctatattggcatacctcccccaggaattgctaggcaccagttgctatgagtactttcaccaggacgacataggtcacctagccgagtgtcatagacaggtgctgcagacccgtgaaaaaatcacaactaattgttacaagttcaagatcaaggacggaagttttatcactctgcggtcaaggtggttttcctttatgaacccatggacgaaagaagtcgagtacattgtgagcacaaacactgttgtgttggcgaacgttcttgagggcggggacccgacttttccccagcttactgcctcacctcattccatggactccatgcttccgagtggggagggtgggcctaagcgaacccatcctacggtgcctgggattcctggtggcactagagctggtgcggggaaaattgggcgaatgatcgccgaagaaatcatggagattcatagaatccggggcagttcaccctcctcatgtggaagcagtcctcttaacatcacatcaacgcctcctccagatgctagtagtccaggcggtaaaaaaattctaaacggcggtaccccagacattccgtcttccggccttctttctgggcaagctcaagaaaacccgggctacccatactccgatagctccagcatcctgggagagaatccacacatcggcatcgatatgatagacaacgatcagggttccagctcccccagcaatgacgaggccgccatggctgtgatcatgtcattattggaggctgacgctggccttgggggcccagtggatttcagcgatctcccctggccgctttag

SEQ ID NO: 29553 - DNA, 1878 bp, Artificial Sequence
  derived and/or modified sequence
atggccgaccagcggatggacatcagcagcaccatcagcgacttcatgtcacccgggcccacagacttgctctctagcagcctggggacttctggagtggattgtaaccgtaagcgcaaggggtctagtacagattaccaggagtctatggacacagacaaggatgacccgcatggcaggctggagtacaccgaacatcagggccggatcaaaaatgcacgggaggcccatagccagatcgagaagaggaggagggacaagatgaattccttcatcgacgagctcgcctctttggtgccgacctgcaatgccatgtctagaaagctggataagctgaccgtgctccgaatggcagtccagcacatgaagacgcttaggggcgctactaacccatataccgaagctaattataaacctacgttcttaagcgatgatgagctgaagcacctgattttgagggccgctgacggttttctgttcgtggtggggtgtgatcggggtaagatcctgttcgtgtctgagtctgtgttcaagatccttaactattcccagaatgatctcattggacagagtctgttcgattatctgcaccctaaagatattgcaaaagttaaggagcagttgtcaagttctgatacagctccacgggagcgccttattgatgccaaaacgggattgccagtaaagacagatatcacccccggaccatcacgactgtgctcaggcgcacgtcggtctttcttctgccggatgaagtgtaacagaccctccgtaaaagtcgaggataaggatttcccgtcaacgtgtagtaaaaaaaaagatcgcaagtccttctgcaccatccatagtactggctacctcaaatcatggccgcctacaaagatggggctggacgaagataacgagccagacaacgaaggctgcaatctgtcttgtttggtcgcgattggacggttgcactctcatgttgtgccacagccagtcaatggagagatcagagtcaaaagcatggaatacgtgagtagacacgccatcgatggcaagttcgtgttcgtggaccagcgggcaactgccattcttgcctacctaccgcaagaattattagggacttcgtgctatgaatactttcaccaggacgacatagggcacctggctgaatgccataggcaggtgctgcagacacgcgagaagatcaccacgaactgttataagtttaaaataaaagatggcagctttatcaccctcagaagccggtggttctcatttatgaacccttggacaaaggaggtggaatacattgtgagtaccaatactgtcgttctggctaacgtgctggaggggggcgaccccacgtttcctcagctcactgccagcccacactccatggacagcatgctgccaagtggggagggcggccccaagcggactcacccgacggtgccggggatccctggcggcacgagagccggcgccggcaaaatcggtaggatgatcgcagaagagattatggagatccataggattcgagggtcatccccctcctcttgtggatcatccccattgaatatcacttcaactccaccacctgacgcatcatcccccgggggaaagaaaatacttaacgggggaacaccggacatcccttcttcgggcttgctgagcggccaagcccaggaaaaccccggctatccgtatagcgattctagcagtatcttgggggaaaaccctcatatcgggattgatatgatagataacgatcagggaagtagctccccatctaacgacgaagctgcgatggcagtgatcatgtctctcttagaggcagatgcagggctcggtggcccagtagacttctccgacctgccatggccactgtag

SEQ ID NO: 29554 - DNA, 231 bp, Artificial Sequence
  derived and/or modified sequence
atggccgaccagcggatggacatcagcagcaccatcagcgacttcatgtcacctggaccaacagatctgctctcctcctcactcggtactagcggcgtcgactgtaaccgaaagcgaaagggctcttcaaccgactaccaagagagcatggatactgataaggacgaccctcatggccggttggagtataccgaacatcaagggcgtatcaaaaatgccagggaggcctag

SEQ ID NO: 29555 - DNA, 408 bp, Artificial Sequence
  derived and/or modified sequence
atggccgaccagcggatggacatcagcagcaccatcagcgacttcatgagccccggaccaaccgacctgttgtccagctccctggggacaagtggagtcgattgtaatcgaaagcgcaaaggtagttcaactgattatcaggagtctatggatactgataaagacgatccccatggacgccttgaatacactgaacatcaggggaggatcaaaaacgcacgggaagctcatagccagattgaaaaacggaggcgggacaagatgaatagctttatcgatgagctggcatcactggtgccaacatgtaatgccatgagtcgtaagctggacaagctaacagtactccggatggcggtccagcatatgaagacattaaggggtgccaccaacccctatacggaggcttag

SEQ ID NO: 29556 - DNA, 306 bp, Artificial Sequence
  derived and/or modified sequence
atggccgaccagcggatggacatcagcagcaccatcagcgacttcatgtcccccgggcctacagatctgttgagttcctctttaggcacctccggcgtagactgcaataggaaacgcaaggggtcatccaccgattatcaggaaagcatggacacagacaaggatgacccacacggcagactcgagtacactgagcaccaggggaggattaaaaatgcacgggaggctcactcacagatcgagaagagacggcgtgacaaaatgaattcgtttattgatgaactagcatctctggtgccaacatag

SEQ ID NO: 29557 - DNA, 180 bp, Artificial Sequence
  derived and/or modified sequence
atggccgaccagcggatggacatcagcagcaccatcagcgacttcatgtctccgggtcctaccgatctcctcagtagcagcctcggcacctccggtgtggactgcaataggaaacgcaaagggtcctcaactgattaccaggaatccatggacacagataaggatgacccccatggttag

SEQ ID NO: 29558 - DNA, 1527 bp, Artificial Sequence
  derived and/or modified sequence
atggctgaccagcggatggatatttcttcaaccattagcgatttcatgtcgcctgggcctacagacctcctgtcctccagtctgggcactagcggagtagattgtaaccggaaacgcaagggttcatccacagactatcaagaatccatggataccgacaaggatgacccacatgggaggcttgagtacactgagcaccagggtagaattaaaaacgcacgagaggcccacagccagatcgagaaacgccgacgtgacaagatgaactcctttatcgacgagctggcctcccttgtccctacatgtaacgcaatgagtcgtaagctagacaagctaacagtacttagaatggccgtgcagcacatgaaaacacttagaggagctacaaatccctacactgaagcaaactataagcccacattcttgagcgatgacgaattgaagcacctcatattacgggcagctgatggcttccttttcgtggtcgggtgcgatagaggaaagatactcttcgtgagcgagtccgttttcaagatcctaaattattcccagaacgacctgatcggccagagcctgttcgattatttacaccccaaggatatcgccaaggtcaaagaacagctttccagctcagataccgctcctagagaacgactaatcgatgctaagaccggtctgcctgtgaagactgatattacccccggaccatccaggctctgtagcggcgctaggagaagctttttttgcaggatgaagtgcaatagaccatccgttaaagtcgaagacaaagatttcccatctacctgctcgaagaaaaaggtgctgcagaccagagagaagattacgacgaattgttataaatttaagatcaaagatggctcgttcatcaccttacgctcccggtggttctcatttatgaatccatggaccaaggaggttgagtacattgtcagtacgaacacagtggtgctggccaacgtcttagaaggtggtgacccgacattcccccaactgaccgcctctccacattcgatggatagcatgttgccatctggtgagggtggcccaaagagaacccatcccactgtccccggtattccgggaggcactcgcgcaggtgccggaaaaataggacgaatgattgcggaagaaatcatggaaatccatcgcattaggggctcatccccgagctcctgtggttcttcccctctgaatattacatccacgccccctcctgacgcatcatctccaggtggaaagaagatcctgaacgggggtactccggatatcccaagctccggtttgctgtctgggcaagctcaggagaaccccggatacccttactctgactcaagctccatcctgggggaaaacccgcatattggcatcgatatgattgataatgaccagggatcctccagccccagcaatgacgaggctgctatggctgtcattatgagcttgcttgaagccgacgccggactcggcggaccagtggacttctctgacttaccatggccgctgtag

SEQ ID NO: 29559 - DNA, 1878 bp, Artificial Sequence
  derived and/or modified sequence
atggccgaccagcgcatggatatcagcagtacaatttccgatttcatgtcaccgggtcctacggatctgctctccagcagccttgggacatcaggagtagattgcaatcgaaaaaggaaagggagcagcacagattaccaagagtctatggataccgacaaagatgacccacatgggagattagagtatactgaacaccagggcaggattaagaatgcaagggaggctcatagccaaatcgagaagcgccgaagggataaaatgaacagtttcattgacgagctcgcaagccttgttcccacatgcaacgcaatgtctcggaaactggacaaactgacggtcctccgcatggcagtacagcatatgaagaccctacggggagctactaacccgtacacagaggctaactataagccaacattcctgtctgacgacgagctgaagcatctgatattgcgggctgccgacggttttctcttcgtggttggttgcgataggggcaagatcctcttcgtttcagagagcgtgtttaaaatcctgaactattcccagaacgatttgatcgggcagtcgctcttcgactatctccatccaaaggacattgcgaaagtcaaggaacagttgagttcaagcgatacggcacctagggagagactgattgatgcgaaaactggattaccagttaaaacagacattactccagggccaagccgactgtgcagcggcgctcggaggtcctttttctgccggatgaagtgtaatcgtccaagcgttaaagttgaggataaggattttccctctacttgcagtaaaaagaaagatagaaagtctttctgcactatccacagcaccggttaccttaagtcttggccacctactaaaatgggcctggatgaggataacgaacccgacaacgagggctgtaacctcagctgcctggttgcaattgggaggctacattcacacgtggtccctcagccagtcaatggcgagatccgagtcaaaagcatggagtacgttagcaggcacgctatcgatgggaagttcgtgttcgttgatcaacgggcaacggcaatcctggcttacctgcctcaggagctcttgggaaccagctgctacgagtattttcatcaggacgatatcgggcatctggctgaatgtcacagacaggtactacagaccagagaaaaaattaccacaaattgctacaaattcaaaatcaaagacggctctttcatcactcttcggagtagatggttctctttcatgaatccctggaccaaagaggtggagtacatcgttagtactaacacggtggtccttgcaaatgttctggaaggaggggatcccacattcccccagctcaccgcttccccccactccatggattcgatgttgccatcgggtgagggcggacccaagaggactcaccccaccgttccagggattccagggggtactagagccggtgccggaaagatcggaagaatgattgccgaagagatcatggagatacacaggattcgcggaagttccccttctagctgtggcagttctcctttgaatatcacctcaactccccctcccgacgcgtcctcacctggaggcaagaaaatcctgaatggagggactccagacatccccagttccggactgctctcagggcaggcccaggagaacccaggatacccttactcagacagctcctccattttgggcgagaatccccatatcgggatagatatgattgacaatgatcaagggtcttcgtctcccagcaatgacgaagccgcaatggctgtcattatgtcactgctcgaggctgatgccggactcggcggaccagtcgatttctctgatctcccctggcccctctag

SEQ ID NO: 29560 - DNA, 1878 bp, Artificial Sequence
  derived and/or modified sequence
atggcagatcagagaatggatatatcttctactattagtgacttcatgagcccaggccctactgacttactgtcctcatcactcgggaccagtggagtcgattgtaataggaagcgtaagggctcgagcacagattaccaggagtcaatggacaccgataaggacgaccctcacggccgactcgagtacacagagcatcaggggaggattaagaatgctagagaagcacacagtcagatcgaaaaacggagaagagataaaatgaactcttttattgacgagctggcatccctcgtccccacctgtaatgccatgtccaggaaactcgacaagttgactgtgcttaggatggcagtgcagcacatgaagaccctcaggggcgctactaacccctacactgaagctaactacaagcctactttcctatctgatgacgagcttaaacatctgatactgagggctgcagatggctttctgttcgtggtgggatgcgaccggggtaagatcctgtttgtctcagaaagcgtatttaagattttgaattattcacaaaacgacctaatcggacaaagcttgttcgattacctgcatcctaaagatatcgccaaggtgaaggaacagctgtcttcgagtgatactgctccacgtgaacgtctcatcgatgctaaaaccggacttcccgttaagaccgacatcacccctggcccatccagactgtgcagcggggcacgacgctctttcttttgtaggatgaaatgtaatcggccatctgttaaagttgaagataaagacttcccgtccacctgcagtaaaaagaaagacagaaagtctttctgtactatccactcaactggttacctcaaatcgtggcccccaaccaagatgggcctggacgaggacaatgaacccgataatgaaggatgtaatctgtcttgcctggtggctatcggcaggttgcacagtcatgttgttccgcaaccggtgaatggagagattagggtgaaatccatggagtatgtgtctcgacacgcaatcgacggcaaattcgtttttgtagaccaacgagccacagcaattctggcttatcttccccaggaactgctgggtacaagctgctacgagtacttccaccaagatgatatcggccatctagccgagtgtcatcgccaggtcctgcaaacgcgcgagaaaattacaacgaattgttataaatttaaaattaaggacggatccttcattactctgcgctcaagatggttcagctttatgaacccgtggacgaaggaagtggaatacattgtgtccaccaacacggtggtcctggccaatgtgctcgaggggggtgaccctacatttccccagcttacagccagcccgcactcaatggatagcatgctcccatctggcgaaggtgggcctaaacgaacccatccaactgtgcccggtatccccggaggaacaagggcaggcgctgggaaaattgggagaatgatcgcagaagagattatggagatccatagaatacggggaagtagcccaagttcctgcggttccagtcccctgaacattacttccacccctccaccagacgctagcagtcctgggggaaagaagattctgaacggagggacgccagacataccaagtagtggattattgtccgggcaggctcaagagaaccccggatacccctatagcgacagcagtagcattctgggcgagaaccctcacataggcatcgacatgatagacaacgatcagggcagtagctcgcccagcaacgacgaagcagccatggccgtcatcatgtcccttctagaagccgatgctgggctgggaggaccagtcgacttcagcgacttaccctggcctttatag

SEQ ID NO: 29561 - DNA, 231 bp, Artificial Sequence
  derived and/or modified sequence
atggcggaccagcgtatggacatcagcagcacaatctcagatttcatgtcccccggtcccacagatttactgtcatcttctctgggcacgtctggggtcgattgtaaccggaaacggaagggcagctctacagactatcaggaaagcatggatacggacaaggacgaccctcacgggagacttgagtataccgaacaccaaggcaggatcaagaacgcacgcgaggcatag

SEQ ID NO: 29562 - DNA, 408 bp, Artificial Sequence
  derived and/or modified sequence
atggcagatcaaaggatggatatttcatcaaccatcagcgattttatgtcccctggtccgacggatcttctgtcatcatctttgggaacaagtggagtcgactgcaataggaagaggaaggggtccagcacagactaccaagaatcaatggacacagataaggatgaccctcacggacgcctcgagtacaccgaacatcaaggaagaattaagaatgcacgggaagcccacagccagattgaaaagcgaaggcgcgacaagatgaacagctttattgacgaactggcttcactggtgccgacctgcaacgccatgagccgtaagctcgacaaactcaccgtgcttcggatggcagtgcagcatatgaagacccttcgcggagccactaacccgtatacagaggcatag

SEQ ID NO: 29563 - DNA, 306 bp, Artificial Sequence
  derived and/or modified sequence
atggctgaccagaggatggacattagcagcaccatcagcgatttcatgtcacccggaccaacagatttactgtcaagttctttggggaccagcggcgtcgattgtaatcgaaagaggaaaggatctagcaccgattaccaagaatcaatggataccgataaggacgatccacatggccgtctcgagtacacggagcatcagggccgtataaaaaatgccagggaggcccatagccaaattgaaaaaaggcggagagataagatgaatagctttattgatgaattagcatctctggtccctacgtag

SEQ ID NO: 29564 - DNA, 180 bp, Artificial Sequence
  derived and/or modified sequence
atggccgatcagagaatggacatatcttctaccatttctgactttatgtcccctggccctacagatctcctttcttcatctttaggtaccagtggagtggactgcaatcggaagcggaagggctccagtaccgactaccaggaatccatggacaccgacaaggatgatccacatggttag

SEQ ID NO: 29565 - DNA, 2387 bp, Artificial Sequence
  derived and/or modified sequence
cggaggtgcctgtttacccgcgccggactcaccgccgccgccgccgcgggatccgagtgcgggcgcgggcgcgggcgctcccggcgagccacggtggtgctggctagagtgtatacgtttggacccaagcttaacttttccaatgtggaatcctgggccttcattggttccgatgtcataggaatctacgctagagggcttcctgtgtgccgggcactgtggtttttggaagaagctgaccgcctgaaaagaaattataaaacatgaaaatcgctttgaggtgaccaagtccagaggcccctaactcctcccaagctggatctggggtgtaagaactgtgacttcagatcatccaatggcagaccagagaatggacatttcttcaaccatcagtgatttcatgtccccgggccccaccgacctgctttccagctctcttggtaccagtggtgtggattgcaaccgcaaacggaaaggcagctccactgactaccaagaaagcatggacacagacaaagatgaccctcatggaaggttagaatatacagaacaccaaggaaggataaaaaatgcaagggaagctcacagtcagattgaaaagcggcgtcgggataaaatgaacagttttatagatgaattggcttctttggtaccaacatgcaacgcaatgtccaggaaattagataaacttactgtgctaaggatggctgttcagcacatgaaaacattaagaggtgccaccaatccatacacagaagcaaactacaaaccaacttttctatcagacgatgaattgaaacacctcattctcagggcagcagatggatttttgtttgtcgtaggatgtgaccgagggaagatactctttgtctcagagtctgtcttcaagatcctcaactacagccagaatgatctgattggtcagagtttgtttgactacctgcatcctaaagatattgccaaagtcaaggagcagctctcctcctctgacaccgcaccccgggagcggctcatagatgcaaaaactggacttccagttaaaacagatataacccctgggccatctcgattatgttctggagcacgacgttctttcttctgtaggatgaagtgtaacaggccttcagtaaaggttgaagacaaggacttcccctctacctgctcaaagaaaaaagttttacagacgagagaaaaaattacaactaattgctataaatttaaaatcaaagatggttcttttatcacactacggagtcgatggttcagtttcatgaacccttggaccaaggaagtagaatatattgtctcaactaacactgttgttttagccaacgtcctggaaggcggggacccaaccttcccacagctcacagcatccccccacagcatggacagcatgctgccctctggagaaggtggcccaaagaggacccaccccactgttccagggattccagggggaacccgggctggggcaggaaaaataggccgaatgattgctgaggaaatcatggaaatccacaggataagagggtcatcgccttctagctgtggctccagcccattgaacatcacgagtacgcctccccctgatgcctcttctccaggaggcaagaagattttaaatggagggactccagacattccttccagtggcctactatcaggccaggctcaggagaacccaggttatccatattctgatagttcttctattcttggtgagaacccccacataggtatagacatgattgacaacgaccaaggatcaagtagtcccagtaatgatgaggcagcaatggctgtcatcatgagcctcttggaagcagatgctggactgggtggccctgttgactttagtgacttgccatggccgctgtaaacactacatgttgctttggcaacagctatagtatcaaagtgcattactggtggagttttacagtctgtgaagcttactggataaggagagaatagcttttatgtactgacttcataaaagccatctcagagccattgatacaagtcaatcttactatatgtaacttcagacaaagtggaactaagcctgctccagtgtttcctcatcattgattattgggctagctgtggatagcttgcattaattgtatattttggattctgtttgtgttgaattttttaatcattgtgcacagaagcatcattggtagcttttatatgcaaatggtcatttcagatgtatggtgtttttacactacaaagaagtcccccatgtggatatttcttatactaattgtatcataaagccgtttattcttccttgtaagaatcctttactataaatatgggttaaagtataatgtactagacagttaaatatttttaataaatgtttcccttgttct

SEQ ID NO: 29566 - DNA, 2776 bp, Artificial Sequence
  derived and/or modified sequence
gacatttagggaaggcagaaagtaggtcagggacggaggtgcctgtttacccgcgccggactcaccgccgccgccgccgcgggatccgagtgcgggcgcgggcgcgggcgctcccggcgagccacggtggtgctggctagagtgtatacgtttggacccaagcttaacttttccaatgtggaatcctgggccttcattggttccgatgtcataggaatctacgctagagggcttcctgtgtgccgggcactgtggtttttggaagaagctgaccgcctgaaaagaaattataaaacatgaaaatcgctttgaggtgaccaagtccagaggcccctaactcctcccaagctggatctggggtgtaagaactgtgacttcagatcatccaatggcagaccagagaatggacatttcttcaaccatcagtgatttcatgtccccgggccccaccgacctgctttccagctctcttggtaccagtggtgtggattgcaaccgcaaacggaaaggcagctccactgactaccaagaaagcatggacacagacaaagatgaccctcatggaaggttagaatatacagaacaccaaggaaggataaaaaatgcaagggaagctcacagtcagattgaaaagcggcgtcgggataaaatgaacagttttatagatgaattggcttctttggtaccaacatgcaacgcaatgtccaggaaattagataaacttactgtgctaaggatggctgttcagcacatgaaaacattaagaggtgccaccaatccatacacagaagcaaactacaaaccaacttttctatcagacgatgaattgaaacacctcattctcagggcagcagatggatttttgtttgtcgtaggatgtgaccgagggaagatactctttgtctcagagtctgtcttcaagatcctcaactacagccagaatgatctgattggtcagagtttgtttgactacctgcatcctaaagatattgccaaagtcaaggagcagctctcctcctctgacaccgcaccccgggagcggctcatagatgcaaaaactggacttccagttaaaacagatataacccctgggccatctcgattatgttctggagcacgacgttctttcttctgtaggatgaagtgtaacaggccttcagtaaaggttgaagacaaggacttcccctctacctgctcaaagaaaaaagatcgaaaaagcttctgcacaatccacagcacaggctatttgaaaagctggccacccacaaagatggggctggatgaagacaacgaaccagacaatgaggggtgtaacctcagctgcctcgtcgcaattggacgactgcattctcatgtagttccacaaccagtgaacggggaaatcagggtgaaatctatggaatatgtttctcggcacgcgatagatggaaagtttgtttttgtagaccagagggcaacagctattttggcatatttaccacaagaacttctaggcacatcgtgttatgaatattttcaccaagatgacataggacatcttgcagaatgtcataggcaagttttacagacgagagaaaaaattacaactaattgctataaatttaaaatcaaagatggttcttttatcacactacggagtcgatggttcagtttcatgaacccttggaccaaggaagtagaatatattgtctcaactaacactgttgttttagccaacgtcctggaaggcggggacccaaccttcccacagctcacagcatccccccacagcatggacagcatgctgccctctggagaaggtggcccaaagaggacccaccccactgttccagggattccagggggaacccgggctggggcaggaaaaataggccgaatgattgctgaggaaatcatggaaatccacaggataagagggtcatcgccttctagctgtggctccagcccattgaacatcacgagtacgcctccccctgatgcctcttctccaggaggcaagaagattttaaatggagggactccagacattccttccagtggcctactatcaggccaggctcaggagaacccaggttatccatattctgatagttcttctattcttggtgagaacccccacataggtatagacatgattgacaacgaccaaggatcaagtagtcccagtaatgatgaggcagcaatggctgtcatcatgagcctcttggaagcagatgctggactgggtggccctgttgactttagtgacttgccatggccgctgtaaacactacatgttgctttggcaacagctatagtatcaaagtgcattactggtggagttttacagtctgtgaagcttactggataaggagagaatagcttttatgtactgacttcataaaagccatctcagagccattgatacaagtcaatcttactatatgtaacttcagacaaagtggaactaagcctgctccagtgtttcctcatcattgattattgggctagctgtggatagcttgcattaattgtatattttggattctgtttgtgttgaattttttaatcattgtgcacagaagcatcattggtagcttttatatgcaaatggtcatttcagatgtatggtgtttttacactacaaagaagtcccccatgtggatatttcttatactaattgtatcataaagccgtttattcttccttgtaagaatcctttactataaatatgggttaaagtataatgtactagacagttaaatatttttaataaatgtttcccttgttctataaa

SEQ ID NO: 29567 - DNA, 2736 bp, Artificial Sequence
  derived and/or modified sequence
ggaaagtaggttagtggtgcgacatttagggaaggcagaaagtaggtcagggacggaggtgcctgtttacccgcgccggactcaccgccgccgccgccgcgggatccgagtgcgggcgcgggcgcgggcgctcccggcgagccacggtggtgctggctagagtgtatacgtttggacccaagcttaacttttccaatgtggaatcctgggccttcattggtttttggaagaagctgaccgcctgaaaagaaattataaaacatgaaaatcgctttgaggtgaccaagtccagaggcccctaactcctcccaagctggatctggggtgtaagaactgtgacttcagatcatccaatggcagaccagagaatggacatttcttcaaccatcagtgatttcatgtccccgggccccaccgacctgctttccagctctcttggtaccagtggtgtggattgcaaccgcaaacggaaaggcagctccactgactaccaagaaagcatggacacagacaaagatgaccctcatggaaggttagaatatacagaacaccaaggaaggataaaaaatgcaagggaagctcacagtcagattgaaaagcggcgtcgggataaaatgaacagttttatagatgaattggcttctttggtaccaacatgcaacgcaatgtccaggaaattagataaacttactgtgctaaggatggctgttcagcacatgaaaacattaagaggtgccaccaatccatacacagaagcaaactacaaaccaacttttctatcagacgatgaattgaaacacctcattctcagggcagcagatggatttttgtttgtcgtaggatgtgaccgagggaagatactctttgtctcagagtctgtcttcaagatcctcaactacagccagaatgatctgattggtcagagtttgtttgactacctgcatcctaaagatattgccaaagtcaaggagcagctctcctcctctgacaccgcaccccgggagcggctcatagatgcaaaaactggacttccagttaaaacagatataacccctgggccatctcgattatgttctggagcacgacgttctttcttctgtaggatgaagtgtaacaggccttcagtaaaggttgaagacaaggacttcccctctacctgctcaaagaaaaaagatcgaaaaagcttctgcacaatccacagcacaggctatttgaaaagctggccacccacaaagatggggctggatgaagacaacgaaccagacaatgaggggtgtaacctcagctgcctcgtcgcaattggacgactgcattctcatgtagttccacaaccagtgaacggggaaatcagggtgaaatctatggaatatgtttctcggcacgcgatagatggaaagtttgtttttgtagaccagagggcaacagctattttggcatatttaccacaagaacttctaggcacatcgtgttatgaatattttcaccaagatgacataggacatcttgcagaatgtcataggcaagttttacagacgagagaaaaaattacaactaattgctataaatttaaaatcaaagatggttcttttatcacactacggagtcgatggttcagtttcatgaacccttggaccaaggaagtagaatatattgtctcaactaacactgttgttttagccaacgtcctggaaggcggggacccaaccttcccacagctcacagcatccccccacagcatggacagcatgctgccctctggagaaggtggcccaaagaggacccaccccactgttccagggattccagggggaacccgggctggggcaggaaaaataggccgaatgattgctgaggaaatcatggaaatccacaggataagagggtcatcgccttctagctgtggctccagcccattgaacatcacgagtacgcctccccctgatgcctcttctccaggaggcaagaagattttaaatggagggactccagacattccttccagtggcctactatcaggccaggctcaggagaacccaggttatccatattctgatagttcttctattcttggtgagaacccccacataggtatagacatgattgacaacgaccaaggatcaagtagtcccagtaatgatgaggcagcaatggctgtcatcatgagcctcttggaagcagatgctggactgggtggccctgttgactttagtgacttgccatggccgctgtaaacactacatgttgctttggcaacagctatagtatcaaagtgcattactggtggagttttacagtctgtgaagcttactggataaggagagaatagcttttatgtactgacttcataaaagccatctcagagccattgatacaagtcaatcttactatatgtaacttcagacaaagtggaactaagcctgctccagtgtttcctcatcattgattattgggctagctgtggatagcttgcattaattgtatattttggattctgtttgtgttgaattttttaatcattgtgcacagaagcatcattggtagcttttatatgcaaatggtcatttcagatgtatggtgtttttacactacaaagaagtcccccatgtggatatttcttatactaattgtatcataaagccgtttattcttccttgtaagaatcctttactataaatatgggttaaagtataatgtactagacagttaaatatttttaataaatgtttcccttgttct

SEQ ID NO: 29568 - DNA, 519 bp, Artificial Sequence
  derived and/or modified sequence
cgggcgttcggattggctggcgggaagaggtggtgctggctagagtgtatacgtttggacccaagcttaacttttccaatgtggaatcctgggccttcattggttccgatgtcataggaatctacgctagagggcttcctgtgtgccgggcactgtggtttttggaagaagctgaccgcctgaaaagaaattataaaacatgaaaatcgctttgaggtgaccaagtccagaggcccctaactcctcccaagctggatctggggtgtaagaactgtgacttcagatcatccaatggcagaccagagaatggacatttcttcaaccatcagtgatttcatgtccccgggccccaccgacctgctttccagctctcttggtaccagtggtgtggattgcaaccgcaaacggaaaggcagctccactgactaccaagaaagcatggacacagacaaagatgaccctcatggaaggttagaatatacagaacaccaaggaaggataaaaaatgcaagggaagct

SEQ ID NO: 29569 - DNA, 571 bp, Artificial Sequence
  derived and/or modified sequence
accctaccccagcaggcgctaaaggagagctgacatgatggataacgaaaaagaagacgctgtccttctattcagggagtttaacatctggaagagccgggagttctttgtgctaaaggccctctacaaagtgcctgagatgcaaaaataagtcactttctctgtcctctcagcaaccgagtcgcatgtcgttatcaaatttttattttctgtaactgtttccttccgtcttgctccgtagacagctttttgcagcagagagcgctgccgcggggctggtgtctactcttcagtaagtggtcaaaacctggctactggaaggaaatgcaatggaatcgctccgcgctcgagtattctctttggaactacgggaatgacagctccagtgggacacttggaggtcatgatgaacgcaaagaacgtggtgctggctagagtgtatacgtttggacccaagcttaacttttccaatgtggaatcctgggccttcattgatcatccaatggcagaccagagaatggacatttcttcaaccatcagtgatttcatgtccccgggccccaccgacctg

SEQ ID NO: 29570 - DNA, 610 bp, Artificial Sequence
  derived and/or modified sequence
tttagggaaggcagaaagtaggtcagggacggaggtgcctgtttacccgcgccggactcaccgccgccgccgccgcgggatccgagtgcgggcgcgggcgcgggcgctcccggcgagccacggtggtgctggctagagtgtatacgtttggacccaagcttaacttttccaatgtggaatcctgggccttcattgatcatccaatggcagaccagagaatggacatttcttcaaccatcagtgatttcatgtccccgggccccaccgacctgctttccagctctcttggtaccagtggtgtggattgcaaccgcaaacggaaaggcagctccactgactaccaagaaagcatggacacagacaaagatgaccctcatggaaggttagaatatacagaacaccaaggaaggataaaaaatgcaagggaagctcacagtcagattgaaaagcggcgtcgggataaaatgaacagttttatagatgaattggcttctttggtaccaacatgcaacgcaatgtccaggaaattagataaacttactgtgctaaggatggctgttcagcacatgaaaacattaagaggtgccaccaatccatacacagaagcaaa

SEQ ID NO: 29571 - DNA, 567 bp, Artificial Sequence
  derived and/or modified sequence
ggtgcgacatttagggaaggcagaaagtaggtcagggacggaggtgcctgtttacccgcgccggactcaccgccgccgccgccgcgggatccgagtgcgggcgcgggcgcgggcgctcccggcgagccacggtttttggaagaagctgaccgcctgaaaagaaattataaaacatgaaaatcgctttgaggtgaccaagtccagaggcccctaactcctcccaagctggatctggggtgtaagaactgtgacttcagatcatccaatggcagaccagagaatggacatttcttcaaccatcagtgatttcatgtccccgggccccaccgacctgctttccagctctcttggtaccagtggtgtggattgcaaccgcaaacggaaaggcagctccactgactaccaagaaagcatggacacagacaaagatgaccctcatggaaggttagaatatacagaacaccaaggaaggataaaaaatgcaagggaagctcacagtcagattgaaaagcggcgtcgggataaaatgaacagttttatagatgaattggcttctttggtaccaac

SEQ ID NO: 29572 - DNA, 807 bp, Artificial Sequence
  derived and/or modified sequence
accctaccccagcaggcgctaaaggagagctgacatgatggataacgaaaaagaagacgctgtccttctattcagggagtttaacatctggaagagccgggagttctttgtgctaaaggccctctacaaagtgcctgagatgcaaaaataagtcactttctctgtcctctcagcaaccgagtcgcatgtcgttatcaaatttttattttctgtaactgtttccttccgtcttgctccgtagacagctttttgcagcagagagcgctgccgcggggctggtgtctactcttcagtaagtggtcaaaacctggctactggaaggaaatgcaatggaatcgctccgcgctcgagtattctctttggaactacgggaatgacagctccagtgggacacttggaggtcatgatgaacgcaaagaacgtggtgctggctagagtgtatacgtttggacccaagcttaacttttccaatgtggaatcctgggccttcattggtttttggaagaagctgaccgcctgaaaagaaattataaaacatgaaaatcgctttgaggtgaccaagtccagaggcccctaactcctcccaagctggatctggggtgtaagaactgtgacttcagatcatccaatggcagaccagagaatggacatttcttcaaccatcagtgatttcatgtccccgggccccaccgacctgctttccagctctcttggtaccagtggtgtggattgcaaccgcaaacggaaaggcagctccactgactaccaagaaagcatggacacagacaaagatgaccctcatggaag

SEQ ID NO: 29573 - DNA, 1527 bp, Artificial Sequence
  derived and/or modified sequence
atggccgaccagagaatggacatcagcagcaccatcagcgacttcatgagccccggccccaccgacctgctgagcagcagcctgggcaccagcggcgtggactgcaacagaaagagaaagggcagcagcaccgactaccaggagagcatggacaccgacaaggacgacccccacggcagactggagtacaccgagcaccagggcagaatcaagaacgccagagaggcccacagccagatcgagaagagaagaagagacaagatgaacagcttcatcgacgagctggccagcctggtgcccacctgcaacgccatgagcagaaagctggacaagctgaccgtgctgagaatggccgtgcagcacatgaagaccctgagaggcgccaccaacccctacaccgaggccaactacaagcccaccttcctgagcgacgacgagctgaagcacctgatcctgagagccgccgacggcttcctgttcgtggtgggctgcgacagaggcaagatcctgttcgtgagcgagagcgtgttcaagatcctgaactacagccagaacgacctgatcggccagagcctgttcgactacctgcaccccaaggacatcgccaaggtgaaggagcagctgagcagcagcgacaccgcccccagagagagactgatcgacgccaagaccggcctgcccgtgaagaccgacatcacccccggccccagcagactgtgcagcggcgccagaagaagcttcttctgcagaatgaagtgcaacagacccagcgtgaaggtggaggacaaggacttccccagcacctgcagcaagaagaaggtgctgcagaccagagagaagatcaccaccaactgctacaagttcaagatcaaggacggcagcttcatcaccctgagaagcagatggttcagcttcatgaacccctggaccaaggaggtggagtacatcgtgagcaccaacaccgtggtgctggccaacgtgctggagggcggcgaccccaccttcccccagctgaccgccagcccccacagcatggacagcatgctgcccagcggcgagggcggccccaagagaacccaccccaccgtgcccggcatccccggcggcaccagagccggcgccggcaagatcggcagaatgatcgccgaggagatcatggagatccacagaatcagaggcagcagccccagcagctgcggcagcagccccctgaacatcaccagcacccccccccccgacgccagcagccccggcggcaagaagatcctgaacggcggcacccccgacatccccagcagcggcctgctgagcggccaggcccaggagaaccccggctacccctacagcgacagcagcagcatcctgggcgagaacccccacatcggcatcgacatgatcgacaacgaccagggcagcagcagccccagcaacgacgaggccgccatggccgtgatcatgagcctgctggaggccgacgccggcctgggcggccccgtggacttcagcgacctgccctggcccctgtag

SEQ ID NO: 29574 - DNA, 1878 bp, Artificial Sequence
  derived and/or modified sequence
atggccgaccagagaatggacatcagcagcaccatcagcgacttcatgagccccggccccaccgacctgctgagcagcagcctgggcaccagcggcgtggactgcaacagaaagagaaagggcagcagcaccgactaccaggagagcatggacaccgacaaggacgacccccacggcagactggagtacaccgagcaccagggcagaatcaagaacgccagagaggcccacagccagatcgagaagagaagaagagacaagatgaacagcttcatcgacgagctggccagcctggtgcccacctgcaacgccatgagcagaaagctggacaagctgaccgtgctgagaatggccgtgcagcacatgaagaccctgagaggcgccaccaacccctacaccgaggccaactacaagcccaccttcctgagcgacgacgagctgaagcacctgatcctgagagccgccgacggcttcctgttcgtggtgggctgcgacagaggcaagatcctgttcgtgagcgagagcgtgttcaagatcctgaactacagccagaacgacctgatcggccagagcctgttcgactacctgcaccccaaggacatcgccaaggtgaaggagcagctgagcagcagcgacaccgcccccagagagagactgatcgacgccaagaccggcctgcccgtgaagaccgacatcacccccggccccagcagactgtgcagcggcgccagaagaagcttcttctgcagaatgaagtgcaacagacccagcgtgaaggtggaggacaaggacttccccagcacctgcagcaagaagaaggacagaaagagcttctgcaccatccacagcaccggctacctgaagagctggccccccaccaagatgggcctggacgaggacaacgagcccgacaacgagggctgcaacctgagctgcctggtggccatcggcagactgcacagccacgtggtgccccagcccgtgaacggcgagatcagagtgaagagcatggagtacgtgagcagacacgccatcgacggcaagttcgtgttcgtggaccagagagccaccgccatcctggcctacctgccccaggagctgctgggcaccagctgctacgagtacttccaccaggacgacatcggccacctggccgagtgccacagacaggtgctgcagaccagagagaagatcaccaccaactgctacaagttcaagatcaaggacggcagcttcatcaccctgagaagcagatggttcagcttcatgaacccctggaccaaggaggtggagtacatcgtgagcaccaacaccgtggtgctggccaacgtgctggagggcggcgaccccaccttcccccagctgaccgccagcccccacagcatggacagcatgctgcccagcggcgagggcggccccaagagaacccaccccaccgtgcccggcatccccggcggcaccagagccggcgccggcaagatcggcagaatgatcgccgaggagatcatggagatccacagaatcagaggcagcagccccagcagctgcggcagcagccccctgaacatcaccagcacccccccccccgacgccagcagccccggcggcaagaagatcctgaacggcggcacccccgacatccccagcagcggcctgctgagcggccaggcccaggagaaccccggctacccctacagcgacagcagcagcatcctgggcgagaacccccacatcggcatcgacatgatcgacaacgaccagggcagcagcagccccagcaacgacgaggccgccatggccgtgatcatgagcctgctggaggccgacgccggcctgggcggccccgtggacttcagcgacctgccctggcccctgtag

SEQ ID NO: 29575 - DNA, 231 bp, Artificial Sequence
  derived and/or modified sequence
atggccgaccagagaatggacatcagcagcaccatcagcgacttcatgagccccggccccaccgacctgctgagcagcagcctgggcaccagcggcgtggactgcaacagaaagagaaagggcagcagcaccgactaccaggagagcatggacaccgacaaggacgacccccacggcagactggagtacaccgagcaccagggcagaatcaagaacgccagagaggcctag

SEQ ID NO: 29576 - DNA, 408 bp, Artificial Sequence
  derived and/or modified sequence
atggccgaccagagaatggacatcagcagcaccatcagcgacttcatgagccccggccccaccgacctgctgagcagcagcctgggcaccagcggcgtggactgcaacagaaagagaaagggcagcagcaccgactaccaggagagcatggacaccgacaaggacgacccccacggcagactggagtacaccgagcaccagggcagaatcaagaacgccagagaggcccacagccagatcgagaagagaagaagagacaagatgaacagcttcatcgacgagctggccagcctggtgcccacctgcaacgccatgagcagaaagctggacaagctgaccgtgctgagaatggccgtgcagcacatgaagaccctgagaggcgccaccaacccctacaccgaggcctag

SEQ ID NO: 29577 - DNA, 306 bp, Artificial Sequence
  derived and/or modified sequence
atggccgaccagagaatggacatcagcagcaccatcagcgacttcatgagccccggccccaccgacctgctgagcagcagcctgggcaccagcggcgtggactgcaacagaaagagaaagggcagcagcaccgactaccaggagagcatggacaccgacaaggacgacccccacggcagactggagtacaccgagcaccagggcagaatcaagaacgccagagaggcccacagccagatcgagaagagaagaagagacaagatgaacagcttcatcgacgagctggccagcctggtgcccacctag

SEQ ID NO: 29578 - DNA, 180 bp, Artificial Sequence
  derived and/or modified sequence
atggccgaccagagaatggacatcagcagcaccatcagcgacttcatgagccccggccccaccgacctgctgagcagcagcctgggcaccagcggcgtggactgcaacagaaagagaaagggcagcagcaccgactaccaggagagcatggacaccgacaaggacgacccccacggctag

SEQ ID NO: 29579 - protein, 582 aa, Artificial Sequence
  derived and/or modified sequence
MINIESMDTDKDDPHGRLEYTEHQGRIKNAREAHSQIEKRRRDKMNSFIDELASLVPTCNAMSRKLDKLTVLRMAVQHMKTLRGATNPYTEANYKPTFLSDDELKHLILRAADGFLFVVGCDRGKILFVSESVFKILNYSQNDLIGQSLFDYLHPKDIAKVKEQLSSSDTAPRERLIDAKTGLPVKTDITPGPSRLCSGARRSFFCRMKCNRPSVKVEDKDFPSTCSKKKDRKSFCTIHSTGYLKSWPPTKMGLDEDNEPDNEGCNLSCLVAIGRLHSHVVPQPVNGEIRVKSMEYVSRHAIDGKFVFVDQRATAILAYLPQELLGTSCYEYFHQDDIGHLAECHRQVLQTREKITTNCYKFKIKDGSFITLRSRWFSFMNPWTKEVEYIVSTNTVVLANVLEGGDPTFPQLTASPHSMDSMLPSGEGGPKRTHPTVPGIPGGTRAGAGKIGRMIAEEIMEIHRIRGSSPSSCGSSPLNITSTPPPDASSPGGKKILNGGTPDIPSSGLLSGQAQENPGYPYSDSSSILGENPHIGIDMIDNDQGSSSPSNDEAAMAVIMSLLEADAGLGGPVDFSDLPWPL

SEQ ID NO: 29580 - DNA, 1749 bp, Artificial Sequence
  derived and/or modified sequence
atgataaatatagagagtatggataccgataaggatgatcctcacggacgcctggagtacacagagcaccagggccgcattaaaaacgctcgcgaggcccactcccaaattgaaaagcgcagacgggataagatgaattcatttatcgacgaactggctagtcttgtgccaacgtgcaatgcaatgtctcgaaaactagacaagttaactgtgctacgcatggcggtacagcacatgaaaacactgcgtggtgcaactaatccatatacggaagccaactacaaaccaactttcctgtcggatgacgaactcaaacacctcatcctgcgggccgccgatggcttcctctttgtggtggggtgcgaccgcggcaagatcctgtttgtgtcagaatctgttttcaagatcctcaattattctcagaacgatcttatagggcagtcactgtttgattacctgcaccccaaagatattgccaaagtgaaggaacaactgagttcttctgatacagcccctagggagcgcttgatcgacgcaaaaaccgggttacccgtgaaaaccgatatcactcctggcccgagccgactttgctctggagcccggaggagttttttctgccgcatgaaatgcaaccggccttccgttaaagtagaggacaaagacttcccctcaacctgctctaaaaagaaggacagaaaatctttttgcacgattcactcaaccggctacctgaaatcctggccacccacaaagatgggcctcgatgaggataatgagcccgataatgaaggctgtaacctgagttgcttagtggctattggccgactacactctcatgtggtaccccagcctgttaatggagagatccgagtaaagtctatggaatacgtttcaaggcacgctatagacggcaagttcgtctttgtcgaccaacgtgccaccgccatcttagcctacctgcctcaagaactcttgggcaccagctgctacgaatacttccatcaggacgatattggacatctggctgagtgtcatcgccaagttcttcagactcgcgagaagattactacgaattgttacaagttcaagattaaagatggctcgttcatcaccctgcgcagccgctggttctctttcatgaacccttggacgaaagaggtcgaatacattgtttccactaatactgtggtgttggccaatgtgctcgaaggtggggatccaacatttccccaattgactgcctcaccacactccatggattccatgctgcctagtggagaaggcggtcccaaacggactcaccctactgtgcctggcatcccaggcggaacccgcgcaggagctggcaagattggccgcatgatcgcggaggagatcatggagatccataggattaggggtagttcaccttcctcctgcggatcctccccattgaacattacttctaccccaccccccgacgctagctcgccggggggcaagaagatcctcaacgggggcactccggacataccgtcgtccgggctcctaagtggacaggctcaggagaatccgggttacccttattccgacagtagctccattctaggagaaaatccacacatagggatcgacatgatagacaatgaccaaggttcttctagtccgtccaacgatgaggccgcgatggccgtgattatgtcactgctggaggccgacgctggcctcggggggcccgtggatttctcagatttgccatggccactgtag

SEQ ID NO: 29581 - DNA, 219 bp, Artificial Sequence
  derived and/or modified sequence
atgattaatattgaatctatggacaccgacaaggatgatccccacggccgtctggagtacaccgagcaccaaggcaggattaaaaacgccagagaggcgcattcgcaaatcgagaagaggagaagggacaaaatgaattctttcatcgatgagctggcttcattggtgccaacctgcaacgctatgagccggaagcttgataaattaaccgtcctatag

SEQ ID NO: 29582 - DNA, 141 bp, Artificial Sequence
  derived and/or modified sequence
atgattaatattgaatccatggatacggacaaggatgacccacacggaagattagaatacacagagcatcaagggcggatcaaaaatgcccgcgaagcacactcacaaatcgaaaaaagacggagagacaagatgaattag

SEQ ID NO: 29583 - DNA, 426 bp, Artificial Sequence
  derived and/or modified sequence
atgattaacatcgaatcaatggacacagacaaggacgacccgcacggacgactggagtacacagagcaccagggccgtattaagaatgcgcgggaggctcacagtcagattgaaaagagacgccgggacaagatgaatagctttatagatgagcttgcttcccttgttccaacatgcaatgccatgagccgtaagctggataagctaactgtgttgcggatggcagttcaacatatgaaaactttgcgcggggccaccaatccctacacagaagccaactataaacccaccttcctgtccgatgacgaactgaagcatcttatcctccgtgcagccgatggcttcctgtttgtcgtcgggtgcgacagggggaagatcctcttcgtttccgagagcgtctttaagatccttaactacagtcagtag

SEQ ID NO: 29584 - DNA, 1749 bp, Artificial Sequence
  derived and/or modified sequence
atgatcaacatcgagagcatggacacagacaaggatgacccccacggccgcctggagtacacagagcaccagggccgcatcaagaatgcccgggaggcccacagccagatcgagaagagaagaagagacaagatgaacagcttcattgatgagctggccagcctggtgcccacctgcaatgccatgagcaggaagctggacaagctgactgtgctgaggatggctgtgcagcacatgaagaccctgcggggggccaccaacccctacacagaggccaactacaagcccaccttcctgagtgatgatgagctgaagcacctgatcctgcgggcagcagatggcttcctgtttgtggtgggctgtgaccggggcaagatcctgtttgtgtctgagagcgtcttcaagatcctgaactacagccagaatgacctgattggccagagcctgtttgactacctgcaccccaaggacatcgccaaggtgaaggagcagctgagcagcagtgacacagccccccgggagcggctgattgatgccaagacaggcctgcctgtgaagacagacatcaccccaggccccagccggctgtgcagcggggcccggcgctccttcttctgcaggatgaagtgcaaccggcccagcgtgaaggtggaggacaaggacttccccagcacctgcagcaagaagaaggacaggaagagcttctgcaccatccacagcacaggctacctgaagtcctggccacccaccaagatgggcctggatgaggacaatgaaccagacaatgaaggctgcaacctgagctgcctggtggccatcggccgcctgcacagccacgtggtgccccagcctgtgaatggagagatccgggtgaagtccatggagtatgtgtccagacatgccattgatggcaagtttgtgtttgtggaccagagggccacagccatcctggcctacctgccccaggagctgctgggcaccagctgctatgagtacttccaccaggatgacatcggccacctggccgagtgccaccggcaggtgctgcagacccgggagaagatcaccaccaactgctacaagttcaagatcaaggatggcagcttcatcaccctgcggagccgctggttctccttcatgaacccctggaccaaggaggtggagtacatcgtgtccaccaacacagtggtgctggccaacgtgctggagggcggggaccccaccttcccccagctgacagccagcccccacagcatggacagcatgctgcccagcggggagggcggccccaagaggacccaccccaccgtgcccggcatccctgggggcacccgggccggggccggcaagattggaaggatgattgctgaggagatcatggagatccaccgcatccggggcagcagccccagcagctgtggcagcagccccctgaacatcaccagcaccccacctccagatgccagcagccctgggggcaagaagatcctgaatggaggcaccccagacatccccagcagcggcctgctgagcggccaggcccaggagaaccctggctacccctacagcgacagcagcagcatcctgggggagaacccccacatcggcatcgacatgattgacaatgaccagggcagcagcagccccagcaatgatgaggccgccatggctgtgatcatgagcctgctggaggctgatgctggcctgggcggccctgtggacttcagtgacctgccctggcccctgtag

SEQ ID NO: 29585 - DNA, 219 bp, Artificial Sequence
  derived and/or modified sequence
atgatcaacatcgagagcatggacacagacaaggatgacccccacggccgcctggagtacacagagcaccagggccgcatcaagaatgcccgggaggcccacagccagatcgagaagagaagaagagacaagatgaacagcttcattgatgagctggccagcctggtgcccacctgcaatgccatgagcaggaagctggacaagctgactgtgctgtag

SEQ ID NO: 29586 - DNA, 141 bp, Artificial Sequence
  derived and/or modified sequence
atgatcaacatcgagagcatggacacagacaaggatgacccccacggccgcctggagtacacagagcaccagggccgcatcaagaatgcccgggaggcccacagccagatcgagaagagaagaagagacaagatgaactag

SEQ ID NO: 29587 - DNA, 426 bp, Artificial Sequence
  derived and/or modified sequence
atgatcaacatcgagagcatggacacagacaaggatgacccccacggccgcctggagtacacagagcaccagggccgcatcaagaatgcccgggaggcccacagccagatcgagaagagaagaagagacaagatgaacagcttcattgatgagctggccagcctggtgcccacctgcaatgccatgagcaggaagctggacaagctgactgtgctgaggatggctgtgcagcacatgaagaccctgcggggggccaccaacccctacacagaggccaactacaagcccaccttcctgagtgatgatgagctgaagcacctgatcctgcgggcagcagatggcttcctgtttgtggtgggctgtgaccggggcaagatcctgtttgtgtctgagagcgtcttcaagatcctgaactacagccagtag

SEQ ID NO: 29588 - DNA, 1749 bp, Artificial Sequence
  derived and/or modified sequence
atgatcaacatcgagagcatggacaccgacaaggacgacccccacggtcgccttgaatataccgaacatcaaggcaggattaaaaacgctcgcgaagcccactcgcaaatagagaaacgccgaagggacaagatgaacagcttcattgacgagctcgccagcctggtacctacctgtaatgccatgtcacgtaaactcgacaagctgactgtgttgagaatggcagtgcaacatatgaagacgctgcgaggagccaccaacccatacacagaagctaattacaaaccaactttcctgtctgatgacgaattaaaacaccttattctgagagccgcagacgggtttctgttcgtcgtgggctgcgatagggggaagattctctttgtaagtgagagcgttttcaaaattttgaactatagtcagaatgacttgattggacagtccctttttgattatttgcaccccaaagacatcgcaaaggtgaaggagcagctgagcagtagtgatacagcacctagggaaaggcttattgatgccaaaaccggtctgccagtgaaaacagacattacccctggccccagtaggttgtgcagcggcgcacgacggagttttttctgcaggatgaagtgcaaccgcccctccgtgaaggtcgaggacaaagacttcccatctacctgttcaaagaaaaaagataggaaaagcttctgtactattcatagcactggctatctgaaatcgtggcctcccacaaagatgggccttgatgaggacaacgaacccgataatgagggctgtaatttgagttgcctggttgccataggacgactccactcccacgtcgtgcctcagcctgtaaacggagagatcagggtgaaaagtatggaatacgtgtccaggcatgcgattgacgggaagttcgtgttcgtggatcagcgcgcgaccgcaatattggcctacctcccccaggagcttcttggcacttcttgctatgaatactttcaccaggacgacatcggacacttagctgagtgtcaccgccaggtactgcaaaccagagaaaaaatcacaactaactgttacaagttcaaaattaaggacggcagcttcatcaccctccggtctcgatggttcagcttcatgaacccctggacaaaggaggtcgagtacatcgtgagcacaaataccgttgtcttggctaacgtgctagaaggcggagaccccaccttcccacagcttacagcttccccgcatagtatggactccatgctgccgagcggggagggcggaccaaagagaacccatcctactgttcccggcattcctgggggcaccagagcaggggccggaaagattgggaggatgatcgcagaagagattatggaaatccatcggatccgcggcagttcacccagttcgtgcggatcttctccactgaatatcacttccacgccccctcctgatgcctcgtcaccaggagggaagaagatcctgaacggcggcacccccgacataccgagttcaggcctcctgtccggtcaggcacaggagaatccaggctacccttatagtgatagtagctcaatcctaggcgagaacccccacataggcatagatatgattgataacgaccaagggtccagctcaccgtccaacgacgaagcagcgatggccgtcatcatgagtttactcgaggccgatgcgggattagggggtcccgtggatttctctgacctgccctggcctctgtag

SEQ ID NO: 29589 - DNA, 219 bp, Artificial Sequence
  derived and/or modified sequence
atgatcaacatcgagagcatggacaccgacaaggacgacccccacggtaggctggaatacacggagcaccagggccgcataaaaaacgcacgggaggcccactctcagatcgaaaagagaagaagggataagatgaactcatttatcgatgagctggcatctctggtgccgacctgcaatgccatgtcccggaagcttgacaagctcactgtgttgtag

SEQ ID NO: 29590 - DNA, 141 bp, Artificial Sequence
  derived and/or modified sequence
atgatcaacatcgagagcatggacaccgacaaggacgacccccacgggagattagaatacactgagcaccagggccgaattaaaaacgcacgcgaggcacactcacagatcgaaaaacggcggagggacaagatgaattag

SEQ ID NO: 29591 - DNA, 426 bp, Artificial Sequence
  derived and/or modified sequence
atgatcaacatcgagagcatggacaccgacaaggacgacccccacggtcgtctagaatacactgagcaccagggaaggatcaaaaatgcgcgagaagcccacagccagattgagaagcgcagaagggacaagatgaacagtttcattgacgagctagcctcactggtccccacatgcaatgcaatgtctagaaaactagacaaattgaccgtcctgcgcatggctgtgcagcacatgaaaaccctcaggggcgcaactaacccatacacagaggccaattacaagccgactttcttgtcggacgacgaactgaaacatctgatcctgcgggccgctgatggattcctgtttgtggtcggatgtgatagaggaaaaatactgtttgtgtcagagagcgtgtttaagatacttaattactcacagtag

SEQ ID NO: 29592 - DNA, 1749 bp, Artificial Sequence
  derived and/or modified sequence
atgatcaacatagagagcatggataccgataaggatgacccacacgggcgactggagtacaccgagcatcagggcagaatcaagaatgccagggaagctcatagccagattgaaaagcggaggagggacaaaatgaattcatttattgatgaactggctagtctagtgcccacatgtaatgccatgagccggaaactggataagttgacagtcctgagaatggctgtccagcatatgaaaactctaagaggagctaccaatccttatactgaggccaactacaaaccaacttttctgtcagatgacgagcttaagcatctgattctcagagctgcagacggattcttgttcgtggtcggatgcgacagaggcaagatcctttttgtgtccgagtctgtctttaaaatacttaactactctcagaacgatcttatcggccagagcctcttcgattacttgcaccctaaggacatcgccaaagtgaaagagcagcttagttccagcgacactgccccacgggaacggttaatcgatgcaaaaactgggctaccagttaagactgacataactccgggacccagccggctgtgctccggagctcgtcgatcctttttctgccggatgaagtgcaatcgcccatccgttaaggtggaggataaggacttccccagcacatgttcaaaaaagaaggaccggaaaagtttttgcacaattcacagcacagggtatctcaagagttggccacctacaaagatgggattggatgaagataacgagcccgacaacgaaggctgtaacctgtcgtgtcttgtggctatcggcaggctacattcccacgtagtgccgcagcccgtaaacggcgaaatccgggtgaaatccatggagtacgttagtagacacgccattgatggtaagttcgtctttgtggatcagcgagcaacggctatcctggcttatcttccacaggaattgctcggcacgtcttgttatgagtattttcaccaagacgatattggtcacctagccgaatgccatagacaggtgttgcagacccgcgagaagatcaccaccaactgctacaaatttaagataaaggacggttcctttattaccctgcggtcacgctggttttccttcatgaatccctggactaaggaggtcgaatatatagttagtactaatactgtcgtgttggctaacgtactggaaggtggggaccccactttcccccaattaactgcatctccacactccatggacagtatgctgccttccggcgagggcggaccaaaacggactcatccgactgttcctggcattcccggtggaacccgggctggcgcaggaaagatcggccgaatgatagcagaggagatcatggagatccatagaatacgcggatcctccccttctagctgtggctcaagtccacttaacatcaccagcactcccccaccggacgcatcgtcgccaggtggcaagaaaatcctcaacggcggtacccctgatatcccatctagtgggcttttatcaggacaggctcaagagaatccaggatacccttatagcgatagcagttccatcctgggagagaacccccatattgggattgacatgattgataatgatcagggctctagtagcccctcgaatgacgaggctgcgatggccgttataatgtccttgctggaggccgatgcaggtctggggggacccgtggacttctccgacttaccatggccactctag

SEQ ID NO: 29593 - DNA, 219 bp, Artificial Sequence
  derived and/or modified sequence
atgatcaatattgagagcatggatacggacaaggatgaccctcatggtaggcttgagtacactgagcaccaaggaagaatcaaaaatgcacgggaagcccactcacagatagagaagcgacgcagagacaagatgaattcttttatcgatgagctagcatccctggtacccacttgcaatgctatgtcaaggaagcttgataagcttactgtcctctag

SEQ ID NO: 29594 - DNA, 141 bp, Artificial Sequence
  derived and/or modified sequence
atgattaacatagagtccatggatacagataaggacgacccacatggcagactcgagtacaccgagcaccaaggaagaattaaaaacgcacgcgaggcccactcccagatcgaaaaaaggcggagggacaagatgaactag

SEQ ID NO: 29595 - DNA, 426 bp, Artificial Sequence
  derived and/or modified sequence
atgatcaacatagagtccatggacacggataaagacgacccgcacgggagactggagtacacagaacatcaaggacgcatcaagaacgcccgagaagcgcacagccagattgagaagaggcgtcgcgacaaaatgaactcgtttatcgacgagctggcctctcttgtcccaacctgtaatgctatgagcagaaaacttgacaaactgacagtgctaaggatggcggttcagcatatgaagaccctcagaggggcaacgaatccctacacagaggctaattataaacctactttcctgtcagacgatgaactgaagcatctgattctcagagcggctgacgggttcctgtttgtggtgggttgtgatagaggtaagatcctcttcgtttcagagtctgtttttaagattctcaattattcccaatag

SEQ ID NO: 29596 - DNA, 2745 bp, Artificial Sequence
  derived and/or modified sequence
gtttacccgcgccggactcaccgccgccgccgccgcgggatccgagtgcgggcgcgggcgcgggcgctcccggcgagccacggtggtgctggctagagtgtatacgtttggacccaagcttaacttttccaatgtggaatcctgggccttcattggtttttggaagaagctgaccgcctgaaaagaaattataaaacatgaaaatcgctttgaggtgaccaagtccagaggcccctaactcctcccaagctggatctggggtgtaagaactgtgacttcagatcatccaatggcagaccagagaatggacatttcttcaaccatcagtgatttcatgtccccgggccccaccgacctgctttccagctctcttggtaccagtggtgtggattgcaaccgcaaacggaaaggcagctccactgactaccattcacaggtcgaatttggggagcacaatggctggaggtcagatgcccactaggagatgctatgattaatatagaaagcatggacacagacaaagatgaccctcatggaaggttagaatatacagaacaccaaggaaggataaaaaatgcaagggaagctcacagtcagattgaaaagcggcgtcgggataaaatgaacagttttatagatgaattggcttctttggtaccaacatgcaacgcaatgtccaggaaattagataaacttactgtgctaaggatggctgttcagcacatgaaaacattaagaggtgccaccaatccatacacagaagcaaactacaaaccaacttttctatcagacgatgaattgaaacacctcattctcagggcagcagatggatttttgtttgtcgtaggatgtgaccgagggaagatactctttgtctcagagtctgtcttcaagatcctcaactacagccagaatgatctgattggtcagagtttgtttgactacctgcatcctaaagatattgccaaagtcaaggagcagctctcctcctctgacaccgcaccccgggagcggctcatagatgcaaaaactggacttccagttaaaacagatataacccctgggccatctcgattatgttctggagcacgacgttctttcttctgtaggatgaagtgtaacaggccttcagtaaaggttgaagacaaggacttcccctctacctgctcaaagaaaaaagatcgaaaaagcttctgcacaatccacagcacaggctatttgaaaagctggccacccacaaagatggggctggatgaagacaacgaaccagacaatgaggggtgtaacctcagctgcctcgtcgcaattggacgactgcattctcatgtagttccacaaccagtgaacggggaaatcagggtgaaatctatggaatatgtttctcggcacgcgatagatggaaagtttgtttttgtagaccagagggcaacagctattttggcatatttaccacaagaacttctaggcacatcgtgttatgaatattttcaccaagatgacataggacatcttgcagaatgtcataggcaagttttacagacgagagaaaaaattacaactaattgctataaatttaaaatcaaagatggttcttttatcacactacggagtcgatggttcagtttcatgaacccttggaccaaggaagtagaatatattgtctcaactaacactgttgttttagccaacgtcctggaaggcggggacccaaccttcccacagctcacagcatccccccacagcatggacagcatgctgccctctggagaaggtggcccaaagaggacccaccccactgttccagggattccagggggaacccgggctggggcaggaaaaataggccgaatgattgctgaggaaatcatggaaatccacaggataagagggtcatcgccttctagctgtggctccagcccattgaacatcacgagtacgcctccccctgatgcctcttctccaggaggcaagaagattttaaatggagggactccagacattccttccagtggcctactatcaggccaggctcaggagaacccaggttatccatattctgatagttcttctattcttggtgagaacccccacataggtatagacatgattgacaacgaccaaggatcaagtagtcccagtaatgatgaggcagcaatggctgtcatcatgagcctcttggaagcagatgctggactgggtggccctgttgactttagtgacttgccatggccgctgtaaacactacatgttgctttggcaacagctatagtatcaaagtgcattactggtggagttttacagtctgtgaagcttactggataaggagagaatagcttttatgtactgacttcataaaagccatctcagagccattgatacaagtcaatcttactatatgtaacttcagacaaagtggaactaagcctgctccagtgtttcctcatcattgattattgggctagctgtggatagcttgcattaattgtatattttggattctgtttgtgttgaattttttaatcattgtgcacagaagcatcattggtagcttttatatgcaaatggtcatttcagatgtatggtgtttttacactacaaagaagtcccccatgtggatatttcttatactaattgtatcataaagccgtttattcttccttgtaagaatcctttactataaatatgggttaaagtataatgtactagacagttaaatatttttaataaatgtttcccttgttctat

SEQ ID NO: 29597 - DNA, 739 bp, Artificial Sequence
  derived and/or modified sequence
gagtgcgggcgcgggcgcgggcgctcccggcgagccacggtggtgctggctagagtgtatacgtttggacccaagcttaacttttccaatgtggaatcctgggccttcattggttccgatgtcataggaatctacgctagagggcttcctgtgtgccgggcactgtggtttttggaagaagctgaccgcctgaaaagaaattataaaacatgaaaatcgctttgaggtgaccaagtccagaggcccctaactcctcccaagctggatctggggtgtaagaactgtgacttcagatcatccaatggcagaccagagaatggacatttcttcaaccatcagtgatttcatgtccccgggccccaccgacctgctttccagctctcttggtaccagtggtgtggattgcaaccgcaaacggaaaggcagctccactgactaccaacttgttgacttttcgtttgattcacaggtcgaatttggggagcacaatggctggaggtcagatgcccactaggagatgctatgattaatatagaaagcatggacacagacaaagatgaccctcatggaaggttagaatatacagaacaccaaggaaggataaaaaatgcaagggaagctcacagtcagattgaaaagcggcgtcgggataaaatgaacagttttatagatgaattggcttctttggtaccaacatgcaacgcaatgtccaggaaattagataaacttactgtgctaa

SEQ ID NO: 29598 - DNA, 551 bp, Artificial Sequence
  derived and/or modified sequence
gtgcgacatttagggaaggcagaaagtaggtcagggacggaggtgcctgtttacccgcgccggactcaccgccgccgccgccgcgggatccgagtgcgggcgcgggcgcgggcgctcccggcgagccacggtggtgctggctagagtgtatacgtttggacccaagcttaacttttccaatgtggaatcctgggccttcattgatcatccaatggcagaccagagaatggacatttcttcaaccatcagtgatttcatgtccccgggccccaccgacctgctttccagctctcttggtaccagtggtgtggattgcaaccgcaaacggaaaggcagctccactgactaccattcacaggtcgaatttggggagcacaatggctggaggtcagatgcccactaggagatgctatgattaatatagaaagcatggacacagacaaagatgaccctcatggaaggttagaatatacagaacaccaaggaaggataaaaaatgcaagggaagctcacagtcagattgaaaagcggcgtcgggataaaatgaacag

SEQ ID NO: 29599 - DNA, 868 bp, Artificial Sequence
  derived and/or modified sequence
gaaagtaggtcagggacggaggtgcctgtttacccgcgccggactcaccgccgccgccgccgcgggatccgagtgcgggcgcgggcgcgggcgctcccggcgagccacggtggtgctggctagagtgtatacgtttggacccaagcttaacttttccaatgtggaatcctgggccttcattggttccgatgtcataggaatctacgctagagggcttcctgtgtgccgggcactgtgatcatccaatggcagaccagagaatggacatttcttcaaccatcagtgatttcatgtccccgggccccaccgacctgctttccagctctcttggtaccagtggtgtggattgcaaccgcaaacggaaaggcagctccactgactaccattcacaggtcgaatttggggagcacaatggctggaggtcagatgcccactaggagatgctatgattaatatagaaagcatggacacagacaaagatgaccctcatggaaggttagaatatacagaacaccaaggaaggataaaaaatgcaagggaagctcacagtcagattgaaaagcggcgtcgggataaaatgaacagttttatagatgaattggcttctttggtaccaacatgcaacgcaatgtccaggaaattagataaacttactgtgctaaggatggctgttcagcacatgaaaacattaagaggtgccaccaatccatacacagaagcaaactacaaaccaacttttctatcagacgatgaattgaaacacctcattctcagggcagcagatggatttttgtttgtcgtaggatgtgaccgagggaagatactctttgtctcagagtctgtcttcaagatcctcaactacagccag

SEQ ID NO: 29600 - DNA, 1749 bp, Artificial Sequence
  derived and/or modified sequence
atgatcaacatcgagagcatggacaccgacaaggacgacccccacggcagactggagtacaccgagcaccagggcagaatcaagaacgccagagaggcccacagccagatcgagaagagaagaagagacaagatgaacagcttcatcgacgagctggccagcctggtgcccacctgcaacgccatgagcagaaagctggacaagctgaccgtgctgagaatggccgtgcagcacatgaagaccctgagaggcgccaccaacccctacaccgaggccaactacaagcccaccttcctgagcgacgacgagctgaagcacctgatcctgagagccgccgacggcttcctgttcgtggtgggctgcgacagaggcaagatcctgttcgtgagcgagagcgtgttcaagatcctgaactacagccagaacgacctgatcggccagagcctgttcgactacctgcaccccaaggacatcgccaaggtgaaggagcagctgagcagcagcgacaccgcccccagagagagactgatcgacgccaagaccggcctgcccgtgaagaccgacatcacccccggccccagcagactgtgcagcggcgccagaagaagcttcttctgcagaatgaagtgcaacagacccagcgtgaaggtggaggacaaggacttccccagcacctgcagcaagaagaaggacagaaagagcttctgcaccatccacagcaccggctacctgaagagctggccccccaccaagatgggcctggacgaggacaacgagcccgacaacgagggctgcaacctgagctgcctggtggccatcggcagactgcacagccacgtggtgccccagcccgtgaacggcgagatcagagtgaagagcatggagtacgtgagcagacacgccatcgacggcaagttcgtgttcgtggaccagagagccaccgccatcctggcctacctgccccaggagctgctgggcaccagctgctacgagtacttccaccaggacgacatcggccacctggccgagtgccacagacaggtgctgcagaccagagagaagatcaccaccaactgctacaagttcaagatcaaggacggcagcttcatcaccctgagaagcagatggttcagcttcatgaacccctggaccaaggaggtggagtacatcgtgagcaccaacaccgtggtgctggccaacgtgctggagggcggcgaccccaccttcccccagctgaccgccagcccccacagcatggacagcatgctgcccagcggcgagggcggccccaagagaacccaccccaccgtgcccggcatccccggcggcaccagagccggcgccggcaagatcggcagaatgatcgccgaggagatcatggagatccacagaatcagaggcagcagccccagcagctgcggcagcagccccctgaacatcaccagcacccccccccccgacgccagcagccccggcggcaagaagatcctgaacggcggcacccccgacatccccagcagcggcctgctgagcggccaggcccaggagaaccccggctacccctacagcgacagcagcagcatcctgggcgagaacccccacatcggcatcgacatgatcgacaacgaccagggcagcagcagccccagcaacgacgaggccgccatggccgtgatcatgagcctgctggaggccgacgccggcctgggcggccccgtggacttcagcgacctgccctggcccctgtag

SEQ ID NO: 29601 - DNA, 219 bp, Artificial Sequence
  derived and/or modified sequence
atgatcaacatcgagagcatggacaccgacaaggacgacccccacggcagactggagtacaccgagcaccagggcagaatcaagaacgccagagaggcccacagccagatcgagaagagaagaagagacaagatgaacagcttcatcgacgagctggccagcctggtgcccacctgcaacgccatgagcagaaagctggacaagctgaccgtgctgtag

SEQ ID NO: 29602 - DNA, 141 bp, Artificial Sequence
  derived and/or modified sequence
atgatcaacatcgagagcatggacaccgacaaggacgacccccacggcagactggagtacaccgagcaccagggcagaatcaagaacgccagagaggcccacagccagatcgagaagagaagaagagacaagatgaactag

SEQ ID NO: 29603 - DNA, 426 bp, Artificial Sequence
  derived and/or modified sequence
atgatcaacatcgagagcatggacaccgacaaggacgacccccacggcagactggagtacaccgagcaccagggcagaatcaagaacgccagagaggcccacagccagatcgagaagagaagaagagacaagatgaacagcttcatcgacgagctggccagcctggtgcccacctgcaacgccatgagcagaaagctggacaagctgaccgtgctgagaatggccgtgcagcacatgaagaccctgagaggcgccaccaacccctacaccgaggccaactacaagcccaccttcctgagcgacgacgagctgaagcacctgatcctgagagccgccgacggcttcctgttcgtggtgggctgcgacagaggcaagatcctgttcgtgagcgagagcgtgttcaagatcctgaactacagccagtag

SEQ ID NO: 29604 - protein, 558 aa, Artificial Sequence
  derived and/or modified sequence
MPWRRRRNRVSALEGGREEEAPPEAAAVPPALLTSPQQTEAAAERILLRGIFEIGRDSCDVVLSERALRWRPIQPERPAGDSKYDLLCKEEFIELKDIFSVKLKRRCSVKQQRSGTLLGITLFICLKKEQNKLKNSTLDLINLSEDHCDIWFRQFKKILAGFPNRPKSLKILLNPQSHKKEATQVYYEKVEPLLKLAGIKTDVTIMEYEGHALSLLKECELQGFDGGHRKPLFAIHWSVQRLFTGMQTLEPSVVCVGGDGSASEVAHALLLRAQKNAGMETDRILTPVRAQLPLGLIPAGSTNVLAHSLHGVPHVITATLHIIMGHVQLVDVCTFSTAGKLLRFGFSAMFGFGGRTLALAEKYRWMSPNQRRDFAVVKALAKLKAEDCEISFLPFNSSDDVQERRAQGSPKSDCNDQWQMIQGQFLNVSIMAIPCLCSVAPRGLAPNTRLNNGSMALIIARNTSRPEFIKHLKRYASVKNQFNFPFVETYTVEEVKVHPRNNTGGYNPEEEEDETASENCFPWNVDGDLMEVASEVHIRLHPRLISLYGGSMEEMIPK

SEQ ID NO: 29605 - DNA, 1677 bp, Artificial Sequence
  derived and/or modified sequence
atgccatggcggcggaggcgcaacagagtgagtgccctggaagggggaagagaggaggaggcacctcccgaagcagccgccgttccccccgccttactcactagcccacaacagaccgaggccgcagcggaaaggatactgctgagaggaattttcgaaattggccgagactcctgcgacgttgtccttagtgaacgagctctgcgatggcgacccattcaacccgaaagaccagctggtgattccaagtacgacctcttgtgcaaggaggaattcattgagctcaaagatatcttcagcgtgaaattgaagagacgctgctcagtcaaacagcaacgctctggcacactgctcggcatcacgctgttcatctgtttaaagaaagagcaaaataaactgaaaaatagcactttggatttgatcaacttgagcgaggatcactgtgatatatggttcagacaatttaagaaaatacttgcaggatttcctaaccgccctaagtctctaaaaattctattaaacccacaaagccataaaaaggaggccacccaggtgtactatgagaaggtggagcccttactgaaactagccgggataaagaccgacgtcactataatggaatatgaggggcacgcactctccttactgaaagagtgcgaactgcagggcttcgatgggggacaccgcaagcctctgttcgcgatacattggtctgttcagcggttattcacaggaatgcagaccctggagcccagcgtcgtgtgcgtcggaggcgacggttccgcctccgaagtggcacatgccctcctgttgcgcgctcagaagaacgctggaatggaaacagacagaattctcaccccagtccgggcccagctccccctcggtcttatccccgcaggcagcactaacgttctagcacattccctgcacggggtgccccacgtcatcactgccaccttgcacataatcatgggccacgtacagcttgtggacgtgtgcaccttcagtactgctggcaagctgctccgttttggcttcagcgcgatgtttggcttcgggggccgcaccctagccctggcggagaaatataggtggatgagccctaatcaacgccgggattttgccgtcgtgaaggcgctggcaaaactgaaagccgaggactgtgagatcagcttcctgccttttaattctagtgacgacgtgcaggaaagacgagcccaagggagtccgaaatccgattgtaatgaccagtggcaaatgatacagggacagttccttaacgtgagcattatggcaatcccttgtctttgtagcgtcgctccccgggggttggcgcccaacactaggctgaacaatggctccatggctctgatcatagctcggaacacctctcgtcccgaattcattaaacatctcaaacgctacgcgagcgttaagaatcaattcaatttcccatttgtggaaacctacaccgtggaggaagtcaaggtgcacccccgcaataatacgggaggctataacccagaggaggaggaggacgaaaccgccagcgagaattgttttccttggaacgtagacggcgacttgatggaggtggcttctgaggtgcatattagacttcaccctcggctgatttcgttatacggtggatccatggaagaaatgattccaaagtag

SEQ ID NO: 29606 - DNA, 1677 bp, Artificial Sequence
  derived and/or modified sequence
atgccctggaggagaagaagaaacagagtgtctgccctggagggcggccgggaggaggaggcccctcctgaggccgctgctgtgcccccagccctgctgaccagcccccagcagacagaagctgctgctgagcgcatcctgctgcggggcatctttgagatcggccgggacagctgtgatgtggtgctgtctgagcgggccctgcgctggaggcccatccagcctgagaggcctgctggggacagcaaatatgacctgctgtgcaaggaggagttcatcgagctgaaggacatcttctctgtgaagctgaagaggcgctgcagcgtgaagcagcagaggagcggcaccctgctgggcatcaccctcttcatctgcctgaagaaggagcagaacaagctgaagaacagcaccctggacctgatcaacctgtctgaggaccactgtgacatctggttccggcagttcaagaagatcctggccggcttccccaaccggcccaagagcctgaagatcctgctgaacccccagagccacaagaaggaggccacccaggtgtactatgagaaggtggagcccctgctgaagctggccggcatcaagacagatgtgaccatcatggagtatgagggccacgccctgagcctgctgaaggaatgtgagctgcagggctttgatggcggccacaggaagcccctgtttgccatccactggagcgtgcagaggctcttcaccggcatgcagaccctggagcccagcgtggtgtgtgtgggcggagatggcagcgccagcgaggtggcccacgccctgctgctgcgggcccagaagaatgccggcatggagacagaccgcatcctgacccctgtgcgggcccagctgcccctgggcctcatcccagctggcagcaccaacgtgctggcccacagcctgcacggcgtgccccacgtgatcacagccaccctgcacatcatcatgggccacgtgcagctggtggatgtgtgcaccttcagcacagctgggaagctgctgcgcttcggcttcagcgccatgtttggatttggaggccgcaccctggccctggccgagaagtaccgctggatgagccccaaccagaggcgggactttgctgtggtgaaggccctggccaagctgaaggccgaggactgtgagatctccttcctgcccttcaacagcagtgatgatgtgcaggagcggcgggcccagggcagccccaagagtgactgcaatgaccagtggcagatgatccagggccagttcctgaatgtgtccatcatggccatcccctgcctgtgcagcgtggccccccggggcctggcccccaacacccggctgaacaacggctccatggccctgatcatcgccaggaacaccagcaggcctgagttcatcaagcacctgaagagatatgcctctgtgaagaaccagttcaacttcccctttgtggagacctacacagtggaggaggtgaaggtgcaccccaggaacaacacaggaggctacaaccctgaggaggaggaggatgaaacagccagcgagaactgcttcccctggaatgtggatggagacctgatggaggtggccagcgaggtgcacatccggctgcaccccaggctcatcagcctgtatggaggctccatggaggagatgatccccaagtag

SEQ ID NO: 29607 - DNA, 1677 bp, Artificial Sequence
  derived and/or modified sequence
atgccctggcggcggcggcggaaccgggtgagcgccctggagggcgggagagaagaggaggccccaccagaggcagccgctgttccccccgcactgttgacatcccctcagcagacagaagccgctgccgaaaggatcctgctacgtggtatatttgaaatcggtcgggactcctgtgacgtggtcctgagcgagagagcgctgagatggaggcctatacagcctgagcggcctgctggggatagtaagtacgatcttctctgcaaggaggagtttatcgaactgaaagacattttctccgtcaaactcaagagaagatgcagcgtcaaacagcagcgatcaggaaccttactgggtattacactcttcatttgcctgaagaaggagcagaacaaactcaaaaacagcaccctcgatctgattaatctttcggaagatcattgcgacatttggttccggcaatttaagaagatcctcgctggcttcccgaacagacccaagtctctaaagattcttctcaaccctcaatcacacaaaaaagaggctacccaggtgtactatgaaaaagtcgagccgctcctaaaactggccggaattaaaacagatgtgacgattatggagtatgagggacatgcactttccctcctcaaagagtgtgagctgcaggggtttgacggcggccacaggaagccactcttcgctatccattggtctgtgcagcgtttgtttacaggaatgcaaaccctcgagccatctgttgtctgcgtgggcggtgatggatccgcaagcgaggtggcccacgccctgctactgcgcgcccaaaagaatgccggcatggagacagatcggatcttgactcctgtcagggctcaattgccgctgggcctcattcctgccggctccacgaacgtacttgcccattccctccatggtgtgccacacgtaattaccgccacgctccacataattatgggccacgtgcagctggttgacgtgtgtaccttttctaccgcgggaaagcttctgaggttcggtttttcagctatgttcggatttgggggtaggacactcgcactggcagagaaataccgctggatgtcgccaaatcaacgccgagatttcgcagttgttaaggccttagcaaaattgaaggcagaagactgtgagatctccttcctccctttcaatagcagtgacgacgtccaggagagaagggcgcagggttctcccaaatccgattgcaacgaccagtggcaaatgattcagggacagttcctgaacgtaagtatcatggcaatcccctgcctatgttcagttgctccacgagggctggctcctaacactcggcttaataacggttctatggcgctgattatagctcggaatacgtctcgccccgaattcatcaagcacttaaagcgctatgcgtccgtgaaaaaccagtttaatttcccctttgtggagacttacactgtggaagaggtgaaagtgcatccacgcaacaacacggggggatacaaccccgaagaagaggaagatgagaccgcttccgaaaattgctttccttggaatgtggacggggacctaatggaagtcgcgtcagaggtccatataaggctgcatccgaggttgatctctttgtatggaggatcaatggaggaaatgatcccaaagtag

SEQ ID NO: 29608 - DNA, 1677 bp, Artificial Sequence
  derived and/or modified sequence
atgccgtggaggcgtcgcaggaaccgggtgtctgcactggagggaggaagggaagaggaagctccaccagaagccgctgcggtccctcctgccctgttgaccagtcctcagcagaccgaagcagctgccgaacgaatcttgctccgaggaatattcgagattggcagagattcatgtgacgtcgtattgtccgagcgggctctccgatggcgaccgattcagcccgagcggcctgccggtgactcaaaatacgatctcctgtgtaaagaggaattcatagagctgaaggatatcttctctgtgaaacttaagaggcggtgcagcgtcaagcagcagcgttctggcaccctgcttgggattactttgtttatttgcctcaagaaggaacagaataagctgaaaaattccacgttagacctcatcaacctgtccgaggatcattgtgatatctggtttcgacagtttaagaaaattcttgccggttttcctaaccggccaaaatcactgaagattcttttgaacccacaaagtcataaaaaagaggctacacaggtgtactacgaaaaagtggaaccattacttaaacttgccggtataaaaaccgacgtcactattatggaatatgagggtcacgccctgtctttgctgaaggagtgcgagttacagggcttcgatggtgggcaccgcaaaccacttttcgctattcactggagcgtccagcgtcttttcacaggtatgcaaactctcgaaccttctgtcgtctgcgttggcggtgatggatctgcatcagaggtggcccacgcattactcctcagagcccagaaaaacgcgggaatggaaacagatcgcattctcactccagttcgagcccaactccccctgggcctgataccagccggatctactaacgtgttagcacacagcttgcacggggtgccacacgtcattaccgccacgctgcacatcattatgggccacgtccagctggtcgacgtctgcaccttctcgactgcgggaaaactcctgaggttcggttttagtgcaatgttcggctttggtgggagaactctcgcactggcagagaaataccgctggatgagtcccaatcagcggagagattttgccgtggtcaaagctctagccaaattgaaagcggaagactgtgagatttcattcttgccattcaatagtagtgacgacgtacaggagcgaagagcccagggctctcctaagtccgattgtaatgaccagtggcagatgatccagggccaattcctcaatgtgtcaataatggcgattccgtgtctttgctctgtcgcaccgagggggttggcccctaataccagacttaataacggatcaatggccctgattatcgctagaaatacctcccgccctgaatttatcaagcatctgaaacgttatgcatccgtcaagaatcagtttaactttccgtttgtcgagacttatactgtagaagaggtgaaagtgcacccaaggaacaatacaggtggctataatcctgaagaggaagaggacgagacagcatcggagaactgtttcccatggaacgtcgatggagacctaatggaagttgccagcgaagttcacattagactccaccctagactcatctccctctatggcggaagcatggaggaaatgatcccgaaatag

SEQ ID NO: 29609 - DNA, 1677 bp, Artificial Sequence
  derived and/or modified sequence
atgccctggaggaggcgcaggaaccgggtgagtgccctggagggcggccgggaggaagaggcgcccccggaggctgccgctgtgcctccggcgctgttaacgtccccgcagcagacggaggcggcggccgagcggattctgctccggggcatcttcgagatcgggagggacagttgtgacgtggtgctgagcgagcgagcactgcggtggcggcccattcagcccgagcgcccggcgggtgattctaagtatgacttgctatgtaaagaagaatttattgaactcaaagacatattctctgtgaaactgaaacggcgttgttctgttaaacagcagagaagtggtactttattaggtatcacactcttcatctgcttgaaaaaggaacaaaataaactaaagaattctacacttgatcttattaatttaagtgaagaccactgtgacatatggtttagacagttcaagaaaatattggcaggctttccaaacagaccgaagtcattaaaaatactccttaacccccaaagtcacaaaaaagaagctacccaggtttattatgagaaggttgaacctctgttgaagcttgcaggaataaaaactgatgtaacaataatggaatatgaagggcacgctctgtcactgcttaaggaatgtgaactccagggatttgatggtgggcatcggaaaccattgttcgcaatacattggagtgtacagagattgttcactggcatgcaaacgttagaaccaagtgttgtctgtgttggtggagatggatctgctagcgaagtagcccatgctttgcttctgagagctcagaagaatgctgggatggaaacagaccgaatcctgactcctgtcagagcacagcttccacttggcttaataccagcaggatctaccaatgtattggcacattctcttcatggagttcctcatgtgataactgcaacattgcacattataatggggcatgtacagctggtcgacgtctgcaccttcagcaccgctggcaagcttcttcgctttgggttctcagccatgtttggctttggtggaagaactttggctctggcagaaaaatatcgatggatgtcccctaaccaacggagagattttgctgttgttaaggcactggcaaaacttaaggcagaagactgtgaaatatcatttttaccatttaacagctctgatgatgtgcaagaaaggagggcacagggatctcccaaatctgactgtaatgatcaatggcaaatgatccagggtcagttcttgaatgtcagcattatggcaattccttgcctgtgttcagtggcacctagaggcttggcacctaataccagattaaataatggaagtatggctcttataattgcccgaaacacttctcggccagaatttataaaacacctgaaaagatatgccagtgtaaaaaatcagttcaattttccatttgttgagacttacactgttgaggaagtaaaagttcatccaaggaataatactggtggatataatccagaggaggaggaggatgaaactgcttcagaaaattgtttcccttggaatgtagatggtgacttaatggaagttgcatcagaggtccatattagattgcatccaagacttatcagtctttatggaggaagcatggaagaaatgattccaaagtaa

SEQ ID NO: 29610 - DNA, 1677 bp, Artificial Sequence
  derived and/or modified sequence
atgccctggagaagaagaagaaacagagtgagcgccctggagggcggcagagaggaggaggccccccccgaggccgccgccgtgccccccgccctgctgaccagcccccagcagaccgaggccgccgccgagagaatcctgctgagaggcatcttcgagatcggcagagacagctgcgacgtggtgctgagcgagagagccctgagatggagacccatccagcccgagagacccgccggcgacagcaagtacgacctgctgtgcaaggaggagttcatcgagctgaaggacatcttcagcgtgaagctgaagagaagatgcagcgtgaagcagcagagaagcggcaccctgctgggcatcaccctgttcatctgcctgaagaaggagcagaacaagctgaagaacagcaccctggacctgatcaacctgagcgaggaccactgcgacatctggttcagacagttcaagaagatcctggccggcttccccaacagacccaagagcctgaagatcctgctgaacccccagagccacaagaaggaggccacccaggtgtactacgagaaggtggagcccctgctgaagctggccggcatcaagaccgacgtgaccatcatggagtacgagggccacgccctgagcctgctgaaggagtgcgagctgcagggcttcgacggcggccacagaaagcccctgttcgccatccactggagcgtgcagagactgttcaccggcatgcagaccctggagcccagcgtggtgtgcgtgggcggcgacggcagcgccagcgaggtggcccacgccctgctgctgagagcccagaagaacgccggcatggagaccgacagaatcctgacccccgtgagagcccagctgcccctgggcctgatccccgccggcagcaccaacgtgctggcccacagcctgcacggcgtgccccacgtgatcaccgccaccctgcacatcatcatgggccacgtgcagctggtggacgtgtgcaccttcagcaccgccggcaagctgctgagattcggcttcagcgccatgttcggcttcggcggcagaaccctggccctggccgagaagtacagatggatgagccccaaccagagaagagacttcgccgtggtgaaggccctggccaagctgaaggccgaggactgcgagatcagcttcctgcccttcaacagcagcgacgacgtgcaggagagaagagcccagggcagccccaagagcgactgcaacgaccagtggcagatgatccagggccagttcctgaacgtgagcatcatggccatcccctgcctgtgcagcgtggcccccagaggcctggcccccaacaccagactgaacaacggcagcatggccctgatcatcgccagaaacaccagcagacccgagttcatcaagcacctgaagagatacgccagcgtgaagaaccagttcaacttccccttcgtggagacctacaccgtggaggaggtgaaggtgcaccccagaaacaacaccggcggctacaaccccgaggaggaggaggacgagaccgccagcgagaactgcttcccctggaacgtggacggcgacctgatggaggtggccagcgaggtgcacatcagactgcaccccagactgatcagcctgtacggcggcagcatggaggagatgatccccaagtag

SEQ ID NO: 29611 - protein, 419 aa, Artificial Sequence
  derived and/or modified sequence
MPWRRRRNRVSALEGGREEEAPPEAAAVPPALLTSPQQTEAAAERILLRGIFEIGRDSCDVVLSERALRWRPIQPERPAGDSKYDLLCKEEFIELKDIFSVKLKRRCSVKQQRSGTLLGITLFICLKKEQNKLKNSTLDLINLSEDHCDIWFRQFKKILAGSTNVLAHSLHGVPHVITATLHIIMGHVQLVDVCTFSTAGKLLRFGFSAMFGFGGRTLALAEKYRWMSPNQRRDFAVVKALAKLKAEDCEISFLPFNSSDDVQERRAQGSPKSDCNDQWQMIQGQFLNVSIMAIPCLCSVAPRGLAPNTRLNNGSMALIIARNTSRPEFIKHLKRYASVKNQFNFPFVETYTVEEVKVHPRNNTGGYNPEEEEDETASENCFPWNVDGDLMEVASEVHIRLHPRLISLYGGSMEEMIPK

SEQ ID NO: 29612 - DNA, 1260 bp, Artificial Sequence
  derived and/or modified sequence
atgccctggcgtcggaggcggaatagagtctctgcgttggagggtgggagagaagaggaggctccccctgaggcagcagcagtcccacctgcactgcttacctcaccccagcagacagaagccgccgcagagcggattctgttaagggggatcttcgaaatcgggcgagacagttgtgatgtcgtcctgtcggaacgggcccttcggtggagacccattcagccggaacgccctgccggcgactccaagtacgacctgctttgcaaagaggagttcattgaactgaaggacatcttctcagtgaagctaaagcgcagatgctctgtgaaacagcagaggagcggcacgttgctcgggattactctgtttatttgcctgaaaaaggaacagaacaagctgaagaacagtactctcgaccttatcaacttatctgaggaccattgtgatatctggtttcgccagtttaaaaagatattggcgggatctacaaacgtactagcccactcgctgcatggggtacctcacgttattaccgccacactccacataatcatggggcatgtgcaacttgttgatgtgtgcacgttttcaaccgccggcaagttgttgagattcggttttagcgctatgttcggttttgggggacggacactcgctctggccgaaaagtaccggtggatgtcccccaaccagcgacgcgactttgccgttgtcaaagctttggctaagctgaaagccgaggattgcgagatatcattcctgcccttcaatagtagcgatgacgtgcaggagaggcgtgcccaaggatccccgaagtcggactgtaacgatcagtggcaaatgatccagggccaattcctgaacgtgtccatcatggccatcccttgtctgtgttccgtggccccacgaggactcgccccaaatacaaggttgaacaatggcagcatggccctgatcattgcgaggaatacctcacgcccagagtttatcaaacatcttaagcgctacgcgagcgtgaaaaaccaattcaacttcccgttcgtggaaacctacacggttgaggaggtgaaggttcatccccgcaataataccggcgggtacaatccagaggaggaggaagatgagacagccagcgaaaattgctttccatggaacgtcgatggcgaccttatggaagtcgcttccgaagtccacatacgactccatcctcggctaatcagcttgtatgggggctcgatggaagagatgatcccaaagtag

SEQ ID NO: 29613 - DNA, 1260 bp, Artificial Sequence
  derived and/or modified sequence
atgccctggaggagaagaagaaacagagtgtctgccctggagggcggccgggaggaggaggcccctcctgaggccgctgctgtgcccccagccctgctgaccagcccccagcagacagaagctgctgctgagcgcatcctgctgcggggcatctttgagatcggccgggacagctgtgatgtggtgctgtctgagcgggccctgcgctggaggcccatccagcctgagaggcctgctggggacagcaaatatgacctgctgtgcaaggaggagttcatcgagctgaaggacatcttctctgtgaagctgaagaggcgctgcagcgtgaagcagcagaggagcggcaccctgctgggcatcaccctcttcatctgcctgaagaaggagcagaacaagctgaagaacagcaccctggacctgatcaacctgtctgaggaccactgtgacatctggttccggcagttcaagaagatcctggccggcagcaccaacgtgctggcccacagcctgcatggagtgccccacgtgatcacagccaccctgcacatcatcatgggccacgtgcagctggtggatgtgtgcaccttcagcacagctgggaagctgctgcgcttcggcttcagcgccatgtttggatttggaggccgcaccctggccctggccgagaagtaccgctggatgagccccaaccagaggcgggactttgctgtggtgaaggccctggccaagctgaaggccgaggactgtgagatctccttcctgcccttcaacagcagtgatgatgtgcaggagcggcgggcccagggcagccccaagagtgactgcaatgaccagtggcagatgatccagggccagttcctgaatgtgtccatcatggccatcccctgcctgtgcagcgtggccccccggggcctggcccccaacacccggctgaacaacggctccatggccctgatcatcgccaggaacaccagcaggcctgagttcatcaagcacctgaagagatatgcctctgtgaagaaccagttcaacttcccctttgtggagacctacacagtggaggaggtgaaggtgcaccccaggaacaacacaggaggctacaaccctgaggaggaggaggatgaaacagccagcgagaactgcttcccctggaatgtggatggagacctgatggaggtggccagcgaggtgcacatccggctgcaccccaggctcatcagcctgtatggaggctccatggaggagatgatccccaagtag

SEQ ID NO: 29614 - DNA, 1260 bp, Artificial Sequence
  derived and/or modified sequence
atgccctggcggcggcggcggaaccgggtgagcgccctggagggcgggagggaggaggaggcaccgcccgaagcggccgcagtcccaccagcccttctgacatctccccagcagacagaggcagctgccgagcgtattctgttacgcggcatcttcgagattggacgagacagctgtgacgtggtgctgtccgagagggctttgaggtggcggcctatacaacctgagaggccagcaggggacagtaagtacgatctcttatgcaaggaagagttcattgaactcaaggacatctttagtgtgaaattgaaacgcaggtgctcagtgaaacagcaacgatccggcactttgctaggaataactctctttatctgtctgaagaaagaacaaaataaactaaagaactcaacgctggacttaatcaacctgagtgaggatcactgcgacatttggttcagacagttcaaaaagatactggccggttctacgaatgtgttggcgcacagtctgcatggggtgcctcatgtgatcactgcgaccctccacatcattatgggacacgtgcagttggtggacgtgtgtactttttctaccgcaggtaaacttctgaggtttggcttctctgctatgttcgggtttggaggccgaacccttgctctggctgaaaaatataggtggatgtcgccaaaccaaagacgggattttgctgtcgtgaaggccctcgcaaagctgaaggcagaggactgcgaaataagcttcttgccgttcaacagtagtgacgacgttcaagaacggcgagctcagggctctccgaagagcgattgtaacgatcaatggcagatgatacagggtcaattcttgaatgtcagtatcatggctatcccttgcctttgcagtgtcgcccccagagggctggcaccaaacacacggttgaacaatggatctatggccctcatcatcgcaaggaatacaagtcgacccgagtttataaagcacctgaaacgttacgcctcagtgaaaaaccaattcaatttccctttcgtggagacttatacggtcgaagaagtgaaagtgcacccaagaaacaacaccggagggtataaccccgaagaagaagaagacgagaccgcctcagagaattgctttccttggaatgtggatggggacttaatggaggtagcgagtgaggttcacatacgtctgcaccctagactgatttccttgtacggaggctcgatggaggaaatgatcccaaagtag

SEQ ID NO: 29615 - DNA, 1260 bp, Artificial Sequence
  derived and/or modified sequence
atgccttggcgacggcgacgaaatagggtttcagccttggaggggggacgcgaggaagaggcacctcccgaggccgcagctgtccctccggctttgctcacatccccgcagcaaaccgaggccgcagccgagcggattctccttcgcggtatcttcgagatcggcagggactcatgtgacgtagtgctgtcagaacgggctctgcgctggcgaccaatccagcctgaacggccagccggtgactcaaaatatgacctgctgtgcaaagaagaattcatcgaactgaaagatatctttagtgtgaaattaaagcgcaggtgcagtgtgaagcagcagcggtcaggtacactgctcggtattacgttgttcatctgcctcaagaaggaacagaataaactgaagaactctacactagatctcatcaatttgagcgaagatcactgtgacatttggttccgtcagttcaagaagatactggccggatccacaaacgtgctcgcacacagtcttcacggcgtcccacacgtgatcacggccaccctgcacataataatggggcacgtgcaattggtcgacgtttgcaccttttccaccgccggtaagctgctgcgcttcggattctctgccatgttcggttttggagggagaacactggcccttgcggaaaagtaccggtggatgagtccaaaccaacgtcgggattttgccgtggtgaaagctcttgcaaagcttaaagctgaagactgcgagatttccttcctgccttttaattctagcgacgatgtgcaggagcgccgagcacagggcagccctaaatctgattgtaacgatcagtggcagatgatccagggtcagttcttgaacgtgtcaattatggccattccttgtctctgtagcgtggcccctcggggtctggcccctaatacaaggttaaacaacggctcaatggccctcatcattgcccgaaacactagcaggcccgaattcataaagcacctgaagcgctacgctagcgttaagaaccagttcaatttcccctttgtagagacgtacacagttgaggaagtaaaagtgcaccctcgcaataacactgggggatataaccccgaagaagaggaggatgagacagcaagcgaaaactgcttcccttggaacgtggacggtgatctaatggaagtcgcttctgaagtgcatattcgtttacaccctcggctgatttccctatacggcggatcaatggaagaaatgatacccaaatag

SEQ ID NO: 29616 - DNA, 1330 bp, Artificial Sequence
  derived and/or modified sequence
atgccctggaggaggcgcaggaaccgggtgagtgccctggagggcggccgggaggaagaggcgcccccggaggctgccgctgtgcctccggcgctgttaacgtccccgcagcagacggaggcggcggccgagcggattctgctccggggcatcttcgagatcgggagggacagttgtgacgtggtgctgagcgagcgagcactgcggtggcggcccattcagcccgagcgcccggcgggtgattctaagtatgacttgctatgtaaagaagaatttattgaactcaaagacatattctctgtgaaactgaaacggcgttgttctgttaaacagcagagaagtggtactttattaggtatcacactcttcatctgcttgaaaaaggaacaaaataaactaaagaattctacacttgatcttattaatttaagtgaagaccactgtgacatatggtttagacagttcaagaaaatattggcaggatctaccaatgtattggcacattctcttcatggagttcctcatgtgataactgcaacattgcacattataatggggcatgtacagctggtcgacgtctgcaccttcagcaccgctggcaagcttcttcgctttgggttctcagccatgtttggctttggtggaagaactttggctctggcagaaaaatatcgatggatgtcccctaaccaacggagagattttgctgttgttaaggcactggcaaaacttaaggcagaagactgtgaaatatcatttttaccatttaacagctctgatgatgtgcaagaaaggagggcacagggatctcccaaatctgactgtaatgatcaatggcaaatgatccagggtcagttcttgaatgtcagcattatggcaattccttgcctgtgttcagtggcacctagaggcttggcacctaataccagattaaataatggaagtatggctcttataattgcccgaaacacttctcggccagaatttataaaacacctgaaaagatatgccagtgtaaaaaatcagttcaattttccatttgttgagacttacactgttgaggaagtaaaagttcatccaaggaataatactggtggatataatccagaggaggaggaggatgaaactgcttcagaaaattgtttcccttggaatgtagatggtgacttaatggaagttgcatcagaggtccatattagattgcatccaagacttatcagtctttatggaggaagcatggaagaaatgattccaaagtaacatgtaattgtttctaaaagaaatgtacaaactagaattttaatataaagaaatgtggccatgctttaaa

SEQ ID NO: 29617 - DNA, 1260 bp, Artificial Sequence
  derived and/or modified sequence
atgccctggagaagaagaagaaacagagtgagcgccctggagggcggcagagaggaggaggccccccccgaggccgccgccgtgccccccgccctgctgaccagcccccagcagaccgaggccgccgccgagagaatcctgctgagaggcatcttcgagatcggcagagacagctgcgacgtggtgctgagcgagagagccctgagatggagacccatccagcccgagagacccgccggcgacagcaagtacgacctgctgtgcaaggaggagttcatcgagctgaaggacatcttcagcgtgaagctgaagagaagatgcagcgtgaagcagcagagaagcggcaccctgctgggcatcaccctgttcatctgcctgaagaaggagcagaacaagctgaagaacagcaccctggacctgatcaacctgagcgaggaccactgcgacatctggttcagacagttcaagaagatcctggccggcagcaccaacgtgctggcccacagcctgcacggcgtgccccacgtgatcaccgccaccctgcacatcatcatgggccacgtgcagctggtggacgtgtgcaccttcagcaccgccggcaagctgctgagattcggcttcagcgccatgttcggcttcggcggcagaaccctggccctggccgagaagtacagatggatgagccccaaccagagaagagacttcgccgtggtgaaggccctggccaagctgaaggccgaggactgcgagatcagcttcctgcccttcaacagcagcgacgacgtgcaggagagaagagcccagggcagccccaagagcgactgcaacgaccagtggcagatgatccagggccagttcctgaacgtgagcatcatggccatcccctgcctgtgcagcgtggcccccagaggcctggcccccaacaccagactgaacaacggcagcatggccctgatcatcgccagaaacaccagcagacccgagttcatcaagcacctgaagagatacgccagcgtgaagaaccagttcaacttccccttcgtggagacctacaccgtggaggaggtgaaggtgcaccccagaaacaacaccggcggctacaaccccgaggaggaggaggacgagaccgccagcgagaactgcttcccctggaacgtggacggcgacctgatggaggtggccagcgaggtgcacatcagactgcaccccagactgatcagcctgtacggcggcagcatggaggagatgatccccaagtag

SEQ ID NO: 29618 - protein, 463 aa, Artificial Sequence
  derived and/or modified sequence
MPWRRRRNRVSALEGGREEEAPPEAAAVPPALLTSPQQTEAAAERILLRGIFEIGRDSCDVVLSERALRWRPIQPERPAGDSKYDLLCKEEFIELKDIFSVKLKRRCSVKQQRSGTLLGITLFICLKKEQNKLKNSTLDLINLSEDHCDIWFRQFKKILAGFPNRPKSLKILLNPQSHKKEATQVYYEKVEPLLKLAGIKTDVTRSTNVLAHSLHGVPHVITATLHIIMGHVQLVDVCTFSTAGKLLRFGFSAMFGFGGRTLALAEKYRWMSPNQRRDFAVVKALAKLKAEDCEISFLPFNSSDDVQERRAQGSPKSDCNDQWQMIQGQFLNVSIMAIPCLCSVAPRGLAPNTRLNNGSMALIIARNTSRPEFIKHLKRYASVKNQFNFPFVETYTVEEVKVHPRNNTGGYNPEEEEDETASENCFPWNVDGDLMEVASEVHIRLHPRLISLYGGSMEEMIPK

SEQ ID NO: 29619 - DNA, 1392 bp, Artificial Sequence
  derived and/or modified sequence
atgccctggcgcagacggagaaacagagtgagcgccctggagggtggacgggaagaagaggctcccccggaggccgccgcagttcctcccgcgcttttgaccagccctcagcaaactgaagccgcagccgagagaattctgttgagaggcatttttgaaatcggtcgcgactcctgtgatgtcgtcctcagtgagagagccttgagatggaggcccatacagcctgaacgcccagctggcgactccaaatatgaccttctctgcaaagaagagtttatcgaattgaaagacatcttctcagtgaaactgaaaaggaggtgcagtgtgaaacagcagcgtagcggcacgctgctagggatcactctcttcatatgcttgaaaaaggaacagaacaaactcaaaaacagtacactcgatctgatcaacctgtcggaagatcattgtgatatttggttccgccagttcaaaaaaatcttggccggctttccaaaccgccccaaatccctgaagatcctacttaacccccagtcccacaagaaggaagcgacacaggtgtactacgagaaggtggagcccctcttgaagctggcgggcattaaaacagatgtcacgcgcagcactaatgtgctggcccatagcttgcatggcgttccccacgtgataactgccacacttcacattattatgggccacgtacaactggtcgatgtgtgcacattcagcaccgcagggaagttgttaaggtttggctttagtgccatgtttgggttcggagggcgcacactggcccttgccgagaaataccgttggatgtctcccaaccagaggcgcgacttcgctgtcgtcaaggcgctggcaaaactcaaggctgaggattgcgagatttccttcctgccattcaattcgtctgacgacgtgcaggagcgtcgtgctcaggggtctccaaaaagcgattgcaacgaccagtggcaaatgatccagggccaatttctgaacgtcagtatcatggccatcccgtgtctttgttctgtcgcaccgcgaggcctcgcacctaacacaagacttaacaacgggtctatggcattaataatcgcccggaataccagtcgtccagaattcattaagcacctgaagaggtatgccagcgtgaagaatcaatttaattttccgtttgtcgaaacttacacggtcgaggaggttaaagttcacccacgaaacaacacaggagggtacaatccagaagaggaagaggatgagaccgcctccgaaaattgcttcccatggaatgtggacggggatcttatggaagtcgccagcgaggtgcacatcaggctgcacccccggctgatttccctttatggtgggtccatggaggaaatgatcccaaaatag

SEQ ID NO: 29620 - DNA, 1392 bp, Artificial Sequence
  derived and/or modified sequence
atgccctggaggagaagaagaaacagagtgtctgccctggagggcggccgggaggaggaggcccctcctgaggccgctgctgtgcccccagccctgctgaccagcccccagcagacagaagctgctgctgagcgcatcctgctgcggggcatctttgagatcggccgggacagctgtgatgtggtgctgtctgagcgggccctgcgctggaggcccatccagcctgagaggcctgctggggacagcaaatatgacctgctgtgcaaggaggagttcatcgagctgaaggacatcttctctgtgaagctgaagaggcgctgcagcgtgaagcagcagaggagcggcaccctgctgggcatcaccctcttcatctgcctgaagaaggagcagaacaagctgaagaacagcaccctggacctgatcaacctgtctgaggaccactgtgacatctggttccggcagttcaagaagatcctggccggcttccccaaccggcccaagagcctgaagatcctgctgaacccccagagccacaagaaggaggccacccaggtgtactatgagaaggtggagcccctgctgaagctggccggcatcaagacagatgtgaccaggagcaccaacgtgctggcccacagcctgcatggagtgccccacgtgatcacagccaccctgcacatcatcatgggccacgtgcagctggtggatgtgtgcaccttcagcacagctgggaagctgctgcgcttcggcttcagcgccatgtttggatttggaggccgcaccctggccctggccgagaagtaccgctggatgagccccaaccagaggcgggactttgctgtggtgaaggccctggccaagctgaaggccgaggactgtgagatctccttcctgcccttcaacagcagtgatgatgtgcaggagcggcgggcccagggcagccccaagagtgactgcaatgaccagtggcagatgatccagggccagttcctgaatgtgtccatcatggccatcccctgcctgtgcagcgtggccccccggggcctggcccccaacacccggctgaacaacggctccatggccctgatcatcgccaggaacaccagcaggcctgagttcatcaagcacctgaagagatatgcctctgtgaagaaccagttcaacttcccctttgtggagacctacacagtggaggaggtgaaggtgcaccccaggaacaacacaggaggctacaaccctgaggaggaggaggatgaaacagccagcgagaactgcttcccctggaatgtggatggagacctgatggaggtggccagcgaggtgcacatccggctgcaccccaggctcatcagcctgtatggaggctccatggaggagatgatccccaagtag

SEQ ID NO: 29621 - DNA, 1392 bp, Artificial Sequence
  derived and/or modified sequence
atgccctggcggcggcggcggaaccgggtgagcgccctggagggcgggcgggaggaagaagccccacccgaggctgcggcagttccacccgcccttctgacctctcctcagcagacggaggcggctgcagagcgtatcctgctgcgtggcattttcgaaatcggaagagattcttgcgacgtcgtgttatcggaacgcgcgttacgatggaggcctatccagccagagagaccggccggcgactccaagtacgatctcctgtgcaaggaggagttcatcgagctcaaggatatcttttctgtaaagttgaaaaggagatgctcggtcaaacagcagcgctctggcactctgctgggtattacactctttatctgcctcaaaaaagagcagaataagctaaaaaactctactctggatctgattaacttgtccgaagaccactgcgacatctggttccgccagttcaagaagatcctggccgggtttcccaatcggcccaagagcctgaagatactgctcaatcctcaaagtcataagaaggaagcaacccaagtttattatgagaaggtggagcccctgcttaagttagctggaataaagaccgatgtcacccgatcaacaaatgtcttagctcattccttgcacggagtgccgcatgtcatcacggccacgctgcacataataatgggccacgttcagctggtggatgtctgcaccttcagcacagccggcaaactgcttaggttcggcttcagcgctatgtttggctttgggggtcgaacactggcactcgctgagaagtacaggtggatgtctccaaaccaaagacgcgacttcgcagtggtgaaagccctggcgaagctcaaggccgaggattgtgagatatccttcctcccgttcaattcatccgacgacgtgcaggaacgacgcgcccagggatctcctaaaagcgactgtaatgaccagtggcagatgatacaaggccagttcctcaatgtgtcaattatggccataccatgcctctgttcggtggctcccagaggactcgcccctaacaccaggttgaataatggatccatggcactgattattgcgcggaatactagtcgcccagaatttatcaaacaccttaaacgatatgcttctgtgaaaaaccagtttaacttcccattcgtggaaacctatacagttgaggaggtgaaagtgcaccccaggaacaacaccggggggtataatcccgaggaggaggaagacgagacagcttccgagaactgcttcccctggaatgtcgacggcgatctgatggaggtggctagcgaggtgcatatcagactgcaccctagacttatctcactgtatggcggttcgatggaagagatgatccccaagtag

SEQ ID NO: 29622 - DNA, 1392 bp, Artificial Sequence
  derived and/or modified sequence
atgccatggcgcagaagacgcaatagagtgagcgcgctggaaggagggagggaggaggaggcccctcccgaagctgctgctgtcccacccgcactccttactagtccccaacagaccgaagctgcggctgagaggatcttgctccgaggcatttttgaaattggacgggactcctgtgatgttgttctctccgaaagagcactgcgctggcgcccaatccagccggaacggcctgctggtgactctaagtacgacttgctgtgtaaagaggagttcatcgagctcaaggacattttcagcgtgaagctgaagagacgctgtagcgtaaagcagcagagaagcggaaccctgctcggaattacactgttcatatgtctcaagaaggagcaaaacaagttgaagaattccaccctggacctgataaacctgtccgaagatcactgtgacatttggttcaggcagtttaaaaagatcctagccggattcccaaatcgtcccaagtctctcaagatcttgctgaatccgcaaagccacaaaaaggaagccactcaggtttactatgagaaagtggaacctctgttgaaactcgctggcattaaaaccgatgtaactagaagcacaaatgtgcttgcacatagcctgcacggcgttccccatgtcatcaccgccacattgcacatcattatgggacacgtgcaattggtagacgtctgcacattctcaacggccggaaagttactgagattcggcttcagcgctatgtttggcttcggtggccgaactctggcccttgcagagaaatataggtggatgagcccgaaccaaaggcgggattttgctgttgtgaaggcactcgcaaagctgaaagcagaagattgcgagatctccttcctaccatttaatagtagtgatgacgttcaggaacggagagcccaagggtcccccaagtctgactgcaatgaccagtggcaaatgatacaggggcaattcctgaacgtgtccattatggctatcccctgtctgtgctctgtcgcccctcgcggacttgcccctaacacccgattgaataatggctccatggcgcttatcattgcaagaaatacttcacgccctgagtttatcaagcatctcaaacgctatgcttctgtgaagaatcagttcaattttcccttcgttgagacttatactgtggaagaagtcaaggttcatcccagaaataataccggaggatacaatcctgaggaagaagaagatgagaccgcgtcagagaactgctttccttggaacgttgatggagatctcatggaggtggcatctgaagtccacattcgtctgcaccccagattgatatcgctgtatggaggtagcatggaagagatgatacccaagtag

SEQ ID NO: 29623 - DNA, 1392 bp, Artificial Sequence
  derived and/or modified sequence
atgccctggaggaggcgcaggaaccgggtgagtgccctggagggcggccgggaggaagaggcgcccccggaggctgccgctgtgcctccggcgctgttaacgtccccgcagcagacggaggcggcggccgagcggattctgctccggggcatcttcgagatcgggagggacagttgtgacgtggtgctgagcgagcgagcactgcggtggcggcccattcagcccgagcgcccggcgggtgattctaagtatgacttgctatgtaaagaagaatttattgaactcaaagacatattctctgtgaaactgaaacggcgttgttctgttaaacagcagagaagtggtactttattaggtatcacactcttcatctgcttgaaaaaggaacaaaataaactaaagaattctacacttgatcttattaatttaagtgaagaccactgtgacatatggtttagacagttcaagaaaatattggcaggctttccaaacagaccgaagtcattaaaaatactccttaacccccaaagtcacaaaaaagaagctacccaggtttattatgagaaggttgaacctctgttgaagcttgcaggaataaaaactgatgtaacaagatctaccaatgtattggcacattctcttcatggagttcctcatgtgataactgcaacattgcacattataatggggcatgtacagctggtcgacgtctgcaccttcagcaccgctggcaagcttcttcgctttgggttctcagccatgtttggctttggtggaagaactttggctctggcagaaaaatatcgatggatgtcccctaaccaacggagagattttgctgttgttaaggcactggcaaaacttaaggcagaagactgtgaaatatcatttttaccatttaacagctctgatgatgtgcaagaaaggagggcacagggatctcccaaatctgactgtaatgatcaatggcaaatgatccagggtcagttcttgaatgtcagcattatggcaattccttgcctgtgttcagtggcacctagaggcttggcacctaataccagattaaataatggaagtatggctcttataattgcccgaaacacttctcggccagaatttataaaacacctgaaaagatatgccagtgtaaaaaatcagttcaattttccatttgttgagacttacactgttgaggaagtaaaagttcatccaaggaataatactggtggatataatccagaggaggaggaggatgaaactgcttcagaaaattgtttcccttggaatgtagatggtgacttaatggaagttgcatcagaggtccatattagattgcatccaagacttatcagtctttatggaggaagcatggaagaaatgattccaaagtaa

SEQ ID NO: 29624 - DNA, 1392 bp, Artificial Sequence
  derived and/or modified sequence
atgccctggagaagaagaagaaacagagtgagcgccctggagggcggcagagaggaggaggccccccccgaggccgccgccgtgccccccgccctgctgaccagcccccagcagaccgaggccgccgccgagagaatcctgctgagaggcatcttcgagatcggcagagacagctgcgacgtggtgctgagcgagagagccctgagatggagacccatccagcccgagagacccgccggcgacagcaagtacgacctgctgtgcaaggaggagttcatcgagctgaaggacatcttcagcgtgaagctgaagagaagatgcagcgtgaagcagcagagaagcggcaccctgctgggcatcaccctgttcatctgcctgaagaaggagcagaacaagctgaagaacagcaccctggacctgatcaacctgagcgaggaccactgcgacatctggttcagacagttcaagaagatcctggccggcttccccaacagacccaagagcctgaagatcctgctgaacccccagagccacaagaaggaggccacccaggtgtactacgagaaggtggagcccctgctgaagctggccggcatcaagaccgacgtgaccagaagcaccaacgtgctggcccacagcctgcacggcgtgccccacgtgatcaccgccaccctgcacatcatcatgggccacgtgcagctggtggacgtgtgcaccttcagcaccgccggcaagctgctgagattcggcttcagcgccatgttcggcttcggcggcagaaccctggccctggccgagaagtacagatggatgagccccaaccagagaagagacttcgccgtggtgaaggccctggccaagctgaaggccgaggactgcgagatcagcttcctgcccttcaacagcagcgacgacgtgcaggagagaagagcccagggcagccccaagagcgactgcaacgaccagtggcagatgatccagggccagttcctgaacgtgagcatcatggccatcccctgcctgtgcagcgtggcccccagaggcctggcccccaacaccagactgaacaacggcagcatggccctgatcatcgccagaaacaccagcagacccgagttcatcaagcacctgaagagatacgccagcgtgaagaaccagttcaacttccccttcgtggagacctacaccgtggaggaggtgaaggtgcaccccagaaacaacaccggcggctacaaccccgaggaggaggaggacgagaccgccagcgagaactgcttcccctggaacgtggacggcgacctgatggaggtggccagcgaggtgcacatcagactgcaccccagactgatcagcctgtacggcggcagcatggaggagatgatccccaagtag

SEQ ID NO: 29625 - protein, 389 aa, Artificial Sequence
  derived and/or modified sequence
MLSLRVPLAPITDPQQLQLSPLKGLSLVDKENTPPALSGTRVLASKTARRIFQEPTEPKTKAAAPGVEDEPLLRENPRRFVIFPIEYHDIWQMYKKAEASFWTAEEVDLSKDIQHWESLKPEERYFISHVLAFFAASDGIVNENLVERFSQEVQITEARCFYGFQIAMENIHSEMYSLLIDTYIKDPKEREFLFNAIETMPCVKKKADWALRWIGDKEATYGERVVAFAAVEGIFFSGSFASIFWLKKRGLMPGLTFSNELISRDEGLHCDFACLMFKHLVHKPSEERVREIIINAVRIEQEFLTEALPVKLIGMNCTLMKQYIEFVADRLMLELGFSKVFRVENPFDFMENISLEGKTNFFEKRVGEYQRMGVMSSPTENSFTLDADF

SEQ ID NO: 29626 - protein, 90 aa, Artificial Sequence
  derived and/or modified sequence
MSTAMNFGTKSFQPRPPDKGSFPLDHLGECKSFKEKFMKCLHNNNFENALCRKESKEYLECRMERKLMLQEPLEKLGFGDLTSGKSEAKK

SEQ ID NO: 29627 - DNA, 273 bp, Artificial Sequence
  derived and/or modified sequence
atgagcaccgccatgaacttcggcaccaagagcttccagcccagaccccccgacaagggcagcttccccctggaccacctgggcgagtgcaagagcttcaaggagaagttcatgaagtgcctgcacaacaacaacttcgagaacgccctgtgcagaaaggagagcaaggagtacctggagtgcagaatggagagaaagctgatgctgcaggagcccctggagaagctgggcttcggcgacctgaccagcggcaagagcgaggccaagaagtag

SEQ ID NO: 29628 - DNA, 3666 bp, Artificial Sequence
  derived and/or modified sequence
gtgctcggcgctcccggggtgcctgctcggcgctccgccggccgccctgcgtacgctcgcaaggcgctcgcagactccggagtcgccaacatgtcgaccgccatgaatttcgggaccaagagcttccagccgcggcccccggacaagggcagcttcccgctggatcacttaggtgaatgtaaaagctttaaagagaaattcatgaagtgtcttcataacaataattttgaaaatgctttgtgcagaaaggaatcaaaagaatatttagaatgcaggatggagagaaaattgatgctacaagaaccattggagaaactgggatttggagacttgactagtggaaaatcagaggcaaaaaaatgaattttgatgagaagacccctgggccgtgttcagtggtctctcaggacggagggcatcatcctgcctcttaggttggctgaggcctgcgtgtggtgtccttagaaatgggcttcgaatagaagctccagccctgtgggggcgtctcctgggtagggagtggcgtcccgttttcccttaggagggtgtttctgcattgaacccctgagtgggacggcgttcccggcaaagctgggagggaggcgagcgtggggcaagacccttgtcttcgaggccggggccctcttgtatggggcggttttatgttgcagtcctctgatactttctgagttcaaagaggtaaatgtataaatttcagtcccttctgaacacagatatcatcagaaaattaccattccctagcaggatgttttcgtgtttgtattcgtatatgccagttcatttcctttgaaaaaaaaaaaaagtggaacacaaagtaggaagtgagaaccttctggctttggatggattgacttcttgattctttctggttttgcctgaacaccaagtagcttcataatcaaagggtcattttctggtttgtatcagaccgtatttataaagttgggtatttaatttcagtaactcctgtattttaacagaaaaagaacctgagtccatttgcagttaggctcgcaccagctgtcttctgtgccagccagctccgcccgagaccccggcacgtgttcgcagcacagcctggcaggggccctgagcggagttctcagcccgtctgtgccaaagttgcctgtgggtcacggaaacccggcccatgtccacccagtgcgtcaggccagccggggcccaaacctgtggatggaacgcaggtgcctgcacatctggggcctcagccagacctgtctccttcccaggcactgtcggaaaggggctggctcctgtctggtcagtggaggatggtggcaggagacggggtggggaggtccaggtcacgtcctctctggcgaccctggcagtggctgtctccaagccctggcaggtggggccaccaatctggccgacctcaggctctgggaaacaggctgccctcgtccctctgcctgtgggtggctgaggcttctcagcccatctccagttctctgcagcaaaggccctctgtttctgtcctgcagtggtggccctttcgtggttaaacatgtccctcccctcctcacagaactgagtacctattgcggctgggcccgcccaaccctgtgtccctgcacccatgggttctaccacctgattcggctgcagctgtcactgtcccgtgtctgctctctgtcaggcctctgagtgctgcagacgtattaacatatcaccgctagttgatggaaagtcttgtttcttattagaatattttgtgtaggcacagggttgccccagcactgtctatagcaaccccagtgtcctcacagtgcacgtgagccgtgacgcagccaccgtggagtcggcgctgacgcggtgtggccacgtgccatgagctcgccaacgcagtgcggctatatggcgtgagcttactgtgaagtggagacaggcagggacacaggaaactacaaacgagaaatccagaaggaggagctggaactgatgggcatagccggccgcgagcccctccgagcacccctgggggtggagttctggctgtcatggcagagggtttcacatgctcaaaaagtaaatgaaccaggatgtgaggggaacacaacagaccatgccgacggagctcccgggcccaggccggggcctcttcccatcgcactctgacccgccgtcgggagtgcccaggcccgggtcgggcctgcctctccgctcgcaccgcactctgacccatcaggagtgtggggaagaccgtcgaccaaaggtgggaaagacaggaaagatactgtactctaagtagtaaatttgttttttgcgtggacgattctgaagctgtattctgagatggaaaaaactagaaatacatcgtggatgatgagagccaggtgtattgagctcctgcttttctaacgtacaaaggtaactggatagagaaacggagtgatcgccctcacctggccagggtgtgctccgagaccccagcaggtgccgaagccgcggatagtcccgaatcctgtccaggcgctgttttttcctgtacgtacctgtgatcaagtctgagatgtgacagcaaaactgacagaacttcgtgcttccctcttcaaaatgtcacagatgggcactgtgttcttaccggagatcttagcaacctcggcatctggctgtttttcttataggtcaggagtttccaccttttcccttaaaggaagcgcttggcagcttctctggtgtgtctgagtcgccagcatcaccactgtcctgttctggggccattcttaagtaaaataaaagcttcttggacccaagcaccacatcaccgcgatggctggtctgatcaccgagatggctgctgagtgcctggcaggcagggtggcgtggatggcccgaaacgctggacggagggagggttgatgtcccagcaggacggctgctcagaacagcacagaatcaaaaactcatgaatggtttatttctggaattttccacttagtatttttggactgtggctgaccatgggtaactgaaaccgtgtgtaagggggactgttgtgaggggctgtgcacaaatgcttcccagctcttgagggcctggacgcagtgacccgtgcactcagggtcttggccctgataccattctgtaaccaaaaggaaccagggccaggccagagaaggtatcagatgagctagagagtgaagaattgctgggatgaggagacttgttgaaataacacggggggatgggaaggagcatacggtggccagcctggggcagtgtgagcgtgaaaataaacaggctgggcgcagcggctcacgcctgcaatcccagcactttaggaggccaaggtgggaggatcacttgaggctaggagttcaagaccagcctgggcaacatgggtgaaaccctgtctctacaaaacaagaaaagtcagccgtgcgtggtgtcacccgcctgtagtcccagatactcaggaagctgaggcaggaggatcacttgagccagaggttaagtctgcagtgagctgtgattgtaccactgctctccagcctgagcaacagagccggaccctgtctcaccaaaggaaaaaaaaaaaaaaaaaagaaagaaaattaattattgtaatgggctgtagccctcagaataaattgatatccagtagtctatacaacataa

SEQ ID NO: 29629 - DNA, 273 bp, Artificial Sequence
  derived and/or modified sequence
atgagcactgctatgaacttcggcaccaaaagctttcagccacgcccacctgacaaggggtcatttccactggatcacctgggggagtgcaagtcattcaaggagaaattcatgaagtgtctacacaacaataatttcgagaacgctctgtgcaggaaagaaagcaaggagtacctcgaatgccgcatggaacggaagctgatgctgcaggagccacttgagaaattgggctttggcgacctcacaagtggtaaatctgaggccaagaaatag

SEQ ID NO: 29630 - DNA, 273 bp, Artificial Sequence
  derived and/or modified sequence
atgagcacagccatgaactttggcaccaagagcttccagccccggcccccagacaagggcagcttccccctggaccacctgggggagtgcaagagcttcaaggagaagttcatgaagtgcctgcacaacaacaactttgaaaatgccctgtgcaggaaggagagcaaggagtacctggagtgcaggatggagaggaagctgatgctgcaggagcccctggagaagctgggctttggagacctgaccagcggcaagtctgaggccaagaagtag

SEQ ID NO: 29631 - DNA, 273 bp, Artificial Sequence
  derived and/or modified sequence
atgagcaccgccatgaacttcggcaccaagagcttccagccccggcccccggacaaggggagcttccctttagaccacttaggggagtgcaagagctttaaggagaaatttatgaaatgcctccacaacaacaattttgaaaatgccctctgtcggaaggaatcaaaagagtatctggagtgccgcatggagagaaaactcatgctacaggaacccctggaaaaactggggttcggcgatttgaccagtggcaaatccgaggccaagaaatag

SEQ ID NO: 29632 - DNA, 273 bp, Artificial Sequence
  derived and/or modified sequence
atgtcgaccgccatgaactttggcacaaaaagttttcagcctcgccctcccgataaaggcagcttccccttggaccatctgggcgaatgcaagtcttttaaggagaaatttatgaaatgcttgcacaacaataatttcgagaatgcactgtgtcgtaaagaatccaaagaatatctcgagtgccgaatggaacgaaagttgatgttgcaagaaccgttggagaagctgggattcggcgacctgacatccgggaaatcagaagctaagaagtag

SEQ ID NO: 29633 - protein, 1061 aa, Artificial Sequence
  derived and/or modified sequence
MGDPGSEIIESVPPAGPEASESTTDENEDDIQFVSEGPLRPVLEYIDLVSSDDEEPSTSYTDENIKRKDHIDYQKDKVALTLARLARHVEVEKQQKEEKNRAFREKIDFQHAHGLQELEFIRGHSDTEAARLCVDQWLKMPGLKTGTINCGTKSSFRRGGHTWVSGKPILCPIMHCNKEFDNGHLLLGHLKRFDHSPCDPTITLHGPFFSSFACVVCYKKFVTQQQYRDHLFDKEATDDGHNNNLLPQIIQCFACPNCFLLFSRKEECSKHMSGKNHFHQSFKLGDNKGIAHPISFPSFAKKLLISLCKDVPFQVKCVACHKTLRSHMELTAHFRVHCRNAGPVAVAEKSITQVAEKFILRGYCPDCNQVFVDETSTQNHKQNSGHKVRVINSVEESVLLYCHSSEGNKDPSSDLHLLLDQSKFSSLKRTMSIKESSSLECIAIPKKKMNLKDKSHEGVACVQKEKSVVKTWFCECNQRFPSEDAVEKHVFSANTMGYKCVVCGKVCDDSGVIRLHMSRIHGGAHLNNFLFWCRTCKKELTRKDTIMAHVTEFHNGHRYFYEMDEVEGETLPSSSTTLDNLTANKPSSAITVIDHSPANSSPRGKWQCRICEDMFDSQEYVKQHCMSLASHKFHRYSCAHCRKPFHKIETLYRHCQDEHDNEIKIKYFCGLCDLIFNVEEAFLSHYEEHHSIDYVFVSEKTETSIKTEDDFPVIETSNQLTCGCRESYICKVNRKEDYSRCLQIMLDKGKLWFRCSLCSATAQNLTDMNTHIHQVHKEKSDEEEQQYVIKCGTCTKAFHDPESAQQHFHRKHCFLQKPSVAHFGSEKSNLYKFTASASHTERKLKQAINYSKSLDMEKGVENDLSYQNIEEEIVELPDLDYLRTMTHIVFVDFDNWSNFFGHLPGHLNQGTFIWGFQGGNTNWKPPLNCKIYNYLNRIGCFFLHPRCSKRKDAADFAICMHAGRLDEQLPKQIPFTILSGDQGFLELENQFKKTQRPAHILNPHHLEGDMMCALLNSISDTTKECDSDDNMGAKNTSIGEEFISTEDVELEEAIRRSLEEM

SEQ ID NO: 29634 - DNA, 3186 bp, Artificial Sequence
  derived and/or modified sequence
atgggcgaccccggcagcgagatcatcgagagcgtgccccccgccggccccgaggccagcgagagcaccaccgacgagaacgaggacgacatccagttcgtgagcgagggccccctgagacccgtgctggagtacatcgacctggtgagcagcgacgacgaggagcccagcaccagctacaccgacgagaacatcaagagaaaggaccacatcgactaccagaaggacaaggtggccctgaccctggccagactggccagacacgtggaggtggagaagcagcagaaggaggagaagaacagagccttcagagagaagatcgacttccagcacgcccacggcctgcaggagctggagttcatcagaggccacagcgacaccgaggccgccagactgtgcgtggaccagtggctgaagatgcccggcctgaagaccggcaccatcaactgcggcaccaagagcagcttcagaagaggcggccacacctgggtgagcggcaagcccatcctgtgccccatcatgcactgcaacaaggagttcgacaacggccacctgctgctgggccacctgaagagattcgaccacagcccctgcgaccccaccatcaccctgcacggccccttcttcagcagcttcgcctgcgtggtgtgctacaagaagttcgtgacccagcagcagtacagagaccacctgttcgacaaggaggccaccgacgacggccacaacaacaacctgctgccccagatcatccagtgcttcgcctgccccaactgcttcctgctgttcagcagaaaggaggagtgcagcaagcacatgagcggcaagaaccacttccaccagagcttcaagctgggcgacaacaagggcatcgcccaccccatcagcttccccagcttcgccaagaagctgctgatcagcctgtgcaaggacgtgcccttccaggtgaagtgcgtggcctgccacaagaccctgagaagccacatggagctgaccgcccacttcagagtgcactgcagaaacgccggccccgtggccgtggccgagaagagcatcacccaggtggccgagaagttcatcctgagaggctactgccccgactgcaaccaggtgttcgtggacgagaccagcacccagaaccacaagcagaacagcggccacaaggtgagagtgatcaacagcgtggaggagagcgtgctgctgtactgccacagcagcgagggcaacaaggaccccagcagcgacctgcacctgctgctggaccagagcaagttcagcagcctgaagagaaccatgagcatcaaggagagcagcagcctggagtgcatcgccatccccaagaagaagatgaacctgaaggacaagagccacgagggcgtggcctgcgtgcagaaggagaagagcgtggtgaagacctggttctgcgagtgcaaccagagattccccagcgaggacgccgtggagaagcacgtgttcagcgccaacaccatgggctacaagtgcgtggtgtgcggcaaggtgtgcgacgacagcggcgtgatcagactgcacatgagcagaatccacggcggcgcccacctgaacaacttcctgttctggtgcagaacctgcaagaaggagctgaccagaaaggacaccatcatggcccacgtgaccgagttccacaacggccacagatacttctacgagatggacgaggtggagggcgagaccctgcccagcagcagcaccaccctggacaacctgaccgccaacaagcccagcagcgccatcaccgtgatcgaccacagccccgccaacagcagccccagaggcaagtggcagtgcagaatctgcgaggacatgttcgacagccaggagtacgtgaagcagcactgcatgagcctggccagccacaagttccacagatacagctgcgcccactgcagaaagcccttccacaagatcgagaccctgtacagacactgccaggacgagcacgacaacgagatcaagatcaagtacttctgcggcctgtgcgacctgatcttcaacgtggaggaggccttcctgagccactacgaggagcaccacagcatcgactacgtgttcgtgagcgagaagaccgagaccagcatcaagaccgaggacgacttccccgtgatcgagaccagcaaccagctgacctgcggctgcagagagagctacatctgcaaggtgaacagaaaggaggactacagcagatgcctgcagatcatgctggacaagggcaagctgtggttcagatgcagcctgtgcagcgccaccgcccagaacctgaccgacatgaacacccacatccaccaggtgcacaaggagaagagcgacgaggaggagcagcagtacgtgatcaagtgcggcacctgcaccaaggccttccacgaccccgagagcgcccagcagcacttccacagaaagcactgcttcctgcagaagcccagcgtggcccacttcggcagcgagaagagcaacctgtacaagttcaccgccagcgccagccacaccgagagaaagctgaagcaggccatcaactacagcaagagcctggacatggagaagggcgtggagaacgacctgagctaccagaacatcgaggaggagatcgtggagctgcccgacctggactacctgagaaccatgacccacatcgtgttcgtggacttcgacaactggagcaacttcttcggccacctgcccggccacctgaaccagggcaccttcatctggggcttccagggcggcaacaccaactggaagccccccctgaactgcaagatctacaactacctgaacagaatcggctgcttcttcctgcaccccagatgcagcaagagaaaggacgccgccgacttcgccatctgcatgcacgccggcagactggacgagcagctgcccaagcagatccccttcaccatcctgagcggcgaccagggcttcctggagctggagaaccagttcaagaagacccagagacccgcccacatcctgaacccccaccacctggagggcgacatgatgtgcgccctgctgaacagcatcagcgacaccaccaaggagtgcgacagcgacgacaacatgggcgccaagaacaccagcatcggcgaggagttcatcagcaccgaggacgtggagctggaggaggccatcagaagaagcctggaggagatgtag

SEQ ID NO: 29635 - DNA, 3186 bp, Artificial Sequence
  derived and/or modified sequence
atgggagaccctggctcagagattattgagtccgtcccccccgccggaccagaggctagcgaatctactactgacgagaacgaagatgacatacagttcgttagcgagggtcccttgaggcccgtgcttgaatacatcgatttggtctccagcgatgatgaggaacccagcacctcctataccgacgagaacattaagcggaaggaccatatcgactaccagaaagacaaagtcgcactcaccctcgcgcgacttgctagacatgtggaggtcgagaagcagcaaaaagaggagaagaatagggcctttagagaaaaaatagacttccagcacgcccacggactacaggagctggaattcattcggggccattctgatacggaagccgccaggctttgcgtcgaccagtggctgaaaatgcctggattgaagacagggacaataaactgtggcactaagtcgagctttcgcagggggggccacacctgggtgtcaggtaaacctatactgtgtcctattatgcactgcaacaaagaattcgacaatggacatttgctgctcggtcacctgaagcgctttgatcactccccatgtgaccccaccatcacacttcatggcccattcttctctagctttgcctgtgtggtgtgctataagaaatttgtgacacagcagcaataccgtgaccaccttttcgataaggaagccacggatgatgggcataacaacaatttattacctcagattatccagtgctttgcatgccctaattgcttcctgcttttcagtcggaaggaggagtgttccaagcacatgtctggaaaaaaccacttccaccaatcatttaagttaggcgataacaaaggaatcgcacaccctatcagtttcccttcctttgccaagaaactactgatcagcttgtgcaaagacgtgccattccaggtgaagtgcgtagcgtgccataaaacactacgctcacacatggagctaaccgcccacttcagggtgcactgcaggaacgccgggcctgttgccgtggcagagaagtcaatcactcaagtcgctgagaagttcattttaaggggatactgccctgactgtaatcaagttttcgtggacgagacatcaacacagaatcataaacagaattcaggacacaaggtccgtgtcattaacagcgtcgaggagtcagttcttttgtactgccacagttcagagggtaataaggacccaagtagcgacctgcaccttctgttggaccaaagtaagttcagctcactgaaacgcaccatgtccattaaggagtcaagcagccttgaatgcatcgccattcccaagaagaagatgaatctgaaagacaagtcgcatgagggcgtggcttgcgtgcagaaagaaaagagtgtggtcaagacctggttttgtgagtgtaaccaaagattccctagcgaggatgcagtagaaaaacacgtgttctccgcaaatacaatgggctacaaatgtgtcgtgtgcggaaaggtctgcgacgactctggcgtgattcgactgcatatgtccaggatccacggcggagcccacctgaacaactttctgttttggtgccgcacttgcaagaaggaactaacccggaaagatacgattatggcccatgttactgagttccacaatggccaccgatacttctatgaaatggacgaggtcgaaggagagacactcccctcctcatccacgactttagataacttgactgccaacaaaccctctagcgctatcactgttattgatcacagccctgctaattcctcacctaggggcaaatggcagtgtaggatctgtgaggatatgttcgactcccaagaatacgttaagcagcactgcatgtctcttgcgtcccacaagtttcacaggtattcttgcgcacactgtaggaagccatttcacaaaatcgagaccctctaccgacactgtcaagacgagcatgacaacgaaatcaagatcaagtacttttgtggcttatgcgatctaatctttaatgtggaggaggccttcttgtctcactatgaagaacatcattctatagactatgtcttcgtgagtgagaaaaccgaaacatcaattaaaaccgaggacgatttccctgtgatcgagacgtctaaccaactgacttgcggttgtcgcgaatcctacatctgcaaagtcaatcgcaaagaggactactcccgctgtctgcagatcatgcttgacaagggcaagctatggtttagatgctcactctgtagtgcaacagcccagaacctgacggacatgaacacccacattcaccaagttcacaaagagaagtcagatgaagaagaacagcagtatgtcatcaaatgcggcacatgcaccaaagcatttcacgaccctgaatccgcccaacaacattttcatcgtaagcattgtttcctgcagaaacctagtgtggctcactttggcagcgagaagtccaacctctataagtttacagctagtgctagtcacactgagaggaaactcaaacaggccatcaactattctaagtcgctggatatggaaaaaggagtggagaatgacctttcctaccagaacattgaagaagaaatcgtcgaactgcccgatttggattatctcaggactatgactcacatagtcttcgttgacttcgataattggtctaacttctttggacatcttcctggccatttgaaccagggcacctttatttggggttttcaaggcggcaacacaaattggaaacctccgctcaattgcaagatatacaattatctgaaccgcatcggctgcttttttctccatcctaggtgctccaagcggaaagacgcagcagacttcgcgatatgcatgcacgctggccgcctagacgaacagctgcccaagcagataccgtttactatcctgtccggcgaccagggattcttggaacttgagaaccagttcaaaaaaacccagaggcctgcacatatcctgaacccgcaccacctggagggcgacatgatgtgtgctcttctcaattccatcagtgacactacgaaagaatgtgatagcgacgacaatatgggcgccaagaatacatcgatcggcgaagagttcatctcgaccgaggacgttgagcttgaggaggcaataagaaggtcactcgaagagatgtag

SEQ ID NO: 29636 - DNA, 3186 bp, Artificial Sequence
  derived and/or modified sequence
atgggagaccccggcagcgagatcattgaatctgtgcccccagctggccctgaggccagcgagagcaccacagatgaaaatgaagatgacatccagtttgtgtctgagggccccctgcggcctgtgctggagtacatcgacctggtgtccagtgatgatgaggagcccagcaccagctacacagatgagaacatcaagaggaaggaccacatcgactaccagaaggacaaggtggccctgaccctggcccggctggcccggcacgtggaggtggagaagcagcagaaggaggagaagaacagagccttccgggagaagattgacttccagcacgcccacggcctgcaggagctggagttcatccggggccacagcgacacagaagctgcccggctgtgtgtggaccagtggctgaagatgcctggcctgaagacaggcaccatcaactgtggcaccaagagcagcttcagaagaggaggccacacctgggtgtctgggaagcccatcctgtgccccatcatgcactgcaacaaggagtttgacaatggccacctgctgctgggccacctgaagagatttgaccacagcccctgtgaccccaccatcaccctgcacggccccttcttcagcagctttgcctgtgtggtgtgctacaagaagtttgtgacccagcagcagtacagagaccacctgtttgacaaggaggccacagatgatggccacaacaacaacctgctgccccagatcatccagtgctttgcctgccccaactgcttcctgctcttcagcaggaaggaggagtgcagcaagcacatgtctgggaagaaccacttccaccagagcttcaagctgggggacaacaagggcatcgcccaccccatctccttccccagctttgccaagaagctgctgatcagcctgtgcaaggatgtgcccttccaggtgaagtgtgtggcctgccacaagaccctgcggagccacatggagctgacagcccacttccgggtgcactgcagaaatgccggccctgtggccgtggccgagaagagcatcacccaggtggccgagaagttcatcctgcggggctactgcccagactgcaaccaggtgtttgtggatgagaccagcacccagaaccacaagcagaacagcggccacaaggtgcgggtcatcaacagcgtggaggagagcgtgctgctgtactgccacagcagcgagggcaacaaggaccccagcagtgacctgcacctgctgctggaccagagcaagttcagcagcctgaagaggaccatgagcatcaaggagagcagcagcctggagtgcatcgccatccccaagaagaagatgaacctgaaggacaagagccatgagggcgtggcctgtgtgcagaaggagaagtctgtggtgaagacctggttctgtgagtgcaaccagcgcttccccagtgaagatgctgtggagaagcacgtgttcagcgccaacaccatgggctacaagtgtgtggtgtgtgggaaggtgtgtgatgacagcggggtcatccggctgcacatgagccgcatccatggaggagcccacctgaacaacttcctgttctggtgcaggacctgcaagaaggagctgaccaggaaggacaccatcatggcccacgtgacagagttccacaacggccaccgctacttctatgagatggatgaggtggagggggagaccctgcccagcagcagcaccaccctggacaacctgacagccaacaagcccagcagcgccatcaccgtgattgaccacagccctgccaacagcagcccccggggcaagtggcagtgccgcatctgtgaggacatgtttgacagccaggagtatgtgaagcagcactgcatgagcctggccagccacaagttccaccgctacagctgtgcccactgcaggaagcccttccacaagattgagaccctgtaccgccactgccaggatgaacatgacaatgagatcaagatcaagtacttctgtggcctgtgtgacctgatcttcaacgtggaggaggccttcctgagccactatgaggagcaccacagcattgattatgtgtttgtgtctgagaagacagagaccagcatcaagacagaagatgacttccctgtgattgagaccagcaaccagctgacctgtggctgccgggagagctacatctgcaaggtgaacaggaaggaggactacagccgctgcctgcagatcatgctggacaagggcaagctgtggttccgctgcagcctgtgcagcgccacagcccagaacctgacagacatgaacacccacatccaccaggtgcacaaggagaagagtgatgaggaggagcagcagtatgtgatcaagtgtggcacctgcaccaaggccttccatgaccctgagagcgcccagcagcacttccacaggaagcactgcttcctgcagaagcccagcgtggcccactttggaagtgagaagagcaacctgtacaagttcaccgccagcgccagccacacagagaggaagctgaagcaggccatcaactacagcaagagcctggacatggagaagggcgtggagaatgacctgagctaccagaacatcgaggaggagatcgtggagctgcctgacctggactacctgcggaccatgacccacatcgtgtttgtggactttgacaactggagcaacttcttcggccacctgcccggccacctgaaccagggcaccttcatctggggcttccagggcggcaacaccaactggaagccacccctgaactgcaagatctacaactacctgaaccgcatcggctgcttcttcctgcacccccgctgcagcaagaggaaggatgctgctgactttgccatctgcatgcacgccggccgcctggatgagcagctgcccaagcagatccccttcaccatcctgagcggggaccagggcttcctggagctggagaaccagttcaagaagacccagaggcctgcccacatcctgaacccccaccacctggagggggacatgatgtgtgccctgctgaacagcatcagtgacaccaccaaggaatgtgacagtgatgacaacatgggcgccaagaacaccagcatcggggaggagttcatcagcacagaagatgtggagctggaggaggccatcagaagaagcctggaggagatgtag

SEQ ID NO: 29637 - DNA, 3186 bp, Artificial Sequence
  derived and/or modified sequence
atgggcgaccccggcagcgagatcatcgagagcgtgccccccgccggacccgaagcatccgaatccaccactgacgaaaacgaggacgatatccagtttgtgtccgaaggaccattaaggcctgtcctggagtatattgaccttgtgtcctccgacgacgaggagccttcaacaagttatacggatgagaatattaagcgcaaggatcacatcgattatcaaaaagacaaggttgccctgaccctcgcccgactggccagacatgtcgaagttgaaaagcagcaaaaggaagaaaagaatcgagccttccgcgaaaagatcgatttccagcatgcccatggtctacaggagctggagtttatccggggccatagcgatactgaagctgctaggctgtgtgtggatcaatggctgaaaatgcccggcctgaaaactgggacaatcaattgtggcacgaaatccagtttccggcgagggggtcatacgtgggtcagcggtaagcctattctttgtcccataatgcattgtaataaagagtttgataatggccacctgctgcttggacacctcaaacggttcgatcactctccttgtgaccccaccatcacactccatggcccttttttcagttcattcgcgtgcgtcgtctgttacaagaaattcgtgacacaacaacaatatcgagaccacctgttcgacaaggaggcaactgatgatggccataacaataatttattacctcaaataatccagtgctttgcttgtccgaactgtttcctcctcttttcgagaaaggaggaatgctccaaacacatgtcgggtaaaaatcacttccaccaaagcttcaaactaggagacaacaaggggatcgcacatcctattagtttcccgtcattcgcgaaaaagctactgatcagcctctgtaaggatgtccctttccaggtgaaatgcgtcgcttgccataaaaccctgagatcacacatggaactgaccgcacattttcgagtccactgtagaaatgcaggtcctgtcgctgtcgccgagaagtctataacacaagttgccgaaaaatttattctgcgaggatactgtcctgattgcaaccaggtctttgtcgacgagaccagtacccaaaaccacaaacaaaactcgggacataaggtacgggtgataaactctgttgaggaatcagttttactgtactgccattcttcagagggcaataaggatccctcaagtgatctgcatttactgctcgaccagagtaagttcagtagcttaaaaaggacaatgagcattaaagagagttcctctttagaatgtatcgctatccctaagaaaaagatgaacttaaaggacaagtcccacgagggtgtggcttgtgtgcagaaagagaaatctgtcgtcaagacttggttctgcgaatgcaaccagcggttcccctccgaagatgcagtagagaagcacgtctttagcgctaataccatggggtataaatgcgttgtgtgcgggaaagtgtgcgatgatagcggcgtcatcaggcttcatatgagtaggattcacggtggggcccacctcaacaacttcctattttggtgccggacatgtaagaaagagctgacgcgtaaagacacaatcatggcgcatgtgactgagtttcacaacggccaccgctatttctatgagatggatgaggtggagggtgagactttaccctcctcctcgacaacgcttgacaacttgactgctaataaacctagtagtgccataacggtgatcgatcacagccctgccaattccagcccgcgcggaaagtggcagtgcaggatttgcgaggatatgttcgatagtcaagaatatgtgaaacagcactgtatgagtctggctagccacaaatttcatcggtactcttgtgcgcactgccgtaaacctttccacaaaatcgagacgctctatcggcactgtcaggacgaacacgacaacgagatcaaaattaaatacttttgcgggttgtgcgatctcatctttaatgtagaagaggcgttcctgtcacattacgaggagcaccacagtattgactacgtctttgtgagcgaaaaaacagaaacgtccataaagacggaggacgactttccggtgatcgagacctcaaaccagctgacgtgcggatgccgcgagtcttacatttgtaaagtgaaccgtaaagaggactactcaaggtgtctacagatcatgttagacaaaggtaagctgtggtttagatgtagtttgtgttctgccaccgctcaaaatctgaccgacatgaatactcatatccatcaggtccacaaggagaaatccgatgaggaggagcagcaatatgtgatcaagtgcgggacatgtacaaaggcctttcatgatcctgagagtgctcagcagcattttcacaggaagcactgctttctgcagaagccctccgtggcgcacttcggatctgagaagagcaacctttataagttcacagcaagtgcatctcacactgagagaaaactaaaacaggccatcaattattccaaatctctggacatggagaagggagtggagaacgatctatcataccagaatatcgaagaagagatcgtcgagctccctgaccttgattacctgcggacaatgactcacatcgtcttcgtggacttcgacaactggtccaacttttttggccatctgcccggtcatcttaaccaggggacctttatatggggcttccagggcggtaatacaaactggaaaccccccctaaattgcaagatttacaattacctgaaccgtatcggctgtttcttcctccacccgaggtgcagcaagaggaaggacgctgcagacttcgctatctgcatgcacgcgggccgactggatgaacagttgcccaagcagattccattcactattttgtccggcgatcaggggtttctcgaacttgaaaatcagtttaaaaagacccaacgccccgctcacattctcaaccctcatcaccttgagggggacatgatgtgcgctctgcttaattctatctcagacacaacaaaggaatgcgacagtgacgataatatgggcgccaagaatacaagcattggagaagaattcatcagcaccgaggacgtagagttggaggaagccatccggcggtctctggaggaaatgtag

SEQ ID NO: 29638 - DNA, 3186 bp, Artificial Sequence
  derived and/or modified sequence
atgggagatccgggatcagaaatcattgaaagcgtaccccctgctggcccagaagcatccgagtctactacggatgagaatgaggatgacattcaatttgtttctgagggtcccctgaggccggttctggagtacattgatctcgtgtccagcgacgatgaggagcctagtacctcatatactgacgaaaacataaagaggaaggaccacatcgactaccagaaagacaaggtggccctgacactggctaggctcgcaagacatgtggaagtcgagaagcagcagaaggaagaaaagaacagggcctttcgcgagaagattgattttcagcacgcgcatggccttcaggagcttgaattcattagaggccacagcgacacagaggcggcaagactgtgcgttgaccagtggttaaagatgccaggattgaagacaggcacgattaactgtggaacgaaaagttcctttagacgcggaggccacacctgggtctctggtaaacccatactgtgccccataatgcattgcaataaagagtttgataacggtcacctcctgctcggccacttaaagcggtttgatcactccccctgtgaccctactattacacttcacggcccttttttcagcagcttcgcctgtgtcgtgtgctacaagaagtttgtgacccagcagcagtatcgggatcacctttttgacaaggaagccacagatgacggccacaacaataacctactgccccagataattcagtgctttgcatgtccaaactgctttctactcttctcacgcaaggaggagtgcagtaagcatatgtccgggaagaaccatttccaccagtcattcaagcttggtgataataaaggtattgctcaccccataagcttccccagcttcgctaagaagctcctgatcagcctctgtaaggacgttccatttcaggtgaagtgcgtcgcatgccataaaaccctacgcagtcacatggaactgacagcacactttcgagtgcattgcaggaatgcgggaccagtggcagttgcagagaaatccattacccaggtggccgaaaagttcattctccggggttactgcccagactgtaaccaggtcttcgtcgacgaaacctctactcagaaccataaacagaattccggccataaggtgagggtgatcaatagcgtcgaggaaagcgtcttgctttactgccactcctccgagggtaacaaggatccctctagcgatctgcatttgctactggatcagagcaagttcagctcattgaaaaggacaatgagcatcaaagaaagcagctccctggaatgtatcgcgattccaaaaaaaaaaatgaacttgaaagacaaatcccacgaaggcgtcgcttgtgtgcagaaggaaaagtccgtggtcaaaacatggttctgtgagtgtaatcaaagattccctagtgaggacgcagttgagaagcacgtgttcagtgctaacacaatgggatataagtgtgtagtgtgtgggaaagtgtgtgatgactccggtgtcatccgcctgcacatgtcacgcatccacgggggagctcatctgaataatttcctcttttggtgtagaacatgtaagaaagagcttacacggaaagacacaattatggcccatgtgaccgaattccataacgggcatcggtacttctacgaaatggatgaggtggagggggaaacactgccatcatcaagtacaacactggataacctcacagctaataagcccagtagtgccatcaccgtgatcgaccatagtccggcaaattcaagccctagagggaaatggcagtgcagaatctgcgaagacatgttcgactcccaggagtacgttaaacagcactgcatgtcattagccagccataagtttcatagatactcctgcgcccattgcaggaagccgttccacaagatagagactctgtatcgccactgccaagacgaacatgataacgagataaaaatcaaatacttctgcgggctctgtgatttaatcttcaacgtggaggaagcttttctcagccactatgaggagcaccattcgatcgactacgtgtttgtctctgaaaaaactgagacctccatcaaaacggaagatgacttcccagtcatcgagacttccaaccaactgacatgcggttgtagagaaagctatatctgtaaggttaataggaaagaagattatagtcggtgtcttcagatcatgttggacaaaggcaagctctggtttcgatgctcactctgctctgctaccgcccaaaacttgacggacatgaatacccatatccatcaagtgcacaaagagaaatctgatgaggaagaacagcagtacgtgataaaatgcggcacgtgcaccaaggcctttcacgaccccgagtccgcccagcagcactttcacagaaagcactgtttcctgcaaaagccttccgtggcccatttcggatctgaaaagtccaatctttacaaattcacagccagtgcaagccataccgagcggaaactcaaacaggccattaattacagcaagtctctggacatggagaagggcgtggagaatgacttaagctatcaaaacatagaagaggagattgtggaacttcctgacctcgactatctgcgtactatgactcacattgtctttgtggacttcgataattggagcaacttcttcggacacctacccggacacctaaaccaggggacctttatctgggggtttcaaggcggtaatacaaattggaaacctcctcttaactgcaaaatttacaattatctgaaccgtatcggctgttttttcctccacccacgctgcagtaaacgaaaggacgctgccgacttcgccatctgcatgcacgctgggagactcgatgaacagctgcctaaacaaatccccttcaccatcttaagtggagaccaaggttttctggagctcgagaaccaattcaagaagacacagagacctgcacatatactgaatccacatcacctggagggtgacatgatgtgcgctctgctgaatagtatcagcgacaccacaaaggagtgcgattcagatgacaacatgggagcgaagaacacgtccattggagaggaattcatctccacggaggacgttgagctggaggaggccataagaaggagcttagaggaaatgtag

SEQ ID NO: 29639 - DNA, 5268 bp, Artificial Sequence
  derived and/or modified sequence
atcctgcgcggcgcggggaaggaagcccgggagtgagagaaagcggctccgggggcatagcgggccagtaagggccgctcctcctttgaagaggttttgcgtctctttccgccggtggcgtcggcgctcacgcaggggcgggtcccggtagcgccaggcggtgcagggcgggaaggggattcgtggcgacggcggcggcagggacagcaggagcagtggtgctgtcagcgcggccgtcggagacatgggagacccggggtcggagataatagaatctgtccctccagctggccctgaggcatctgagtcaacaacggatgaaaatgaagacgacattcagtttgtcagtgaaggaccattacgacctgttcttgaatacattgatctggtcagcagtgatgatgaagagcctagcacctcttatactgatgagaatattaaacgtaaagaccatattgattatcagaaggataaagttgctttaactctggctcgtctagcccgccatgttgaagtggagaaacagcagaaagaagagaagaatagagcattcagagaaaaaattgattttcagcatgctcatgggttacaagaattggaatttattcgaggacattctgatacagaagcagcaagactgtgtgtggaccagtggctaaaaatgccaggactcaaaacaggcacaattaattgtggaacaaaaagttcattccgaagaggaggccacacgtgggtgtctgggaaaccaattttatgtcctataatgcactgtaacaaggagtttgacaatgggcaccttctcttaggacatttgaaaaggttcgatcactctccatgtgatccaacaattacactacatggacctttcttcagctcctttgcttgtgtagtatgttataaaaaatttgttactcaacaacaatatagagatcacctttttgataaggaagccacagatgatggacataacaacaaccttcttcctcagattattcagtgttttgcatgtccaaattgcttccttctttttagcagaaaggaggagtgttcaaagcatatgtctggaaagaatcatttccatcagagtttcaaactgggtgataacaaaggaattgcacatccaatatctttcccatcttttgcaaagaaacttttgatctctctgtgcaaagatgttccctttcaagttaagtgtgtggcctgccacaagacactgcgttcccacatggagctcactgcccatttcagagttcattgtcgaaatgctggacctgtagctgtagctgagaagagcattacccaggttgcagagaaattcatattaagaggttattgtccagattgcaatcaagtctttgtggatgaaaccagcacccaaaatcataagcagaattcaggacacaaagtccgagtcattaactcagtggaagaatcagtcttactctattgccacagcagcgaagggaacaaggatccttcttctgacttgcatttattgttggatcaatcaaaattttcatcacttaaaagaaccatgtctattaaagaatctagctcactggagtgcattgccattccaaaaaagaagatgaatttaaaagataaaagccatgaaggtgttgcttgtgtccagaaagaaaaatcagtagttaaaacctggttctgtgaatgcaatcagcgattcccaagtgaagatgcagtagaaaagcatgttttctcagcaaacacaatgggttataaatgtgtggtctgtggaaaggtatgtgatgattcaggggtcattcgtttacacatgagccggattcacggaggggcacatttaaataactttcttttctggtgtcggacatgcaaaaaggagttaacaaggaaagatactatcatggcacatgtgactgaatttcataatggacacagatatttttatgagatggatgaggtagaaggtgaaactttgccatcatcctctacaacattggataatttgactgctaacaagccttcatcagctattactgttattgatcattccccggcaaatagttctccgaggggtaaatggcaatgccggatttgtgaagatatgtttgattcccaggaatatgtaaaacagcactgcatgtctttggcaagccacaagtttcatagatacagctgtgctcactgcagaaagccttttcataagatagaaacattgtaccgacattgccaagatgagcatgacaatgagataaagattaaatacttctgtgggctttgtgatcttatctttaatgtggaagaagcatttctgagtcattatgaggagcaccacagcatagattatgtatttgtgtcagaaaaaactgaaacttcaattaaaaccgaagatgattttccagtaatagagaccagtaaccagttaacttgtggttgccgtgagagttacatctgtaaagtcaacagaaaagaagattatagcagatgtctccaaatcatgctggataaaggaaaactgtggtttcgctgcagtttatgttcggcaacagcacagaatttaaccgacatgaacactcatatccatcaagtgcacaaagaaaagagtgatgaggaggagcagcagtatgtaatcaagtgtggcacctgcaccaaagcatttcatgatcctgagagtgcacagcagcatttccatagaaaacattgcttcttacagaaacccagtgtggctcattttggatctgaaaaatcaaacctgtacaagtttactgctagtgcctcacatacagagagaaaactgaaacaggcaataaactattcaaaaagtttagacatggagaaaggagttgagaatgacctaagctatcagaatatagaggaagaaattgttgagcttccagatttggattacctgcgaaccatgactcatatagtctttgtagattttgataactggtcaaacttttttggtcatctaccagggcatctaaaccaaggaacatttatttggggctttcaaggaggaaacaccaattggaagcctccgctcaactgtaagatttataactacctgaacaggattggatgcttcttccttcatcctcgctgtagtaaaagaaaagatgctgctgattttgccatatgtatgcatgctggccgtctagatgaacaactacccaagcaaattcctttcaccatcctctcaggagatcaaggttttctggagctagagaatcaatttaagaagactcagaggccagctcatatactaaaccctcaccacttagagggagatatgatgtgtgccttgttaaatagcatatctgataccaccaaagaatgtgacagtgatgataacatgggtgccaaaaatacttcaataggagaagaatttatatccacagaagatgtggaattagaagaagctattagaagaagtcttgaggaaatgtaattaaagatattaccacacaacatcaagtggccttgaagagactgagataacgaattcttgagtttgttttctaaaggagaccagaaatccactattacaaatgtatttgaaaacatgtttttgctttcatatgttcaaaatctgatctttgttttgtatttttgtgctaatgtgcaaacatgtacagaagaaatagaatacatgttcatgcaaatataaattatgtattctaatataggtgtaacagtttcccagttaactttgaatttatatatttagatttaaaggattaaaaaaaaggaaagctcttgacagttgtttcccaaatagcattagttctttaattttatttgtactgtacaaatgatgctagtttatttttttagcagtgaaaatgaatataaaaaaggtgacataggtcaagttttccataaattctacttctcatgtggcactattatataatacctttgagatctttgtttatgtttattagaagagggtaatggaaactgatcatggaaacatttaaaattttatcagcaatgttctttgtgggtgccatgcatatgtaaattattgctttaattagagcagcacattgctaaaataaaaaatacaccttaatttttaagaaataatttaaatgaaacaatttccattccttttacctgcttagacttttatgtgacttgtatggtctcctggttaaagggaatggtgtcagaatatttgcataaaattatttttcataacagtccttttttatatattggtgtaaacataatattcttcaagaaataatgttgaaagcctactcaggaataatcttccttaactctttaaatttttatttcatgtgaagtgttttcagtttagttattcactgaattgtcagtttccttcatttggtattacatatttaattcttaaatattgaggccccattgtgagtaataaaaaatacgacataagtagaagactaagaagggcttgtcatattatctttgtgtatatgcttcatgttatttaaccagaaatgtcttatctctaaaaatttttagtagtaattatttaccaaacttaaaaacatttctataaatataaagcttttctttatatttaagacaaaatataaaggctagaatttggttccttctctgtaacactaaatattttagtgtgaaattgaatttttttattactatagtcttttcaatctataatttgtgtttttaatttcttgatatgtcacttctgttcctccctgcttgcattttttaaaaactagacattgtggcttgagaatttatcaatcatctttccgaaatgaccacattgtgcttttagtttgtatgtttaagtggtcaagcaaggctctaggaggtagtcactgagctggaccttaaacacatctgcaggagctcacaaaatgggagcaaaagaggcattccagaaagaagagtagttaagcagatgtgggggcagggcaagaggagacagcaccttgttgccagagattctacacaaaggtgtgatggacactgatgctctattaagaagcttttgtggtgtgtgtggtagagaataattaaggcttctgataagacaggaaagggatatttcatcatgactgttaagaaaaggtaactgggttgtttaatgttttaattgataattgtcactgatcgtatttctacttgttaaataattaaaaatcatcttaaaattcatactttgactttaatttagacacaaggagatgtaatcgctgtgtaacatcagagaaagctatatggattatcgtcagaagtaaatgtttctaacattgacaaaga

SEQ ID NO: 29640 - DNA, 276 bp, Artificial Sequence
  derived and/or modified sequence
atgaatatcgcctctgctactattgcactcgtgggcaccgccttcctgagtctgaatattgccgtcaatattcagtccctccgatcttgccactcttcatctgagagtcctgacttgtgcaactatatggggtctataagtaacggtatggtgagtctgttactgatcctgactttgctagaactctgcgttacaatatccaccatagcaatgtggtgtaatgctaactgctgtaactcacgtgaggaaattagcagtccccctaacagtgtttag

SEQ ID NO: 29641 - DNA, 276 bp, Artificial Sequence
  derived and/or modified sequence
atgaacatcgccagcgccaccatcgccctggtgggcacagccttcctgagcctgaacattgctgtgaacatccagagcctgcggagctgccacagcagcagcgagagcccagacctgtgcaactacatgggcagcatcagcaatggcatggtgtccctgctgctgatcctgaccctgctggagctgtgtgtgaccatcagcaccatcgccatgtggtgcaatgccaactgctgcaacagccgggaggagatcagcagcccccccaacagcgtgtag

SEQ ID NO: 29642 - DNA, 276 bp, Artificial Sequence
  derived and/or modified sequence
atgaacatcgccagcgccaccatcgccctggtgggcaccgccttcttgtcactaaacatcgccgtgaatatacaatcccttcggtcctgccattcaagctcggaatctcctgatctgtgcaactacatgggctcaatctctaacggcatggtcagcctgttattgattctgactctgctcgaactctgtgtgacgatatcaacgattgctatgtggtgtaacgctaattgctgcaatagtagggaagaaatttcctcacccccgaactctgtgtag

SEQ ID NO: 29643 - DNA, 276 bp, Artificial Sequence
  derived and/or modified sequence
atgaatatcgctagtgccacaatagctctggtgggaaccgcatttctatcactgaacattgccgtcaatatacaatcactgaggtcgtgccatagtagctccgagagcccggacttgtgtaattatatggggagtatcagcaatgggatggtgagcttgcttctaattctgaccctgctggagctatgcgttacaatcagtacgatcgccatgtggtgcaatgccaattgctgtaatagtcgcgaagaaatcagcagcccacccaactcagtttag

SEQ ID NO: 29644 - DNA, 276 bp, Artificial Sequence
  derived and/or modified sequence
atgaacatcgccagcgccaccatcgccctggtgggcaccgccttcctgagcctgaacatcgccgtgaacatccagagcctgagaagctgccacagcagcagcgagagccccgacctgtgcaactacatgggcagcatcagcaacggcatggtgagcctgctgctgatcctgaccctgctggagctgtgcgtgaccatcagcaccatcgccatgtggtgcaacgccaactgctgcaacagcagagaggagatcagcagcccccccaacagcgtgtag

SEQ ID NO: 29645 - protein, 400 aa, Artificial Sequence
  derived and/or modified sequence
MIRNWLTIFILFPLKLVEKCESSVSLTVPPVVKLENGSSTNVSLTLRPPLNATLVITFEITFRSKNITILELPDEVVVPPGVTNSSFQVTSQNVGQLTVYLHGNHSNQTGPRIRFLVIRSSAISIINQVIGWIYFVAWSISFYPQVIMNWRRKSVIGLSFDFVALNLTGFVAYSVFNIGLLWVPYIKEQFLLKYPNGVNPVNSNDVFFSLHAVVLTLIIIVQCCLYERGGQRVSWPAIGFLVLAWLFAFVTMIVAAVGVTTWLQFLFCFSYIKLAVTLVKYFPQAYMNFYYKSTEGWSIGNVLLDFTGGSFSLLQMFLQSYNNDQWTLIFGDPTKFGLGVFSIVFDVVFFIQHFCLYRKRPGLQAARTGSGSRLRQDWAPSLQPKALPQTTSVSASSLKG

SEQ ID NO: 29646 - protein, 292 aa, Artificial Sequence
  derived and/or modified sequence
MCPRIRFLVIRSSAISIINQVIGWIYFVAWSISFYPQVIMNWRRKSVIGLSFDFVALNLTGFVAYSVFNIGLLWVPYIKEQFLLKYPNGVNPVNSNDVFFSLHAVVLTLIIIVQCCLYERGGQRVSWPAIGFLVLAWLFAFVTMIVAAVGVTTWLQFLFCFSYIKLAVTLVKYFPQAYMNFYYKSTEGWSIGNVLLDFTGGSFSLLQMFLQSYNNDQWTLIFGDPTKFGLGVFSIVFDVVFFIQHFCLYRKRPGLQAARTGSGSRLRQDWAPSLQPKALPQTTSVSASSLKG

SEQ ID NO: 29647 - protein, 75 aa, Artificial Sequence
  derived and/or modified sequence
MIRNWLTIFILFPLKLVEKCESSVSLTVPPVVKLENGSSTNVSLTLRPPLNATLVITFEITFRSKNITILELPDE

SEQ ID NO: 29648 - DNA, 876 bp, Artificial Sequence
  derived and/or modified sequence
atgtgcccccgcatccgcttcctggtgatccgcagcagcgccatcagcatcatcaaccaggtgatcggctggatctacttcgtggcctggagcatcagcttctacccccaggtgatcatgaactggcgccgcaagagcgtgatcggcctgagcttcgacttcgtggccctgaacctgaccggcttcgtggcctacagcgtgttcaacatcggcctgctgtgggtgccctacatcaaggagcagttcctgctgaagtaccccaacggcgtgaaccccgtgaacagcaacgacgtgttcttcagcctgcacgccgtggtgctgaccctgatcatcatcgtgcagtgctgcctgtacgagcgcggcggccagcgcgtgagctggcccgccatcggcttcctggtgctggcctggctgttcgccttcgtgaccatgatcgtggccgccgtgggcgtgaccacctggctgcagttcctgttctgcttcagctacatcaagctggccgtgaccctggtgaagtacttcccccaggcctacatgaacttctactacaagagcaccgagggctggagcatcggcaacgtgctgctggacttcaccggcggcagcttcagcctgctgcagatgttcctgcagagctacaacaacgaccagtggaccctgatcttcggcgaccccaccaagttcggcctgggcgtgttcagcatcgtgttcgacgtggtgttcttcatccagcacttctgcctgtaccgcaagcgccccggcctgcaggccgcccgcaccggcagcggcagccgcctgcgccaggactgggcccccagcctgcagcccaaggccctgccccagaccaccagcgtgagcgccagcagcctgaagggc

SEQ ID NO: 29649 - DNA, 1203 bp, Artificial Sequence
  derived and/or modified sequence
atgatcagaaactggctgaccatcttcatcctgttccccctgaagctggtggagaagtgcgagagcagcgtgagcctgaccgtgccccccgtggtgaagctggagaacggcagcagcaccaacgtgagcctgaccctgagaccccccctgaacgccaccctggtgatcaccttcgagatcaccttcagaagcaagaacatcaccatcctggagctgcccgacgaggtggtggtgccccccggcgtgaccaacagcagcttccaggtgaccagccagaacgtgggccagctgaccgtgtacctgcacggcaaccacagcaaccagaccggccccagaatcagattcctggtgatcagaagcagcgccatcagcatcatcaaccaggtgatcggctggatctacttcgtggcctggagcatcagcttctacccccaggtgatcatgaactggagaagaaagagcgtgatcggcctgagcttcgacttcgtggccctgaacctgaccggcttcgtggcctacagcgtgttcaacatcggcctgctgtgggtgccctacatcaaggagcagttcctgctgaagtaccccaacggcgtgaaccccgtgaacagcaacgacgtgttcttcagcctgcacgccgtggtgctgaccctgatcatcatcgtgcagtgctgcctgtacgagagaggcggccagagagtgagctggcccgccatcggcttcctggtgctggcctggctgttcgccttcgtgaccatgatcgtggccgccgtgggcgtgaccacctggctgcagttcctgttctgcttcagctacatcaagctggccgtgaccctggtgaagtacttcccccaggcctacatgaacttctactacaagagcaccgagggctggagcatcggcaacgtgctgctggacttcaccggcggcagcttcagcctgctgcagatgttcctgcagagctacaacaacgaccagtggaccctgatcttcggcgaccccaccaagttcggcctgggcgtgttcagcatcgtgttcgacgtggtgttcttcatccagcacttctgcctgtacagaaagagacccggcctgcaggccgccagaaccggcagcggcagcagactgagacaggactgggcccccagcctgcagcccaaggccctgccccagaccaccagcgtgagcgccagcagcctgaagggctag

SEQ ID NO: 29650 - DNA, 879 bp, Artificial Sequence
  derived and/or modified sequence
atgtgccccagaatcagattcctggtgatcagaagcagcgccatcagcatcatcaaccaggtgatcggctggatctacttcgtggcctggagcatcagcttctacccccaggtgatcatgaactggagaagaaagagcgtgatcggcctgagcttcgacttcgtggccctgaacctgaccggcttcgtggcctacagcgtgttcaacatcggcctgctgtgggtgccctacatcaaggagcagttcctgctgaagtaccccaacggcgtgaaccccgtgaacagcaacgacgtgttcttcagcctgcacgccgtggtgctgaccctgatcatcatcgtgcagtgctgcctgtacgagagaggcggccagagagtgagctggcccgccatcggcttcctggtgctggcctggctgttcgccttcgtgaccatgatcgtggccgccgtgggcgtgaccacctggctgcagttcctgttctgcttcagctacatcaagctggccgtgaccctggtgaagtacttcccccaggcctacatgaacttctactacaagagcaccgagggctggagcatcggcaacgtgctgctggacttcaccggcggcagcttcagcctgctgcagatgttcctgcagagctacaacaacgaccagtggaccctgatcttcggcgaccccaccaagttcggcctgggcgtgttcagcatcgtgttcgacgtggtgttcttcatccagcacttctgcctgtacagaaagagacccggcctgcaggccgccagaaccggcagcggcagcagactgagacaggactgggcccccagcctgcagcccaaggccctgccccagaccaccagcgtgagcgccagcagcctgaagggctag

SEQ ID NO: 29651 - DNA, 1203 bp, Artificial Sequence
  derived and/or modified sequence
atgatccgcaactggttaaccattttcatactgttcccactgaagttggtggaaaagtgcgaatcctccgtgtcgctgacagtgccccccgtcgtgaagctggagaacggtagcagtactaacgtgtccctgaccctgcgaccccccctcaacgccacactcgttataaccttcgagataaccttccggtctaaaaacatcacaatcttggagctcccagacgaagtggttgttccccccggcgtgacaaatagctctttccaggtcacaagccagaatgttggacagctgacggtatatttacatgggaaccactccaaccagaccggcccgcggataagatttctcgtgatccgatcgtccgcgatctcaattatcaatcaggtaatagggtggatctactttgtcgcgtggtcaataagcttctacccacaggtgattatgaattggaggagaaaaagcgtgattggactgtcattcgactttgtggccttaaacctgacgggatttgttgcctattccgtgtttaatataggactgctctgggtgccctatatcaaggagcagttcctgttgaagtatcccaacggggtgaaccccgtcaactccaacgacgtcttcttctctctgcatgcagttgtcctaacgctgattatcatcgtgcaatgttgcttgtatgagagaggagggcagagggtcagctggcctgcgataggttttctggtgctggcgtggctgtttgctttcgtaacaatgatcgtggctgccgtcggcgtcactacttggctgcaattccttttttgctttagctatatcaaacttgcagtgacactggtaaaatacttcccacaggcctatatgaacttctactacaaaagtaccgagggctggagcattgggaatgtgcttctcgacttcaccggcgggtctttttctttactccagatgtttctgcagtcttataacaatgaccagtggactcttatttttggcgacccaacgaagtttggccttggggtgttcagcattgtgttcgatgtggtgttcttcattcagcatttttgcttgtatagaaagaggcccggacttcaggccgcccggaccggctccggttctaggctcaggcaggattgggcacccagtttacagcccaaagctctgccacagaccacaagcgtgtccgcatccagcttgaagggctag

SEQ ID NO: 29652 - DNA, 879 bp, Artificial Sequence
  derived and/or modified sequence
atgtgtcctcgcatcagatttctggtgattagatcatccgctattagcataattaatcaggtgatcggctggatttactttgtggcctggtctataagcttttaccctcaagtcattatgaactggcgaagaaagtccgtcattggcctgtctttcgattttgtagccctcaatttaaccggcttcgtggcctacagcgtcttcaacataggattgctctgggtgccctatattaaagagcagttcttgctgaaatatcccaatggtgtgaaccctgttaacagcaacgacgtgtttttcagcttacatgctgtggtgctgacactgattattatcgtccaatgctgtttgtatgagcggggcggacagcgcgtctcctggccagctatcggttttctcgtgctggcctggctcttcgcatttgtaacgatgattgtggctgcagttggcgtcacaacgtggctccagttcctgttttgcttttcttatatcaagctggccgtaacactagtcaaatacttccctcaggcgtatatgaacttctactacaagagcacagaaggttggagcattggcaatgtgctgctagatttcacgggcggcagttttagtttgcttcagatgtttttgcagtcttacaacaatgatcagtggaccttgatattcggcgatcccaccaagttcggcctgggtgtttttagtattgttttcgatgtagtcttttttatacagcacttctgcctgtacaggaagcgcccaggcctccaggccgctaggaccggcagcggaagcaggctaagacaggattgggcgccttctctgcagcctaaggccttaccacagaccacctcagtgtctgctagctcccttaagggctag

SEQ ID NO: 29653 - DNA, 1203 bp, Artificial Sequence
  derived and/or modified sequence
atgatccggaactggctgaccatcttcatcctcttccccctgaagctggtggagaagtgtgagagctctgtgtccctgactgtgccccctgtggtgaagctggagaatggcagcagcaccaacgtgtccctgaccctgcggccccccctgaatgccaccctggtgatcacctttgagatcaccttccgcagcaagaacatcaccatcctggagctgcctgatgaggtggtggtgcccccaggagtgaccaacagcagcttccaggtgaccagccagaatgtgggccagctgactgtgtacctgcacggcaaccacagcaaccagacaggcccccgcatccgcttcctggtgatccgcagcagcgccatcagcatcatcaaccaggtgattggctggatctactttgtggcctggagcatctccttctacccccaggtgatcatgaactggaggaggaagagcgtcatcggcctgagctttgattttgtggccctgaacctgaccggctttgtggcctacagcgtcttcaacatcggcctgctgtgggtgccctacatcaaggagcagttcctgctgaagtaccccaacggggtgaaccctgtgaacagcaatgatgtgttcttcagcctgcatgctgtggtgctgaccctcatcatcatcgtgcagtgctgcctgtatgaaagaggaggccagagggtgtcctggccagccatcggcttcctggtgctggcctggctgtttgcctttgtgaccatgattgtggccgctgtgggcgtgaccacctggctgcagttcctgttctgcttctcctacatcaagctggccgtgaccctggtgaagtacttcccccaggcctacatgaacttctactacaagagcacagagggctggagcattggaaatgtgctgctggacttcaccggcggcagcttcagcctgctgcagatgttcctgcagagctacaacaatgaccagtggaccctcatctttggagaccccaccaagtttggcctgggcgtcttcagcatcgtgtttgatgtggtgttcttcatccagcacttctgcctgtacaggaagaggcctggcctgcaggccgccaggacaggcagcggcagccggctgcggcaggactgggcccccagcctgcagcccaaggccctgccccagaccacctctgtgtctgccagcagcctgaagggctag

SEQ ID NO: 29654 - DNA, 879 bp, Artificial Sequence
  derived and/or modified sequence
atgtgcccccgcatccgcttcctggtgatccgcagcagcgccatcagcatcatcaaccaggtgattggctggatctactttgtggcctggagcatctccttctacccccaggtgatcatgaactggaggaggaagagcgtcatcggcctgagctttgattttgtggccctgaacctgaccggctttgtggcctacagcgtcttcaacatcggcctgctgtgggtgccctacatcaaggagcagttcctgctgaagtaccccaacggggtgaaccctgtgaacagcaatgatgtgttcttcagcctgcatgctgtggtgctgaccctcatcatcatcgtgcagtgctgcctgtatgaaagaggaggccagagggtgtcctggccagccatcggcttcctggtgctggcctggctgtttgcctttgtgaccatgattgtggccgctgtgggcgtgaccacctggctgcagttcctgttctgcttctcctacatcaagctggccgtgaccctggtgaagtacttcccccaggcctacatgaacttctactacaagagcacagagggctggagcattggaaatgtgctgctggacttcaccggcggcagcttcagcctgctgcagatgttcctgcagagctacaacaatgaccagtggaccctcatctttggagaccccaccaagtttggcctgggcgtcttcagcatcgtgtttgatgtggtgttcttcatccagcacttctgcctgtacaggaagaggcctggcctgcaggccgccaggacaggcagcggcagccggctgcggcaggactgggcccccagcctgcagcccaaggccctgccccagaccacctctgtgtctgccagcagcctgaagggctag

SEQ ID NO: 29655 - DNA, 2470 bp, Artificial Sequence
  derived and/or modified sequence
aatggagggcggtctgagcttcgctcacgaaaggagccgggaggcgctggcggctccaagagtctctgtgtccctggcagcggacctcatcttccctcacgccggagccccgatctctgcgccccggcccgacccagctgcgctctgtccgtctaagacgcgcggaaactacaactcccagagctcatctcgccgagatccggccccacgagtcaggtggcggaggtcagattgctttggagacgctgagagaacctttgcgagagcgccggttgacgtgcggagtgcggggctccgggggactgagcagcacgagaccccatcctcccctccgggttttcacactgggcgaagggaggactcctgagctctgcctcttccagtaacattgaggattactgtgttttgtgagagctcgctaggcgccctaagcaacagagttctgagaaatcgagaaacatgataaggaattggctgactatttttatcctttttcccctgaagctcgtagagaaatgtgagtcaagcgtcagcctcactgttcctcctgtcgtaaagctggagaacggcagctcgaccaacgtcagcctcaccctgcggccaccattaaatgcaaccctggtgatcacttttgaaatcacatttcgttccaaaaatattactatccttgagctccccgatgaagttgtggtgcctcctggagtgacaaactcctcttttcaagtgacatctcaaaatgttggacaacttactgtttatctacatggaaatcactccaatcagaccggcccgaggatacgctttcttgtgatccgcagcagcgccattagcatcataaaccaggtgattggctggatctactttgtggcctggtccatctccttctaccctcaggtgatcatgaattggaggcggaaaagtgtcattggtctgagcttcgacttcgtggctctgaacctgacgggcttcgtggcctacagtgtattcaacatcggcctcctctgggtgccctacatcaaggagcagtttctcctcaaataccccaacggagtgaaccccgtgaacagcaacgacgtcttcttcagcctgcacgcggttgtcctcacgctgatcatcatcgtgcagtgctgcctgtatgagcgcggtggccagcgcgtgtcctggcctgccatcggcttcctggtgctcgcgtggctcttcgcatttgtcaccatgatcgtggctgcagtgggagtgaccacgtggctgcagtttctcttctgcttctcctacatcaagctcgcagtcacgctggtcaagtattttccacaggcctacatgaacttttactacaaaagcactgagggctggagcattggcaacgtgctcctggacttcaccgggggcagcttcagcctcctgcagatgttcctccagtcctacaacaacgaccagtggacgctgatcttcggagacccaaccaagtttggactcggggtcttctccatcgtcttcgacgtcgtcttcttcatccagcacttctgtttgtacagaaagagaccggggcttcaggcagcgcgcacaggctctggcagccgtctcaggcaggactgggcaccaagcttgcagccgaaggccttgccccaaactaccagcgtttctgcaagcagcttgaagggctgaccttgcagccgggtgagccaagggcactttgctgccaccgctgcattcccagagatcaagcagcccggtgccgtggccagtgaactcagaggtgctggtggacgggctaggactttggggttaggccatggggctctttctctgaaggccactttcctgacgtactctctgtacataactcagcgtccgtgactgcagtaacagccagccctacccagagtatttctgagccatgaggggcccaccagattggttctgaattggattcatgcccagcgcattagcatagtaactcctttcagattttttggagggacgtttggaagtggcttactctcttctgccctctctcctacctccaccttctcagattagccccatctgagcacatccagctgctccttacccagcatctggagtacaggacatagctctctcctgctaccagtctgtgccttagaggtctgttaggcctgccaaacggcgaccagctcccctggagcgagggcaggccccttccctctctttccccagacacctacttgagactcaccaatttctggcctgttcaggagcctcagataagtatttgtacttgagaccacctcacacaatctgtatgggcccaaccctgatctcaaacctccttccctctgcccaaagctgtccttcctatggcaggaggggtgggggtcccaggacgtgcctcatacatgacttgagcttgtcagtccactgagtttccttctacgagatcaacgcgaggggcctgtatcttgaattaaaacctactcgcttcctttctgca

SEQ ID NO: 29656 - DNA, 1570 bp, Artificial Sequence
  derived and/or modified sequence
cccaaagtctagccgggcaggggaacgcggtgcattcctgaccggcacctggcgaggctcatgcgtcccgtgagggcggttcctcgagcctgggggcgctcagattgctttggagacgctgagagaacctttgcgagagcgccggttgacgtgcggagtgcggggctccgggggactgagcagcacgagaccccatcctcccctccgggttttcacactgggcgaagggaggactcctgagctctgcctcttccagtaacattgaggattactgtgttttgtgagagctcgctaggcgccctaagcaacagagttctgagaaatcgagaaacatgataaggaattggctgactatttttatcctttttcccctgaagctcgtagagaaatgtgcccgaggatacgctttcttgtgatccgcagcagcgccattagcatcataaaccaggtgattggctggatctactttgtggcctggtccatctccttctaccctcaggtgatcatgaattggaggcggaaaagtgtcattggtctgagcttcgacttcgtggctctgaacctgacgggcttcgtggcctacagtgtattcaacatcggcctcctctgggtgccctacatcaaggagcagtttctcctcaaataccccaacggagtgaaccccgtgaacagcaacgacgtcttcttcagcctgcacgcggttgtcctcacgctgatcatcatcgtgcagtgctgcctgtatgagcgcggtggccagcgcgtgtcctggcctgccatcggcttcctggtgctcgcgtggctcttcgcatttgtcaccatgatcgtggctgcagtgggagtgaccacgtggctgcagtttctcttctgcttctcctacatcaagctcgcagtcacgctggtcaagtattttccacaggcctacatgaacttttactacaaaagcactgagggctggagcattggcaacgtgctcctggacttcaccgggggcagcttcagcctcctgcagatgttcctccagtcctacaacaacgaccagtggacgctgatcttcggagacccaaccaagtttggactcggggtcttctccatcgtcttcgacgtcgtcttcttcatccagcacttctgtttgtacagaaagagaccggggcttcaggcagcgcgcacaggctctggcagccgtctcaggcaggactgggcaccaagcttgcagccgaaggccttgccccaaactaccagcgtttctgcaagcagcttgaagggctgaccttgcagccgggtgagccaagggcactttgctgccaccgctgcattcccagagatcaagcagcccggtgccgtggccagtgaactcagaggtgctggtggacgggctaggactttggggttaggccatggggctctttctctgaaggccactttcctgacgtactctctgtacataactcagcgtccgtgactgcagtaacagccagccctacccagagtatttctgagccatgaggggcccaccagattggttctgaattggattcatgcccagcgcattagcatagtaactcctttcaga

SEQ ID NO: 29657 - DNA, 1203 bp, Artificial Sequence
  derived and/or modified sequence
atgatccggaactggctgaccatcttcatcctgttccccctgaagcttgtggaaaaatgtgaatcatctgtatccctcacagttccgcctgtcgtcaagctcgaaaatggctccagtactaacgttagtctgacactgcggcccccgctcaacgctacccttgtgatcaccttcgaaatcactttcaggagtaaaaacattactattcttgaactcccggacgaagtcgtggttccccctggagttaccaactcttccttccaggtcacaagtcaaaacgtggggcagctgaccgtgtacctccatggcaatcatagtaatcagacagggcctaggatccgatttttagttattaggtcaagtgccatttccattattaatcaggtgatcggttggatatactttgtcgcctggtctatctccttctatccccaggtaataatgaactggagacggaagagcgtgattggcctgtcttttgacttcgttgctttgaatttgaccggctttgtagcatacagtgtttttaatatcggcctgctgtgggtgccctacatcaaagagcagttcctgctcaagtaccccaacggagtgaatcctgtgaattccaatgatgtcttcttcagcctgcatgcggtggttttgactcttatcatcatcgtgcagtgttgtctgtatgagcggggcggacaacgagtttcctggccagctattggtttcctagtgctggcctggctcttcgcattcgttactatgattgttgcagccgtcggcgtgaccacgtggctgcagttcctgttctgcttctcctacattaaactcgccgtaacgttagtgaaatatttcccacaggcatatatgaatttttattacaagagcacagagggctggtcaatcgggaacgtgctgcttgactttacaggcggcagcttcagtctactgcagatgttcctccagtcctataacaacgaccagtggacactcatattcggagatcctactaagttcggactcggcgtctttagcatcgtttttgacgtggtatttttcatccagcatttttgtctctatcgtaagcgcccaggcctgcaagcagcgcgaaccggttcgggtagccgactcaggcaggactgggccccctcccttcagcccaaggctctgccccagaccacatcggtgtctgcctcttccctcaaggggtag

SEQ ID NO: 29658 - DNA, 879 bp, Artificial Sequence
  derived and/or modified sequence
atgtgcccccggatccggttcctggtgatccggagcagcgccatctccataatcaaccaggtcattggctggatttacttcgttgcctggtcaatttcattctatccccaggtgatcatgaattggcgccggaagtccgtcatcggcttgagtttcgacttcgttgccctcaatcttaccgggttcgtggcgtattcagttttcaacattggtctgctttgggtcccatatataaaagaacagttccttctgaagtacccaaatggcgtgaacccggtcaactccaacgacgtgttcttcagcctacatgccgtcgtccttacccttataataatcgtccagtgctgcctgtatgaacggggtggacaacgggtatcctggccagccataggtttcttggttctcgcctggctttttgccttcgtaaccatgatagtggctgccgttggggtgacaacctggctgcagttcctgttctgtttttcttacattaaactggcagttacattagtgaagtacttcccccaggcctacatgaatttttattacaaaagcaccgagggctggtctatagggaacgtccttctagatttcacaggcggttcattttctctgttgcagatgtttctccagagttataataatgaccagtggacgttgatttttggcgaccctactaagtttggactgggggtgttcagcatcgtatttgacgtggtattctttatccagcacttttgcctttatcgcaaaagaccgggattgcaagccgcaaggaccggctcagggagccgcctgcgccaggattgggccccgtcactccagcccaaagccctcccacagaccacatcagtttctgcatcctcactcaagggctag

SEQ ID NO: 29659 - DNA, 1203 bp, Artificial Sequence
  derived and/or modified sequence
atgattcggaactggctcactatctttatacttttccccttaaagctggtggagaagtgcgagagtagtgtgtcacttaccgttcctcctgtcgttaagctggagaatggctcatctaccaatgtttctctgaccctgagaccgcctcttaacgctaccctggtgattaccttcgaaatcactttccggagcaaaaacatcacaatcctggagctgcccgacgaggtggtggttccacccggagtcactaactccagctttcaggtgacttcacagaatgtgggacaattgacggtataccttcacggtaaccatagtaatcagactggccctagaattcgtttccttgtcatcaggagttctgccatctcaatcatcaatcaagtgatcggctggatttactttgtagcttggagcatttctttttacccgcaggtaattatgaactggcgcagaaagtccgtcatcggactgagcttcgattttgtggccttaaatctcacaggttttgtcgcttatagcgtgtttaacataggacttctctgggtgccttatatcaaggaacagttcctattaaagtatcccaatggagtcaaccctgtaaactcgaacgatgtcttcttttcattgcatgccgtcgttctcacactcattatcatcgtgcagtgctgtctctatgaacgcggaggacagagggtgagctggcctgccattggtttcctggttctagcctggctgtttgcctttgtcacaatgatcgtcgcagccgtcggagttaccacctggctacaattcctgttttgcttcagttatataaagcttgctgtaactttggtcaagtacttcccccaggcgtatatgaacttctactacaaatccacagaaggatggagcattggtaatgttctgcttgacttcaccggtggatcctttagcttactacagatgttcctgcagtcctacaacaacgatcagtggacgctcatctttggggacccaacaaagttcggtctgggagtattttccatagtgtttgatgtcgtgttttttattcagcatttctgcttgtatagaaaaagacccggtctgcaggccgctcgcacaggctccggatctcgattgcgacaagattgggccccttccctccagcctaaagcccttccccaaaccactagcgtctccgctagctccctgaagggctag

SEQ ID NO: 29660 - DNA, 879 bp, Artificial Sequence
  derived and/or modified sequence
atgtgtcctaggatacggttcctagtcatcagatcatctgctatctctattatcaaccaagtgataggctggatctattttgtggcctggtctatctccttctatccgcaggtcatcatgaactggaggcgaaaaagcgttattgggctgtcttttgattttgtcgccttaaatctgacagggtttgtcgcatattctgtgtttaatatcgggctgctgtgggtgccttacatcaaggaacagttccttctgaagtaccccaatggggttaaccccgtcaactccaacgacgtgtttttttctctgcatgccgtggtcttaacccttataatcatcgtgcaatgttgtctgtatgagcggggaggtcagagagtatcctggcccgctattggattcttggtcttagcttggttattcgctttcgtcacgatgatcgtagccgcagtgggggtgacgacatggctgcaatttttattctgcttctcctatattaagctcgccgtgacattagttaagtacttcccacaggcatacatgaacttctattataaaagcactgaaggctggtccattggcaatgtgctgcttgacttcactgggggatccttttctcttttacaaatgttcctacagtcttataacaacgaccaatggacactgatttttggggatcctacaaagtttggactgggggtgttcagcattgtctttgacgttgtattctttatacagcacttctgtctatataggaaacgcccaggcctgcaagccgctcgaactggctctggtagtcgtctgcggcaggactgggccccatccctgcaacccaaggcactgcctcagacgacctcggtgtctgccagttcactgaaaggctag

SEQ ID NO: 29661 - protein, 238 aa, Artificial Sequence
  derived and/or modified sequence
MSRYGRYGGETKVYVGNLGTGAGKGELERAFSYYGPLRTVWIARNPPGFAFVEFEDPRDAEDAVRGLDGKVICGSRVRVELSTGMPRRSRFDRPPARRPFDPNDRCYECGEKGHYAYDCHRYSRRRRSRSRSRSHSRSRGRRYSRSRSRSRGRRSRSASPRRSRSISLRRSRSASLRRSRSGSIKGSRYFQSPSRSRSRSRSISRPRSSRSKSRSPSPKRSRSPSGSPRRSASPERMD

SEQ ID NO: 29662 - protein, 1134 aa, Artificial Sequence
  derived and/or modified sequence
MRFGSKMMPMFLTVYLSNNEQHFTEVPVTPETICRDVVDLCKEPGESDCHLAEVWCGSERPVADNERMFDVLQRFGSQRNEVRFFLRHERPPGRDIVSGPRSQDPSLKRNGVKVPGEYRRKENGVNSPRMDLTLAELQEMASRQQQQIEAQQQLLATKEQRLKFLKQQDQRQQQQVAEQEKLKRLKEIAENQEAKLKKVRALKGHVEQKRLSNGKLVEEIEQMNNLFQQKQRELVLAVSKVEELTRQLEMLKNGRIDSHHDNQSAVAELDRLYKELQLRNKLNQEQNAKLQQQRECLNKRNSEVAVMDKRVNELRDRLWKKKAALQQKENLPVSSDGNLPQQAASAPSRVAAVGPYIQSSTMPRMPSRPELLVKPALPDGSLVIQASEGPMKIQTLPNMRSGAASQTKGSKIHPVGPDWSPSNADLFPSQGSASVPQSTGNALDQVDDGEVPLREKEKKVRPFSMFDAVDQSNAPPSFGTLRKNQSSEDILRDAQVANKNVAKVPPPVPTKPKQINLPYFGQTNQPPSDIKPDGSSQQLSTVVPSMGTKPKPAGQQPRVLLSPSIPSVGQDQTLSPGSKQESPPAAAVRPFTPQPSKDTLLPPFRKPQTVAASSIYSMYTQQQAPGKNFQQAVQSALTKTHTRGPHFSSVYGKPVIAAAQNQQQHPENIYSNSQGKPGSPEPETEPVSSVQENHENERIPRPLSPTKLLPFLSNPYRNQSDADLEALRKKLSNAPRPLKKRSSITEPEGPNGPNIQKLLYQRTTIAAMETISVPSYPSKSASVTASSESPVEIQNPYLHVEPEKEVVSLVPESLSPEDVGNASTENSDMPAPSPGLDYEPEGVPDNSPNLQNNPEEPNPEAPHVLDVYLEEYPPYPPPPYPSGEPEGPGEDSVSMRPPEITGQVSLPPGKRTNLRKTGSERIAHGMRVKFNPLALLLDSSLEGEFDLVQRIIYEVDDPSLPNDEGITALHNAVCAGHTEIVKFLVQFGVNVNAADSDGWTPLHCAASCNNVQVCKFLVESGAAVFAMTYSDMQTAADKCEEMEEGYTQCSQFLYGVQEKMGIMNKGVIYALWDYEPQNDDELPMKEGDCMTIIHREDEDEIEWWWARLNDKEGYVPRNLLGLYPRIKPRQRSLA

SEQ ID NO: 29663 - DNA, 4802 bp, Artificial Sequence
  derived and/or modified sequence
gctggggcccgacccgggattagttggtttcggagcggaggagggagccccgaccgtcacgagcgtcgaagagacaaagccgcgtcagggggcccggccggggcgggggagcccggggcttgttggtgccccagcccgcgcggagggcccttcggacccgcgcgccgccgctgccgccgccgccgcctcgcaacaggtccgggcggcctcgctctccgctcccctcccccgcatccgcgaccctccggggcacctcagctcggccggggccgcagtctggccacccgcttccatgcggttcgggtccaagatgatgccgatgtttcttaccgtgtatctcagtaacaatgagcagcacttcacagaagttccagttactccagaaacaatatgcagagacgtggtggatctgtgcaaagaacccggcgagagtgattgccatttggctgaagtgtggtgtggctctgtagagatagagtttcatcatgttggccaggatggtctcgatctcctgaccttgtgatccgcctgcctcggcctcccaaagtgctggattacaggtgtgagccaccacgatcagcctctagtgtttaaaaaagaacgtccagttgcggataatgagcgaatgtttgatgttcttcaacgatttggaagtcagaggaacgaagttcgcttcttccttcgtcatgaacgcccccctggcagggacattgtgagtggaccaagatctcaggatccaagtttaaaaagaaatggtgtaaaagttcctggtgaatatcgaagaaaggagaacggtgttaatagtcctaggatggatctgactcttgctgaacttcaggaaatggcatctcgccagcagcaacagattgaagcccagcaacaattgctggcaactaaggaacagcgcttaaagtttttgaaacaacaagatcagcgacaacagcaacaagttgctgagcaggagaaacttaaaaggctaaaagaaatagctgagaatcaggaagctaagctaaaaaaagtgagagcacttaaaggccacgtggaacagaagagactaagcaatgggaaacttgtggaggaaattgaacagatgaataatttgttccagcaaaaacagagggagctcgtcctggctgtgtcaaaagtagaagaactgaccaggcagctagagatgctcaagaacggcaggatcgacagccaccatgacaatcagtctgcagtggctgagcttgatcgcctctataaggagctgcagctaagaaacaaattgaatcaagagcagaatgccaagctacaacaacagagggagtgtttgaataagcgtaattcagaagtggcagtcatggataagcgtgttaatgagctgagggaccggctgtggaagaagaaggcagctctacagcaaaaagaaaatctaccagtttcatctgatggaaatcttccccagcaagccgcgtcagccccaagccgtgtggctgcagtaggtccctatatccagtcgtctactatgcctcggatgccctcaaggcctgaattgctggtgaagccagccctgccggatggttccttggtcattcaggcttcagaggggccgatgaaaatacagacactgcccaacatgagatctggggctgcttcacaaactaaaggctctaaaatccatccagttggccctgattggagtccttcaaatgcagatcttttcccaagccaaggctctgcttctgtacctcaaagcactgggaatgctctggatcaagttgatgatggagaggttccgctgagggagaaagagaagaaagtgcgtccgttctcaatgtttgatgcagtagaccagtccaatgccccaccttcctttggtactctgaggaagaaccagagcagtgaagatatcttgcgggatgctcaggttgcaaataaaaatgtggctaaagtaccacctcctgttcctacaaaaccaaaacagattaatttgccttattttggacaaactaatcagccaccttcagacattaagccagacggaagttctcagcagttgtcaacagttgttccgtccatgggaactaaaccaaaaccagcagggcagcagccgagagtgctgctatctcccagcataccttcggttggccaagaccagaccctttctccaggttctaagcaagaaagtccacctgctgctgccgtccggccctttactccccagccttccaaagacaccttacttccacccttcagaaaaccccagaccgtggcagcaagttcaatatattccatgtatacgcaacagcaggcgccaggaaaaaacttccagcaggctgtgcagagcgcgttgaccaagactcataccagagggccacacttttcaagtgtatatggtaagcctgtaattgctgctgcccagaatcaacagcagcacccagagaacatttattccaatagccagggcaagcctggcagtccagaacctgaaacagagcctgtttcttcagttcaggagaaccatgaaaacgaaagaattcctcggccactcagcccaactaaattactgcctttcttatctaatccttaccgaaaccagagtgatgctgacctagaagccttacgaaagaaactgtctaacgcaccaaggcctctaaagaaacgtagttctattacagagccagagggtcctaatgggccaaatattcagaagcttttatatcagaggaccaccatagcggccatggagaccatctctgtcccatcatacccatccaagtcagcttctgtgactgccagctcagaaagcccagtagaaatccagaatccatatttacatgtggagcccgaaaaggaggtggtctctctggttcctgaatcattgtccccagaggatgtggggaatgccagtacagagaacagtgacatgccagctccttctccaggccttgattatgagcctgagggagtcccagacaacagcccaaatctccagaataacccagaagaaccaaatccagaggctccacatgtgcttgatgtgtacctggaggagtaccctccatacccacccccaccatacccatctggggagcctgaagggcccggagaagactcggtgagcatgcgcccgcctgaaatcaccgggcaggtctctctgcctcctggtaaaaggacaaacttgcgtaaaactggctcagagcgtatcgctcatggaatgagggtgaaattcaacccccttgctttactgctagattcgtctttggagggagaatttgaccttgtacagagaattatttatgaggttgatgacccaagcctccccaatgatgaaggcatcacggctcttcacaatgctgtgtgtgcaggccacacagaaatcgttaagttcctggtacagtttggtgtaaatgtaaatgctgctgatagtgatggatggactccattacattgtgctgcctcatgtaacaacgtccaagtgtgtaagtttttggtggagtcaggagccgctgtgtttgccatgacctacagtgacatgcagactgctgcagataagtgcgaggaaatggaggaaggctacactcagtgctcccaatttctttatggagttcaggagaagatgggcataatgaataaaggagtcatttatgcgctttgggattatgaacctcagaatgatgatgagctgcccatgaaagaaggagactgcatgacaatcatccacagggaagacgaagatgaaatcgaatggtggtgggcgcgccttaatgataaggagggatatgttccacgtaacttgctgggactgtacccaagaattaaaccaagacaaaggagcttggcctgaaacttccacacagaattttagtcaatgaagaattaatctctgttaagaagaagtaatacgattatttttggcaaaaatttcacaagacttattttaatgacaatgtagcttgaaagcgatgaagaatgtctctagaagagaatgaaggattgaagaattcaccattagaggacatttagcgtgatgaaataaagcatctacgtcagcaggccatactgtgttggggcaaaggtgtcccgtgtagcactcagataagtatacagcgacaatcctgttttctacaagaatcctgtctagtaaataggatcatttattgggcagttgggaaatcagctctctgtcctgttgagtgttttcagcagctgctcctaaaccagtcctcctgccagaaaggaccagtgccgtcacatcgctgtctctgattgtccccggcaccagcaggcccttggggggctcacctgaaggctcgaaggcactgcacacttgtatattgtcagtgaagaactgttagttggttgtcagtgaacaataactttattatatgagtttttgtagcatcttaagaattatacatatgtttgaaatattgaaactaagctacggtaccagtaattagatgtagaatcttgtttgtaggctgaattttaatctgtatttattgtcttttgtatctcagaaattagaaacttgctacagacttacccgtaatatttgtcaagatcatagctgactttaaaaacagttgtaataaactttttgatgctagctgtttactggtttttgtttttgatgtcataaatagaccttgtttaatagtcacaagccgttgggatatcatacccagctgaaaaagaacaaactgcttaacataagtatatgtatcgtaataagagttttttaccagctaagtgattcaatgtaagtggtttttaaaataaaatactgtagagatcatggtgaaaaaaaaaaaaaa

SEQ ID NO: 29664 - DNA, 3405 bp, Artificial Sequence
  derived and/or modified sequence
atgagattcggcagcaagatgatgcccatgttcctgaccgtgtacctgagcaacaacgagcagcacttcaccgaggtgcccgtgacccccgagaccatctgcagagacgtggtggacctgtgcaaggagcccggcgagagcgactgccacctggccgaggtgtggtgcggcagcgagagacccgtggccgacaacgagagaatgttcgacgtgctgcagagattcggcagccagagaaacgaggtgagattcttcctgagacacgagagaccccccggcagagacatcgtgagcggccccagaagccaggaccccagcctgaagagaaacggcgtgaaggtgcccggcgagtacagaagaaaggagaacggcgtgaacagccccagaatggacctgaccctggccgagctgcaggagatggccagcagacagcagcagcagatcgaggcccagcagcagctgctggccaccaaggagcagagactgaagttcctgaagcagcaggaccagagacagcagcagcaggtggccgagcaggagaagctgaagagactgaaggagatcgccgagaaccaggaggccaagctgaagaaggtgagagccctgaagggccacgtggagcagaagagactgagcaacggcaagctggtggaggagatcgagcagatgaacaacctgttccagcagaagcagagagagctggtgctggccgtgagcaaggtggaggagctgaccagacagctggagatgctgaagaacggcagaatcgacagccaccacgacaaccagagcgccgtggccgagctggacagactgtacaaggagctgcagctgagaaacaagctgaaccaggagcagaacgccaagctgcagcagcagagagagtgcctgaacaagagaaacagcgaggtggccgtgatggacaagagagtgaacgagctgagagacagactgtggaagaagaaggccgccctgcagcagaaggagaacctgcccgtgagcagcgacggcaacctgccccagcaggccgccagcgcccccagcagagtggccgccgtgggcccctacatccagagcagcaccatgcccagaatgcccagcagacccgagctgctggtgaagcccgccctgcccgacggcagcctggtgatccaggccagcgagggccccatgaagatccagaccctgcccaacatgagaagcggcgccgccagccagaccaagggcagcaagatccaccccgtgggccccgactggagccccagcaacgccgacctgttccccagccagggcagcgccagcgtgccccagagcaccggcaacgccctggaccaggtggacgacggcgaggtgcccctgagagagaaggagaagaaggtgagacccttcagcatgttcgacgccgtggaccagagcaacgccccccccagcttcggcaccctgagaaagaaccagagcagcgaggacatcctgagagacgcccaggtggccaacaagaacgtggccaaggtgcccccccccgtgcccaccaagcccaagcagatcaacctgccctacttcggccagaccaaccagccccccagcgacatcaagcccgacggcagcagccagcagctgagcaccgtggtgcccagcatgggcaccaagcccaagcccgccggccagcagcccagagtgctgctgagccccagcatccccagcgtgggccaggaccagaccctgagccccggcagcaagcaggagagcccccccgccgccgccgtgagacccttcaccccccagcccagcaaggacaccctgctgccccccttcagaaagccccagaccgtggccgccagcagcatctacagcatgtacacccagcagcaggcccccggcaagaacttccagcaggccgtgcagagcgccctgaccaagacccacaccagaggcccccacttcagcagcgtgtacggcaagcccgtgatcgccgccgcccagaaccagcagcagcaccccgagaacatctacagcaacagccagggcaagcccggcagccccgagcccgagaccgagcccgtgagcagcgtgcaggagaaccacgagaacgagagaatccccagacccctgagccccaccaagctgctgcccttcctgagcaacccctacagaaaccagagcgacgccgacctggaggccctgagaaagaagctgagcaacgcccccagacccctgaagaagagaagcagcatcaccgagcccgagggccccaacggccccaacatccagaagctgctgtaccagagaaccaccatcgccgccatggagaccatcagcgtgcccagctaccccagcaagagcgccagcgtgaccgccagcagcgagagccccgtggagatccagaacccctacctgcacgtggagcccgagaaggaggtggtgagcctggtgcccgagagcctgagccccgaggacgtgggcaacgccagcaccgagaacagcgacatgcccgcccccagccccggcctggactacgagcccgagggcgtgcccgacaacagccccaacctgcagaacaaccccgaggagcccaaccccgaggccccccacgtgctggacgtgtacctggaggagtaccccccctaccccccccccccctaccccagcggcgagcccgagggccccggcgaggacagcgtgagcatgagaccccccgagatcaccggccaggtgagcctgccccccggcaagagaaccaacctgagaaagaccggcagcgagagaatcgcccacggcatgagagtgaagttcaaccccctggccctgctgctggacagcagcctggagggcgagttcgacctggtgcagagaatcatctacgaggtggacgaccccagcctgcccaacgacgagggcatcaccgccctgcacaacgccgtgtgcgccggccacaccgagatcgtgaagttcctggtgcagttcggcgtgaacgtgaacgccgccgacagcgacggctggacccccctgcactgcgccgccagctgcaacaacgtgcaggtgtgcaagttcctggtggagagcggcgccgccgtgttcgccatgacctacagcgacatgcagaccgccgccgacaagtgcgaggagatggaggagggctacacccagtgcagccagttcctgtacggcgtgcaggagaagatgggcatcatgaacaagggcgtgatctacgccctgtgggactacgagccccagaacgacgacgagctgcccatgaaggagggcgactgcatgaccatcatccacagagaggacgaggacgagatcgagtggtggtgggccagactgaacgacaaggagggctacgtgcccagaaacctgctgggcctgtaccccagaatcaagcccagacagagaagcctggcctag

SEQ ID NO: 29665 - DNA, 3405 bp, Artificial Sequence
  derived and/or modified sequence
atgcggttcggcagtaaaatgatgcctatgttcctcaccgtttatttaagtaataatgagcaacatttcactgaagtgccagtcacgcctgaaacaatttgtagagatgtcgtggacttgtgcaaagagcctggcgagtccgattgccacctcgctgaggtgtggtgtgggtccgagcgaccagtcgcagacaacgagcgaatgttcgacgttctgcaacggttcggctctcagcgaaacgaagtcagattttttctaaggcatgagcgcccacctggtagagacattgtgagcggaccgcgcagtcaggacccatctctaaaaaggaatggcgtgaaggtgccaggtgagtatcgcagaaaggagaatggtgtgaactcccctaggatggatctgacactggcggagctacaggagatggcaagtcgccagcagcagcagattgaggcgcagcagcagctgctggcaactaaagaacagagactgaagttcctgaaacagcaagaccagcgccagcaacagcaagtggcagaacaggagaaacttaagcgactcaaggagattgctgagaaccaggaggccaaactgaaaaaggtgagagctctgaaaggacacgttgaacaaaaacgcctaagcaatggaaaactagtggaagagattgagcagatgaataacctcttccagcagaaacagcgtgagctagtcctcgcagttagcaaagtcgaagaactgacccgccagctggaaatgctgaaaaatggccgcattgattcacaccacgacaaccagtctgcggtggcagagctggatcgcctttacaaagaactgcagctacggaataagctgaaccaggaacaaaatgcgaagctgcagcagcagcgtgagtgcttaaacaaaaggaattccgaagttgccgttatggataaacgtgtgaacgaactgcgcgaccggctttggaagaaaaaagctgcactgcagcagaaagaaaatctgccagtttcatctgacgggaacctcccccaacaagcagcgtccgcacctagtagagttgctgcagttgggccctacatacagtccagcaccatgccccgaatgccttcacgaccagagctcctcgtgaagcctgctctgcctgacggttctcttgttatccaagcgtccgagggacctatgaagatccagactttgcccaatatgcgcagcggagcagcttcacagactaaaggctctaagattcaccctgtgggacctgactggtctccctcgaatgcagacctattcccgagccaagggtccgcttctgtgccgcagtccaccggcaacgccctggaccaggtggatgacggggaggtgcccctccgtgagaaggaaaagaaggtacgcccgttttcaatgtttgacgcggtggaccagtccaatgctccaccctcattcggcaccctgagaaaaaaccaaagttctgaggatatacttagggatgcccaggttgcgaacaaaaacgtagcaaaggtgcctcctcccgtgcctacaaaacctaagcagatcaaccttccttacttcggccagacaaatcaaccgccttctgacattaagcctgatgggagttcacagcaattgagcaccgttgtgccatcaatgggaaccaagcctaaacctgcagggcaacaaccacgcgtgctcctgagtccttcaataccctctgtgggccaggatcaaacactgtcaccgggttctaagcaagaatcacctccagcagcagccgtccgccctttcacgccccagcccagtaaggatactctcctgcccccgttccgaaagcctcagacggtagccgcctcctctatctatagcatgtacacccagcaacaggctcccggcaagaacttccagcaggctgtccagtccgccctgaccaagactcacactcggggccctcatttctcctcggtttacgggaagcccgtgatcgctgctgcccaaaaccagcagcagcatcctgagaatatttactccaattcgcagggaaaaccggggagtcccgaacccgaaaccgagcctgtttcttctgtgcaggaaaatcacgaaaatgagaggatacctcgaccgctctccccaaccaagttactacccttcctaagtaacccttatcggaatcagtcggacgctgatcttgaagccctgcgtaagaagctgagtaacgcacccaggccccttaagaagcgatctagcattactgagcctgagggacccaacggccctaacattcagaagctcctgtatcagcgaactacaatcgctgctatggagacaattagcgttccttcctacccaagcaagagcgcatcagtgactgcctctagtgagtcacctgtggagatccagaacccatatttacacgtcgagcctgagaaagaagtggtatctctagtgcctgaatccctcagccccgaggatgtcgggaacgcatcaactgagaacagtgacatgcccgcaccaagcccagggttagattatgagcccgagggtgtgcccgataatagcccaaatctgcagaataatcctgaagaacccaatccagaagcaccgcacgtcctggacgtgtatctcgaggagtatccaccttaccctcctcccccctatccctctggggaacccgagggccccggtgaagacagtgtgtctatgaggccgcccgagatcacaggccaggtttccctgccacctggcaaacgaacaaacctgaggaagaccggcagcgagcgtatcgcacatgggatgcgcgtgaaatttaatcctctagctctcttactggatagcagtttggagggcgagtttgacttggtacaacgaatcatctatgaggtagatgatcctagcctgcccaatgacgaggggattacggccctgcacaacgcagtatgcgctggccacacggagatagttaagtttcttgtgcagtttggcgttaacgtgaacgctgcagactctgacgggtggacacctttacattgtgccgcaagttgcaataacgtgcaggtttgtaagttcctagtggagtctggagcagccgtgtttgcgatgacgtattcagacatgcagacagccgcagacaaatgcgaggagatggaagagggctatactcagtgttctcagtttctttatggagtgcaagagaagatggggattatgaacaaaggggtgatttacgccttgtgggactatgagcctcagaacgacgacgagctgccaatgaaagagggggactgcatgaccatcatccatagggaagatgaagacgagatagagtggtggtgggctagacttaatgataaggagggctatgtgcctagaaacctcctgggcctgtaccctagaatcaaaccccgccagagatcacttgcctag

SEQ ID NO: 29666 - DNA, 3405 bp, Artificial Sequence
  derived and/or modified sequence
atgagatttggcagcaagatgatgcccatgttcctgactgtgtacctgagcaacaatgagcagcacttcacagaggtgcctgtgaccccagagaccatctgcagagatgtggtggacctgtgcaaggagcccggggagagtgactgccacctggccgaggtgtggtgtggcagcgagaggcctgtggccgacaatgaaagaatgtttgatgtgctgcagagatttggcagccagagaaatgaggtgcgcttcttcctgcggcatgagaggcctcctggccgggacatcgtgtctggccccaggagccaggaccccagcctgaagagaaatggagtgaaggtgcctggagagtacagaagaaaagaaaatggagtgaacagccccaggatggacctgaccctggccgagctgcaggagatggccagccggcagcagcagcagatcgaggcccagcagcagctgctggccaccaaggagcagaggctgaagttcctgaagcagcaggaccagaggcagcagcagcaggtggccgagcaggagaagctgaagaggctgaaggagattgctgagaaccaggaggccaagctgaagaaggtgcgggccctgaagggccacgtggagcagaagaggctgagcaatggcaagctggtggaggagattgagcagatgaacaacctcttccagcagaagcagcgggagctggtgctggccgtgtccaaggtggaggagctgacccggcagctggagatgctgaagaatggaagaattgacagccaccacgacaaccagagcgctgtggccgagctggaccggctgtacaaggagctgcagctgaggaacaagctgaaccaggagcagaatgccaagctgcagcagcagagagaatgtctgaacaagaggaacagcgaggtggccgtgatggacaagagggtgaatgagctgcgggaccggctgtggaagaagaaggccgccctgcagcagaaggagaacctgcctgtgtccagtgatggcaacctgccccagcaggccgccagcgcccccagccgggtggccgctgtgggcccctacatccagagcagcaccatgcccaggatgcccagcaggcctgagctgctggtgaagccagccctgcctgatggcagcctggtgatccaggccagcgagggccccatgaagatccagaccctgcccaacatgaggtctggagctgccagccagaccaagggcagcaagatccaccctgtgggccctgactggagccccagcaatgctgacctcttccccagccagggcagcgcctctgtgccccagagcactggaaatgccctggaccaggtggatgatggagaggtgcccctgcgggagaaggagaagaaggtgcggcccttctccatgtttgatgctgtggaccagagcaatgcccctccttcctttggcaccctgaggaagaaccagagcagcgaggacatcctgagagatgcccaggtggccaacaagaatgtggccaaggtgcccccacctgtgcccaccaagcccaagcagatcaacctgccctacttcggccagaccaaccagccccccagcgacatcaagccagatggcagcagccagcagctgagcacagtggtgcccagcatgggcaccaagcccaagccagctggccagcagccccgggtgctgctgagccccagcatccccagcgtgggccaggaccagaccctgagccctggcagcaagcaggagagccccccagctgctgctgtgcggcccttcaccccccagcccagcaaggacaccctgctgccccccttcaggaagccccagacagtggccgccagcagcatctacagcatgtacacccagcagcaggcccctgggaagaacttccagcaggccgtgcagagcgccctgaccaagacccacacccggggcccccacttcagctctgtgtatggcaagcctgtgattgctgctgcccagaaccagcagcagcaccctgagaacatctacagcaacagccagggcaagccaggcagccctgagcctgagacagagcctgtgtcctctgtgcaggagaaccatgaaaatgaaagaatcccccggcccctgagccccaccaagctgctgcccttcctgagcaacccctacagaaaccagagtgatgctgacctggaggccctgaggaagaagctgagcaatgccccccggcccctgaagaagaggagcagcatcacagagcctgagggccccaacggccccaacatccagaagctgctgtaccagaggaccaccatcgccgccatggagaccatctctgtgcccagctaccccagcaagagcgcctctgtgacagccagcagcgagagccctgtggagatccagaacccctacctgcacgtggagcctgagaaggaggtggtgtccctggtgcctgagagcctgagcccagaagatgtgggcaatgccagcacagaaaattctgacatgcctgcccccagccctggcctggactatgagcctgagggcgtgcctgacaacagccccaacctgcagaacaaccctgaggagcccaaccctgaggcccctcatgtgctggatgtgtacctggaggagtacccaccctacccacctccaccctaccccagcggggagcctgagggccctggagaggacagcgtgtccatgaggcctcctgagatcaccggccaggtgtccctgcccccaggcaagaggaccaacctgaggaagacaggcagcgagcgcatcgcccacggcatgagggtgaagttcaaccccctggccctgctgctggacagcagcctggagggggagtttgacctggtgcagaggatcatctatgaggtggatgaccccagcctgcccaatgatgagggcatcacagccctgcacaatgctgtgtgtgccggccacacagagatcgtgaagttcctggtgcagtttggagtgaatgtgaatgctgctgacagtgatggctggacccccctgcactgtgccgccagctgcaacaacgtgcaggtgtgcaagttcctggtggagagcggggctgctgtgtttgccatgacctacagcgacatgcagacagctgctgacaagtgtgaggagatggaggagggctacacccagtgcagccagttcctgtatggagtgcaggagaagatgggcatcatgaacaagggcgtcatctatgccctgtgggactatgagccccagaatgatgatgagctgcccatgaaggagggggactgcatgaccatcatccaccgggaggatgaagatgaaattgagtggtggtgggcccggctgaatgacaaggagggctacgtgcccaggaacctgctgggcctgtacccccgcatcaagccccggcagaggagcctggcctag

SEQ ID NO: 29667 - DNA, 3405 bp, Artificial Sequence
  derived and/or modified sequence
atgcggttcggcagcaagatgatgcccatgttcctgaccgtgtacttaagcaataatgagcaacacttcacagaggtgcctgttactcccgagacaatttgtagagacgtggtcgacctgtgcaaagagccaggggagtctgactgccatcttgcggaagtatggtgtgggtccgaaagaccagtggcggacaacgaacgaatgttcgatgtactccaaagattcggatcacagcgtaatgaggtgagatttttcctcagacatgaacgaccccccggcagagatatcgtaagcgggccccgttctcaagacccttcccttaaaagaaatggcgtcaaagtacctggcgaataccgtagaaaggagaacggcgtgaacagcccccgaatggacctaactttggccgaactacaagagatggcctcccggcagcagcagcagattgaggcccagcagcaactgttagcaaccaaagagcaacgcctgaaatttctgaagcagcaagaccaacggcagcagcaacaggtagcggagcaggaaaagcttaagaggctcaaagaaatcgctgagaaccaggaggcaaagctcaaaaaagtgcgcgcactgaaaggccacgtcgagcagaaacggttgagcaatggaaaactggttgaggaaattgagcagatgaacaatttgtttcaacaaaagcaacgcgagctggtattagcagttagcaaagttgaagaactgacccgacagctggaaatgctcaaaaatggtcgtatagactcacaccatgataatcagtcagctgtggctgaattggatcgattgtacaaagaactacaactgcgaaataagttgaaccaggagcagaatgccaaactgcagcaacagcgcgaatgtttaaataagcgaaacagcgaggtcgcagtgatggataagagggtcaatgaacttcgggaccggctttggaaaaagaaggcagctcttcagcagaaagaaaatcttcctgtgtcttcagatggcaatctgccccaacaagctgcgtctgcgcccagtcgagtggccgccgttggcccctacattcagtccagtacgatgccacggatgccttcgaggccagagcttcttgtgaagccagccctgcctgacggcagcctggtcatccaggccagtgaaggcccaatgaaaatccaaaccctgcccaacatgagatcaggcgccgcatcacaaactaagggttcgaagatccacccagtgggacctgattggagtccctcaaacgctgatctcttcccctcgcagggaagcgcctcagtcccacagagtactggcaatgccctcgatcaggtggacgacggggaggtccccttaagagagaaagagaagaaggtgcggccattctctatgttcgatgctgtcgaccagagcaacgccccaccttcttttggaacactgagaaaaaaccaaagtagcgaagatatactgcgggatgcccaggtggccaacaagaacgtggcaaaggtccccccacccgtaccaacaaagcccaagcaaattaacttaccttactttggccagaccaatcagcctccatctgatataaagcctgatggctcttctcaacagctgtctactgtagttccatcgatgggcaccaagcccaaaccggcggggcagcagcccagggtgctgctgtctccatcaattccttccgttggccaagatcagacactgtctccaggatccaagcaggagtcgccacccgcagctgccgtacgaccctttacgcctcaaccatctaaggatacacttttgcccccattccgaaaaccccaaacggttgctgcctcatcaatttactcgatgtacactcaacagcaggctcccggaaagaatttccagcaagccgtgcaatcggctctgacaaagacccatactagagggccacacttcagctccgtatatggaaaaccagtgattgccgctgcccaaaatcaacagcagcatcctgagaatatctacagtaatagccagggtaagccaggtagtcctgagcctgaaacagagcccgtcagctctgtgcaagaaaaccacgagaatgagaggatcccacgcccgttatcaccaactaaactgctgccgtttctgtccaacccatacaggaatcagtccgatgcagatttggaggccctgaggaaaaagttatccaacgctccacggcctttaaagaagcggagctcaatcactgagccagagggaccaaatggaccgaacatccagaaactcctgtaccagcgcacaactatagccgccatggaaactattagcgttccatcttatccttccaagagcgcaagtgtgaccgcctctagcgaaagtccggtcgagatacagaacccttatctccacgttgaaccagagaaagaggtcgtgtctctcgttccggagtcactttccccagaggacgtgggtaacgcttcgactgaaaatagcgatatgcccgcgccatctccgggactggattacgagccagaaggggtgccagataattctccgaacctgcaaaataatccagaggaacccaaccccgaagcacctcacgtgctagatgtgtacttggaagagtaccccccctatcctcctcctccatatccttctggcgaacctgaggggcccggagaggatagcgtgtctatgaggccgccagagattacagggcaagtctcacttccacccggtaagagaaccaatctccgcaagactggatcggagcgcatagcacatgggatgcgggtgaagtttaacccgctggccctgctgctagatagttctctggaaggggagtttgacttggtgcagaggataatctatgaagttgacgacccttccctgccaaacgacgagggcattactgccctgcataacgcagtgtgcgcgggccacacggaaatcgtgaagttcctcgtgcaatttggcgtcaacgtgaacgctgcggacagcgacggatggactccattgcactgcgccgcttcatgtaataacgtgcaggtgtgtaaattccttgtcgagagcggggctgcggtctttgctatgacatattccgacatgcaaacagcagctgataagtgtgaggaaatggaagagggatacacccagtgcagccagttcttatatggtgtacaagaaaagatgggaattatgaacaagggggttatatacgcattgtgggactacgagcctcagaacgatgatgaactgcccatgaaggaaggcgactgtatgacaataatccatcgggaagacgaagacgagatagaatggtggtgggccaggctgaacgataaggaaggctacgtaccacggaatcttctaggtctttacccacgcattaaaccccgccaacgcagcctcgcatag

SEQ ID NO: 29668 - DNA, 3405 bp, Artificial Sequence
  derived and/or modified sequence
atgaggttcgggagcaaaatgatgccgatgtttctcactgtgtacttgtccaacaacgaacagcacttcacagaagttccagtcactcccgaaacaatttgtagggatgtggtcgatctgtgcaaggaacccggagagtcggattgccacttggctgaagtctggtgcgggtccgagagaccagtggccgataacgagaggatgtttgatgtgttacagaggtttggaagtcagcgtaatgaggttcgattcttcttgcgtcacgagcgtccacctggacgtgacattgtgagtgggcctcgctctcaggatcctagtctgaagagaaatggagttaaggtccccggagagtatagacggaaagaaaatggagtgaattcaccgagaatggacttaactctcgctgagctgcaagaaatggcgagccggcaacaacagcagatcgaagctcagcaacagctattggccacgaaggaacaaagactgaagttcttgaagcagcaagaccagcgacaacagcaacaagtcgccgaacaggagaagctgaagaggctgaaggaaatcgccgagaaccaggaggcgaaattaaaaaaggttagagctctcaaagggcatgttgagcaaaagagactgtccaatggaaagcttgtagaggagatcgaacagatgaataacttatttcagcaaaaacagcgggaattagtgttggcggtgtcaaaggtggaggagctcacaaggcagcttgaaatgctcaagaacggtcgtatagactctcaccacgataaccagtctgcggttgctgaactcgatcggctgtacaaggagctacaactcagaaataaactcaaccaagagcagaacgccaagcttcagcaacagcgcgaatgtctgaacaaacggaactccgaggtagctgttatggataagcgagttaatgagctcagagaccgtctatggaaaaaaaaggccgctctccagcagaaggagaatcttcctgtgtcttccgatggcaatctaccccagcaggcagcttcggcaccaagccgtgttgctgccgtcggaccatacatccaaagctcgactatgccacggatgccgtctaggcctgagctgttagtgaagcctgctttgccagacggcagtttagtaatccaggcatcggaaggtcccatgaagatccagaccctccctaatatgcgttcgggagccgcttctcagactaaggggtctaaaattcaccccgtgggacctgactggtctccaagtaatgcggatctgttcccatctcaggggtcagcctctgtgccccaaagcactggtaatgccttggatcaggttgatgatggcgaggtacccctgcgcgagaaggaaaagaaggtgcggccattctcaatgtttgacgccgttgaccagtccaacgccccaccgtccttcggcactcttcggaagaatcagtctagtgaagatatcctgcgcgacgctcaggtggccaacaagaatgtagctaaggtgccaccgccagtgcccactaaacccaaacagattaacttgccatacttcgggcaaacaaaccagccaccttctgatattaagcccgacggctcttcccaacagctgtcaactgttgtgccatctatgggcacaaagccgaaaccggctggacagcaacccagggtcctactgagcccctctatcccttcagtgggccaggaccagaccctctctcctggaagcaaacaggagtcacctccagcagcagccgtcaggccttttaccccacagccatccaaagataccttactcccgccattccgcaaaccgcagacagtagctgcgagctcgatctattccatgtatacacagcagcaggctcccggtaagaacttccagcaggccgtccaatctgccctgactaagacgcatacacgcggaccacatttctcatccgtctacggaaaacccgtaatagccgcagctcagaatcagcagcagcacccggaaaacatctattccaatagtcagggcaaacccggaagcccggagcctgaaaccgaacccgtgtctagcgtgcaggagaatcacgaaaacgagagaattcccagacctttatcacccactaagcttcttccgtttctcagcaacccttatcgtaaccaaagcgatgccgatctggaagccctcaggaagaagctgtcaaacgccccacggcctcttaagaaacggagtagcataacggaaccagaaggcccaaacgggcctaacatccagaaacttctgtaccaacgtacaaccatcgcggcaatggaaacaatttcggtgccttcatatccctcaaaatcagccagtgtcaccgctagcagcgagtctcccgttgaaattcaaaatccgtatcttcatgtggaaccagaaaaggaagtagtgtctctagtgcccgagagtttatcccccgaggatgtgggcaacgcttctaccgagaattctgatatgccggctccaagtcccggactcgactatgagccagaaggagtaccggacaatagtccaaacctacagaacaatcccgaagagcccaatcccgaagctccacatgttctcgatgtgtacctcgaggagtatccaccttacccaccccctccgtatccaagcggcgaacccgagggccctggcgaggactccgtgagtatgaggccaccagagattacagggcaggtatcgcttcctccaggaaaacgcacaaacctaagaaaaactggtagcgaaaggattgcccacggcatgagagttaagttcaatccactggcgctcttactcgattctagcttagagggcgagtttgatctggtgcagcgtatcatctacgaagtggatgacccgtcactcccgaacgacgaaggtataaccgcgctacataacgcagtgtgtgccggtcatacggaaatcgtgaagttcctggtgcaatttggtgtcaatgtaaatgccgctgactccgacgggtggacaccacttcattgcgcagctagctgtaacaatgtgcaggtatgcaagttccttgtggaatcaggggcagcagtatttgcaatgacctatagcgacatgcagactgcagccgataaatgcgaagagatggaagaaggctacacccaatgctcccagttcctctacggtgtccaggaaaagatgggcataatgaataagggggtgatctacgctctgtgggactatgaaccacagaacgatgacgagctccccatgaaagaaggggattgtatgaccattatccatagggaagatgaagacgagatcgagtggtggtgggcccgactcaacgacaaggagggctacgtgccacggaacctcctcggactctatccgcgtatcaagcccagacaacggagcttagcttag

SEQ ID NO: 29669 - DNA, 4651 bp, Artificial Sequence
  derived and/or modified sequence
gctggggcccgacccgggattagttggtttcggagcggaggagggagccccgaccgtcacgagcgtcgaagagacaaagccgcgtcagggggcccggccggggcgggggagcccggggcttgttggtgccccagcccgcgcggagggcccttcggacccgcgcgccgccgctgccgccgccgccgcctcgcaacaggtccgggcggcctcgctctccgctcccctcccccgcatccgcgaccctccggggcacctcagctcggccggggccgcagtctggccacccgcttccatgcggttcgggtccaagatgatgccgatgtttcttaccgtgtatctcagtaacaatgagcagcacttcacagaagttccagttactccagaaacaatatgcagagacgtggtggatctgtgcaaagaacccggcgagagtgattgccatttggctgaagtgtggtgtggctctgaacgtccagttgcggataatgagcgaatgtttgatgttcttcaacgatttggaagtcagaggaacgaagttcgcttcttccttcgtcatgaacgcccccctggcagggacattgtgagtggaccaagatctcaggatccaagtttaaaaagaaatggtgtaaaagttcctggtgaatatcgaagaaaggagaacggtgttaatagtcctaggatggatctgactcttgctgaacttcaggaaatggcatctcgccagcagcaacagattgaagcccagcaacaattgctggcaactaaggaacagcgcttaaagtttttgaaacaacaagatcagcgacaacagcaacaagttgctgagcaggagaaacttaaaaggctaaaagaaatagctgagaatcaggaagctaagctaaaaaaagtgagagcacttaaaggccacgtggaacagaagagactaagcaatgggaaacttgtggaggaaattgaacagatgaataatttgttccagcaaaaacagagggagctcgtcctggctgtgtcaaaagtagaagaactgaccaggcagctagagatgctcaagaacggcaggatcgacagccaccatgacaatcagtctgcagtggctgagcttgatcgcctctataaggagctgcagctaagaaacaaattgaatcaagagcagaatgccaagctacaacaacagagggagtgtttgaataagcgtaattcagaagtggcagtcatggataagcgtgttaatgagctgagggaccggctgtggaagaagaaggcagctctacagcaaaaagaaaatctaccagtttcatctgatggaaatcttccccagcaagccgcgtcagccccaagccgtgtggctgcagtaggtccctatatccagtcgtctactatgcctcggatgccctcaaggcctgaattgctggtgaagccagccctgccggatggttccttggtcattcaggcttcagaggggccgatgaaaatacagacactgcccaacatgagatctggggctgcttcacaaactaaaggctctaaaatccatccagttggccctgattggagtccttcaaatgcagatcttttcccaagccaaggctctgcttctgtacctcaaagcactgggaatgctctggatcaagttgatgatggagaggttccgctgagggagaaagagaagaaagtgcgtccgttctcaatgtttgatgcagtagaccagtccaatgccccaccttcctttggtactctgaggaagaaccagagcagtgaagatatcttgcgggatgctcaggttgcaaataaaaatgtggctaaagtaccacctcctgttcctacaaaaccaaaacagattaatttgccttattttggacaaactaatcagccaccttcagacattaagccagacggaagttctcagcagttgtcaacagttgttccgtccatgggaactaaaccaaaaccagcagggcagcagccgagagtgctgctatctcccagcataccttcggttggccaagaccagaccctttctccaggttctaagcaagaaagtccacctgctgctgccgtccggccctttactccccagccttccaaagacaccttacttccacccttcagaaaaccccagaccgtggcagcaagttcaatatattccatgtatacgcaacagcaggcgccaggaaaaaacttccagcaggctgtgcagagcgcgttgaccaagactcataccagagggccacacttttcaagtgtatatggtaagcctgtaattgctgctgcccagaatcaacagcagcacccagagaacatttattccaatagccagggcaagcctggcagtccagaacctgaaacagagcctgtttcttcagttcaggagaaccatgaaaacgaaagaattcctcggccactcagcccaactaaattactgcctttcttatctaatccttaccgaaaccagagtgatgctgacctagaagccttacgaaagaaactgtctaacgcaccaaggcctctaaagaaacgtagttctattacagagccagagggtcctaatgggccaaatattcagaagcttttatatcagaggaccaccatagcggccatggagaccatctctgtcccatcatacccatccaagtcagcttctgtgactgccagctcagaaagcccagtagaaatccagaatccatatttacatgtggagcccgaaaaggaggtggtctctctggttcctgaatcattgtccccagaggatgtggggaatgccagtacagagaacagtgacatgccagctccttctccaggccttgattatgagcctgagggagtcccagacaacagcccaaatctccagaataacccagaagaaccaaatccagaggctccacatgtgcttgatgtgtacctggaggagtaccctccatacccacccccaccatacccatctggggagcctgaagggcccggagaagactcggtgagcatgcgcccgcctgaaatcaccgggcaggtctctctgcctcctggtaaaaggacaaacttgcgtaaaactggctcagagcgtatcgctcatggaatgagggtgaaattcaacccccttgctttactgctagattcgtctttggagggagaatttgaccttgtacagagaattatttatgaggttgatgacccaagcctccccaatgatgaaggcatcacggctcttcacaatgctgtgtgtgcaggccacacagaaatcgttaagttcctggtacagtttggtgtaaatgtaaatgctgctgatagtgatggatggactccattacattgtgctgcctcatgtaacaacgtccaagtgtgtaagtttttggtggagtcaggagccgctgtgtttgccatgacctacagtgacatgcagactgctgcagataagtgcgaggaaatggaggaaggctacactcagtgctcccaatttctttatggagttcaggagaagatgggcataatgaataaaggagtcatttatgcgctttgggattatgaacctcagaatgatgatgagctgcccatgaaagaaggagactgcatgacaatcatccacagggaagacgaagatgaaatcgaatggtggtgggcgcgccttaatgataaggagggatatgttccacgtaacttgctgggactgtacccaagaattaaaccaagacaaaggagcttggcctgaaacttccacacagaattttagtcaatgaagaattaatctctgttaagaagaagtaatacgattatttttggcaaaaatttcacaagacttattttaatgacaatgtagcttgaaagcgatgaagaatgtctctagaagagaatgaaggattgaagaattcaccattagaggacatttagcgtgatgaaataaagcatctacgtcagcaggccatactgtgttggggcaaaggtgtcccgtgtagcactcagataagtatacagcgacaatcctgttttctacaagaatcctgtctagtaaataggatcatttattgggcagttgggaaatcagctctctgtcctgttgagtgttttcagcagctgctcctaaaccagtcctcctgccagaaaggaccagtgccgtcacatcgctgtctctgattgtccccggcaccagcaggcccttggggggctcacctgaaggctcgaaggcactgcacacttgtatattgtcagtgaagaactgttagttggttgtcagtgaacaataactttattatatgagtttttgtagcatcttaagaattatacatatgtttgaaatattgaaactaagctacggtaccagtaattagatgtagaatcttgtttgtaggctgaattttaatctgtatttattgtcttttgtatctcagaaattagaaacttgctacagacttacccgtaatatttgtcaagatcatagctgactttaaaaacagttgtaataaactttttgatgctagctgtttactggtttttgtttttgatgtcataaatagaccttgtttaatagtcacaagccgttgggatatcatacccagctgaaaaagaacaaactgcttaacataagtatatgtatcgtaataagagttttttaccagctaagtgattcaatgtaagtggtttttaaaataaaatactgtagagatca

SEQ ID NO: 29670 - DNA, 4741 bp, Artificial Sequence
  derived and/or modified sequence
gggagccccgaccgtcacgagcgtcgaagagacaaagccgcgtcagggggcccggccggggcgggggagcccggggcttgttggtgccccagcccgcgcggagggcccttcggacccgcgcgccgccgctgccgccgccgccgcctcgcaacaggtccgggcggcctcgctctccgctcccctcccccgcatccgcgaccctccggggcacctcagctcggccggggccgcagtctggccacccgcttccatgcggttcgggtccaagatgatgccgatgtttcttaccgtgtatctcagtaacaatgagcagcacttcacagaagttccagttactccagaaacaatatgcagagacgtggtggatctgtgcaaagaacccggcgagagtgattgccatttggctgaagtgtggtgtggctctgtagagatagagtttcatcatgttggccaggatggtctcgatctcctgaccttgtgatccgcctgcctcggcctcccaaagtgctggattacaggtgtgagccaccacgatcagcctctagtgtttaaaaaagaacgtccagttgcggataatgagcgaatgtttgatgttcttcaacgatttggaagtcagaggaacgaagttcgcttcttccttcgtcatgaacgcccccctggcagggacattgtgagtggaccaagatctcaggatccaagtttaaaaagaaatggtgtaaaagttcctggtgaatatcgaagaaaggagaacggtgttaatagtcctaggatggatctgactcttgctgaacttcaggaaatggcatctcgccagcagcaacagattgaagcccagcaacaattgctggcaactaaggaacagcgcttaaagtttttgaaacaacaagatcagcgacaacagcaacaagttgctgagcaggagaaacttaaaaggctaaaagaaatagctgagaatcaggaagctaagctaaaaaaagtgagagcacttaaaggccacgtggaacagaagagactaagcaatgggaaacttgtggaggaaattgaacagatgaataatttgttccagcaaaaacagagggagctcgtcctggctgtgtcaaaagtagaagaactgaccaggcagctagagatgctcaagaacggcaggatcgacagccaccatgacaatcagtctgcagtggctgagcttgatcgcctctataaggagctgcagctaagaaacaaattgaatcaagagcagaatgccaagctacaacaacagagggagtgtttgaataagcgtaattcagaagtggcagtcatggataagcgtgttaatgagctgagggaccggctgtggaagaagaaggcagctctacagcaaaaagaaaatctaccagtttcatctgatggaaatcttccccagcaagccgcgtcagccccaagccgtgtggctgcagtaggtccctatatccagtcgtctactatgcctcggatgccctcaaggcctgaattgctggtgaagccagccctgccggatggttccttggtcattcaggcttcagaggggccgatgaaaatacagacactgcccaacatgagatctggggctgcttcacaaactaaaggctctaaaatccatccagttggccctgattggagtccttcaaatgcagatcttttcccaagccaaggctctgcttctgtacctcaaagcactgggaatgctctggatcaagttgatgatggagaggttccgctgagggagaaagagaagaaagtgcgtccgttctcaatgtttgatgcagtagaccagtccaatgccccaccttcctttggtactctgaggaagaaccagagcagtgaagatatcttgcgggatgctcaggttgcaaataaaaatgtggctaaagtaccacctcctgttcctacaaaaccaaaacagattaatttgccttattttggacaaactaatcagccaccttcagacattaagccagacggaagttctcagcagttgtcaacagttgttccgtccatgggaactaaaccaaaaccagcagggcagcagccgagagtgctgctatctcccagcataccttcggttggccaagaccagaccctttctccaggttctaagcaagaaagtccacctgctgctgccgtccggccctttactccccagccttccaaagacaccttacttccacccttcagaaaaccccagaccgtggcagcaagttcaatatattccatgtatacgcaacagcaggcgccaggaaaaaacttccagcaggctgtgcagagcgcgttgaccaagactcataccagagggccacacttttcaagtgtatatggtaagcctgtaattgctgctgcccagaatcaacagcagcacccagagaacatttattccaatagccagggcaagcctggcagtccagaacctgaaacagagcctgtttcttcagttcaggagaaccatgaaaacgaaagaattcctcggccactcagcccaactaaattactgcctttcttatctaatccttaccgaaaccagagtgatgctgacctagaagccttacgaaagaaactgtctaacgcaccaaggcctctaaagaaacgtagttctattacagagccagagggtcctaatgggccaaatattcagaagcttttatatcagaggaccaccatagcggccatggagaccatctctgtcccatcatacccatccaagtcagcttctgtgactgccagctcagaaagcccagtagaaatccagaatccatatttacatgtggagcccgaaaaggaggtggtctctctggttcctgaatcattgtccccagaggatgtggggaatgccagtacagagaacagtgacatgccagctccttctccaggccttgattatgagcctgagggagtcccagacaacagcccaaatctccagaataacccagaagaaccaaatccagaggctccacatgtgcttgatgtgtacctggaggagtaccctccatacccacccccaccatacccatctggggagcctgaagggcccggagaagactcggtgagcatgcgcccgcctgaaatcaccgggcaggtctctctgcctcctggtaaaaggacaaacttgcgtaaaactggctcagagcgtatcgctcatggaatgagggtgaaattcaacccccttgctttactgctagattcgtctttggagggagaatttgaccttgtacagagaattatttatgaggttgatgacccaagcctccccaatgatgaaggcatcacggctcttcacaatgctgtgtgtgcaggccacacagaaatcgttaagttcctggtacagtttggtgtaaatgtaaatgctgctgatagtgatggatggactccattacattgtgctgcctcatgtaacaacgtccaagtgtgtaagtttttggtggagtcaggagccgctgtgtttgccatgacctacagtgacatgcagactgctgcagataagtgcgaggaaatggaggaaggctacactcagtgctcccaatttctttatggagttcaggagaagatgggcataatgaataaaggagtcatttatgcgctttgggattatgaacctcagaatgatgatgagctgcccatgaaagaaggagactgcatgacaatcatccacagggaagacgaagatgaaatcgaatggtggtgggcgcgccttaatgataaggagggatatgttccacgtaacttgctgggactgtacccaagaattaaaccaagacaaaggagcttggcctgaaacttccacacagaattttagtcaatgaagaattaatctctgttaagaagaagtaatacgattatttttggcaaaaatttcacaagacttattttaatgacaatgtagcttgaaagcgatgaagaatgtctctagaagagaatgaaggattgaagaattcaccattagaggacatttagcgtgatgaaataaagcatctacgtcagcaggccatactgtgttggggcaaaggtgtcccgtgtagcactcagataagtatacagcgacaatcctgttttctacaagaatcctgtctagtaaataggatcatttattgggcagttgggaaatcagctctctgtcctgttgagtgttttcagcagctgctcctaaaccagtcctcctgccagaaaggaccagtgccgtcacatcgctgtctctgattgtccccggcaccagcaggcccttggggggctcacctgaaggctcgaaggcactgcacacttgtatattgtcagtgaagaactgttagttggttgtcagtgaacaataactttattatatgagtttttgtagcatcttaagaattatacatatgtttgaaatattgaaactaagctacggtaccagtaattagatgtagaatcttgtttgtaggctgaattttaatctgtatttattgtcttttgtatctcagaaattagaaacttgctacagacttacccgtaatatttgtcaagatcatagctgactttaaaaacagttgtaataaactttttgatgctagctgtttactggtttttgtttttgatgtcataaatagaccttgtttaatagtcacaagccgttgggatatcatacccagctgaaaaagaacaaactgcttaacataagtatatgtatcgtaataagagttttttaccagctaagtgattcaatgtaagtggtttttaaaataaaatactgtagagatca

SEQ ID NO: 29671 - protein, 795 aa, Artificial Sequence
  derived and/or modified sequence
MTSGATRYRLSCSLRGHELDVRGLVCCAYPPGAFVSVSRDRTTRLWAPDSPNRSFTEMHCMSGHSNFVSCVCIIPSSDIYPHGLIATGGNDHNICIFSLDSPMPLYILKGHKNTVCSLSSGKFGTLLSGSWDTTAKVWLNDKCMMTLQGHTAAVWAVKILPEQGLMLTGSADKTVKLWKAGRCERTFSGHEDCVRGLAILSETEFLSCANDASIRRWQITGECLEVYYGHTNYIYSISVFPNCRDFVTTAEDRSLRIWKHGECAQTIRLPAQSIWCCCVLDNGDIVVGASDGIIRVFTESEDRTASAEEIKAFEKELSHATIDSKTGDLGDINAEQLPGREHLNEPGTREGQTRLIRDGEKVEAYQWSVSEGRWIKIGDVVGSSGANQQTSGKVLYEGKEFDYVFSIDVNEGGPSYKLPYNTSDDPWLTAYNFLQKNDLNPMFLDQVAKFIIDNTKGQMLGLGNPSFSDPFTGGGRYVPGSSGSSNTLPTADPFTGAGRYVPGSASMGTTMAGVDPFTGNSAYRSAASKTMNIYFPKKEAVTFDQANPTQILGKLKELNGTAPEEKKLTEDDLILLEKILSLICNSSSEKPTVQQLQILWKAINCPEDIVFPALDILRLSIKHPSVNENFCNEKEGAQFSSHLINLLNPKGKPANQLLALRTFCNCFVGQAGQKLMMSQRESLMSHAIELKSGSNKNIHIALATLALNYSVCFHKDHNIEGKAQCLSLISTILEVVQDLEATFRLLVALGTLISDDSNAVQLAKSLGVDSQIKKYSSVSEPAKVSECCRFILNLL

SEQ ID NO: 29672 - DNA, 2388 bp, Artificial Sequence
  derived and/or modified sequence
atgaccagcggcgccaccagatacagactgagctgcagcctgagaggccacgagctggacgtgagaggcctggtgtgctgcgcctacccccccggcgccttcgtgagcgtgagcagagacagaaccaccagactgtgggcccccgacagccccaacagaagcttcaccgagatgcactgcatgagcggccacagcaacttcgtgagctgcgtgtgcatcatccccagcagcgacatctacccccacggcctgatcgccaccggcggcaacgaccacaacatctgcatcttcagcctggacagccccatgcccctgtacatcctgaagggccacaagaacaccgtgtgcagcctgagcagcggcaagttcggcaccctgctgagcggcagctgggacaccaccgccaaggtgtggctgaacgacaagtgcatgatgaccctgcagggccacaccgccgccgtgtgggccgtgaagatcctgcccgagcagggcctgatgctgaccggcagcgccgacaagaccgtgaagctgtggaaggccggcagatgcgagagaaccttcagcggccacgaggactgcgtgagaggcctggccatcctgagcgagaccgagttcctgagctgcgccaacgacgccagcatcagaagatggcagatcaccggcgagtgcctggaggtgtactacggccacaccaactacatctacagcatcagcgtgttccccaactgcagagacttcgtgaccaccgccgaggacagaagcctgagaatctggaagcacggcgagtgcgcccagaccatcagactgcccgcccagagcatctggtgctgctgcgtgctggacaacggcgacatcgtggtgggcgccagcgacggcatcatcagagtgttcaccgagagcgaggacagaaccgccagcgccgaggagatcaaggccttcgagaaggagctgagccacgccaccatcgacagcaagaccggcgacctgggcgacatcaacgccgagcagctgcccggcagagagcacctgaacgagcccggcaccagagagggccagaccagactgatcagagacggcgagaaggtggaggcctaccagtggagcgtgagcgagggcagatggatcaagatcggcgacgtggtgggcagcagcggcgccaaccagcagaccagcggcaaggtgctgtacgagggcaaggagttcgactacgtgttcagcatcgacgtgaacgagggcggccccagctacaagctgccctacaacaccagcgacgacccctggctgaccgcctacaacttcctgcagaagaacgacctgaaccccatgttcctggaccaggtggccaagttcatcatcgacaacaccaagggccagatgctgggcctgggcaaccccagcttcagcgaccccttcaccggcggcggcagatacgtgcccggcagcagcggcagcagcaacaccctgcccaccgccgaccccttcaccggcgccggcagatacgtgcccggcagcgccagcatgggcaccaccatggccggcgtggaccccttcaccggcaacagcgcctacagaagcgccgccagcaagaccatgaacatctacttccccaagaaggaggccgtgaccttcgaccaggccaaccccacccagatcctgggcaagctgaaggagctgaacggcaccgcccccgaggagaagaagctgaccgaggacgacctgatcctgctggagaagatcctgagcctgatctgcaacagcagcagcgagaagcccaccgtgcagcagctgcagatcctgtggaaggccatcaactgccccgaggacatcgtgttccccgccctggacatcctgagactgagcatcaagcaccccagcgtgaacgagaacttctgcaacgagaaggagggcgcccagttcagcagccacctgatcaacctgctgaaccccaagggcaagcccgccaaccagctgctggccctgagaaccttctgcaactgcttcgtgggccaggccggccagaagctgatgatgagccagagagagagcctgatgagccacgccatcgagctgaagagcggcagcaacaagaacatccacatcgccctggccaccctggccctgaactacagcgtgtgcttccacaaggaccacaacatcgagggcaaggcccagtgcctgagcctgatcagcaccatcctggaggtggtgcaggacctggaggccaccttcagactgctggtggccctgggcaccctgatcagcgacgacagcaacgccgtgcagctggccaagagcctgggcgtggacagccagatcaagaagtacagcagcgtgagcgagcccgccaaggtgagcgagtgctgcagattcatcctgaacctgctgtag

SEQ ID NO: 29673 - DNA, 2388 bp, Artificial Sequence
  derived and/or modified sequence
atgacaagtggcgccacaaggtatcggcttagctgctcactccgcggtcacgaactggatgtcagaggcttggtgtgttgtgcctacccaccaggtgccttcgtaagcgtgtctcgtgaccgaacaacacgcttatgggcgcctgatagtcccaaccggtccttcaccgagatgcactgcatgtcaggccactcaaacttcgtcagttgcgtctgcatcatcccgtcctctgacatctatcctcatggcctcattgccacaggcggcaatgatcacaacatatgcatattttccctagactcacctatgccactgtacatccttaagggtcacaagaacaccgtctgttcattgagctctggaaaatttggaacccttttaagcggaagctgggataccactgcaaaggtgtggttaaatgataaatgcatgatgactcttcaagggcacacagccgcagtatgggctgtcaaaattctgcctgaacagggccttatgctcaccggctctgctgacaagacagtaaaactctggaaagctggcagatgtgaacggactttctctgggcacgaagactgtgtccggggactcgcaatcttatctgagacagagttcttgtcatgcgccaacgacgcaagtatccggcgctggcaaataactggggagtgcttggaggtctactacgggcacaccaattatatatacagtatcagtgtgtttcccaattgccgggatttcgtgactacagcagaggataggtcactcaggatctggaagcatggggaatgcgcccagacgataagattacccgcccagtctatctggtgctgttgtgttttagataacggggacattgttgttggggcaagtgacggaatcatccgagtattcactgaatccgaagaccgcaccgcctccgccgaagagatcaaggctttcgaaaaggaattgagccacgccaccattgactccaaaactggggacctgggagatattaacgctgaacagctgcccggccgagagcatttgaatgagccagggacccgggaaggccagacacggctgattagagacggagagaaggtggaggcttaccagtggagtgtcagcgaagggagatggataaagatcggggatgtcgtaggatctagcggggctaaccagcagacatctgggaaggtgctctacgagggcaaggaattcgactatgtcttttctatcgatgtgaacgagggcgggccatcctataagctcccctacaatacttccgacgatccctggctgacggcatacaatttcctgcagaagaatgatctgaaccctatgtttctggaccaggtggctaaattcatcatcgacaataccaagggccagatgctcggattgggcaacccaagtttttcagaccctttcactgggggcggcagatatgtccctggatcatctggaagctccaacactttgcctactgccgacccatttactggtgctggcagatacgtaccagggagtgcaagcatgggaaccactatggcgggagtggacccttttacaggaaatagtgcgtaccgctcagctgccagcaagactatgaacatctattttcccaagaaggaggcagtgacattcgaccaggcgaatccgacacagattctgggaaaactgaaggagctgaacggcacagctccagaggagaaaaaactgaccgaagacgacctcatactgctcgagaagatcctgtcactgatatgtaattctagctccgaaaaacctaccgtccaacagctgcagatactgtggaaagcaattaattgtccagaggacattgtgttcccggctctcgatatcctgcgattatctatcaaacacccttcggtgaacgaaaacttttgcaatgaaaaggaaggtgctcagttttcttcgcacctgattaacctgctgaacccgaaagggaagcccgccaatcagttactcgcgctgagaaccttttgcaactgcttcgtgggccaggccggccagaaacttatgatgtcacagagggagtctctcatgtcacatgctattgaactgaaaagcggatctaacaaaaatatacacatcgcgttagcgacacttgcgctgaattactctgtatgttttcataaggaccacaatattgaaggaaaggcccagtgcctgagcctgatttcaaccattcttgaggtggttcaggatctggaagccacattcagactgttagtggcattgggcacacttatctcagatgactccaacgcggtgcagctggctaaatctttgggagtagactcacaaattaaaaagtactcatccgtcagtgagccggctaaagtgtcagaatgctgtaggttcatactgaatttactgtag

SEQ ID NO: 29674 - DNA, 2388 bp, Artificial Sequence
  derived and/or modified sequence
atgaccagcggggccacccgctaccgcctgagctgcagcctgcggggccacgagctggatgtgcggggcctggtgtgctgtgcctacccacctggggcctttgtgtctgtgtcccgggacaggaccacccggctgtgggccccagacagccccaacagaagcttcacagagatgcactgcatgagcggccacagcaactttgtgtcctgtgtgtgcatcatccccagcagtgacatctacccccacggcctgattgccactggaggaaatgaccacaacatctgcatcttcagcctggacagccccatgcccctgtacatcctgaagggccacaagaacacagtgtgcagcctgagcagcggcaagtttggcaccctgctgagcggctcctgggacaccacagccaaggtgtggctgaatgacaagtgcatgatgaccctgcagggccacacagctgctgtgtgggccgtgaagatcctgcctgagcagggcctgatgctgaccggcagcgctgacaagacagtgaagctgtggaaggccggccgctgtgagaggaccttcagcggccacgaggactgtgtgcggggcctggccatcctgtctgaaacagagttcctgagctgtgccaatgatgccagcatccgccgctggcagatcaccggggagtgcctggaggtgtactacggccacaccaactacatctacagcatcagcgtcttccccaactgccgggactttgtgaccacagcagaagatagaagcctgcgcatctggaagcacggggagtgtgcccagaccatccggctgcctgcccagagcatctggtgctgctgcgtgctggacaacggggacatcgtggtgggcgccagtgatggcatcatccgggtcttcacagaaagtgaggacagaacagccagcgctgaggagatcaaggcctttgagaaggagctgagccacgccaccatcgacagcaagacaggagacctgggggacatcaatgctgagcagctgcccggccgggagcacctgaatgagcccggcacccgggagggccagaccaggctcatcagagatggagagaaggtggaggcctaccagtggagcgtgtctgagggccgctggatcaagattggagatgtggtgggcagcagcggggccaaccagcagaccagcggcaaggtgctgtatgagggcaaggagtttgattatgtgttcagcattgatgtgaatgaaggaggccccagctacaagctgccctacaacaccagtgatgacccctggctgacagcctacaacttcctgcagaagaatgacctgaaccccatgttcctggaccaggtggccaagttcatcatcgacaacaccaagggccagatgctgggcctgggcaaccccagcttcagtgaccccttcaccggcggcggccgctacgtgcccggcagcagcggcagcagcaacaccctgcccacagctgaccccttcaccggggccggccgctacgtgcccggcagcgcctccatgggcaccaccatggccggcgtggaccccttcaccggcaacagcgcctacagatctgctgccagcaagaccatgaacatctacttccccaagaaggaggccgtgacctttgaccaggccaaccccacccagatcctgggcaagctgaaggagctgaatggaacagcccctgaggagaagaagctgacagaagatgacctgatcctgctggagaagatcctgagcctcatctgcaacagcagcagcgagaagcccaccgtgcagcagctgcagatcctgtggaaggccatcaactgcccagaagatattgtgtttcctgccctggacatcctgcggctgagcatcaagcaccccagcgtgaatgaaaacttctgcaatgagaaggagggcgcccagttcagcagccacctgatcaacctgctgaaccccaagggcaagccagccaaccagctgctggccctgcggaccttctgcaactgctttgtgggccaggccggccagaagctgatgatgagccagcgggagagcctgatgagccacgccatcgagctgaagagcggcagcaacaagaacatccacatcgccctggccaccctggccctgaactacagcgtgtgcttccacaaggaccacaacatcgagggcaaggcccagtgcctgagcctcatcagcaccatcctggaggtggtgcaggacctggaggccaccttccggctgctggtggccctgggcaccctcatcagtgatgacagcaatgctgtgcagctggccaagagcctgggcgtggacagccagatcaagaagtacagctctgtgtctgagcccgccaaggtgtctgagtgctgccgcttcatcctgaacctgctgtag

SEQ ID NO: 29675 - DNA, 2388 bp, Artificial Sequence
  derived and/or modified sequence
atgaccagcggcgccacccggtaccggctgagctgcagcctgcggggccacgaactcgatgtgcgggggctggtgtgctgcgcttatccccccggtgctttcgtgtcggtgtccagggacaggaccacccggctctgggcgcccgattcacctaatagatcctttaccgagatgcactgcatgagcggtcactcgaatttcgtgtcttgcgtttgtataattccttcttctgacatttatccgcacggactgatcgctaccggtggaaacgaccacaatatatgtattttcagcctagactcccctatgcctctgtacattctgaaggggcacaagaataccgtctgttctctgtcgtctggcaagttcggcactctgctgtccggtagttgggatactaccgctaaggtttggctcaacgacaaatgtatgatgacactgcagggccacactgccgctgtttgggccgtgaagatcctgcccgaacagggtctaatgctgaccgggtctgcagataaaaccgtgaagctttggaaagcaggcagatgtgagaggaccttctcgggtcacgaagattgtgtgcgcgggttagccattctgagtgaaaccgaattcctgagctgtgccaatgatgcatccatccggcgttggcagatcacaggggaatgtctcgaggtttactacggccatactaactacatttattctatttcagtgtttcccaactgccgtgatttcgtgaccacagcagaagatcggtcactccgaatctggaagcatggagaatgtgcccagactatccggcttccagcccagtccatatggtgctgttgcgtgctcgataacggagatattgtcgtgggggcaagtgacggaattattagagttttcaccgagagtgaggaccggaccgcaagcgctgaagaaatcaaagcattcgagaaagagctgagccacgccactattgatagtaagacaggagatctgggcgacataaatgccgagcagcttccgggccgggaacacctgaatgaaccaggaacccgtgaaggacagactcggctcatccgggatggcgaaaaagtggaggcatatcagtggtctgtgtccgagggcagatggatcaagattggagatgttgtgggctcgagcggcgccaaccagcagactagtggaaaggtgctctacgagggcaaggagtttgattatgtgttctctattgacgtcaacgaagggggcccttcttataaactcccctacaatacaagcgacgatccttggctgacggcctacaattttttacagaaaaatgatcttaacccaatgtttctcgaccaagtggccaagtttataatcgacaacacaaaggggcaaatgcttggcctaggcaacccatctttctccgacccctttaccggcggcggacggtacgtccctggctcatcgggcagcagtaacacgctccccaccgcagatccctttactggcgccgggcgctacgtgcctggcagtgccagcatgggtactactatggctggtgttgatccgtttaccgggaactccgcataccgaagcgcagccagtaagaccatgaatatttactttcccaagaaagaagctgtaacctttgaccaggctaatccgacacaaatcctgggcaagctgaaggaactaaatgggacagcgccagaggagaagaagctaaccgaagatgacttaatccttttagagaaaattctgtctctcatttgcaactcctctagcgagaagcctacagttcagcagctacagatcctgtggaaagcaattaattgtcctgaagatatcgtttttccagcacttgacattctacgactgagtataaagcacccaagtgtgaacgagaacttttgcaacgagaaggagggggctcagtttagcagccatctaatcaatctcctcaatcctaaagggaagccagccaatcagctgctcgcactgcggaccttctgcaattgcttcgtaggtcaggctgggcaaaagcttatgatgtcgcagcgggaatcactaatgtctcacgcaatcgagctgaaaagtgggtctaacaagaacatccatatcgcgctggcaactttggccttaaactatagtgtatgtttccataaagatcataacatcgaagggaaggcccagtgtctgtctctcatctccaccatactcgaagtagtccaggacttggaagcaacctttcgccttcttgtcgccctggggacattgattagcgatgacagcaacgcagtacaactggccaaatccctgggggtggattctcaaattaaaaaatattcctcagtgtccgagcctgccaaggtgtcagagtgctgtagatttattctgaatctgttgtag

SEQ ID NO: 29676 - DNA, 4234 bp, Artificial Sequence
  derived and/or modified sequence
cacaaactgttgggcccggagtcggaagagacccgggtttgggaaggaccccagggtcaggcgtcctggtggaagggcgggcctctttctctcttgctcagcagggagtccagagccctggaggaaagccagctcagctccgcatcggcgtcggcggttgggacgcacacactctgcgtcatggagggctgaggccgatgatgaattccggagtgcctgtcaggcttgctgtgtcactcggcccgctcggcgcgccccttcccagccgcccttccgtaccggctctcgggctcttccggtctccggccgccccttacctgcaggctcttctcccgccgcggcccggcgctctccgagtcgcccctgcggactggtctcgcacagtgcctgggcaccgggcgccagacagacactggccatgacgagcggcgcaaccaggtaccggctgagctgctcgctccggggccacgagctggacgtacggggcctggtgtgctgcgcctatccgccgggagcctttgtgtccgtgtcccgagaccgcaccacccgcctctgggccccagacagtccaaacaggagctttacagaaatgcactgtatgagtggccattccaattttgtatcttgtgtatgcatcataccctcaagtgacatctaccctcatggcctaattgccaccggtggaaatgaccacaatatatgcattttctcactggacagtccaatgccactttatattctaaaaggccacaaaaatactgtttgtagtctatcatctggaaaatttgggacattacttagtggttcatgggacaccactgctaaagtctggctgaatgacaagtgcatgatgaccttgcagggtcatacagctgcagtgtgggcggtaaagatcttacctgaacagggcttaatgttgactggatcagcagacaagactgttaaactgtggaaggctggaagatgtgagaggactttttcagggcatgaagactgtgtaagaggtttggcaattttgagtgaaacagaatttctttcctgtgcaaatgatgctagtattagaaggtggcaaatcactggcgagtgtcttgaagtatattatggacatacaaattatatttatagcatatccgtttttccaaattgtagagactttgtgacaacagcagaggacagatctctgagaatctggaaacatggggaatgtgctcaaactatccgacttccagctcagtctatatggtgctgctgtgtgctcgacaatggtgacattgtggttggtgcgagtgatggcattattagagtgtttacagaatcagaagatcgaacagcaagtgctgaagaaatcaaggcttttgaaaaagaactgtctcacgcaaccattgattctaaaactggcgatttaggggacatcaatgctgagcagcttcctgggagggaacatcttaatgaacctggtactagagaaggacagactcgtctaatcagagatggggagaaagtcgaagcctatcagtggagtgttagtgaagggaggtggataaaaattggtgatgttgttggctcatctggtgctaatcagcaaacatctggaaaagttttatatgaagggaaagaatttgattatgttttctcaattgatgtcaatgaaggtggaccatcatataaattgccatataataccagtgatgacccttggttaactgcatacaacttcttacagaagaatgatttgaatcctatgtttctggatcaagtagctaaatttattattgataacacaaaaggtcaaatgttgggacttgggaatcccagcttttcagatccatttacaggtggtggtcggtatgttccgggctcttcgggatcttctaacacactacccacagcagatccttttacaggtgctggtcgttatgtaccaggttctgcaagtatgggaactaccatggccggagttgatccatttacagggaatagtgcctaccgatcagctgcatctaaaacaatgaatatttatttccctaaaaaagaggctgtcacatttgaccaagcaaaccctacacaaatattaggtaaactgaaggaacttaatggaactgcacctgaagagaagaagttaactgaggatgacttgatacttcttgagaagatactgtctctaatatgtaatagttcttcagaaaaacccacagtccagcaacttcagattttgtggaaagctattaactgtcctgaagatattgtctttcctgcacttgacattcttcggttgtcaattaaacaccccagtgtgaatgagaacttctgcaatgaaaaggaaggggctcagttcagcagtcatcttatcaatcttctgaaccctaaaggaaagccagcaaaccagctgcttgctctcaggactttttgcaattgttttgttggccaggcaggacaaaaactcatgatgtcccagagggaatcactgatgtcccatgcaatagaactgaaatcagggagcaataagaacattcacattgctctggctacattggccctgaactattctgtttgttttcataaagaccataacattgaagggaaagcccaatgtttgtcactaattagcacaatcttggaagtagtacaagacctagaagccacttttagacttcttgtggctcttggaacacttatcagtgatgattcaaatgctgtacaattagccaagtctttaggtgttgattctcaaataaaaaagtattcctcagtatcagaaccagctaaagtaagtgaatgctgtagatttatcctaaatttgctgtagcagtggggaagagggacggatatttttaattgattagtgtttttttcctcacatttgacatgactgataacagataattaaaaaaagagaatacggtggattaagtaaaattttacatcttgtaaagtggtggggaggggaaacagaaataaaatttttgcactgctgaactgtgagattttcctgtgtaatttgggtagattttcaagagtgtgaacacaaatttaaaataagctataatcagcaacaacacaatgacaatgacatcttccccttaccttagccactaagaagacaagggctgttactcatataacttgcttttattacttaatgtacaccaaactgttgttgtcaattatcttttatttaacttctccaccttcattgctagatccttcgaacagcactgatacatttcaaggtcttgttttaggataactactttaaaattttttaaattatattaaatttataaaataatttataaattcatatattaaaacaatataagataatttcttgatttgtcatttataaatcctaaagtatatttgtttaatggcctatttttagatgaagaaaaagccagttggtaagctgtgttagtcatgtatcagttcagacagacgaggtctcaatttaactccaggcttagatccagtttcttttgcccttcactatttgaggtaacttcatttttcattctagttttgatatttggctgtttatttttgtcattttccattatttcaaagggaatttggaacatgttgaattttatcaggtggttacataagcaagagtacatcaaactgtattatttgaaagtctagaacctgtcatgtgaaattactatttttgagccctctatgtggtccaggcagaatagtagacacactgatatttaatccttaaaacccctttaaatgagggccagtattatctctgctttcagaagtagacataataggatgaatcatataacagaaaaaaaaaagtgaagccaagagggagttaactacttaaagtacatgctatgctatactttctagagagatcacagatgtgtgtgaacatcctagcaattaacacaaagaaggaaccatcacattaattacacaatttattgtgtctgaggtaacccagtttcttgagagaagcgtaactattttcaaaagtgggaaagatcttttcataaagacgttgccagaaatagcaacattctcaatactcgtggtgtaaaaaccatgaatcccctggcttaatgccaaattatagccttagaagaataattgttccccaaatgggcaagaaaggttctaattgtcaagagtaacccaagtaagaacttttggaatatcaaaaggaaatgagcaaaatgtaaatagaggggatatgtactttgctgagtattaaattggaact

SEQ ID NO: 29677 - DNA, 2388 bp, Artificial Sequence
  derived and/or modified sequence
atgacttccggtgccacacggtaccgcctttcgtgtagccttcggggacacgaactcgatgtgcggggacttgtttgttgcgcttatcccccaggagctttcgtgtcagtcagcagagatcgcactacccgcttatgggcacccgatagccccaacagaagctttaccgaaatgcattgtatgtcgggtcacagtaacttcgtttcctgcgtctgtatcattccaagttctgacatttaccctcacgggttgatagccaccggaggcaacgaccacaatatatgtatcttcagtctggactcacctatgccactgtacatactcaaaggccataaaaatactgtgtgctccctcagttcaggaaagtttgggacactgctgagcggttcgtgggatactacagccaaagtctggttgaacgacaagtgcatgatgaccctgcagggccataccgccgctgtgtgggccgtgaaaatcttgcctgagcagggtctgatgttgaccggaagcgcagacaaaacagtcaagctgtggaaggccggacgctgcgagcgcacctttagcggccacgaggactgcgtacgcggtttagcgatcctctctgagactgaattcctgtcttgtgcgaacgacgcctcaataaggcgttggcagatcacgggcgaatgtctcgaggtctattatggccatacgaattatatctactctatcagtgtgttccctaattgtagggattttgtgactacagcagaagatcgctctctcagaatttggaagcacggtgagtgcgctcagactatccggcttcccgctcagagtatctggtgttgctgcgtcctcgataacggcgatatcgtcgtgggggcatcagacggcatcattcgggtgttcactgagtcggaagacagaaccgcaagcgccgaagagatcaaagcattcgagaaggagttgagccacgccaccattgacagcaaaaccggggatttaggagatataaacgctgagcagctgcccggtagagagcatttaaacgagcccggaaccagagagggccaaacaagactcattagggacggcgaaaaggtggaggcatatcagtggagtgttagtgagggtcggtggatcaaaattggggacgttgtcgggagttccggggcaaatcagcaaaccagtggcaaggtgttatatgaaggcaaagagtttgattatgtctttagcattgacgtcaacgaggggggaccttcttacaagttgccatacaatactagcgacgatccatggctcaccgcctacaatttcctgcagaaaaacgatctgaatcccatgttccttgatcaggtcgccaagttcatcatcgacaacacaaaggggcaaatgctaggcctgggtaacccatcgttcagcgacccattcacagggggtggaagatacgtgcccggttcatctggctccagcaacaccctccctaccgccgaccctttcacaggtgccggacgctacgtccccggatctgccagcatgggaaccacaatggcaggggtcgatccctttaccgggaacagtgcctacaggagcgcagcctccaaaacaatgaatatttatttcccgaagaaagaggccgtcacttttgaccaggccaacccgactcagattcttgggaagttaaaagaacttaatgggacagctcccgaggagaaaaaactgaccgaggatgacctcattttgctggagaaaattctgtcgctcatatgcaactcttcaagtgaaaagcctacagtgcagcaacttcagatattgtggaaagccataaactgccctgaggacatagtattccctgcacttgacatcctgagattgagtatcaagcacccgtccgtgaacgaaaatttctgcaatgagaaagaaggggcacagttttcatcccacctgattaacctgttaaatcccaagggcaaacccgcaaaccaactcctggcactgcgcacattctgcaactgctttgtgggccaggccggtcagaagcttatgatgtcgcaacgggagtccctgatgtcacacgcgatcgagctgaaaagtggctctaataagaacatccatattgcgctggcgacgctggccctgaattattcagtgtgctttcataaggaccacaacattgaaggcaaggcccagtgcttgtctttaatctcgacgattcttgaagtagtgcaggacctcgaagccacatttcgcctcttggtggctttgggcaccctcatttcagacgattcaaacgctgtgcagctggccaaaagcctgggggtggattcccagatcaaaaaatactctagcgtttctgagccagccaaagtctccgagtgttgtaggtttatcctaaacttactgtag

SEQ ID NO: 29678 - protein, 380 aa, Artificial Sequence
  derived and/or modified sequence
MEKKKMVTQGNQEPTTTPDAMVQPFTTIPFPPPPQNGIPTEYGVPHTQDYAGQTGEHNLTLYGSTQAHGEQSSNSPSTQNGSLTTEGGAQTDGQQSQTQSSENSESKSTPKRLHVSNIPFRFRDPDLRQMFGQFGKILDVEIIFNERGSKGFGFVTFENSADADRAREKLHGTVVEGRKIEVNNATARVMTNKKMVTPYANGWKLSPVVGAVYGPELYAASSFQADVSLGNDAAVPLSGRGGINTYIPLISLPLVPGFPYPTAATTAAAFRGAHLRGRGRTVYGAVRAVPPTAIPAYPGVVYQDGFYGADLYGGYAAYRYAQPATATAATAAAAAAAAYSDGYGRVYTADPYHALAPAASYGVGAVASLYRGGYSRFAPY

SEQ ID NO: 29679 - DNA, 1935 bp, Artificial Sequence
  derived and/or modified sequence
ctgccagagaggaagagaaaagaaaggaagaaacattagaaagaaaaaggaaggaaaacggtataaagagagatcaattacccacccttaaatagctagattggggggggaggggggtggaaaagaaagctgtggaggtgtgccccagcacggctgctttgaaaggtttatcatctatccgtttggtttatggagaaaaagaaaatggtaactcagggtaaccaggagccgacaacaactcctgacgcaatggttcagccttttactaccatcccatttccaccacctccgcagaatggaattcccacagagtatggggtgccacacactcaagactatgccggccagaccggtgagcataacctgacactctacggaagtacgcaagcccacggggagcagagcagcaactcacccagcacacaaaatggatctcttacgacagaaggtggagcacagacagacggccagcagtcacagacacaaagtagtgaaaattcagagagtaaatctaccccgaaacggctgcatgtctctaatattcctttccgcttccgggaccctgacctccggcagatgtttgggcagtttggcaaaatcctagatgtagaaataatctttaatgaacgtggctctaagggattcgggttcgtaactttcgagaatagtgctgatgcagacagggccagggagaaattacacggcaccgtggtagagggccgtaaaatcgaggtgaataatgctacagcacgtgtaatgaccaataagaagatggtcacaccatatgcaaatggttggaaattaagcccagtagttggagctgtatatggtccggagttatatgcagcatccagctttcaagcagatgtgtccctaggcaatgatgcagcagtgcccctatcaggaagagggggtatcaacacttacattcctttaatcagtctccctttagttcctggcttcccttaccctactgcagccaccacggcagccgctttcagaggagcccatttgaggggcagagggcggacagtatatggtgcagtccgagcggtacctccaacagccatccccgcctatccaggtgtggtttaccaggacggattttacggtgctgacctctatggtggatatgcagcctacagatatgcacagcctgctactgcaaccgcagccaccgctgctgcagccgctgcagccgcttacagtgacggttatggcagggtgtacacagccgacccctaccatgcccttgcccctgccgctagctatggagttggcgctgtggcgagtttataccgaggtggctacagccgatttgccccctactgaagtgacgtgagacccctgcaaatgggacagccccccagttcatgaggcctggctattgcaatatttactagtagaggaactctatagcaagatgaagaggaaaaacaaacaaacaaacaaaaaaaaacacaaaaaaagaaagaatacttttttatacctcactatgttctttgaatatgtatttttcctttaaatttctgcctttaattcttttgttccaaagattgtgcatttttttctttttttttttaaactgtggtaaaaaaaaaaaaaataatgcatttccatgtctgtatgtccgtgcttagcttattctatcaatcacggaagaggcagtcaaggaggaaggagagacattaggagccgataaatgcatctgatcagaaatcagcagacagaattaccaaagtgtatctggtgctgaatgactgggggacaagcagaagtggaagagatctttctgcaacaggatattcttctagtcttctgagtttctggtctttgacaggcaattctggttggctgtggctggaatccacatgctgatagataggaatttgtgcttacaaagcaggagaattaaaaagacgctttcctctcctc

SEQ ID NO: 29680 - DNA, 1143 bp, Artificial Sequence
  derived and/or modified sequence
atggagaagaagaagatggtgacccagggcaaccaggagcccaccaccacccccgacgccatggtgcagcccttcaccaccatccccttccccccccccccccagaacggcatccccaccgagtacggcgtgccccacacccaggactacgccggccagaccggcgagcacaacctgaccctgtacggcagcacccaggcccacggcgagcagagcagcaacagccccagcacccagaacggcagcctgaccaccgagggcggcgcccagaccgacggccagcagagccagacccagagcagcgagaacagcgagagcaagagcacccccaagagactgcacgtgagcaacatccccttcagattcagagaccccgacctgagacagatgttcggccagttcggcaagatcctggacgtggagatcatcttcaacgagagaggcagcaagggcttcggcttcgtgaccttcgagaacagcgccgacgccgacagagccagagagaagctgcacggcaccgtggtggagggcagaaagatcgaggtgaacaacgccaccgccagagtgatgaccaacaagaagatggtgaccccctacgccaacggctggaagctgagccccgtggtgggcgccgtgtacggccccgagctgtacgccgccagcagcttccaggccgacgtgagcctgggcaacgacgccgccgtgcccctgagcggcagaggcggcatcaacacctacatccccctgatcagcctgcccctggtgcccggcttcccctaccccaccgccgccaccaccgccgccgccttcagaggcgcccacctgagaggcagaggcagaaccgtgtacggcgccgtgagagccgtgccccccaccgccatccccgcctaccccggcgtggtgtaccaggacggcttctacggcgccgacctgtacggcggctacgccgcctacagatacgcccagcccgccaccgccaccgccgccaccgccgccgccgccgccgccgccgcctacagcgacggctacggcagagtgtacaccgccgacccctaccacgccctggcccccgccgccagctacggcgtgggcgccgtggccagcctgtacagaggcggctacagcagattcgccccctactag

SEQ ID NO: 29681 - DNA, 1143 bp, Artificial Sequence
  derived and/or modified sequence
atggagaagaaaaagatggtgactcagggcaatcaggagccaaccaccacgcctgacgcaatggtgcagccctttactactattcccttcccccctccgccccaaaatggcattcccaccgaatatggcgttccccacactcaagactacgctggacagaccggagagcataacctgaccttatatggctccacacaggcacacggtgagcagagctctaattcccccagcacacagaatggatcattaaccaccgagggaggggcacagactgacggtcagcagagtcagactcagtcatctgagaattcagagtccaagtccaccccgaagagattacacgtgagcaacatccccttccgtttcagagaccccgacctccgacagatgttcggtcaattcggcaaaatactcgacgtggagatcattttcaacgagcggggttcaaagggattcggattcgtcacttttgagaatagtgccgacgctgaccgcgcccgggaaaagttgcacggaacagtggttgagggaaggaagatcgaagtgaacaacgccacagcgagggtgatgactaataagaaaatggttactccctatgccaacggatggaagctatctcctgttgtcggagctgtttacggacccgagctttatgctgcaagttcgttccaggccgatgtgtctctgggaaacgatgccgccgttccactgtctggccgcgggggtatcaatacctacattccattgatctcactgcctctggtgcccggctttccttatcctactgcggccacaacagcggccgcctttagaggagctcatttacgtggccgtgggagaacagtctatggcgccgtccgggctgtaccccccacagccattcctgcttaccctggcgttgtttatcaagacggcttttacggcgccgacctttacgggggctacgccgcataccggtacgcccagccagccacagcaaccgccgctacagccgccgccgccgcagccgccgcttatagtgatggatacggtcgagtgtacaccgcagacccataccatgctttggcgccagctgctagctacggggtgggagctgttgcatccttataccggggtggatattccagatttgccccctattag

SEQ ID NO: 29682 - DNA, 1143 bp, Artificial Sequence
  derived and/or modified sequence
atggagaagaagaagatggtgacccagggcaaccaggagcccaccaccaccccagatgccatggtgcagcccttcaccaccatccccttccccccaccaccccagaatggcatccccacagaatatggagtgccccacacccaggactatgccggccagacaggagagcacaacctgaccctgtatggcagcacccaggcccacggggagcagagcagcaacagccccagcacccagaatggcagcctgaccacagaaggaggagcccagacagatggccagcagagccagacccagagcagcgagaacagcgagagcaagagcacccccaagaggctgcacgtgagcaacatccccttccgcttccgggaccctgacctgcggcagatgtttggccagtttgggaagatcctggatgtggagatcatcttcaatgaaagaggcagcaagggcttcggctttgtgacctttgagaacagcgcagatgctgaccgggcccgggagaagctgcatggaacagtggtggagggcaggaagattgaggtgaacaatgccacagcccgggtgatgaccaacaagaagatggtgaccccctatgccaacggctggaagctgagccctgtggtgggcgctgtgtatggccctgagctgtatgctgccagcagcttccaggctgatgtgtccctgggcaatgatgctgctgtgcccctgagcggccggggcggcatcaacacctacatccccctcatcagcctgcccctggtgcccggcttcccctaccccacagctgccaccacagctgctgccttccggggggcccacctgcggggccggggccgcacagtgtatggagctgtgcgggctgtgcccccaacagccatcccagcctacccaggagtggtgtaccaggacggcttctatggagctgacctgtatggaggctacgccgcctaccgctatgcccagcctgccacagccacagctgccacagctgctgctgctgctgctgctgcctacagtgatggctacggccgggtgtacacagctgacccctaccacgccctggccccagctgccagctatggagtgggcgctgtggccagcctgtaccggggcggctacagcagatttgccccctactag

SEQ ID NO: 29683 - DNA, 1143 bp, Artificial Sequence
  derived and/or modified sequence
atggagaagaagaagatggtgacccagggcaaccaggagcccaccacgacccccgatgcaatggtgcagccttttaccaccattccattcccccctcccccccagaacgggattcccaccgaatacggagtgccacatacccaggattatgccgggcagactggagagcataacctgaccctgtacggatctacacaggcccacggggagcagagcagcaattcacccagtacacagaacggatccttaaccaccgaaggaggtgcccagactgacggtcaacaatctcaaactcagtcgtccgaaaactctgaaagtaaatctacaccaaagcgtttacacgtcagcaacattccgtttcggttcagggaccctgaccttcgtcaaatgtttggtcagtttggcaagatcctagatgtggagatcatctttaacgaaagagggtctaagggctttgggtttgtgacatttgaaaactctgccgatgccgatagggctcgcgaaaagctgcacggaaccgtggtggaagggagaaagattgaggtgaataatgcaactgctcgagtgatgacgaacaagaaaatggtgacgccctatgcaaacggatggaaactatcgcccgtggtaggagcagtgtatggccctgagctgtacgccgccagtagcttccaggctgacgtctctctcggaaacgatgccgctgtgcctctgagtgggagaggcggtattaatacatacatccctctcatcagtctacccctggtccctgggttcccataccctacagctgcaacgacagccgcggcttttagaggagcccatctgcgtggtcggggtaggacagtctacggtgctgtgagggccgtcccacccactgctatacctgcgtatcctggggtggtctatcaagacggcttctacggagctgacctctatgggggatatgctgcataccgatatgcacaacctgcaactgccaccgccgccactgcggcagccgcagcagcggctgcctactccgacgggtacggtagagtgtatactgctgatccctaccatgcacttgcaccggctgcctcctatggcgttggcgccgtggcgagcctgtataggggagggtactcccggtttgctccatattag

SEQ ID NO: 29684 - DNA, 1143 bp, Artificial Sequence
  derived and/or modified sequence
atggaaaaaaaaaagatggtgacccagggaaaccaagagcctacaactacccctgacgcgatggtccagccatttaccaccattccattcccccctccgcctcagaacggcattccaacagaatatggggtgcctcacacacaagattatgccggacagacaggagagcacaatcttacactctacgggtcgactcaggcccacggagaacaatcctctaattcacctagtacgcagaatggctcactgacaacagaggggggtgcgcagactgacggccaacaatcgcagacccagagctcagagaacagcgagtctaaatcaactcccaaaaggctgcacgtctccaatataccgtttcgattccgggatccggacctgaggcaaatgtttggtcagtttggcaagattctggatgtagagatcattttcaacgaaaggggcagcaaggggttcggctttgtgaccttcgaaaacagtgccgatgctgatagagcaagggagaaactccacgggaccgtggtggagggcagaaaaatagaggtcaacaatgccaccgcgagagttatgactaataaaaaaatggttacaccttatgccaacggctggaagttgtccccagtggtgggcgctgtatatggcccagaactatatgcagccagtagctttcaggccgacgtaagcttaggcaacgacgcagctgtgccacttagcggaagaggcggaattaatacttatatccccctgatttctctgcccctcgtccccggttttccataccccacagccgctaccactgccgctgcatttaggggagcgcacttgcggggacgaggaagaacagtgtacggcgctgtacgcgctgtgccaccaaccgctatcccagcgtaccctggcgtagtctatcaagacggattttacggcgcagatttatatggaggttacgcggcttataggtacgcacagcctgccactgctactgcagcaacagcagccgctgccgcagccgctgcctacagtgacggctacggtcgagtctacactgccgatccctatcatgccttggccccagctgcgtcatatggcgtcggtgcagttgcttcattgtaccgcggaggctactctcggttcgcaccttactag

SEQ ID NO: 29685 - protein, 490 aa, Artificial Sequence
  derived and/or modified sequence
MKPKLMYQELKVPAEEPANELPMNEIEAWKAAEKKARWVLLVLILAVVGFGALMTQLFLWEYGDLHLFGPNQRPAPCYDPCEAVLVESIPEGLDFPNASTGNPSTSQAWLGLLAGAHSSLDIASFYWTLTNNDTHTQEPSAQQGEEVLRQLQTLAPKGVNVRIAVSKPSGPQPQADLQALLQSGAQVRMVDMQKLTHGVLHTKFWVVDQTHFYLGSANMDWRSLTQVKELGVVMYNCSCLARDLTKIFEAYWFLGQAGSSIPSTWPRFYDTRYNQETPMEICLNGTPALAYLASAPPPLCPSGRTPDLKALLNVVDNARSFIYVAVMNYLPTLEFSHPHRFWPAIDDGLRRATYERGVKVRLLISCWGHSEPSMRAFLLSLAALRDNHTHSDIQVKLFVVPADEAQARIPYARVNHNKYMVTERATYIGTSNWSGNYFTETAGTSLLVTQNGRGGLRSQLEAIFLRDWDSPYSHDLDTSADSVGNACRLL

SEQ ID NO: 29686 - protein, 177 aa, Artificial Sequence
  derived and/or modified sequence
MKPKLMYQELKVPAEEPANELPMNEIEAWKAAEKKARWVLLVLILAVVGFGALMTQLFLWEYGDLHLFGPNQRPAPCYDPCEAVLVESIPEGLDFPNASTGNPSTSQAWLGLLAGAHSSLDIASFYWTLTNNDTHTQEPSAQQGEEVLRQLQTLAPKGVNVRIAVSKPSGPQPQADL

SEQ ID NO: 29687 - protein, 129 aa, Artificial Sequence
  derived and/or modified sequence
MKPKLMYQELKVPAEEPANELPMNEIEAWKAAEKKARWVLLVLILAVVGFGALMTQLFLWEYGDLHLFGPNQRPAPCYDPCEAVLVESIPEGLDFPNASTGNPSTSQAWLGLLAGAHSSLDIASFYWTL

SEQ ID NO: 29688 - protein, 402 aa, Artificial Sequence
  derived and/or modified sequence
MKPKLMYQELKVPAEEPANELPMNEIEAWKAAEKKARWVLLVLILAVVGFGALMTQLFLWEYGDLHLFGPNQRPAPCYDPCEAVLVESIPEGLLAGAHSSLDIASFYWTLTNNDTHTQEPSAQQGEEVLRQLQTLAPKGVNVRIAVSKPSGPQPQADLQALLQSGAQVRMVDMQKLTHGVLHTKFWVVDQTHFYLGSANMDWRSLTQVKELGVVMYNCSCLARDLTKIFEAYWFLGQAGSSIPSTWPRFYDTRYNQETPMEICLNGTPALAYLASAPPPLCPSGRTPDLKALLNVVDNARSFIYVAVMNYLPTLEFSHPHRFWPAIDDGLRRATYERGVKVRLLISCWGHSEPSMRAFLLSLAALRDNHTHSDIQVKLFVVPADEAQALSPALPPLPPPPPA

SEQ ID NO: 29689 - DNA, 1473 bp, Artificial Sequence
  derived and/or modified sequence
atgaagcccaagctgatgtaccaggagctgaaggtgcccgccgaggagcccgccaacgagctgcccatgaacgagatcgaggcctggaaggccgccgagaagaaggccagatgggtgctgctggtgctgatcctggccgtggtgggcttcggcgccctgatgacccagctgttcctgtgggagtacggcgacctgcacctgttcggccccaaccagagacccgccccctgctacgacccctgcgaggccgtgctggtggagagcatccccgagggcctggacttccccaacgccagcaccggcaaccccagcaccagccaggcctggctgggcctgctggccggcgcccacagcagcctggacatcgccagcttctactggaccctgaccaacaacgacacccacacccaggagcccagcgcccagcagggcgaggaggtgctgagacagctgcagaccctggcccccaagggcgtgaacgtgagaatcgccgtgagcaagcccagcggcccccagccccaggccgacctgcaggccctgctgcagagcggcgcccaggtgagaatggtggacatgcagaagctgacccacggcgtgctgcacaccaagttctgggtggtggaccagacccacttctacctgggcagcgccaacatggactggagaagcctgacccaggtgaaggagctgggcgtggtgatgtacaactgcagctgcctggccagagacctgaccaagatcttcgaggcctactggttcctgggccaggccggcagcagcatccccagcacctggcccagattctacgacaccagatacaaccaggagacccccatggagatctgcctgaacggcacccccgccctggcctacctggccagcgcccccccccccctgtgccccagcggcagaacccccgacctgaaggccctgctgaacgtggtggacaacgccagaagcttcatctacgtggccgtgatgaactacctgcccaccctggagttcagccacccccacagattctggcccgccatcgacgacggcctgagaagagccacctacgagagaggcgtgaaggtgagactgctgatcagctgctggggccacagcgagcccagcatgagagccttcctgctgagcctggccgccctgagagacaaccacacccacagcgacatccaggtgaagctgttcgtggtgcccgccgacgaggcccaggccagaatcccctacgccagagtgaaccacaacaagtacatggtgaccgagagagccacctacatcggcaccagcaactggagcggcaactacttcaccgagaccgccggcaccagcctgctggtgacccagaacggcagaggcggcctgagaagccagctggaggccatcttcctgagagactgggacagcccctacagccacgacctggacaccagcgccgacagcgtgggcaacgcctgcagactgctgtag

SEQ ID NO: 29690 - DNA, 534 bp, Artificial Sequence
  derived and/or modified sequence
atgaagcccaagctgatgtaccaggagctgaaggtgcccgccgaggagcccgccaacgagctgcccatgaacgagatcgaggcctggaaggccgccgagaagaaggccagatgggtgctgctggtgctgatcctggccgtggtgggcttcggcgccctgatgacccagctgttcctgtgggagtacggcgacctgcacctgttcggccccaaccagagacccgccccctgctacgacccctgcgaggccgtgctggtggagagcatccccgagggcctggacttccccaacgccagcaccggcaaccccagcaccagccaggcctggctgggcctgctggccggcgcccacagcagcctggacatcgccagcttctactggaccctgaccaacaacgacacccacacccaggagcccagcgcccagcagggcgaggaggtgctgagacagctgcagaccctggcccccaagggcgtgaacgtgagaatcgccgtgagcaagcccagcggcccccagccccaggccgacctgtag

SEQ ID NO: 29691 - DNA, 390 bp, Artificial Sequence
  derived and/or modified sequence
atgaagcccaagctgatgtaccaggagctgaaggtgcccgccgaggagcccgccaacgagctgcccatgaacgagatcgaggcctggaaggccgccgagaagaaggccagatgggtgctgctggtgctgatcctggccgtggtgggcttcggcgccctgatgacccagctgttcctgtgggagtacggcgacctgcacctgttcggccccaaccagagacccgccccctgctacgacccctgcgaggccgtgctggtggagagcatccccgagggcctggacttccccaacgccagcaccggcaaccccagcaccagccaggcctggctgggcctgctggccggcgcccacagcagcctggacatcgccagcttctactggaccctgtag

SEQ ID NO: 29692 - DNA, 1209 bp, Artificial Sequence
  derived and/or modified sequence
atgaagcccaagctgatgtaccaggagctgaaggtgcccgccgaggagcccgccaacgagctgcccatgaacgagatcgaggcctggaaggccgccgagaagaaggccagatgggtgctgctggtgctgatcctggccgtggtgggcttcggcgccctgatgacccagctgttcctgtgggagtacggcgacctgcacctgttcggccccaaccagagacccgccccctgctacgacccctgcgaggccgtgctggtggagagcatccccgagggcctgctggccggcgcccacagcagcctggacatcgccagcttctactggaccctgaccaacaacgacacccacacccaggagcccagcgcccagcagggcgaggaggtgctgagacagctgcagaccctggcccccaagggcgtgaacgtgagaatcgccgtgagcaagcccagcggcccccagccccaggccgacctgcaggccctgctgcagagcggcgcccaggtgagaatggtggacatgcagaagctgacccacggcgtgctgcacaccaagttctgggtggtggaccagacccacttctacctgggcagcgccaacatggactggagaagcctgacccaggtgaaggagctgggcgtggtgatgtacaactgcagctgcctggccagagacctgaccaagatcttcgaggcctactggttcctgggccaggccggcagcagcatccccagcacctggcccagattctacgacaccagatacaaccaggagacccccatggagatctgcctgaacggcacccccgccctggcctacctggccagcgcccccccccccctgtgccccagcggcagaacccccgacctgaaggccctgctgaacgtggtggacaacgccagaagcttcatctacgtggccgtgatgaactacctgcccaccctggagttcagccacccccacagattctggcccgccatcgacgacggcctgagaagagccacctacgagagaggcgtgaaggtgagactgctgatcagctgctggggccacagcgagcccagcatgagagccttcctgctgagcctggccgccctgagagacaaccacacccacagcgacatccaggtgaagctgttcgtggtgcccgccgacgaggcccaggccctgagccccgccctgccccccctgcccccccccccccccgcctag

SEQ ID NO: 29693 - DNA, 1473 bp, Artificial Sequence
  derived and/or modified sequence
atgaaaccaaagctgatgtatcaagaacttaaggtgccagcggaggaaccagccaacgagcttccaatgaacgagatcgaggcttggaaggccgctgaaaaaaaagcaaggtgggtgctgctggtgttgatcctggctgtcgtcggatttggtgccttaatgacacagttgttcctgtgggaatacggcgacttgcacctgttcggacctaaccagcgccccgccccttgctacgacccttgtgaagctgtgctggtggagtccatccccgaaggattggactttcccaacgcatccactggtaatcccagtacgagccaggcatggctgggcttgctggccggagcccacagcagcctcgatatcgcttcgttttattggaccttaacaaataacgacacacacacacaggagcctagcgcccagcagggcgaagaggtgttgcgacagttgcagacgttggcacccaaaggggtcaacgtgcgtatcgctgtctccaaaccgtccggaccccagcctcaggcagatcttcaggctctcttgcagagcggtgctcaggttagaatggtggatatgcagaagctgacacatggtgtgctccatacaaaattctgggttgtggaccaaacccatttttacttaggatcggcaaacatggactggaggtccctaacccaggtgaaggagctgggggtggtgatgtataactgttcgtgtctggcccgggaccttacaaagatctttgaggcttactggttcctggggcaggccggctccagtatcccatcaacttggcctagattctacgataccaggtataatcaggagactcctatggagatctgcctcaatgggactccagctctggcctacctggcatccgccccgccacctttatgtccctcaggccgaactcccgaccttaaagccctgctgaatgtggtggacaatgcgagatcctttatctacgtggctgttatgaactacctgcccaccctggaatttagtcatcctcatagattctggcccgctattgatgacggcttgcgacgggcaacctacgagcggggggtgaaggtgcgactcctgatatcatgttggggccacagcgagccctcaatgagggcctttttgctgtcactcgcagccttacgcgataatcatactcactctgacattcaggtcaaattattcgtggtgcctgcggacgaggcccaagcccgcataccttacgctcgcgtgaatcacaacaaatacatggtcactgagcgcgccacttacataggaactagtaactggtctgggaattacttcacggagacagcaggcacctcactgctggtgacacaaaatggaaggggaggcctacggtcacagctcgaagctatcttcctccgagactgggattctccctatagtcacgatctggatacctccgcagattccgtggggaacgcctgcaggttgctctag

SEQ ID NO: 29694 - DNA, 534 bp, Artificial Sequence
  derived and/or modified sequence
atgaaaccaaaattgatgtaccaggagcttaaggttcccgccgaggagcccgcgaacgaactccctatgaacgagattgaggcctggaaggctgcggagaagaaagctaggtgggtcctgctggtactcatactggcggtggtgggttttggggccctgatgactcagctgttcctttgggagtatggggacctgcatctgtttggcccaaatcaacggcctgccccctgttatgacccctgcgaagccgtgctcgtagagagcattccagaaggactggattttcctaacgcttccacaggaaatccttctacgtcgcaggcttggctgggactcttagccggagctcactcctccctggatatcgccagcttctattggactcttaccaataacgacacccacacccaggagccatcagcacaacaaggggaggaggtgttgcgacagctgcagactcttgctcctaaaggagtcaacgtgaggatcgctgtctctaagccgtccggtcctcagccacaggcagacctatag

SEQ ID NO: 29695 - DNA, 390 bp, Artificial Sequence
  derived and/or modified sequence
atgaaaccaaagctgatgtaccaagagttaaaggtgccagcagaagaaccggcaaacgaactgccaatgaacgaaatcgaagcatggaaggctgcagaaaagaaggcccggtgggtactacttgtacttattttagctgtggtcggtttcggggccctgatgacacagctcttcctgtgggagtatggagacctgcacctgttcggacccaaccagaggccagctccctgctatgacccatgtgaggcagtcctcgtggaatctattcccgagggtctggacttccccaacgcgagcaccggcaaccctagcacctcacaggcctggctggggttgttggcaggtgcacactcatctcttgatatcgcatctttctattggactctgtag

SEQ ID NO: 29696 - DNA, 1473 bp, Artificial Sequence
  derived and/or modified sequence
atgaaacctaagttgatgtatcaggagcttaaggtccctgctgaagaaccagctaacgaactccccatgaacgaaatcgaggcctggaaggcagccgaaaaaaaagctcgatgggtgctcttggtgctgatccttgcagttgttggtttcggggccctgatgacacagctgtttctctgggagtatggagacctgcacctttttggtcccaaccagcgacctgctccctgttatgatccgtgtgaggctgtgctggtagagtcaatccccgaaggattggattttcctaacgcatccactggaaacccgtcaacctctcaggcatggctgggactgctggccggagctcatagcagcttggacatcgcctctttttactggacactgactaataacgatacacatacacaggagcctagcgcccagcagggggaggaagttctgcggcagttacagaccttagcgccaaaaggggtcaatgtgcggattgcagtctcaaagccctccggaccccagccacaggccgacctccaggccctgcttcagagcggggctcaggtgcggatggtcgatatgcaaaaactgacccatggcgtgcttcacacaaagttctgggtcgtcgaccagacccacttttacctgggcagcgcaaacatggactggcggtcgctcacccaggtcaaagaactgggggtggtaatgtacaactgtagttgcctggcgcgcgacttgacaaagatcttcgaggcatactggttcctcggccaggcgggaagctctatcccatcaacgtggccccgattttatgatacaaggtacaaccaggagactccaatggagatctgccttaatggtacccctgccctcgcatatctggctagtgcgccccctccactttgcccttctggccgcacacccgacttaaaagcactgctgaacgtagtcgataacgcccgctcttttatctatgtcgcagtcatgaactatctgcctaccttggaatttagtcatcctcacagattttggcctgcgatagacgacggtctgcgtcgcgccacctacgagcggggcgtgaaagtccgactgttgattagttgctggggacactccgaacccagcatgcgtgcatttctgcttagccttgccgcactgagagataaccacacgcattccgacatccaggtgaaacttttcgtggtccccgctgatgaagcccaggcacggatcccttatgcccgtgtgaaccacaacaagtacatggtgactgagcgagccacctacattgggaccagcaattggagtggtaactactttacagaaaccgccggaacttccctgctggttacacagaacggccgagggggcctgcgaagccaactggaagctatttttctcagagactgggattccccatattctcacgatctagatacctccgcagattccgtgggcaacgcgtgtcgactgctctag

SEQ ID NO: 29697 - DNA, 1473 bp, Artificial Sequence
  derived and/or modified sequence
atgaaacctaaactgatgtatcaggaactgaaagtgcccgctgaagaacccgccaatgaactccccatgaatgagattgaggcttggaaagcagctgagaagaaagcacggtgggtcctgctggtgctcattcttgccgtggttggcttcggcgccctgatgactcagcttttcctgtgggagtacggagacctgcacctttttgggcctaatcagcgccccgcaccctgctacgatccatgcgaagccgtgctcgttgaatcaatccccgaagggctggacttccctaatgcctcgactggcaaccctagcacatctcaagcatggctgggcctccttgccggcgctcactcttccctcgacattgcctccttctattggactctgactaataacgatacccatacgcaagagcctagcgcacagcaaggcgaagaagtgctgcgccagctacagacactggcacctaagggcgtaaacgtgcgtattgctgtcagcaagccatccggtcctcaaccccaagccgacctgcaggccctcttacagagcggcgcacaagtaaggatggtcgacatgcaaaaactgacacacggagttctccacaccaaattttgggtcgtggatcagacccatttctatttaggcagtgccaacatggattggaggtccttgacgcaggtgaaagaactgggggtcgttatgtataactgttcctgcttagctcgagacctgacgaaaatcttcgaagcctactggttcctaggtcaggcagggagctctattccctcgacatggcccaggttctatgatacccgttacaatcaggaaactccgatggagatctgtctgaacgggacccccgccctagcctacctggcatctgctcctcctccgctgtgtccttccggacggactcccgacctgaaagccctgttaaacgttgtggataacgcgagatcattcatatacgtcgccgtgatgaactacctgcctaccttagagttcagtcacccccaccggttctggccagccatcgacgatggtctgagaagggctacctatgagaggggagtaaaggtccggttactcatcagctgctggggccactcagaaccaagcatgcgcgccttcttgttgagtttggccgcgctgagggataatcacacccactccgacatacaggtgaagttgtttgtggtgccagccgatgaggcgcaggctcgaatcccctacgcaagagtcaaccataacaaatatatggtcaccgaaagggccacgtatatcggaacaagcaactggagcggaaattattttaccgagaccgcgggtacatctctgcttgttacacaaaacgggcgcggagggctgcggagccagttggaggcaatctttttgcgggactgggactccccatatagtcacgatctggacacttccgccgattctgtcgggaacgcatgcagactactttag

SEQ ID NO: 29698 - DNA, 1473 bp, Artificial Sequence
  derived and/or modified sequence
atgaaacccaaactgatgtaccaggagttgaaggtccctgctgaggagccagctaacgaattacctatgaacgagatcgaggcttggaaggcagcagagaagaaggctaggtgggttttgcttgttcttattctcgcggttgtgggattcggcgcactgatgacccagttattcttgtgggaatacggcgatctccatttgttcggccctaaccagaggcccgccccttgttatgacccctgtgaagccgtcctggtggaatccatcccagagggactagactttcccaatgcttctacggggaacccttcgacttcccaggcctggctaggactgttggccggagctcattccagtctcgacattgcatcgttctattggaccttaaccaataatgatacccatacccaagaaccatctgcacagcagggcgaggaagtgctgcgtcaactgcagaccctggcacctaaaggcgtgaacgttagaatcgcagtgtctaaaccaagcggcccccaacctcaagctgatctgcaggccctgctccagagtggggcgcaggtacggatggtggacatgcagaagctaacccacggagtgctacacacgaagttctgggttgtggatcaaacacatttctatctcggcagcgcgaacatggattggagatcgctgactcaggtgaaggagcttggggtcgtgatgtataactgcagttgcctggctagggacttgacaaagatctttgaagcgtattggtttcttggccaggctggctcttccatccccagcacctggcctcggttctacgacacacggtacaatcaggaaacgccaatggaaatatgtttgaatggtacccccgccctggcatatctcgctagtgcgccacctcctttgtgcccatccggcaggaccccggatctgaaagcgctgctgaatgttgtggataacgcaagaagctttatctatgtggctgtgatgaactaccttcccactctcgaattcagtcatccccatagattctggcccgccatcgatgacggcctccgtagagctacctacgaaagaggtgtaaaagtgcgcctgctgatcagctgctggggccacagcgaaccgagcatgcgagctttcttactatcattagccgccctcagggacaatcacactcattcagatatccaagtgaaactatttgtagtgcctgctgacgaggcacaagctcggatcccatatgcccgggtcaatcacaacaaatatatggtgacagaaagggcaacctatattggcacgagcaactggtctggtaactacttcacggaaacagccgggacaagcctcctggtgacccagaacggtcgtgggggcctcaggagtcagttggaggctatctttctcagggactgggatagcccctactcgcacgatttggatacctccgccgacagtgtaggaaacgcatgcaggcttctgtag

SEQ ID NO: 29699 - DNA, 1473 bp, Artificial Sequence
  derived and/or modified sequence
atgaagcctaaactgatgtatcaggagcttaaagttccagcagaagaacctgccaacgaactgcctatgaacgagatagaagcctggaaagcagccgagaagaaggcccgttgggtgttactggtgcttatcctcgctgttgtgggttttggtgcattgatgacacaactcttcctctgggagtatggagatctccacctgttcggtcccaaccagagacctgctccctgctacgacccatgcgaagctgtcttggtcgagtcaatacccgagggcctcgacttcccaaatgcttcaacaggcaacccttccacctcccaagcgtggctggggctactggccggagctcacagttctctggatatagcatccttttactggaccctgaccaataacgacacccatacccaggaaccctcagcccagcaaggagaggaggtcttgcgacaactccagactctggcccccaaaggagtaaacgtgagaatcgcagtgtctaaaccttcggggccacagccacaagccgacctgcaggctctgttgcagtccggagcacaagtcaggatggtggacatgcagaagctcacacatggggtcctccacaccaagttttgggtggtggaccaaacccacttctatcttggcagcgctaacatggattggagaagcctgacgcaggtgaaagagctgggggtggttatgtataactgctcctgtcttgcaagggatttgacaaagatctttgaagcatattggttcctcgggcaagccggcagctctataccatccacatggcccagattttacgacacgaggtacaaccaggagacccccatggaaatttgcctgaacggcacacccgccctggcttatttggcttcagctccccctcccctctgcccttctggaaggacccccgatcttaaggcactgctcaacgttgtagacaatgcgaggagctttatatatgttgccgtcatgaactatctacctaccttggagttctcacacccacacaggttctggcctgctatagacgatggactccggcgagctacttacgagagaggtgtgaaagtccgacttctcatttcgtgctgggggcacagcgagccaagcatgcgggccttcctactgtctctcgccgcgctgcgcgataatcatacccacagcgatatacaggttaaactatttgttgtccccgctgacgaagctcaggcccgcatcccatacgctagggtgaaccacaataaatacatggttaccgaaagggcgacctacatagggaccagtaactggtcgggcaactatttcactgaaactgccgggaccagccttctagtcacccagaatggtcgcggcgggctgaggtcccagttggaagccatatttttaagggattgggatagcccatatagccatgatttagacacttctgctgattcggtgggtaacgcctgtcggttgctctag

SEQ ID NO: 29700 - DNA, 1209 bp, Artificial Sequence
  derived and/or modified sequence
atgaaaccaaagctgatgtaccaggaactgaaggtccctgccgaggagcccgctaacgaactgcctatgaacgagatcgaggcttggaaggctgccgaaaagaaggcacggtgggtgctgcttgtcctaattctagccgtggtcggattcggagccttgatgacacaactgtttctgtgggaatacggggatctccacctctttggcccaaaccaacgtcccgctccctgttatgacccgtgcgaggccgtgctggtggagtctattcccgagggactcctggccggcgctcattcttcattagatattgcctcattttactggacccttaccaataacgatacccacacccaggaaccaagtgcccagcaaggagaggaggtccttagacagctccagaccctcgcgcccaaaggcgtgaatgtacggattgctgtctcaaagcccagcggcccacagccacaagctgacttgcaggctctgctgcagagtggggcacaggtacgcatggttgatatgcagaaactgacgcacggcgtgttacatactaagttttgggttgttgaccagacgcacttttacctcggtagcgctaacatggattggagatctctgactcaggtgaaagagctgggagtcgttatgtacaactgttcatgcttagctagggatcttaccaagatcttcgaggcctattggtttctgggtcaggcaggatcttctataccgagcacttggcctaggttctacgatacacggtacaatcaagaaacccccatggaaatctgtttgaacggcacacctgcgctggcctacctggctagcgctccgccaccactgtgtccctccggtcggacccccgacttgaaagctctgttaaatgtggtggataacgcgaggtctttcatctatgtggctgttatgaactacctgcccaccctggaattttcccatccacataggttctggccggccatcgatgacgggctgcgacgggcaacatacgaaagaggtgtgaaggtacggctattaatctcatgttggggacattccgaaccttcaatgagagcattcctgctgagccttgcggccctgagagataatcatactcacagcgacatccaggtcaaactgttcgtggtccccgccgacgaagcccaggccctgagtcccgccctgcccccccttcccccaccacctccggcctag

SEQ ID NO: 29701 - DNA, 1473 bp, Artificial Sequence
  derived and/or modified sequence
atgaagcccaagctgatgtaccaggagctgaaggtgcctgctgaggagcccgccaatgagctgcccatgaatgaaattgaggcctggaaggctgctgagaagaaggcccgctgggtgctgctggtgctgatcctggccgtggtgggctttggagccctgatgacccagctgttcctgtgggagtatggagacctgcacctgtttggccccaaccagaggcctgccccctgctatgacccctgtgaggccgtgctggtggagagcatccctgagggcctggacttccccaatgccagcacaggcaaccccagcaccagccaggcctggctgggcctgctggccggggcccacagcagcctggacatcgccagcttctactggaccctgaccaacaatgacacccacacccaggagcccagcgcccagcagggcgaggaggtgctgcggcagctgcagaccctggcccccaagggcgtgaatgtgagaattgctgtgtccaagcccagcggcccccagccccaggccgacctgcaggccctgctgcagagcggggcccaggtgaggatggtggacatgcagaagctgacccatggagtgctgcacaccaagttctgggtggtggaccagacccacttctacctgggcagcgccaacatggactggaggagcctgacccaggtgaaggagctgggcgtggtgatgtacaactgcagctgcctggcccgggacctgaccaagatctttgaggcctactggttcctgggccaggccggcagcagcatccccagcacctggccccgcttctatgacacccgctacaaccaggagacccccatggagatctgcctgaatggcaccccagccctggcctacctggccagcgcccccccacccctgtgccccagcggccgcaccccagacctgaaggccctgctgaatgtggtggacaatgcccggagcttcatctacgtggccgtgatgaactacctgcccaccctggagttcagccacccccaccgcttctggccagccattgatgatggcctgcggcgggccacctatgaaagaggagtgaaggtgcggctgctgatcagctgctggggccacagcgagcccagcatgagggccttcctgctgagcctggccgccctgcgggacaaccacacccacagcgacatccaggtgaagctgtttgtggtgcctgcagatgaggcccaggcccgcatcccctatgcccgggtgaaccacaacaagtacatggtgacagagcgggccacctacatcggcaccagcaactggagcggcaactacttcacagaaacagctggcaccagcctgctggtgacccagaatggccggggcggcctgcggagccagctggaggccatcttcctgcgggactgggacagcccctacagccatgacctggacaccagcgctgacagcgtgggcaatgcctgccgcctgctgtag

SEQ ID NO: 29702 - DNA, 534 bp, Artificial Sequence
  derived and/or modified sequence
atgaagcccaagctgatgtaccaggagctgaaggtgcctgctgaggagcccgccaatgagctgcccatgaatgaaattgaggcctggaaggctgctgagaagaaggcccgctgggtgctgctggtgctgatcctggccgtggtgggctttggagccctgatgacccagctgttcctgtgggagtatggagacctgcacctgtttggccccaaccagaggcctgccccctgctatgacccctgtgaggccgtgctggtggagagcatccctgagggcctggacttccccaatgccagcacaggcaaccccagcaccagccaggcctggctgggcctgctggccggggcccacagcagcctggacatcgccagcttctactggaccctgaccaacaatgacacccacacccaggagcccagcgcccagcagggcgaggaggtgctgcggcagctgcagaccctggcccccaagggcgtgaatgtgagaattgctgtgtccaagcccagcggcccccagccccaggccgacctgtag

SEQ ID NO: 29703 - DNA, 390 bp, Artificial Sequence
  derived and/or modified sequence
atgaagcccaagctgatgtaccaggagctgaaggtgcctgctgaggagcccgccaatgagctgcccatgaatgaaattgaggcctggaaggctgctgagaagaaggcccgctgggtgctgctggtgctgatcctggccgtggtgggctttggagccctgatgacccagctgttcctgtgggagtatggagacctgcacctgtttggccccaaccagaggcctgccccctgctatgacccctgtgaggccgtgctggtggagagcatccctgagggcctggacttccccaatgccagcacaggcaaccccagcaccagccaggcctggctgggcctgctggccggggcccacagcagcctggacatcgccagcttctactggaccctgtag

SEQ ID NO: 29704 - DNA, 1209 bp, Artificial Sequence
  derived and/or modified sequence
atgaagcccaagctgatgtaccaggagctgaaggtgcctgctgaggagcccgccaatgagctgcccatgaatgaaattgaggcctggaaggctgctgagaagaaggcccgctgggtgctgctggtgctgatcctggccgtggtgggctttggagccctgatgacccagctgttcctgtgggagtatggagacctgcacctgtttggccccaaccagaggcctgccccctgctatgacccctgtgaggccgtgctggtggagagcatccctgagggcctgctggccggggcccacagcagcctggacatcgccagcttctactggaccctgaccaacaatgacacccacacccaggagcccagcgcccagcagggcgaggaggtgctgcggcagctgcagaccctggcccccaagggcgtgaatgtgagaattgctgtgtccaagcccagcggcccccagccccaggccgacctgcaggccctgctgcagagcggggcccaggtgaggatggtggacatgcagaagctgacccacggcgtgctgcacaccaagttctgggtggtggaccagacccacttctacctgggcagcgccaacatggactggaggagcctgacccaggtgaaggagctgggcgtggtgatgtacaactgcagctgcctggcccgggacctgaccaagatctttgaggcctactggttcctgggccaggccggcagcagcatccccagcacctggccccgcttctatgacacccgctacaaccaggagacccccatggagatctgcctgaatggcaccccagccctggcctacctggccagcgcccccccacccctgtgccccagcggccgcaccccagacctgaaggccctgctgaatgtggtggacaatgcccgctccttcatctacgtggccgtgatgaactacctgcccaccctggagttcagccacccccaccgcttctggccagccattgatgatggcctgcggcgggccacctatgagcggggcgtgaaggtgcggctgctgatcagctgctggggccacagcgagcccagcatgagggccttcctgctgagcctggccgccctgcgggacaaccacacccacagcgacatccaggtgaagctgtttgtggtgcctgcagatgaggcccaggccctgagccctgccctgccccccctgcccccacctcctccagcctag

SEQ ID NO: 29705 - DNA, 1473 bp, Artificial Sequence
  derived and/or modified sequence
atgaagcccaagctgatgtaccaggagctgaaggtgcccgccgaggaaccagcaaatgaactgcccatgaacgagatagaagcatggaaggcagcggagaagaaagctcgatgggtcctgttggtgctgatcctcgcggtagttggtttcggtgcgctgatgacacagttattcctctgggaatacggggacctccacctctttggtcccaatcaacgccctgctccttgttacgatccttgcgaggccgtccttgtcgaaagcatcccagaggggctggatttcccaaatgcttccacgggcaaccccagcacctcccaggcctggctcggactgttagccggagcacactcatcactggacatcgcttctttttattggactctgactaataacgacacccacacacaggagccttccgcacagcagggagaagaggtgctccgtcagttgcagaccctggctcccaaaggtgtgaatgttcgtattgcagtttccaaacctagcgggccccagccccaagccgatctgcaagcccttctgcagagcggggcccaagtgaggatggtggatatgcagaagttgacgcacggcgttctgcatactaaattttgggtagtcgaccagacccacttctaccttgggtccgcaaacatggattggcgaagcttgacccaagtgaaggagctgggcgtcgttatgtataattgctcctgcctggctagagacctgactaagatttttgaggcctattggttcctgggccaggccggcagctcaatcccctccacctggcccaggttttacgatactcggtataatcaggaaacgccaatggaaatctgtctcaatgggacccccgccctggcctacctcgccagtgcaccaccacccttgtgtccctcaggcagaactcctgatcttaaggccctgttgaacgtggttgacaacgcccggagttttatttatgtggccgtaatgaactatctgcccaccctggagttcagccacccccatcggttttggcctgccattgatgacgggctgagaagggccacgtacgaacggggtgtgaaggtgcgactactgattagctgctggggacatagtgaaccttccatgcgggcttttctattgagtcttgcagcacttagggataaccacacacattctgatattcaggtcaagctcttcgtggttccagcggacgaggctcaagcccgaataccctacgcgcgggtaaaccacaacaagtacatggtcaccgagcgggcaacgtacatcgggacgagtaactggtctggcaactacttcacagagaccgccggtacttcgttgttggtaactcagaatggcagaggaggtcttcggtcccagctcgaggccatttttctccgcgactgggatagtccctactcacatgacctcgatacctcagcagactctgtggggaacgcatgtagactcctttag

SEQ ID NO: 29706 - DNA, 534 bp, Artificial Sequence
  derived and/or modified sequence
atgaagcccaagctgatgtaccaggagctgaaggtgcccgccgaggaacctgccaacgagctgcccatgaacgaaattgaagcgtggaaagccgcagagaagaaagcccgttgggttcttctggtgctcattctggccgtggtgggtttcggcgccctgatgacgcagctattcctttgggagtacggggacctgcacctgttcggtccaaaccagagacccgcaccatgctatgatccctgcgaagccgttttggtcgaatccatacctgagggcttagacttcccgaacgcttccaccggcaatcccagtacctcacaggcttggctcggactgctggcaggcgctcatagctccttggatattgccagcttctactggactctcaccaataatgacacacacacacaggagccgtccgctcagcagggcgaagaggtgctcagacagctgcaaacgctcgcccctaagggcgtaaatgtccggattgctgtgagtaagcctagtgggccccagcctcaggcagacctgtag

SEQ ID NO: 29707 - DNA, 390 bp, Artificial Sequence
  derived and/or modified sequence
atgaagcccaagctgatgtaccaggagctgaaggtgcccgccgaggagcctgccaatgaacttccaatgaatgagatcgaggcctggaaagcggcggagaagaaagcacgttgggttcttttagtcctaatccttgccgtcgtgggctttggggcgcttatgacccagctgttcttgtgggagtacggggatctccaccttttcggacccaaccaaagacccgccccctgttatgacccatgcgaggccgtcttggtggagtctatacctgaaggtctagatttccctaatgcgtcaacggggaacccgagcaccagtcaggcctggttgggcttactggccggcgctcactcgtcgctggatattgcctcattttactggactctttag

SEQ ID NO: 29708 - DNA, 1473 bp, Artificial Sequence
  derived and/or modified sequence
atgaagcccaagctgatgtaccaggagctgaaggtgcccgccgaggaaccggccaacgagctgcctatgaacgagatcgaggcttggaaagctgctgagaagaaagcacggtgggtcctgttggttctcattttggccgtcgtcggattcggcgccctgatgacgcagttatttctgtgggaatacggagatctgcatctgttcgggcctaatcaacggccggcaccatgttacgatccctgcgaagcagttctggtcgagtcaatacctgagggcctggactttccaaatgcatccaccggtaaccccagtactagccaggcctggcttggactcttagctggggctcactccagcttggatatagcatcattctattggactctgaccaacaacgatacccacacccaggaaccttccgcgcagcagggagaggaggtcctacgtcagttgcagacactcgcaccaaaaggagtgaatgtaagaattgcagtttctaagccttccgggccgcaacctcaggccgacctccaagcgctgctccagtccggggcccaagtgagaatggtcgacatgcagaaactgacacatggagtcctacatactaaattctgggtcgtggaccagacgcatttctatctcggttcagccaatatggattggcgatccctgacacaggtgaaggaacttggtgtggtaatgtataactgctcatgcctggcaagagacctgactaagatctttgaggcctattggttcctaggccaggccggatcttcaattccaagcacatggccccggttttacgacacccgttataatcaggaaaccccaatggaaatttgcttaaacggaacgcccgcactggcctatttagcctccgcaccaccacccttatgtcctagcggacgaacccccgatcttaaagccctcctgaacgtggttgataacgcgaggtcattcatctacgtcgccgtgatgaattatttgcccactctggagttttcacaccctcatcgattttggccagcaatcgatgacggcttgagacgcgcaacctacgaaagaggtgtgaaagttagacttctgatctcctgctggggtcacagtgaaccttctatgcgagcttttctcctcagcctcgccgccctccgagacaatcacacacacagcgacatacaggtgaagctttttgtggttccagcagatgaggcacaggccaggattccctatgctagggtgaatcataacaagtacatggtcaccgagagggccacatacatcgggacaagcaactggagcggcaattacttcaccgagacggcgggaactagcctgcttgtgacccagaatggcagaggaggactccgtagtcaactggaagctatctttttgagggactgggattccccgtatagccacgacctggacacctcagcggacagtgtgggcaatgcatgtcggctgctgtag

SEQ ID NO: 29709 - DNA, 1473 bp, Artificial Sequence
  derived and/or modified sequence
atgaagcccaagctgatgtaccaggagctgaaggtgcccgccgaggaacctgcaaacgaactgccaatgaacgaaattgaggcatggaaggccgcagaaaaaaaagctagatgggtgctcttggtcctgattcttgctgtggtgggttttggcgcactgatgacccagctatttctatgggagtatggagacctccacctctttggtccaaaccaaaggcctgccccctgctacgacccatgcgaggctgttcttgtggagagcattcctgaggggctagacttccctaacgccagcacaggcaacccgtcgacgtcccaggcctggctggggctcctggccggcgctcacagtagtctggatatcgcatctttttactggacactaactaacaatgatacccacacacaagagccttcagctcagcagggagaagaagtgctccggcaactgcagacgctggcccccaaaggcgtcaacgtgcgaatcgctgtatccaagccttcaggcccccagccccaagccgatctccaggctctgctccagagcggagctcaggtccggatggtggacatgcagaaactgactcatggagtactgcacacaaaattctgggtcgtggatcaaacacatttttacctggggtccgctaacatggattggcggagtctcacccaggttaaagagttgggcgtggtaatgtacaactgctcgtgccttgcccgcgaccttactaaaatcttcgaagcctattggttcctggggcaggctggttcgagtattccttccacctggcccagattttacgacacccggtataaccaggaaactccgatggagatttgcctgaacgggacccccgcattggcatacctggcatcagcccctcctccgttgtgcccatctggccgcacaccagacttgaaggcccttctgaatgtcgtcgacaatgcacgttcatttatctatgtggcagtgatgaactatttgcccaccctcgaattctcacaccctcaccgattttggcccgctattgatgatggcctacggagggctacctatgaaagaggggtcaaagtcagacttcttatctcatgctggggacactccgagccatccatgcgcgcctttctgttgagtctcgctgctctccgggacaatcacactcactctgatattcaggtgaaattatttgtggtgcccgcagatgaggctcaggcccgaattccctatgcccgggttaatcataataagtacatggtgactgaacgggccacgtacattggaacatctaattggagcgggaactatttcaccgagacggctgggacatcattgctagttacccagaacggacgcgggggtctgcgaagccagctggaggccattttcctgcgagactgggattcgccatattctcatgatctcgacacctcggccgactcagtggggaatgcctgtcgacttctgtag

SEQ ID NO: 29710 - DNA, 1473 bp, Artificial Sequence
  derived and/or modified sequence
atgaagcccaagctgatgtaccaggagctgaaggtgcccgccgaggagccagctaacgagttgccaatgaatgagatagaagcctggaaggcagccgagaagaaagctcgctgggtactcctcgtactgatcctggcagtggtgggcttcggcgcactcatgacacagcttttcttgtgggaatacggcgatctgcatctgtttggcccaaatcagcggccagccccttgctatgatccatgtgaagccgttctggtagagtccatccccgagggcctggatttcccaaacgcttcaaccggaaacccttcaaccagccaggcttggttaggtcttctagcgggggcccatagctctctggatatagcttctttctactggactctgactaacaacgacacgcacacccaggagccctctgcacagcagggagaagaggtgcttcgccaactgcagacacttgcccccaagggcgttaacgttcgtattgcggtaagcaagccctccggcccacagccccaagccgatctgcaagctttacttcagtccggagctcaagtccgtatggtggatatgcagaagttaacccacggcgttctgcataccaagttttgggtcgtggaccagacgcacttttacttaggaagcgcgaatatggactggaggtctctgacacaggtaaaggaactcggcgtggtgatgtacaattgctcctgtttggcacgggaccttacgaaaatttttgaagcatattggtttcttgggcaggccgggtcctcgatcccttctacctggcccagattttacgataccagatacaatcaagagactcctatggagatttgtctcaacgggacccccgctctggcatatttagcatcagcgccaccgcctctctgcccatcagggaggacaccagatcttaaggcactgcttaatgttgttgataatgccaggagcttcatctatgtggcagttatgaattacctgcccaccctggagttcagccatccgcatagattctggccagctatcgacgatggactaaggcgggcgacgtacgagaggggagtgaaagtgcgccttttaattagctgctgggggcacagcgagccttccatgcgcgctttccttctgtccctagctgcgcttcgcgacaaccatacccattcggacattcaagttaaattgttcgtcgtgcctgccgacgaagcccaggcccgtatcccatacgctcgcgtcaatcacaataagtacatggtgaccgaaagagcaacctatatcggtaccagcaattggtccggcaattacttcacggagacagcggggaccagtctactggtgacacagaatgggcggggcggactgagatcacagctggaagcgatctttttgcgtgattgggactcaccttattctcatgatctagacacgtccgcggattctgtgggcaacgcttgcagactcttgtag

SEQ ID NO: 29711 - DNA, 1473 bp, Artificial Sequence
  derived and/or modified sequence
atgaagcccaagctgatgtaccaggagctgaaggtgcccgccgaggagcccgctaacgaactgcccatgaatgagattgaagcctggaaggctgcagagaaaaaagcacgctgggttctgctagtattaatcctagctgtggtgggtttcggggccctgatgacgcaactgtttttgtgggaatacggcgatctgcatctcttcgggcctaaccagagacctgccccctgctatgacccgtgtgaggccgttctcgtcgagtccatcccagaggggctggattttccaaatgccagcacagggaacccctctacaagccaggcctggcttggcttgctggctggcgctcactcctctctcgacatagcttctttttactggaccttgacaaacaacgatacccatacgcaagagccgtctgcacagcagggcgaggaagttctgagacagcttcaaacgctagcacccaaaggcgttaatgtgcgcattgcggttagcaaacctagcggcccccaacctcaggcagatctccaagctctgctgcagagcggcgcccaagtgcgaatggttgatatgcagaagctcactcacggggtcttgcataccaagttctgggtggtggaccagacgcacttctacctgggctcagccaacatggactggaggagcctcacacaggtgaaagaactgggggtggtaatgtacaattgttcctgtttggccagggaccttacgaagattttcgaggcgtactggttcctgggccaggccggcagcagtatcccttctacctggccacgattctacgacacacggtacaatcaggagacaccaatggaaatctgccttaatgggacacccgccctggcctacctggctagcgcgccaccacccctgtgtccttccggcagaacacccgatctcaaggccctccttaacgtggtcgataacgcccgttctttcatctacgtcgcagtgatgaactaccttcccacgctcgagttttctcacccccacagattttggccagccattgatgacgggcttcgccgtgctacctatgagaggggtgtcaaagtccggctgttaatcagctgctggggacactcagaaccgtctatgcgcgctttcctgctaagtttggcagcgcttcgcgacaatcacactcatagcgatattcaggtgaagttattcgtggttccagccgatgaagctcaagcccgcatcccatatgctcgtgtaaatcacaacaaatatatggtcaccgaaagggcaacttacatcgggacgtccaactggtccggcaactactttaccgaaacagcaggcacttctctcctggtgacccaaaatgggcgcggaggactgcggtcccagttggaggccatcttcctgagggactgggactcaccgtattcccatgacctcgatacctccgccgacagcgtcggcaatgcatgtaggttactgtag

SEQ ID NO: 29712 - DNA, 1209 bp, Artificial Sequence
  derived and/or modified sequence
atgaagcccaagctgatgtaccaggagctgaaggtgcccgccgaggagcccgctaacgagttgccaatgaatgaaattgaagcgtggaaagcggccgaaaagaaggctcgttgggtgctactcgtgctcatcctggctgttgtgggctttggggcattaatgactcaactcttcctatgggaatacggcgacttacatctcttcggccccaatcaacggccagccccatgctacgacccatgcgaggcagtgctggtagagtctattcctgaaggcctgctcgctggtgctcatagcagcctggacatcgccagtttttattggaccctgacaaataacgacacacatacgcaggaaccctcagcacagcagggagaggaagttctgagacagttacagaccctggccccgaagggggtaaacgtgaggatcgcagtatcgaagccaagcgggccacagccacaggctgatctgcaggctctcctccagtccggcgcccaggtccgcatggtcgacatgcagaagctgacccatggtgtcttgcacaccaagttttgggttgtagaccaaactcatttctatttaggatccgctaatatggattggagatcactcacgcaagttaaagaactcggcgtcgttatgtataactgctcatgcctggccagagatttgacaaagatattcgaggcttactggtttctgggccaagccggctcctccattccctccacttggccacgattttacgacaccagatacaatcaagaaacgcccatggagatttgcttgaacgggacccccgcccttgcgtatctcgcgtccgcgcctccccctctgtgtccctcggggcggacgcccgatctgaaggcgttacttaacgttgtcgacaatgcgcggagttttatatacgttgctgtcatgaattatctcccaacattagagttcagccacccacaccggttttggcccgctatcgacgatggcctcaggcgcgctacgtacgagcgcggagtgaaagttagactgcttatttcctgctggggccacagcgaaccatctatgagggcctttctgctgagcttggccgctctacgagataaccatactcactctgatatccaggtaaagttgttcgtggtacctgctgacgaggctcaggcactgtcacctgcattaccaccactgccgccgccccctccagcctag

SEQ ID NO: 29713 - DNA, 1906 bp, Artificial Sequence
  derived and/or modified sequence
gtcaggcggggatacagcctggaaggtaatgcatgtccatggtacacaaattcacaagtttggagaccctgacacacccaccttctcacctgggctctgcgtatcccccagccttgagggaagatgaagcctaaactgatgtaccaggagctgaaggtgcctgcagaggagcccgccaatgagctgcccatgaatgagattgaggcgtggaaggctgcggaaaagaaagcccgctgggtcctgctggtcctcattctggcggttgtgggcttcggagccctgatgactcagctgtttctatgggaatacggcgacttgcatctctttgggcccaaccagcgcccagccccctgctatgacccttgcgaagcagtgctggtggaaagcattcctgagggcctggacttccccaatgcctccacggggaacccttccaccagccaggcctggctgggcctgctcgccggtgcgcacagcagcctggacatcgcctccttctactggaccctcaccaacaatgacacccacacgcaggagccctctgcccagcagggtgaggaggtcctccggcagctgcagaccctggcaccaaagggcgtgaacgtccgcatcgctgtgagcaagcccagcgggccccagccacaggcggacctgcaggctctgctgcagagcggtgcccaggtccgcatggtggacatgcagaagctgacccatggcgtcctgcataccaagttctgggtggtggaccagacccacttctacctgggcagtgccaacatggactggcgttcactgacccaggtcaaggagctgggcgtggtcatgtacaactgcagctgcctggctcgagacctgaccaagatctttgaggcctactggttcctgggccaggcaggcagctccatcccatcaacttggccccggttctatgacacccgctacaaccaagagacaccaatggagatctgcctcaatggaacccctgctctggcctacctggcgagtgcgcccccacccctgtgtccaagtggccgcactccagacctgaaggctctactcaacgtggtggacaatgcccggagtttcatctacgtcgctgtcatgaactacctgcccactctggagttctcccaccctcacaggttctggcctgccattgacgatgggctgcggcgggccacctacgagcgtggcgtcaaggtgcgcctgctcatcagctgctggggacactcggagccatccatgcgggccttcctgctctctctggctgccctgcgtgacaaccatacccactctgacatccaggtgaaactctttgtggtccccgcggatgaggcccaggctcgaatcccatatgcccgtgtcaaccacaacaagtacatggtgactgaacgcgccacctacatcggaacctccaactggtctggcaactacttcacggagacggcgggcacctcgctgctggtgacgcagaatgggaggggcggcctgcggagccagctggaggccattttcctgagggactgggactccccttacagccatgaccttgacacctcagctgacagcgtgggcaacgcctgccgcctgctctgaggcccgatccagtgggcaggccaaggcctgctgggcccccgcggacccaggtgctctgggtcacggtccctgtccccgcgcccccgcttctgtctgccccattgtggctcctcaggctctctcccctgctctcccacctctacctccacccccaccggcctgacgctgtggccccgggacccagcagagctgggggagggatcagcccccaaagaaatgggggtgcatgctgggcctggccccctggcccacccccactttccagggcaaaaagggcccagggttataataagtaaataacttgtctgta

SEQ ID NO: 29714 - DNA, 745 bp, Artificial Sequence
  derived and/or modified sequence
ctggctgagctgtgtggtgtgggggcacctgagggcggaggagccacctagaatataccccctgtcccagggctgagaaaagccaggcacaaagacctggggctccgctgacctcatccagcgctgcctttcttggggtgtctacagtttggagaccctgacacacccaccttctcacctgggctctgcgtatcccccagccttgagggaagatgaagcctaaactgatgtaccaggagctgaaggtgcctgcagaggagcccgccaatgagctgcccatgaatgagattgaggcgtggaaggctgcggaaaagaaagcccgctgggtcctgctggtcctcattctggcggttgtgggcttcggagccctgatgactcagctgtttctatgggaatacggcgacttgcatctctttgggcccaaccagcgcccagccccctgctatgacccttgcgaagcagtgctggtggaaagcattcctgagggcctggacttccccaatgcctccacggggaacccttccaccagccaggcctggctgggcctgctcgccggtgcgcacagcagcctggacatcgcctccttctactggaccctcaccaacaatgacacccacacgcaggagccctctgcccagcagggtgaggaggtcctccggcagctgcagaccctggcaccaaagggcgtgaacgtccgcatcgctgtgagcaagcccagcgggccccagccacaggcggacctgca

SEQ ID NO: 29715 - DNA, 873 bp, Artificial Sequence
  derived and/or modified sequence
ggcgctcccctccgcccgaagctagcaagcggcgcggccaatgagaaaggcgcatgcctggcccccgccggcctgcagtctagccgtagtgcgcctgcgcgcggctaggaggggccgtcaggcggggatacagcctggaaggtaatgcatgtccatggtacacaaattcacaaggctggagcgaccgtgtctggggagccgagccccgcttctcgctgcggtgagcccggactggggcacgcactgcgcagactccccgctgcagtgggcggagctcccacaggccccgccccctcctcccaccctcgttcagcctgtccagacagaagctggggcccaccggaggtagctgcagacgcctgagagcgaggccgaggcccctcagggaacaccccacacagtgcccacttttgttctgccagtttggagaccctgacacacccaccttctcacctgggctctgcgtatcccccagccttgagggaagatgaagcctaaactgatgtaccaggagctgaaggtgcctgcagaggagcccgccaatgagctgcccatgaatgagattgaggcgtggaaggctgcggaaaagaaagcccgctgggtcctgctggtcctcattctggcggttgtgggcttcggagccctgatgactcagctgtttctatgggaatacggcgacttgcatctctttgggcccaaccagcgcccagccccctgctatgacccttgcgaagcagtgctggtggaaagcattcctgagggcctggacttccccaatgcctccacggggaacccttccaccagccaggcctggctgggcctgctcgccggtgcgcacagcagcctggacatcgcctccttctactggaccct

SEQ ID NO: 29716 - DNA, 2115 bp, Artificial Sequence
  derived and/or modified sequence
ctctttataatttagtttccatagaagttatatgtgcatttaaaaaaattcaatgctggagcgaccgtgtctggggagccgagccccgcttctcgctgcggtgagcccggactggggcacgcactgcgcagactccccgctgcagtgggcggagctcccacaggccccgccccctcctcccaccctcgttcagcctgtccagacagaagctggggcccaccggaggtagctgcagacgcctgagagcgaggccgaggcccctcagggtttggagaccctgacacacccaccttctcacctgggctctgcgtatcccccagccttgagggaagatgaagcctaaactgatgtaccaggagctgaaggtgcctgcagaggagcccgccaatgagctgcccatgaatgagattgaggcgtggaaggctgcggaaaagaaagcccgctgggtcctgctggtcctcattctggcggttgtgggcttcggagccctgatgactcagctgtttctatgggaatacggcgacttgcatctctttgggcccaaccagcgcccagccccctgctatgacccttgcgaagcagtgctggtggaaagcattcctgagggcctggacttccccaatgcctccacggggaacccttccaccagccaggcctggctgggcctgctcgccggtgcgcacagcagcctggacatcgcctccttctactggaccctcaccaacaatgacacccacacgcaggagccctctgcccagcagggtgaggaggtcctccggcagctgcagaccctggcaccaaagggcgtgaacgtccgcatcgctgtgagcaagcccagcgggccccagccacaggcggacctgcaggctctgctgcagagcggtgcccaggtccgcatggtggacatgcagaagctgacccatggcgtcctgcataccaagttctgggtggtggaccagacccacttctacctgggcagtgccaacatggactggcgttcactgacccaggtcaaggagctgggcgtggtcatgtacaactgcagctgcctggctcgagacctgaccaagatctttgaggcctactggttcctgggccaggcaggcagctccatcccatcaacttggccccggttctatgacacccgctacaaccaagagacaccaatggagatctgcctcaatggaacccctgctctggcctacctggcgagtgcgcccccacccctgtgtccaagtggccgcactccagacctgaaggctctactcaacgtggtggacaatgcccggagtttcatctacgtcgctgtcatgaactacctgcccactctggagttctcccaccctcacaggttctggcctgccattgacgatgggctgcggcgggccacctacgagcgtggcgtcaaggtgcgcctgctcatcagctgctggggacactcggagccatccatgcgggccttcctgctctctctggctgccctgcgtgacaaccatacccactctgacatccaggtgaaactctttgtggtccccgcggatgaggcccaggctcgaatcccatatgcccgtgtcaaccacaacaagtacatggtgactgaacgcgccacctacatcggaacctccaactggtctggcaactacttcacggagacggcgggcacctcgctgctggtgacgcagaatgggaggggcggcctgcggagccagctggaggccattttcctgagggactgggactccccttacagccatgaccttgacacctcagctgacagcgtgggcaacgcctgccgcctgctctgaggcccgatccagtgggcaggccaaggcctgctgggcccccgcggacccaggtgctctgggtcacggtccctgtccccgcgcccccgcttctgtctgccccattgtggctcctcaggctctctcccctgctctcccacctctacctccacccccaccggcctgacgctgtggccccgggacccagcagagctgggggagggatcagcccccaaagaaatgggggtgcatgctgggcctggccccctggcccacccccactttccagggcaaaaagggcccagggttataataagtaaataacttgtctgta

SEQ ID NO: 29717 - DNA, 1966 bp, Artificial Sequence
  derived and/or modified sequence
ctgcgcgcggctaggaggggccgtcaggcggggatacagcctggaaggtgcgtgtggggctgggtctcggagtgggagacgtggagtgcagaacaccccacacagtgcccacttttgttctgccagtttggagaccctgacacacccaccttctcacctgggctctgcgtatcccccagccttgagggaagatgaagcctaaactgatgtaccaggagctgaaggtgcctgcagaggagcccgccaatgagctgcccatgaatgagattgaggcgtggaaggctgcggaaaagaaagcccgctgggtcctgctggtcctcattctggcggttgtgggcttcggagccctgatgactcagctgtttctatgggaatacggcgacttgcatctctttgggcccaaccagcgcccagccccctgctatgacccttgcgaagcagtgctggtggaaagcattcctgagggcctggacttccccaatgcctccacggggaacccttccaccagccaggcctggctgggcctgctcgccggtgcgcacagcagcctggacatcgcctccttctactggaccctcaccaacaatgacacccacacgcaggagccctctgcccagcagggtgaggaggtcctccggcagctgcagaccctggcaccaaagggcgtgaacgtccgcatcgctgtgagcaagcccagcgggccccagccacaggcggacctgcaggctctgctgcagagcggtgcccaggtccgcatggtggacatgcagaagctgacccatggcgtcctgcataccaagttctgggtggtggaccagacccacttctacctgggcagtgccaacatggactggcgttcactgacccaggtcaaggagctgggcgtggtcatgtacaactgcagctgcctggctcgagacctgaccaagatctttgaggcctactggttcctgggccaggcaggcagctccatcccatcaacttggccccggttctatgacacccgctacaaccaagagacaccaatggagatctgcctcaatggaacccctgctctggcctacctggcgagtgcgcccccacccctgtgtccaagtggccgcactccagacctgaaggctctactcaacgtggtggacaatgcccggagtttcatctacgtcgctgtcatgaactacctgcccactctggagttctcccaccctcacaggttctggcctgccattgacgatgggctgcggcgggccacctacgagcgtggcgtcaaggtgcgcctgctcatcagctgctggggacactcggagccatccatgcgggccttcctgctctctctggctgccctgcgtgacaaccatacccactctgacatccaggtgaaactctttgtggtccccgcggatgaggcccaggctcgaatcccatatgcccgtgtcaaccacaacaagtacatggtgactgaacgcgccacctacatcggaacctccaactggtctggcaactacttcacggagacggcgggcacctcgctgctggtgacgcagaatgggaggggcggcctgcggagccagctggaggccattttcctgagggactgggactccccttacagccatgaccttgacacctcagctgacagcgtgggcaacgcctgccgcctgctctgaggcccgatccagtgggcaggccaaggcctgctgggcccccgcggacccaggtgctctgggtcacggtccctgtccccgcgcccccgcttctgtctgccccattgtggctcctcaggctctctcccctgctctcccacctctacctccacccccaccggcctgacgctgtggccccgggacccagcagagctgggggagggatcagcccccaaagaaatgggggtgcatgctgggcctggccccctggcccacccccactttccagggcaaaaagggcccagggttataataagtaaataact

SEQ ID NO: 29718 - DNA, 2180 bp, Artificial Sequence
  derived and/or modified sequence
cggctaggaggggccgtcaggcggggatacagcctggaaggtgcgtgtggggctgggtctcggagtgggagacgtggagtgcaggctggagcgaccgtgtctggggagccgagccccgcttctcgctgcggtgagcccggactggggcacgcactgcgcagactccccgctgcagtgggcggagctcccacaggccccgccccctcctcccaccctcgttcagcctgtccagacagaagctggggcccaccggaggtagctgcagacgcctgagagcgaggccgaggcccctcagggaacaccccacacagtgcccacttttgttctgccagtttggagaccctgacacacccaccttctcacctgggctctgcgtatcccccagccttgagggaagatgaagcctaaactgatgtaccaggagctgaaggtgcctgcagaggagcccgccaatgagctgcccatgaatgagattgaggcgtggaaggctgcggaaaagaaagcccgctgggtcctgctggtcctcattctggcggttgtgggcttcggagccctgatgactcagctgtttctatgggaatacggcgacttgcatctctttgggcccaaccagcgcccagccccctgctatgacccttgcgaagcagtgctggtggaaagcattcctgagggcctggacttccccaatgcctccacggggaacccttccaccagccaggcctggctgggcctgctcgccggtgcgcacagcagcctggacatcgcctccttctactggaccctcaccaacaatgacacccacacgcaggagccctctgcccagcagggtgaggaggtcctccggcagctgcagaccctggcaccaaagggcgtgaacgtccgcatcgctgtgagcaagcccagcgggccccagccacaggcggacctgcaggctctgctgcagagcggtgcccaggtccgcatggtggacatgcagaagctgacccatggcgtcctgcataccaagttctgggtggtggaccagacccacttctacctgggcagtgccaacatggactggcgttcactgacccaggtcaaggagctgggcgtggtcatgtacaactgcagctgcctggctcgagacctgaccaagatctttgaggcctactggttcctgggccaggcaggcagctccatcccatcaacttggccccggttctatgacacccgctacaaccaagagacaccaatggagatctgcctcaatggaacccctgctctggcctacctggcgagtgcgcccccacccctgtgtccaagtggccgcactccagacctgaaggctctactcaacgtggtggacaatgcccggagtttcatctacgtcgctgtcatgaactacctgcccactctggagttctcccaccctcacaggttctggcctgccattgacgatgggctgcggcgggccacctacgagcgtggcgtcaaggtgcgcctgctcatcagctgctggggacactcggagccatccatgcgggccttcctgctctctctggctgccctgcgtgacaaccatacccactctgacatccaggtgaaactctttgtggtccccgcggatgaggcccaggctcgaatcccatatgcccgtgtcaaccacaacaagtacatggtgactgaacgcgccacctacatcggaacctccaactggtctggcaactacttcacggagacggcgggcacctcgctgctggtgacgcagaatgggaggggcggcctgcggagccagctggaggccattttcctgagggactgggactccccttacagccatgaccttgacacctcagctgacagcgtgggcaacgcctgccgcctgctctgaggcccgatccagtgggcaggccaaggcctgctgggcccccgcggacccaggtgctctgggtcacggtccctgtccccgcgcccccgcttctgtctgccccattgtggctcctcaggctctctcccctgctctcccacctctacctccacccccaccggcctgacgctgtggccccgggacccagcagagctgggggagggatcagcccccaaagaaatgggggtgcatgctgggcctggccccctggcccacccccactttccagggcaaaaagggcccagggttataataagtaaataacttgtctgta

SEQ ID NO: 29719 - DNA, 2104 bp, Artificial Sequence
  derived and/or modified sequence
tgcgtgtggggctgggtctcggagtgggagacgtggagtgcaggctggagcgaccgtgtctggggagccgagccccgcttctcgctgcggtgagcccggactggggcacgcactgcgcagactccccgctgcagtgggcggagctcccacaggccccgccccctcctcccaccctcgttcagcctgtccagacagaagctggggcccaccggaggtagctgcagacgcctgagagcgaggccgaggcccctcagggtttggagaccctgacacacccaccttctcacctgggctctgcgtatcccccagccttgagggaagatgaagcctaaactgatgtaccaggagctgaaggtgcctgcagaggagcccgccaatgagctgcccatgaatgagattgaggcgtggaaggctgcggaaaagaaagcccgctgggtcctgctggtcctcattctggcggttgtgggcttcggagccctgatgactcagctgtttctatgggaatacggcgacttgcatctctttgggcccaaccagcgcccagccccctgctatgacccttgcgaagcagtgctggtggaaagcattcctgagggcctggacttccccaatgcctccacggggaacccttccaccagccaggcctggctgggcctgctcgccggtgcgcacagcagcctggacatcgcctccttctactggaccctcaccaacaatgacacccacacgcaggagccctctgcccagcagggtgaggaggtcctccggcagctgcagaccctggcaccaaagggcgtgaacgtccgcatcgctgtgagcaagcccagcgggccccagccacaggcggacctgcaggctctgctgcagagcggtgcccaggtccgcatggtggacatgcagaagctgacccatggcgtcctgcataccaagttctgggtggtggaccagacccacttctacctgggcagtgccaacatggactggcgttcactgacccaggtcaaggagctgggcgtggtcatgtacaactgcagctgcctggctcgagacctgaccaagatctttgaggcctactggttcctgggccaggcaggcagctccatcccatcaacttggccccggttctatgacacccgctacaaccaagagacaccaatggagatctgcctcaatggaacccctgctctggcctacctggcgagtgcgcccccacccctgtgtccaagtggccgcactccagacctgaaggctctactcaacgtggtggacaatgcccggagtttcatctacgtcgctgtcatgaactacctgcccactctggagttctcccaccctcacaggttctggcctgccattgacgatgggctgcggcgggccacctacgagcgtggcgtcaaggtgcgcctgctcatcagctgctggggacactcggagccatccatgcgggccttcctgctctctctggctgccctgcgtgacaaccatacccactctgacatccaggtgaaactctttgtggtccccgcggatgaggcccaggctcgaatcccatatgcccgtgtcaaccacaacaagtacatggtgactgaacgcgccacctacatcggaacctccaactggtctggcaactacttcacggagacggcgggcacctcgctgctggtgacgcagaatgggaggggcggcctgcggagccagctggaggccattttcctgagggactgggactccccttacagccatgaccttgacacctcagctgacagcgtgggcaacgcctgccgcctgctctgaggcccgatccagtgggcaggccaaggcctgctgggcccccgcggacccaggtgctctgggtcacggtccctgtccccgcgcccccgcttctgtctgccccattgtggctcctcaggctctctcccctgctctcccacctctacctccacccccaccggcctgacgctgtggccccgggacccagcagagctgggggagggatcagcccccaaagaaatgggggtgcatgctgggcctggccccctggcccacccccactttccagggcaaaaagggcccagggttataataagtaaataacttgtctgta

SEQ ID NO: 29720 - DNA, 1430 bp, Artificial Sequence
  derived and/or modified sequence
atacagcctggaaggtgcgtgtggggctgggtctcggagtgggagacgtggagtgcagtttggagaccctgacacacccaccttctcacctgggctctgcgtatcccccagccttgagggaagatgaagcctaaactgatgtaccaggagctgaaggtgcctgcagaggagcccgccaatgagctgcccatgaatgagattgaggcgtggaaggctgcggaaaagaaagcccgctgggtcctgctggtcctcattctggcggttgtgggcttcggagccctgatgactcagctgtttctatgggaatacggcgacttgcatctctttgggcccaaccagcgcccagccccctgctatgacccttgcgaagcagtgctggtggaaagcattcctgagggcctgctcgccggtgcgcacagcagcctggacatcgcctccttctactggaccctcaccaacaatgacacccacacgcaggagccctctgcccagcagggtgaggaggtcctccggcagctgcagaccctggcaccaaagggcgtgaacgtccgcatcgctgtgagcaagcccagcgggccccagccacaggcggacctgcaggctctgctgcagagcggtgcccaggtccgcatggtggacatgcagaagctgacccatggcgtcctgcataccaagttctgggtggtggaccagacccacttctacctgggcagtgccaacatggactggcgttcactgacccaggtcaaggagctgggcgtggtcatgtacaactgcagctgcctggctcgagacctgaccaagatctttgaggcctactggttcctgggccaggcaggcagctccatcccatcaacttggccccggttctatgacacccgctacaaccaagagacaccaatggagatctgcctcaatggaacccctgctctggcctacctggcgagtgcgcccccacccctgtgtccaagtggccgcactccagacctgaaggctctactcaacgtggtggacaatgcccggagtttcatctacgtcgctgtcatgaactacctgcccactctggagttctcccaccctcacaggttctggcctgccattgacgatgggctgcggcgggccacctacgagcgtggcgtcaaggtgcgcctgctcatcagctgctggggacactcggagccatccatgcgggccttcctgctctctctggctgccctgcgtgacaaccatacccactctgacatccaggtgaaactctttgtggtccccgcggatgaggcccaggctctctcccctgctctcccacctctacctccacccccaccggcctgacgctgtggccccgggacccagcagagctgggggagggatcagcccccaaagaaatgggggtgcatgctgggcctggccccctggcccacccccacttt

SEQ ID NO: 29721 - DNA, 1473 bp, Artificial Sequence
  derived and/or modified sequence
atgaagcccaagcttatgtaccaggagctgaaggtgcccgcagaggagcccgcaaacgagctgcctatgaacgagattgaggcctggaaggccgctgagaaaaaggcaagatgggtgctattggtactgatcctcgcggttgtgggtttcggggcactcatgacacaattatttctctgggaatacggcgatctgcacctcttcgggccaaaccagaggcccgctccctgctacgatccttgtgaagcagtgcttgtagagtcaattcctgaaggccttgatttccctaatgcgtccactggtaacccaagcacctctcaagcatggctgggcctgcttgcgggagctcattcatcactggacatcgcgagtttttactggactctgaccaataacgatactcatacgcaggaacccagcgctcagcaaggggaggaggtcctgcgacaactgcaaacattggcccctaaaggcgtgaacgtgcgaatcgcagtgtctaaaccctctggaccacagcctcaggcagatctgcaggccctgctgcagtcaggagcccaggttcgaatggtggacatgcaaaagctcacacacggagtcttacatacaaagttttgggttgtggatcagacacatttttatttaggttcagctaacatggactggaggagcttgacccaggtgaaggagcttggtgtggttatgtacaattgctcttgcctagcccgagatttgacgaaaattttcgaggcatactggttcctgggtcaggccggtagtagcataccaagtacatggccccgtttctacgacacaagatacaaccaggaaaccccaatggaaatttgcctaaacggaacacccgcattagcgtatctggcttctgccccaccacccttgtgcccatctggcagaacgccagacctgaaagccctcctgaatgtagtggataacgctcgatccttcatatatgtagccgtcatgaactatctgcccaccctggaattcagccacccccaccgattttggccagccattgacgacggattaaggagagccacttacgagcgaggagttaaagtgcgattactgattagctgctggggccactccgagccatccatgagggcattcttgctgtccttggctgcgctgcgcgataatcacactcactcagatatccaggtgaaactgttcgtcgtgccagcagacgaagcccaggctcggattccctacgcgagggttaaccacaataaatatatggtgacggagagagctacctacatcgggacctccaactggtccggcaactatttcaccgagactgccggtacaagtttactggttactcagaatggccgtggcggacttcgatcgcagctcgaagctatcttcctcagggattgggattctccctatagccacgacttggacacttccgccgactccgtaggcaacgcatgtcgcctgctttag

SEQ ID NO: 29722 - DNA, 534 bp, Artificial Sequence
  derived and/or modified sequence
atgaagccaaagctgatgtaccaggagctgaaggttcccgctgaggaacccgctaatgaactaccgatgaacgaaatcgaagcatggaaggcagcagagaaaaaggctcgctgggtcctccttgtgctcatccttgctgtggtgggctttggagcacttatgacacaattattcctgtgggagtacggcgatctgcacctcttcgggccaaatcagagacctgccccttgttatgacccatgcgaggctgtgctcgtcgaaagcattcccgagggactcgattttcccaatgcatcaaccggcaacccaagcacctctcaggcatggctgggactgctcgcgggagcccactcaagtctggacattgcctcattttattggactttaaccaacaacgacacccacactcaagaaccctctgctcagcagggagaagaagtcctgaggcagttgcaaactttggcacctaaaggagtgaacgtccgtatcgctgtctctaagcccagcggccctcagccccaggcagatctctag

SEQ ID NO: 29723 - DNA, 390 bp, Artificial Sequence
  derived and/or modified sequence
atgaaacccaagttgatgtatcaagagctgaaggtgcccgctgaggaaccagctaatgaactgccgatgaatgagatcgaagcttggaaggctgcagaaaagaaagcccgatgggtactgttagttcttattcttgccgtggttggcttcggcgctctcatgactcagctttttctgtgggaatatggggacctgcatttgttcggccctaaccagcggcctgccccatgttacgacccttgtgaagctgttctcgtggagtccatcccagaaggcctcgatttccctaacgccagcaccggcaacccatcaacatcccaggcttggcttggtctcctggctggagcccattcctccctggacatcgcatccttctattggactttatag

SEQ ID NO: 29724 - DNA, 1473 bp, Artificial Sequence
  derived and/or modified sequence
atgaagcccaaactgatgtaccaggaacttaaggtgcccgcagaagaacccgctaacgagttgcccatgaacgaaattgaggcctggaaggccgctgaaaaaaaggccaggtgggttttattggtcctcattctggccgtagttggatttggagctttaatgacacagctgttcctctgggaatacggagatctgcatttgttcggtcctaaccagaggccagccccttgttacgatccctgtgaggccgttctcgttgaaagtattcctgaggggttggattttcctaatgctagcaccggtaacccatcaacaagtcaggcttggctcggtctgcttgccggtgctcacagctctcttgacatcgcttcattctattggactctcactaataacgacacgcatacccaggagccctcggcacagcagggcgaggaagtgctgcgccagctccaaactctcgcccctaaaggggtaaatgttcgcatcgcggtgtctaaacctagtgggccacagccccaggccgacctccaggcacttctgcaatcaggtgctcaagtgcggatggttgacatgcaaaagcttacccacggcgtgcttcacacaaaattttgggtagtggaccagacacatttctatctggggtcagctaacatggactggagatcgttgacccaggttaaagaactgggagtggttatgtacaattgctcttgcctggcgagagaccttactaaaattttcgaggcatactggtttctgggtcaagccggttcttccataccttcgacatggcctcggttttacgatactcggtacaatcaggaaaccccaatggaaatttgcctcaacggtacacctgccctagcgtatctcgcttctgcaccaccgccactctgccctagcggtcgtacccccgatttgaaagcactcttaaatgtggtcgacaacgctcggagtttcatctacgtcgccgtgatgaactatctgcctacgctggagtttagccacccgcatcggttttggcccgctatagatgacggcctccgacgtgccacgtacgaacgcggtgtgaaagtcaggctgttgatttcctgttggggtcatagtgagccctctatgagggcatttctgctgtctcttgcggctcttcgcgacaaccacactcatagcgacatccaggtcaagctgtttgtagtaccggctgacgaggcacaggctagaattccctatgccagagtcaatcacaataaatatatggttactgagcgagcaacctatatcggcacaagcaactggtccggaaattatttcaccgagacggcgggaactagcctgttggtcacacaaaacgggaggggcggactacgttcccagctggaggcaatctttctgcgagactgggactccccatatagtcacgacctcgacactagcgccgatagcgtgggcaatgcgtgccggcttctttag

SEQ ID NO: 29725 - DNA, 1473 bp, Artificial Sequence
  derived and/or modified sequence
atgaaacctaaacttatgtaccaggagctgaaggtccccgctgaagagcccgctaacgaactcccaatgaatgagatcgaggcttggaaggcagcagaaaaaaaagccagatgggttctgttagtattgatcctggccgtcgtcggcttcggcgctttgatgacccagttgttcttatgggaatacggtgacctgcatctcttcggccctaaccagcgtcccgctccttgctacgatccctgcgaagcggttctggtggagtcgattccagagggccttgatttccctaacgcctcgacgggcaatccaagcactagccaggcttggctgggactgctagcaggagcccacagttcactggacattgcctcgttctattggacactcaccaataacgatacacacacccaggaaccttcggctcagcagggcgaggaggtgttacgacagctgcagactctcgcaccaaagggcgtcaacgtacggatcgccgtgtccaagccttctggcccacaaccgcaagcagatctgcaggccctgcttcagagcggtgcccaggttaggatggtcgatatgcagaagctcacacacggcgtcctccatacaaaattctgggtggttgatcaaactcacttctatctggggtccgcaaatatggattggcgaagcctgacccaggttaaagagctgggcgtggtgatgtataattgtagctgcctggcaagggatctgactaagatcttcgaggcgtactggtttctggggcaagcaggctccagcatcccaagtacctggcccaggttctacgacaccaggtataaccaggagactcccatggaaatctgtttgaacggcacacccgctttggcgtatctggcatccgcccctccgcctctgtgtcccagcggcagaacgcctgatctcaaggctctgctgaatgtcgtggacaatgcgaggtcatttatctacgtggccgtcatgaactatctgcctactctggagtttagtcacccacataggttctggcccgcaattgatgacgggcttcgccgagctacatacgagcgaggcgtgaaggtgcgtttgctgatcagttgttgggggcatagtgaaccctcaatgcgcgcttttctactctctctcgccgctctccgtgacaatcatacacattctgacattcaggtcaagttattcgttgtcccagccgatgaggcgcaggcaaggatcccttatgctagggtcaatcataataaatatatggtcaccgaacgcgcaacctatatcggaacctcaaattggtccggcaactatttcactgagaccgcgggtacttcgctactggttactcagaacggaagaggcggtttacggagtcaactggaggcaatcttccttagggattgggactccccatactcacacgacttagacacttcagctgattccgttggaaatgcttgtagactgctctag

SEQ ID NO: 29726 - DNA, 1473 bp, Artificial Sequence
  derived and/or modified sequence
atgaagccaaagctgatgtaccaggaattaaaggtaccagctgaagaacctgctaacgagctccccatgaacgaaatagaggcatggaaggcggctgagaagaaggccagatgggtgttgctggtcctgattttggcggttgtgggcttcggtgccctgatgacccagctctttctgtgggagtatggggatctgcatctatttgggcctaaccaaaggccagccccttgctatgacccttgtgaagccgtactggtcgaatccattcctgagggcctggattttccgaatgcaagcaccggaaacccctccactagccaagcttggctgggcctactggccggtgcccactccagccttgatattgctagtttctactggacactcacgaacaatgacactcacacccaggaaccaagtgcacaacagggagaagaagtgcttaggcagctccaaacactcgcacctaagggcgttaatgtcaggattgcagttagcaagccatccggaccacaaccccaagccgaccttcaagccttactccagtccggtgcacaggtccgcatggtggacatgcagaaactgactcatggggtgctgcacacaaagttctgggtggtggaccaaacgcacttctatcttggatcagccaatatggactggcgttctctgacccaggtcaaagaactaggggtggtgatgtacaattgtagttgcctggctagggacctgaccaaaatatttgaagcatactggtttttgggacaggccggaagcagcatcccatcaacctggccacgattttacgatactcgctacaaccaggagacgccgatggaaatctgccttaacggcactcctgccctcgcatacctggcgtccgcccctcccccactttgccccagcggtcgtacaccagacctcaaagccctgctgaatgtcgtagacaacgcgagatctttcatttatgtcgctgtaatgaattatctccctaccctggaattctcccatcctcaccgtttttggccagccattgacgacgggctccgtagagccacttacgagagaggcgtaaaagttagactgctgatatcctgttggggacactccgagccctccatgcgggcattcctgctaagcctggcggcattgcgtgataaccatacccattccgacattcaagttaaattatttgttgtgcctgccgatgaggctcaagctcgtatcccatatgcccgtgttaatcacaataaatacatggtgacggagagagccacttatatcgggacttcaaattggagtggcaattactttacggaaacagcgggtactagcctgctggttacccaaaatggaagaggtggcctcaggtcacagctggaagctattttcttgagagactgggattctccgtactcccacgatctggacacatctgcagacagtgttggaaatgcctgccgactattatag

SEQ ID NO: 29727 - DNA, 1473 bp, Artificial Sequence
  derived and/or modified sequence
atgaaacctaagcttatgtaccaggagctgaaggtaccggctgaggagcccgcaaatgagcttccaatgaatgagattgaagcatggaaggccgctgagaagaaagcccgatgggtgctgctagtgcttattctggcggttgtcgggtttggagctttgatgacacaattgtttctctgggaatatggagatctgcacctcttcggacccaaccaacgtcctgctccctgctacgatccctgcgaggccgtgttggtagaatctatcccggaaggtttggatttcccaaacgcatccaccgggaacccatctacatcccaggcctggttagggctccttgcaggggcacactccagtctggacatagcctctttctattggactttgactaacaatgacactcacacccaggaaccctcggcacagcaaggagaggaagtgttacgccagcttcaaactctggctccaaaaggcgtgaacgtgaggatagctgtttcaaagccaagtgggcctcaacctcaggccgatttacaagctctgctgcagagcggcgctcaggtgaggatggtagatatgcagaagttgacacacggggtgttgcacactaagttctgggtggttgatcagacacacttctacttgggaagcgccaatatggattggaggtccttgacgcaggtgaaggagttaggggtggtcatgtacaattgctcctgcctggccagagatctgacaaagatcttcgaggcatattggtttctgggccaagcgggtagctccattccctctacctggcctcgcttctacgatactaggtacaatcaagaaacacccatggagatttgtctgaatggcaccccagccttggcatacctggcatctgctcccccaccattgtgtccctctggtcggacaccagatctcaaagcactgttgaacgtggtagacaacgccaggtcttttatttatgtggccgtgatgaactacctacctaccctcgagttttcacacccacaccggttttggccagccatcgacgatggcctgagaagggccacgtatgagcggggagttaaggtccggttgttgatctcctgttggggacacagcgagccttctatgcgagcattcctgctgagtctggcggctctgcgcgacaatcatacccatagcgacattcaagttaagcttttcgtagttcctgctgacgaagcacaggccagaatcccatacgcaagagtgaaccataataagtatatggtgacggagagagcaacttacatcggaacctcaaactggagtggaaactatttcacagaaacagctggaaccagcctactcgtgacccagaatggccgtggtgggctgcggtcacagctggaagctatcttcctcagggactgggacagtccttacagtcatgatttagacacaagtgcagattcagtgggtaatgcatgcagactcctttag

SEQ ID NO: 29728 - DNA, 1209 bp, Artificial Sequence
  derived and/or modified sequence
atgaagccaaaactgatgtatcaagagttgaaagttcctgcggaagaaccagcaaacgaactgcctatgaatgaaattgaggcctggaaggccgcagagaagaaagcacgctgggttctactggttctgatcctcgctgttgtagggtttggggcactgatgacccagctcttcctttgggagtacggggacttacatctttttggcccaaatcagcgacccgcaccctgctacgatccatgtgaggccgtgctggtcgaaagcatcccggagggcctgctggcaggagctcactcctccctggacattgcctcattctattggactctgacgaataatgacacgcatacccaggagccaagcgcccagcagggagaggaagtactgcgacagctacaaacacttgcaccaaagggagttaatgtccgcatagcagtgagtaagccatccgggccacagccccaagcagacctccaggctcttcttcaatcaggtgctcaggtccgtatggtcgacatgcagaaactgacacacggagtactgcatacgaagttctgggtcgtcgaccagactcatttctatctgggcagcgccaatatggattggcgctctctgacccaagttaaagagttgggcgtagtcatgtataattgttcatgtttggcacgggatctgacaaagatcttcgaggcatactggttcctgggacaagctggctccagcatcccctcgacctggccacggttctacgacactcgctacaatcaggagacccccatggagatatgccttaatgggacaccagccctggcctacctggcctcagcacctcccccactttgccctagcggcagaaccccagacctgaaggcgctcctaaacgtggtagacaacgcccgaagcttcatctacgtggctgtcatgaattacctgcctaccctcgaattctctcacccacacaggttctggcctgctatagacgatggtctgaggagagcgacatacgagcgcggtgttaaggtcaggctgctgatcagctgctgggggcactctgagccgtcaatgcgcgcattcctgctgagcctcgccgcactccgtgacaaccacacccattcagacatccaggttaagctgttcgtggtccccgctgatgaggcccaggcactgtcaccagctctccctccactgcctccccctccccctgcctag

SEQ ID NO: 29729 - protein, 527 aa, Artificial Sequence
  derived and/or modified sequence
MTCPDKPGQLINWFICSLCVPRVRKLWSSRRPRTRRNLLLGTACAIYLGFLVSQVGRASLQHGQAAEKGPHRSRDTAEPSFPEIPLDGTLAPPESQGNGSTLQPNVVYITLRSKRSKPANIRGTVKPKRRKKHAVASAAPGQEALVGPSLQPQEAAREADAVAPGYAQGANLVKIGERPWRLVRGPGVRAGGPDFLQPSSRESNIRIYSESAPSWLSKDDIRRMRLLADSAVAGLRPVSSRSGARLLVLEGGAPGAVLRCGPSPCGLLKQPLDMSEVFAFHLDRILGLNRTLPSVSRKAEFIQAAAAACLSMRLAFFIFPAWEDMRVPGKCCIGHARLTWGTYQQLLKQKCWQNGRVPKPESGCTEIHHHEWSKMALFDFLLQIYNRLDTNCCGFRPRKEDACVQNGLRPKCDDQGSAALAHIIQRKHDPRHLVFIDNKGFFDRSEDNLNFKLLEGIKEFPASAVSVLKSQHLRQKLLQSLFLDKVYWESQGGRQGIEKLIDVIEHRAKILITYINAHGVKVLPMNE

SEQ ID NO: 29730 - DNA, 1584 bp, Artificial Sequence
  derived and/or modified sequence
atgacctgccccgacaagcccggccagctgatcaactggttcatctgcagcctgtgcgtgcccagagtgagaaagctgtggagcagcagaagacccagaaccagaagaaacctgctgctgggcaccgcctgcgccatctacctgggcttcctggtgagccaggtgggcagagccagcctgcagcacggccaggccgccgagaagggcccccacagaagcagagacaccgccgagcccagcttccccgagatccccctggacggcaccctggccccccccgagagccagggcaacggcagcaccctgcagcccaacgtggtgtacatcaccctgagaagcaagagaagcaagcccgccaacatcagaggcaccgtgaagcccaagagaagaaagaagcacgccgtggccagcgccgcccccggccaggaggccctggtgggccccagcctgcagccccaggaggccgccagagaggccgacgccgtggcccccggctacgcccagggcgccaacctggtgaagatcggcgagagaccctggagactggtgagaggccccggcgtgagagccggcggccccgacttcctgcagcccagcagcagagagagcaacatcagaatctacagcgagagcgcccccagctggctgagcaaggacgacatcagaagaatgagactgctggccgacagcgccgtggccggcctgagacccgtgagcagcagaagcggcgccagactgctggtgctggagggcggcgcccccggcgccgtgctgagatgcggccccagcccctgcggcctgctgaagcagcccctggacatgagcgaggtgttcgccttccacctggacagaatcctgggcctgaacagaaccctgcccagcgtgagcagaaaggccgagttcatccaggccgccgccgccgcctgcctgagcatgagactggccttcttcatcttccccgcctgggaggacatgagagtgcccggcaagtgctgcatcggccacgccagactgacctggggcacctaccagcagctgctgaagcagaagtgctggcagaacggcagagtgcccaagcccgagagcggctgcaccgagatccaccaccacgagtggagcaagatggccctgttcgacttcctgctgcagatctacaacagactggacaccaactgctgcggcttcagacccagaaaggaggacgcctgcgtgcagaacggcctgagacccaagtgcgacgaccagggcagcgccgccctggcccacatcatccagagaaagcacgaccccagacacctggtgttcatcgacaacaagggcttcttcgacagaagcgaggacaacctgaacttcaagctgctggagggcatcaaggagttccccgccagcgccgtgagcgtgctgaagagccagcacctgagacagaagctgctgcagagcctgttcctggacaaggtgtactgggagagccagggcggcagacagggcatcgagaagctgatcgacgtgatcgagcacagagccaagatcctgatcacctacatcaacgcccacggcgtgaaggtgctgcccatgaacgagtag

SEQ ID NO: 29731 - DNA, 4544 bp, Artificial Sequence
  derived and/or modified sequence
gtgaactgttgcaccgtgcaattgcacactataaatgtctttccttatctgtgtgtactcttatctcactgttctattttttctcctcatttatattaactctttcttacctttttttctgaacttctaggccttctctttccagaactggtggaagacaaatgaaacggccaagatggtaagaaacaagccgcatttctccttggggagactgataatttaaaaggtttgttgtgtcagaaacattcccagcttcatcaccaaccctttccttccacctctgcccactggagaccacttatatcccgaagcggacgcggcagctgaagtcaggaaaccatgcatcacattagcaggagccaactgcagactttaaactccgttcaacatgtggatgcggcagagaaatgacctgtccagacaagccggggcagctcataaactggttcatctgctccctgtgcgtcccgcgggtgcgtaagctctggagcagccggcgtccaaggacccggagaaaccttctgctgggcactgcgtgtgccatctacttgggcttcctggtgagccaggtggggagggcctctctccagcatggacaggcggctgagaaggggccacatcgcagccgcgacaccgccgagccatccttccctgagatacccctggatggtaccctggcccctccagagtcccagggcaatgggtccactctgcagcccaatgtggtgtacattaccctacgctccaagcgcagcaagccggccaatatccgtggcaccgtgaagcccaagcgcaggaaaaagcatgcagtggcatcggctgccccagggcaggaggctttggtcggaccatcccttcagccgcaggaagcggcaagggaagctgatgctgtagcacctgggtacgctcagggagcaaacctggttaagattggagagcgaccctggaggttggtgcggggtccgggagtgcgagccgggggcccagacttcctgcagcccagctccagggagagcaacattaggatctacagcgagagcgccccctcctggctgagcaaagatgacatccgaagaatgcgactcttggcggacagcgcagtggcagggctccggcctgtgtcctctaggagcggagcccgtttgctggtgctggaggggggcgcacctggcgctgtgctccgctgtggccctagcccctgtgggcttctcaagcagcccttggacatgagtgaggtgtttgccttccacctagacaggatcctggggctcaacaggaccctgccgtctgtgagcaggaaagcagagttcatccaagcagcagcagcagcgtgtctttccatgcgcttggcattctttattttcccagcctgggaggatatgagagttccagggaaatgctgtattggacatgcaagactcacctggggaacttatcagcagttgctgaaacagaaatgctggcagaatggccgagtacccaagcctgaatcgggttgtactgaaatacatcatcatgagtggtccaagatggcactctttgattttttgttacagatttataatcgcttagatacaaattgctgtggattcagacctcgcaaggaagatgcctgtgtacagaatggattgaggccaaaatgtgatgaccaaggttctgcggctctagcacacattatccagcgaaagcatgacccaaggcatttggtttttatagacaacaagggtttctttgacaggagtgaagataacttaaacttcaaattgttagaaggcatcaaagagtttccagcttctgcagtttctgttttgaagagccagcacttacggcagaaacttcttcagtctctgtttcttgataaagtgtattgggaaagtcaaggaggtagacaaggaattgaaaagcttatcgatgtaatagaacacagagccaaaattcttatcacctatatcaatgcacacggggtcaaagtattacctatgaatgaatgacaaaagaatcttctggctagggtgttagatatatttatgcatttttggttttgtttttaaatcaagcacatcaacctcaagcccgtttagcaatgaggcagtgtagatgaatacgtaaaataaatgactttaaccaagtagctataatgggacttagcactgtatgcatacttaaaaaggttttgaaaaacaaactacttgagaaatatttgtttatatttttctctaacatcatgctatgtgtcagtctgaacatctgacaacagaaatttcagttattattctagctaagttttgaaaacatttgtcatgctgtttaatagaaaactgcaaaccagagacactgactccattaataaaccatattttgtgccgttttgactgttctgaccaaatactaatgggaacaattcttgacgtttttctgttgctgattgttaacatagagcagtctctacactaccctgaggcaactctacattggaacactgaggcttacagcctgcaagagcatcagagctgaccatacatttaaacagaaatgctggtttatttgcaaaatcaccagtatattttctattgtgtctataaaaaatcagtcatttaagtacaagaatcatattttccattcctttttagaaatttattttgttgtccctatggaaatcattcacatctgacaatttatatgttaaagagttttactctctctattttggtccaatttgtatctagtggctgagaaattaaataattctaaagtatgaagttacctatctgaaaatgtacttacagagtatcattttaaaatggatgtctctttaaaaattttgttacttttaccaacaatgtaatataatttatgtatattttattaataatagtgaattccttaaaatttgttctatgtacttatatttaatttgatttaatggttactgcccagatattgagaattggttcaaatattgagtgtgtttcaatatattatctggcttatttcaacatgagtaatatgagcaaaataagttaaaacctgcgtctgatcaattttcctcatgactagaactaaaacagtaaatttggacaatattaagcctcaaataatcatctccaaactccttctaacactttttaaatcagattggaagacatggacaaatcaggttcatgtgttgcatctttatgtcctttgccaatatccaagatcatcacatatggtagatattcacatggagtttcaaattcagaatagattaccattaccttcctgcccttacacatcctactccttatttaaaagttctatttgtgacttttcatttcctgaaagtttaaaaatacaatttgagaatgtttataatacattctctcctgtcttttcacggttacgtctgttattgctgaaatacaccacattttctttgttctggtcaaggttaactcaatatctgtgtgaaagagaactactaacaacgttacaatagaggctagatttgaaaaaaaaaatctatagatctaattgatacaattgtagaacaaaatgtcaaaataatgttttaagtataagagaagatggaccaaggagagagagatcatttgaaaatctaattgtagcttttctaggctcacattcatgtactacttttagcacccttatgggctgtgctcgccccctggacagttgagctttggattatcttcctcttcaattttccctctattgacccgagtgtctccctctgcttctacagatttatagtactccttggctcttttgagtctccacttttactcactgtctctgggatttttaagatccttttcttctcttataaatcatcctcttaatgaaaattagcctaacaaaagtttggagactggaatcctactttgagccactgacttgaaataactcttttggcaagttgcctgacatcctgtcttaccaaggtggcatatttgcatttttactgcttaaaacatttttttttttttaccatctttatccaaatttatcatattgatggtaggactaacaggctttttagaagctggctttaactttgagtctcaagctacaatgctgttgggcagcctggtcttcccacgtgagggtttaactttgtttatttgcctccagttattccaaaatgcttattaaatgaaagtcccaggaacatgtttattttagtcacctttgctttttaacaattttgttttgtaatcaatgagtaattcatgatgaattatttttgactaatggatagccgaaggccaggcttttaattctaataggtaatgttcttcttttgtcttattgaaacaatgagaatactctgtgcatttcaaatgcactccgattatgctgtggttttattcacataagcacaatatgtgttttatttataacttcataacaaacttataatataataatttaccttagcagacatgcaaaagcttattcttgtgtgacttactttctttaagctaataatataaaaataaatatgtatcttaaaaatctataataaaacattagaaattaaa

SEQ ID NO: 29732 - DNA, 1584 bp, Artificial Sequence
  derived and/or modified sequence
atgacttgccctgataaacctgggcagctcatcaactggtttatttgcagcttgtgtgtccccagggtgcgcaagctgtggtcaagcaggcgacctagaacccgaaggaacctgttgcttggaacagcgtgtgcaatctatctgggctttctggtctcccaagtaggccgggcctcactgcagcacgggcaggccgctgagaagggcccacatcggagcagggacacagccgaacccagctttccagagatacctctggatggaacgctggctccaccagagagccaagggaacggatccacactgcaacctaacgtggtttatattaccctcagaagcaagaggtccaagcccgccaacatcagggggacagtgaaacctaaaaggcgcaagaaacatgccgttgccagcgccgctcctggtcaagaagcgctcgtagggccctcgctgcagccgcaggaagcagcccgcgaggcagacgccgttgcccccggttacgcgcagggggcaaacctcgtgaaaattggagaaaggccatggagactggtccgtggcccaggcgtgcgcgccggcggtccagactttctccagccaagtagtcgggagagcaatatcaggatctactcagaaagtgctccttcctggttgtctaaggacgatatcaggcgaatgcgccttcttgctgattcggctgtcgccggcctgcgtcctgtcagcagtagaagcggggcccgactgctcgtgttagaagggggggcccccggtgctgtgctgcggtgcggcccgagcccatgcggactcttaaagcagcccctggatatgagcgaagtcttcgcctttcacctggatcgaattcttggcctgaatcggacgctgccttcagtgtctaggaaggccgaatttatccaggcggcagctgcagcctgcttgtcgatgagactcgcatttttcatatttccagcctgggaagacatgcgcgtgcctggcaagtgctgcatagggcatgcccgactgacgtggggaacatatcaacaactattgaaacaaaagtgttggcagaacgggcgtgtccccaaacccgaatctggctgtacagagattcatcaccacgagtggagtaagatggcactattcgactttcttctgcagatctataacaggctcgatacaaactgctgtgggtttaggccccgtaaggaggatgcttgcgtccagaatggccttagacctaaatgtgacgatcaggggtcggctgcccttgcccatatcatccaaaggaagcacgatccgcgtcacctcgtcttcatcgataataaggggtttttcgaccggagtgaggacaacttgaacttcaaactgctggagggaattaaggaattcccggcctctgcagtgtccgtgttaaagtcccagcacttaaggcaaaagttgctgcagtcactttttctggacaaagtctattgggagagtcagggcggccggcaggggatcgagaaactaatagatgtgatagagcacagagctaagattcttattacttacatcaacgcccacggtgtcaaggtccttcctatgaacgagtag

SEQ ID NO: 29733 - DNA, 1584 bp, Artificial Sequence
  derived and/or modified sequence
atgacctgcccagacaagccaggccagctgatcaactggttcatctgcagcctgtgtgtgccccgggtgaggaagctgtggagcagccggcggcccaggaccaggaggaacctgctgctgggcacagcctgtgccatctacctgggcttcctggtgtcccaggtgggccgggccagcctgcagcacggccaggccgctgagaagggcccccacaggagccgggacacagctgagcccagcttccctgagatccccctggatggcaccctggcccctcctgagagccagggcaatggcagcaccctgcagcccaacgtggtgtacatcaccctgcggagcaagaggagcaagccagccaacatccggggcaccgtgaagcccaagaggaggaagaagcatgctgtggccagcgctgcccctggccaggaggccctggtgggccccagcctgcagccccaggaggccgcccgggaggctgatgctgtggcccctggctacgcccagggcgccaacctggtgaagattggagagcggccctggaggctggtgcggggccctggggtgcgggccggcggccctgacttcctgcagcccagcagccgggagagcaacatccgcatctacagcgagagcgcccccagctggctgagcaaggatgacatccggaggatgaggctgctggccgacagcgctgtggccggcctgcggcctgtgagcagccgcagcggggcccggctgctggtgctggagggcggggcccctggagctgtgctgcgctgtggccccagcccctgtggcctgctgaagcagcccctggacatgtctgaggtgtttgccttccacctggaccgcatcctgggcctgaacagaaccctgcccagcgtgtccaggaaggccgagttcatccaggccgctgctgctgcctgcctgtccatgaggctggccttcttcatcttccctgcctgggaggacatgagggtgcctgggaagtgctgcattggacatgcccggctgacctggggcacctaccagcagctgctgaagcagaagtgctggcagaatggccgggtgcccaagccagagagcggctgcacagagatccaccaccacgagtggagcaagatggccctgtttgacttcctgctgcagatctacaaccggctggacaccaactgctgcggcttccggcccaggaaggaggatgcctgtgtgcagaatggcctgcggcccaagtgtgatgaccagggcagcgctgccctggcccacatcatccagaggaagcatgaccccaggcacctggtgttcatcgacaacaagggcttctttgacagaagtgaggacaacctgaacttcaagctgctggagggcatcaaggagttccctgccagcgctgtgtctgtgctgaagagccagcacctgcggcagaagctgctgcagagcctcttcctggacaaggtgtactgggagagccagggcggccggcagggcatcgagaagctgattgatgtgattgagcaccgggccaagatcctgatcacctacatcaatgcccacggcgtgaaggtgctgcccatgaatgaatag

SEQ ID NO: 29734 - DNA, 1584 bp, Artificial Sequence
  derived and/or modified sequence
atgacctgccccgacaagcccggccagctgatcaactggttcatctgctctttatgcgtgccaagagtgaggaagctgtggagtagtaggcgcccacgtacacgtagaaatcttctgttgggtacagcttgtgctatttatctgggcttccttgtctcgcaggtcggccgggcatctttgcagcacggccaggccgccgagaaaggtccacacagatctcgcgacaccgccgaaccctcattccccgaaatcccccttgacggcactttggccccaccagagtcccaaggcaatggctccacactgcagcctaacgtcgtgtacattaccctacgcagcaagagaagtaagccagcgaacattagaggtacagtcaaacctaagagacggaagaaacatgctgtggctagcgcagctccgggccaggaagctttggttggaccctcacttcagccccaggaggcggccagagaagcggacgcagtagcacccggttacgcccagggagccaaccttgtcaagatcggtgagcgaccttggcgtttggtacgaggccctggagtgagggcaggcggccccgatttcctccagccctcctcccgcgaaagtaacatacgaatctactcagaaagcgcaccgagttggctcagtaaggacgacatcaggcgtatgcgcctgctcgcagacagcgccgtcgccggtctcagacccgtgtcttctaggtcaggcgcgcggttactggtgcttgagggcggcgcacccggcgccgtacttaggtgtggaccctctccatgcggactgctcaagcagcctctcgacatgagcgaagtctttgccttccacttggaccggatccttgggctgaatcggactctccccagtgtgtcacgcaaagctgaatttatacaggcggcggcggctgcctgcctcagtatgagacttgctttttttatattccccgcttgggaagatatgagggtacctgggaagtgctgtatcggccacgccagattgacgtggggaacctaccagcagctcctgaagcaaaaatgttggcagaatggaagggttcctaaacctgaaagcggctgtacggagatccatcatcatgaatggagcaagatggcactgttcgacttcctcctccaaatttacaatcggttagacactaattgctgcggatttcgaccacggaaagaagatgcttgtgtgcagaacggattgagacctaagtgcgatgatcagggctcagccgcattggcccatatcatccagcgcaagcatgaccctagacacctggtgtttattgacaacaaaggtttcttcgataggagtgaagataatctgaactttaaactgctggagggcattaaagaattccctgcatccgccgtcagtgtccttaaaagccagcacttgcggcaaaaacttctgcagtcgctgtttctcgataaggtctattgggagagccagggaggccggcaggggatcgagaagctgatcgacgtgatcgagcaccgcgctaagattctgatcacttacataaatgcacacggggtgaaggtgcttccgatgaacgagtag

SEQ ID NO: 29735 - DNA, 1584 bp, Artificial Sequence
  derived and/or modified sequence
atgacatgccctgataagccgggacaactgatcaactggttcatctgctccctgtgcgtgccaagagtgcggaaactgtggagttctaggcgccctaggaccaggagaaatctcctgctcgggaccgcgtgtgccatctatctgggattcttggtttcccaggtcggtcgcgcatcactgcagcacggtcaggctgcagagaaaggccctcacagatctcgagacacagcagagccctcttttccagaaattcccctggatggtactctcgccccaccagagtcgcagggaaacgggtctaccctgcagccaaacgtggtctacatcactctccgatcaaagcggagtaaacccgctaacatccgtggaactgtcaaacctaagagacggaaaaaacatgctgtagcctcagccgctcccggacaagaagcgctggtgggcccaagtctgcagccccaggaagccgcacgggaagcagacgccgtggcccctgggtacgctcagggcgctaaccttgtgaaaatcggcgaaagaccatggagactggtcaggggccctggagtgcgagcaggcggacctgactttctgcagcctagctcacgggagagcaacatccgaatatacagcgagagcgcaccaagttggctgtcaaaagacgacattcgcaggatgcggttactagcggactccgctgtcgctggcttacgcccagtttccagtcgctcaggcgctcggctgctggtcttagagggcggtgcaccaggcgctgttctacggtgcggacctagcccctgcgggcttctgaagcagccccttgatatgtcagaggtgttcgcttttcaccttgaccgtatcctgggactgaatcgtaccctgccatcagtgtcccgaaaggccgaattcattcaggcggctgccgcagcatgcttgagcatgagattggcgttctttatattcccagcctgggaagatatgcgggtgcccggaaagtgctgcataggccatgctcggttaacttgggggacatatcagcaactgcttaagcaaaagtgttggcaaaacgggagggtgcctaaacctgaaagcggctgcaccgagattcaccaccatgagtggagcaagatggcattgttcgactttctcctccagatctataataggctggatactaactgttgcggctttagaccgaggaaagaggacgcatgtgttcagaatggactgcggccaaaatgcgatgatcagggcagtgcagccctggcacacatcatacagcggaaacacgatcccaggcacttggtttttatcgacaacaaagggttctttgatcggtcagaagacaatctgaactttaaactcctcgaggggatcaaggagtttccagcctcagctgtatccgtcctaaaaagccagcatctgcgccagaaactcttacagtccttatttctggataaggtgtactgggaaagtcagggcggaagacagggaatagagaagctgatcgatgttattgagcacagagctaagatccttattacatacataaatgcccatggagtgaaggtcctgcccatgaatgaatag

SEQ ID NO: 29736 - protein, 548 aa, Artificial Sequence
  derived and/or modified sequence
MTMAAAAVVARGAGARAATAAALRGGCGTAARGRPCAGPARPLCTAPGTAPDMKRYLWERYREAKRSTEELVPSIMSNLLNPDAIFSNNEMSLSDIEIYGFDYDYTLVFYSKHLHTLIFNAARDLLINEHRYPAEIRKYEYDPNFAIRGLHYDVQRAVLMKIDAFHYIQLGTVYRGLSVVPDEEVIEMYEGSHVPLEQMSDFYGKSSHGNTMKQFMDIFSLPEMTLLSCVNEYFLKNNIDYEPVHLYKDVKDSIRDVHIKGIMYRAIEADIEKYICYAEQTRAVLAKLADHGKKMFLITNSPSSFVDKGMSYIVGKDWRDLFDVVIVQAEKPNFFNDKRRPFRKMNEKGVLLWDKIHKLQKGQIYKQGNLYEFLKLTGWRGSRVLYFGDHIYSDLADLTLKHGWRTGAIIPELRSELKIMNTEQYIQTMTWLQTLTGLLEQMQVHRDAESQLVLQEWKKERKEMREMTKSFFNAQFGSLFRTDQNPTYFLRRLSRFADIYMASLSCLLNYDVSHTFYPRRTPLQHELPAWSERPPTFGTPLLQEAQAK

SEQ ID NO: 29737 - DNA, 1647 bp, Artificial Sequence
  derived and/or modified sequence
atgacaatggccgccgcggctgtcgtggcccggggtgccggagcgagggcggctaccgctgccgccctgcgtgggggatgcgggactgccgccagaggaaggccatgtgctggacccgcccggcctctctgtaccgcacctggcacggccccagatatgaaacgctacttatgggaacggtaccgcgaggccaaacgttccacggaggaactagtcccctccatcatgtccaatctgcttaacccggatgcaatcttctccaacaacgagatgtctctctctgatattgaaatttacggattcgattacgattacactctggtcttctactcaaaacacctgcacacattgattttcaatgcagctcgagacctgctcatcaatgaacatcgttacccagctgaaataaggaaatatgagtatgaccccaactttgccattcgcggtctccactatgacgttcagagggcggtgttgatgaagattgatgctttccactacattcagctgggcactgtgtacaggggattgagtgtagtcccagatgaagaggtcatagaaatgtatgaggggtcacacgtccctttagaacagatgagcgacttctatggcaagagttcacacggaaacactatgaaacagtttatggatattttctcgctaccagagatgactttgctcagctgtgtgaatgagtatttcctcaagaacaatatcgattacgagcccgtacatctctataaggacgtgaaagacagcattagagacgttcatatcaaagggattatgtaccgggctattgaagcagatattgagaagtatatctgctacgccgagcaaacaagagcagttcttgctaagctggctgaccatggtaagaagatgttcctgatcacaaactcaccatcatcatttgtggacaaagggatgtcgtatattgtcgggaaggactggagagatctttttgacgtggttattgtgcaagcagagaagcccaattttttcaacgataaacgcaggccatttcgtaagatgaatgaaaaaggcgtgctgctctgggataaaatccataagctccaaaagggccagatttataagcagggcaacctgtacgagttcctcaagctcacaggttggagggggagcagggtcctttacttcggcgaccacatctacagtgacctcgctgatctgaccctcaagcatggctggcgcacgggagccataatccctgaacttcggagcgaactgaaaataatgaacactgaacagtatatccagacaatgacttggttacagacactaacaggcctcctagaacagatgcaggtccatcgcgacgccgagagtcaactggtgctgcaggaatggaaaaaagaaagaaaggagatgcgagagatgactaagtcctttttcaatgcccaatttggcagcctctttcggacagatcagaaccccacatacttcctaaggcgtctatcccgcttcgccgacatctacatggctagtttgagctgtttgcttaactacgacgtgagccacaccttctacccaaggcgaacccccctgcagcatgagctgcctgcatggagtgagagacctcctacctttggaacccctttgctccaggaagcccaggcgaagtag

SEQ ID NO: 29738 - DNA, 1647 bp, Artificial Sequence
  derived and/or modified sequence
atgaccatggctgctgctgctgtggtggcccggggagctggggcccgggccgccacagctgctgccctgcggggcggctgcggcacagctgcccggggccggccctgtgccggccctgcccggcccctgtgcacagcccctggaacagccccagacatgaagcgctacctgtgggagcgctaccgggaggccaagaggagcacagaggagctggtgcccagcatcatgagcaacctgctgaacccagatgccatcttcagcaacaatgagatgagcctgagtgacatcgagatctacggctttgattatgactacaccctggtgttctacagcaagcacctgcacaccctcatcttcaatgctgcccgggacctgctgatcaatgagcaccgctacccagctgagatcagaaaatatgaatatgaccccaactttgccatccggggcctgcactatgatgtgcagagagctgtgctgatgaagattgatgccttccactacatccagctgggcaccgtgtaccggggcctgtctgtggtgcctgatgaggaggtgattgagatgtatgagggcagccacgtgcccctggagcagatgtctgacttctacggcaagagcagccacggcaacaccatgaagcagttcatggacatcttcagcctgcctgagatgaccctgctgagctgtgtgaatgagtacttcctgaagaacaacattgattatgagcctgtgcacctgtacaaggatgtgaaggacagcatcagagatgtgcacatcaagggcatcatgtaccgggccattgaagctgacatcgagaagtacatctgctacgccgagcagaccagggctgtgctggccaagctggccgaccacggcaagaagatgttcctgatcaccaacagccccagcagctttgtggacaagggcatgagctacatcgtgggcaaggactggagggacctgtttgatgtggtgattgtgcaggccgagaagcccaacttcttcaatgacaagagaagacccttcaggaagatgaatgagaagggcgtgctgctgtgggacaagatccacaagctgcagaagggccagatctacaagcagggcaacctgtatgagttcctgaagctgaccggctggaggggcagccgggtgctgtactttggagaccacatctacagcgacctggccgacctgaccctgaagcacggctggaggactggagccatcatccctgagctgcggtctgagctgaagatcatgaacacagagcagtacatccagaccatgacctggctgcagaccctgaccggcctgctggagcagatgcaggtgcacagagatgctgagagccagctggtgctgcaggagtggaagaaggagaggaaggagatgagggagatgaccaagagcttcttcaatgcccagtttggcagcctcttcagaacagaccagaaccccacctacttcctgcggcggctgagcagatttgctgacatctacatggccagcctgagctgcctgctgaactatgatgtgagccacaccttctaccccaggaggacccccctgcagcacgagctgcctgcctggagcgagcggccccccaccttcggcacccccctgctgcaggaggcccaggccaagtag

SEQ ID NO: 29739 - DNA, 1647 bp, Artificial Sequence
  derived and/or modified sequence
atgaccatggccgccgccgccgtggtggcccggggcgccggcgcccgtgctgccacggccgctgctctcagagggggctgtggcaccgccgcacgagggaggccatgcgcgggacctgctcggcccttatgtactgcacccggtaccgcgcccgacatgaagcggtatctgtgggagaggtatcgcgaggccaagagatccacggaggagctcgtcccttctattatgagtaatttactcaacccagatgcaatcttttctaacaatgaaatgagtttatcggacattgagatatacggattcgactacgactacacgctggtcttctactctaaacatctgcacactttgatcttcaatgccgctcgggatcttcttattaatgagcacaggtacccagctgagataaggaagtacgagtatgatcccaattttgcaatccgggggcttcactatgatgtccagagggcagttctgatgaagatcgacgcttttcattatattcaattgggcaccgtgtatcgcggtctgagcgtggtgcctgacgaagaggttattgaaatgtatgaagggtcccacgtgccactcgagcagatgtctgatttttatgggaagagttctcacggcaatactatgaaacagttcatggacatcttcagcctgcccgaaatgaccttgctgagctgcgtaaatgagtactttctgaagaacaacatcgattacgagcccgttcacctgtacaaggatgtgaaggatagtatccgggatgtccatatcaaaggcatcatgtacagagcaatcgaggcggatatcgaaaagtacatatgctatgcggaacagaccagagctgtgttggctaaattggctgaccacggaaaaaagatgttccttatcaccaactcccccagcagcttcgtggacaaggggatgagctatatcgttggcaaggactggcgcgatctctttgatgtggtgatcgtgcaggcagaaaagcctaattttttcaatgataaacgtaggcctttcaggaagatgaacgagaagggagtgctactctgggacaagattcacaagctacagaaaggtcagatatacaaacaagggaacctttacgagttcctaaaactcactggatggcgaggttcccgagtgctgtactttggcgaccatatttactccgacctcgcggacctcaccctgaagcacggatggcggacaggcgccatcatccccgagctgcggagtgagttgaagatcatgaacactgaacaatatatccagaccatgacctggctacagactctgacgggtctactcgaacagatgcaggtacacagggatgctgaatcgcagctagtccttcaagagtggaagaaggagcgcaaggaaatgcgcgagatgactaagtcattcttcaacgcacagttcgggagcctattcaggacagaccagaatcctacctattttctaaggcggttaagccgattcgccgatatctacatggcctcgctttcctgtctgctgaactatgacgtcagtcacaccttttacccgcggcgcacgcccttacagcacgaattgcctgcatggtccgaacgtccacccacgttcggcacaccactcttacaggaggcgcaggctaagtag

SEQ ID NO: 29740 - DNA, 1647 bp, Artificial Sequence
  derived and/or modified sequence
atgactatggccgctgccgcagtcgtagcgcgtggggcaggggctagggccgctactgctgcagcactcagagggggatgtggtacggcagcacggggtcgcccttgtgcagggccagccaggcctttgtgcactgccccagggacggcaccggacatgaagcgatacctctgggaaaggtatcgggaagcaaaaagaagtacggaagaattagtgccttcaatcatgtccaatttgctgaacccggatgctatatttagcaataatgagatgtcactttctgatatagaaatttacggattcgactatgactataccttagttttttactccaagcatttgcataccctgatctttaatgcggcacgagacctcctcatcaatgaacatagatacccagcggagatccgcaagtacgagtatgatcccaattttgccattcgaggcttgcactatgacgtgcagcgggctgtgctcatgaaaatcgacgcattccactacatacagctcggcaccgtgtacagggggctgtctgtcgttcccgacgaggaggtgatcgaaatgtacgaaggctcccacgtgcctctggaacaaatgagcgacttttatggaaagtcctcccacgggaataccatgaaacagttcatggacatattttcactgccagagatgaccctgttgagctgtgtaaacgagtacttcctgaaaaataatattgactacgaacctgtgcacttgtacaaggatgtgaaggactcaattcgcgatgtgcatattaaggggattatgtacagggcaatcgaagctgatatcgagaagtatatttgttatgcagagcagacccgggcagttttggccaaactcgccgatcacggcaagaaaatgtttctgatcaccaacagtcccagcagtttcgtggataaaggcatgtcatatatagttggtaaggattggagggacctctttgatgttgtgatcgtgcaggcagagaagcctaacttcttcaacgacaagcgacgaccatttcgcaagatgaacgagaagggagtgctgctgtgggacaaaatacataagctccagaaaggacaaatctataagcaggggaacctttacgagtttctgaagttaaccggctggaggggctctagggttctctattttggtgaccacatctactcggacctagctgatctgaccctgaaacacggctggaggactggcgcaataattcccgaactgcgctccgagcttaagattatgaacaccgagcagtatatccagactatgacttggctccagacgctgactggcttgttggagcagatgcaggtccacagagacgccgaatctcagctggtcctgcaggagtggaaaaaggaacgcaaggaaatgagggagatgacaaagtccttcttcaacgcacagttcggctccctgtttagaaccgatcaaaacccgacttacttcctccgtaggttgtctagattcgcagatatctacatggcctcgctgtcttgtctgctcaattatgacgtctcacatacgttctatccgagaaggacccccctccaacacgaactgccagcatggtctgagagaccacctacgtttggaaccccgctgctgcaagaagcccaggccaagtag

SEQ ID NO: 29741 - DNA, 7207 bp, Artificial Sequence
  derived and/or modified sequence
gcagagcggcgcggcggcggtggcggcagcaggcagcaggcatgaccatggcagcggcggcggtggtggcacgcggggccggggcgagggcagcgacagcggcggctttgcggggtggctgcgggaccgcggctcgggggcggccgtgtgcgggccccgcccggcccttgtgcactgcacccgggaccgccccggacatgaagcgctacctgtgggagcgctaccgggaggcgaagagaagcacagaagaattggttccttccattatgagcaacttgttgaatccagatgccattttctcaaacaatgaaatgagcctgtcagacattgaaatctatggcttcgattatgattacaccttggtgttttattcaaagcacctccacacgctgatatttaatgctgcacgggaccttctcatcaatgaacaccggtatccagcagaaatcaggaagtatgagtatgacccaaattttgcaattcgtggacttcattatgatgtacagcgggcagtattaatgaagatcgatgcttttcattatatccagctgggaactgtctacagaggcctcagtgttgtccctgatgaagaagtcattgaaatgtacgaggggtcccacgtgcccttggagcagatgagtgacttttacggaaagagctctcatggaaacacgatgaagcagttcatggacatcttctccctgcccgagatgaccctcctgtcctgcgtgaatgaatacttcctcaagaacaacatcgactatgagcctgtgcatctgtacaaagatgtcaaggattcaattcgagacgtccacatcaaaggaataatgtacagagcaattgaagcagacattgaaaagtacatctgctatgctgagcagacccgcgcagtgttggccaaactggctgatcatggcaagaagatgtttctcatcaccaatagccccagtagctttgtggacaaagggatgagttatatcgttgggaaagactggagggacctgttcgatgtggtcattgttcaggctgagaagccaaacttctttaatgataagcggaggcctttccgaaagatgaatgagaaaggtgtcttactctgggataaaatccataagttgcagaaaggccagatatacaagcagggtaatttatatgaatttttgaagcttactggatggagaggatccagagtgttgtattttggtgaccatatatacagtgacctggcggatttgaccctaaagcatggctggaggactggtgcaatcatcccagagttgagatctgagctcaaaatcatgaacacggagcaatacattcaaaccatgacctggctgcagaccttgactggcttattggaacagatgcaggttcacagagatgctgagtcacagctggttttgcaggagtggaaaaaggaaaggaaggagatgcgagaaatgaccaagagtttcttcaatgcccagtttggaagcctgttccgcacagaccagaacccaacctacttcctaaggcgcctgtcgcgcttcgctgacatctacatggcgtctctgagctgcctcctgaactatgacgtcagccacactttctacccccggaggactccactgcagcacgaactgcccgcctggtcagaaaggccccccaccttcggaacccctctcctgcaggaggcccaggccaagtagccaagggcaaaaactagaaactgtaactgcccctgattgggcaggcatgatggggttgacttcatgtgggtctgagtgttgcttttggaaaagatacagataagccttttgatatttattttgtaccttacggagaataattctcccaatggttaagacaggagctagcagcccacccctccagcctttccccccatgcagggctgaaaggcaagcttcacattggaactctgattttgcctttttgtttactgaggtcctggaacatcaggtttcctgggataggtgagaccacttgatgccatgtctgtattctagcaggtcaagcttgaaacggttcttgactcctccatggaacatttcctgaacatttacgggctatgcattgggaactgcaggggcacagtgatgggcaaagattagctgcttccagaaggctgatttcgtgggctccacaatggtaaaacgctgctgtgagtggcagagaggttccccaggtgatggccagttcccaaatcatttggtactaaggctttgacattctggcacatcacatcaaatagaacacagcctccctggaaggacttaagtgagaaagaacaagagaagctgcaactcctggacccttttgtcctcagtgtgtggttcctgcgtccttccccagcatggaggagggcaggagagaggagatgagagctctggtcaaaacctgccagctagtggaacagccttctgtagagccttctgcaagaaacgagtgggtttgaagaaccaaaacatttgtggtaggtctcccaggagcttgttaaacctggaaacaccacctgagttggtttcatctgctcattggaagaaagaaaatgaaccaggaaaaagcatctttgtcatgaaatgctatgccatgccacccacccagttgaattggaatcctgttaaaacatgagatttaccagaaacagtcctttgtctagatggaaacaaacaagatcctggcttctctctaatgagttaccaactgagaggtgcttggattggccaggggaggaggaagatggccaccacaacttagccatgtccagccttctcttagatttcactcctgtgatgtttgtgcgactatttgggagtttgtgtagtttgttttttttttttttgttttgttttgtttttttttagatgtctaagatgggaaagggcgaaggacattgaagctaaggaatagatatgacctagctaaccaagcttttctcatttccttctgttttgttttgttgagatggagttttgctcttattgcccaggctggagtgcagtggcacaatctcagctcactgcaacctctgcctcccgggttcaagcgattctcctgcctcagcctcccaagtagctgggattacaggcatgcactaccacacccagctaattttgtatttctagtagagatggggtttctccatgttggtcaggctggtctcgaactcccgacctcagataatctgcccgccttggcctcccaaattgctgggattacaggtgtgagccaccgcacctggcctgcttttttcatttctttctaggggcaatgcaagtggcatgtattccttttgttggagggaagaatccttaattgcacctgcatttgtagtatccttcaatgtaaagtgcatatttactgcactctctgagtgctatgggaatgtctgctgttattagttatggggctgctaatactgttttaattgcatatgctatatcaatacttctgttcagattagcctaatctagtattgctaaaactcattttaagcttttgcggtaacttgtatatattcttaaatctaaaggatggcaggaacatgaggggagcttgtggagagtgcttgcttattcaacatttttattgtgataaatgtatgtaaccatctattgatgaaatccaagtctggcattccatgggctccttgccagatggcagaaacttaatgagttatatagcatcctttgtaatgctgcttgttatagttggaatgtacttgtgatatttggctgtatttaactataatggtgaaggtgaccctttagatccaataaggcttctccccatcttctacattttgttatgaacacagtaaggcacagtagtatgttctttttttggaacagggtaggcattttgtttattgtttgcttgcttctaggtgttttcgccatcagggtgtattggaggctgacacttaatgggtgtgtgttgcgcccagaactgctcggtgtcggggttctaaaagaatgcgctggtgttcttggcttcaagtttctgctttggagaagcagattcaggaagtaggtgttgcttaaaaataattcttggtttttatctaatcagatattcattgattacctaccaggtgccagttatagggtgttttgtttactcaagaatgaagtagaactatttttaaaacctgtttccatgagtgttcacgttaggtgacctaagctttgaaggagaaaaacatttttgggtatgaataatgagttttgtaatcaattcccagttagaagaatttcagtctctgggccattgagcttggcagtgttgagatctcccatgtgacagaagcctgacatctgggccaccaaggctcactgactgtgtaccttgcagactgtagacccatgtcgtggcggtaacggggccgaacacagtcattcccatgtgaacgatggaggcacatcccactttattattaatccttgtatatactcagtcaggacagattttaacttgtcgctgtcatgactttttttttttttttttgaggcaaggtctcgctctgttgcccattctggagtgcagtggtgtgatctcggctcactgcaacctcttgcctcccaggttcaagcaattttcgtgcctcagcctcccgagtagctgggactactggtacatgccaccaggcctggccaagttttgtagttttaatagagatggggtttcaccatgttggccaggctggtctcaaactcctagcctcaagtgttctgcccacctcagccttccaaagtgctgggattctgggtgtgagccactgtcatgcctggcctcgtcatgactcttttctctttttttttttttttttttttgagatttagttttgctctttttgcccaggccggagtgcaatggcacgatcttggctcactccaacctccgcctcctgggttcaagtgattctcctgcctcagcctcccgagtagctgggattacaggtgcccaccaccacatccagctaatttttttgtatttttagtagagacggggtttcaccatgttggccaggctggtctcgaactcctgaccttgggtaatccacctgccttggcctcccaaggtgctgggattacaggcatgagccaccgtgcccagcctatcatgactcaactgggatctggcacactgcactgggtgttttgttctctgatgtgcacattgatgaatgcatattggtacaagggaaatgaatctgttttcagccatttaaaaaattgtgttgtaaagcaaacaaaaatagcttgaacatttaaaaattactgtttaatattgtttgactgattttctaagaattatgtgaacaatgatgagtccagggcagcagccatcacaaatatgacagtccagcaaggcccatggaggtccctttggaagggacttgcacagctgattttctttttccagtgttgtttttacgggtgaaacgtggcttttgaaatactttagttgtttggcttagagctcccactttccccctaacatagtgcctgtctgttttttaaaacattttacccttcggcactattttctgctattcccattaatattatgtaacataaaccacttgctactgatttgggcatattacagactacaattactagttgctttgaatgcattggcactcttaattattgcaaaggagaattgaaaagtagtcttgtggtcctagttaatttagctttgggcaaactaagtggcttttcttctgtcctcttctcaaaaggccttttaagcagcagagactgggctaaatactggaactgaattccacttttctgcctgctcatttgctgccaaagaccacttggggctccttgtctagaatgctctaagacgaaatttggccagacacagggttccttgattgttctgttcaactaatagagaacctacattttgccttcttaatatcgactttcttttgtaccaggtttttctttctttcttttttgccttaggagcttagctcaaagttcagctaacctttgacactactagtgtcatttagtaacagtaatctttgacactactagtgtcatttaggagcttagctcaaagttcagctaacctttgacactgctagtgcgttcaagaaagggtagggaatgaagtacccttaatgcagggtcagcaaacttttcctgtaaaaggccagataggaagtatttttggctttttgggctgtttgcttttgctactactactgtgggaatgaccatggtcatggctgtgttccagcacaacttgatttaccaagacaagctgtgggctgtatttggtcctcaggctgtggcttgctagcccctgctctaatggattgtgttggcggcaatggcaagattcccttgctgagaacatgcagatgaataaccttatagctgggatgcagagaggagaaagttctgtaggtaataagtgcactgtattccctctgagctacttcctgggcatagttacatgtatggccagtgtgtgtacttgagccatcaggctcagacacttgttgaatatacctctcattgcattagtttgtaattgtgctagtgctgggtgctgagctcagctgcccggatgacctttccagactgaaggacatactcccctaacagctgggagtgctgctggctggccatttacttccagcccttatgaggagtttcccctgctgaagagccctgcctgccccagatcatacccccttcctgcctgtaacccttaccggctccatatggggtacaaagggctggcctcctcaccccaacttgggaaaccctctggggccatcccagctccagagccccttgtggggtcagtgagacctcattgtggccacattacagcccagtgcctctccctgacaagcctgtacccagccggctcagcccacagcactgtcctatgaaccttcctgcacgccattctccacctcagtatctgctttcggggaacccaacctgcgacagtgcttctgtgtgttttcagtcctgcaggtttgaactctgactttggagacttttccagttatctcgtggaatgacagattgtgcctgtatgatatcaggcacaattaatgcaaattaggcagacctatttattctagatgtgaatttgctatttattttaaatgttgattttatgtgttatgtgactctgaacttattgccaaataaaagtttgaattgta

SEQ ID NO: 29742 - DNA, 1647 bp, Artificial Sequence
  derived and/or modified sequence
atgaccatggccgccgccgccgtggtggccagaggcgccggcgccagagccgccaccgccgccgccctgagaggcggctgcggcaccgccgccagaggcagaccctgcgccggccccgccagacccctgtgcaccgcccccggcaccgcccccgacatgaagagatacctgtgggagagatacagagaggccaagagaagcaccgaggagctggtgcccagcatcatgagcaacctgctgaaccccgacgccatcttcagcaacaacgagatgagcctgagcgacatcgagatctacggcttcgactacgactacaccctggtgttctacagcaagcacctgcacaccctgatcttcaacgccgccagagacctgctgatcaacgagcacagataccccgccgagatcagaaagtacgagtacgaccccaacttcgccatcagaggcctgcactacgacgtgcagagagccgtgctgatgaagatcgacgccttccactacatccagctgggcaccgtgtacagaggcctgagcgtggtgcccgacgaggaggtgatcgagatgtacgagggcagccacgtgcccctggagcagatgagcgacttctacggcaagagcagccacggcaacaccatgaagcagttcatggacatcttcagcctgcccgagatgaccctgctgagctgcgtgaacgagtacttcctgaagaacaacatcgactacgagcccgtgcacctgtacaaggacgtgaaggacagcatcagagacgtgcacatcaagggcatcatgtacagagccatcgaggccgacatcgagaagtacatctgctacgccgagcagaccagagccgtgctggccaagctggccgaccacggcaagaagatgttcctgatcaccaacagccccagcagcttcgtggacaagggcatgagctacatcgtgggcaaggactggagagacctgttcgacgtggtgatcgtgcaggccgagaagcccaacttcttcaacgacaagagaagacccttcagaaagatgaacgagaagggcgtgctgctgtgggacaagatccacaagctgcagaagggccagatctacaagcagggcaacctgtacgagttcctgaagctgaccggctggagaggcagcagagtgctgtacttcggcgaccacatctacagcgacctggccgacctgaccctgaagcacggctggagaaccggcgccatcatccccgagctgagaagcgagctgaagatcatgaacaccgagcagtacatccagaccatgacctggctgcagaccctgaccggcctgctggagcagatgcaggtgcacagagacgccgagagccagctggtgctgcaggagtggaagaaggagagaaaggagatgagagagatgaccaagagcttcttcaacgcccagttcggcagcctgttcagaaccgaccagaaccccacctacttcctgagaagactgagcagattcgccgacatctacatggccagcctgagctgcctgctgaactacgacgtgagccacaccttctaccccagaagaacccccctgcagcacgagctgcccgcctggagcgagagaccccccaccttcggcacccccctgctgcaggaggcccaggccaagtag

SEQ ID NO: 29743 - protein, 1151 aa, Artificial Sequence
  derived and/or modified sequence
MPCGFSPSPVAHHLVPGPPDTPAQQLRCGWTVGGWLLSLVRGLLPCLPPGARTAEGPIMVLAGPLAVSLLLPSLTLLVSHLSSSQDVSSEPSSEQQLCALSKHPTVAFEDLQPWVSNFTYPGARDFSQLALDPSGNQLIVGARNYLFRLSLANVSLLQATEWASSEDTRRSCQSKGKTEEECQNYVRVLIVAGRKVFMCGTNAFSPMCTSRQVGNLSRTIEKINGVARCPYDPRHNSTAVISSQGELYAATVIDFSGRDPAIYRSLGSGPPLRTAQYNSKWLNEPNFVAAYDIGLFAYFFLRENAVEHDCGRTVYSRVARVCKNDVGGRFLLEDTWTTFMKARLNCSRPGEVPFYYNELQSAFHLPEQDLIYGVFTTNVNSIAASAVCAFNLSAISQAFNGPFRYQENPRAAWLPIANPIPNFQCGTLPETGPNENLTERSLQDAQRLFLMSEAVQPVTPEPCVTQDSVRFSHLVVDLVQAKDTLYHVLYIGTESGTILKALSTASRSLHGCYLEELHVLPPGRREPLRSLRILHSARALFVGLRDGVLRVPLERCAAYRSQGACLGARDPYCGWDGKQQRCSTLEDSSNMSLWTQNITACPVRNVTRDGGFGPWSPWQPCEHLDGDNSGSCLCRARSCDSPRPRCGGLDCLGPAIHIANCSRNGAWTPWSSWALCSTSCGIGFQVRQRSCSNPAPRHGGRICVGKSREERFCNENTPCPVPIFWASWGSWSKCSSNCGGGMQSRRRACENGNSCLGCGVEFKTCNPEGCPEVRRNTPWTPWLPVNVTQGGARQEQRFRFTCRAPLADPHGLQFGRRRTETRTCPADGSGSCDTDALVEVLLRSGSTSPHTVSGGWAAWGPWSSCSRDCELGFRVRKRTCTNPEPRNGGLPCVGDAAEYQDCNPQACPVRGAWSCWTSWSPCSASCGGGHYQRTRSCTSPAPSPGEDICLGLHTEEALCATQACPEGWSPWSEWSKCTDDGAQSRSRHCEELLPGSSACAGNSSQSRPCPYSEIPVILPASSMEEATDCAGFNLIHLVATGISCFLGSGLLTLAVYLSCQHCQRQSQESTLVHPATPNHLHYKGGGTPKNEKYTPMEFKTLNKNNLIPDDRANFYPLQQTNVYTTTYYPSPLNKHSFRPEASPGQRCFPNS

SEQ ID NO: 29744 - DNA, 3456 bp, Artificial Sequence
  derived and/or modified sequence
atgccctgcggcttcagccccagccccgtggcccaccacctggtgcccggcccccccgacacccccgcccagcagctgagatgcggctggaccgtgggcggctggctgctgagcctggtgagaggcctgctgccctgcctgccccccggcgccagaaccgccgagggccccatcatggtgctggccggccccctggccgtgagcctgctgctgcccagcctgaccctgctggtgagccacctgagcagcagccaggacgtgagcagcgagcccagcagcgagcagcagctgtgcgccctgagcaagcaccccaccgtggccttcgaggacctgcagccctgggtgagcaacttcacctaccccggcgccagagacttcagccagctggccctggaccccagcggcaaccagctgatcgtgggcgccagaaactacctgttcagactgagcctggccaacgtgagcctgctgcaggccaccgagtgggccagcagcgaggacaccagaagaagctgccagagcaagggcaagaccgaggaggagtgccagaactacgtgagagtgctgatcgtggccggcagaaaggtgttcatgtgcggcaccaacgccttcagccccatgtgcaccagcagacaggtgggcaacctgagcagaaccatcgagaagatcaacggcgtggccagatgcccctacgaccccagacacaacagcaccgccgtgatcagcagccagggcgagctgtacgccgccaccgtgatcgacttcagcggcagagaccccgccatctacagaagcctgggcagcggcccccccctgagaaccgcccagtacaacagcaagtggctgaacgagcccaacttcgtggccgcctacgacatcggcctgttcgcctacttcttcctgagagagaacgccgtggagcacgactgcggcagaaccgtgtacagcagagtggccagagtgtgcaagaacgacgtgggcggcagattcctgctggaggacacctggaccaccttcatgaaggccagactgaactgcagcagacccggcgaggtgcccttctactacaacgagctgcagagcgccttccacctgcccgagcaggacctgatctacggcgtgttcaccaccaacgtgaacagcatcgccgccagcgccgtgtgcgccttcaacctgagcgccatcagccaggccttcaacggccccttcagataccaggagaaccccagagccgcctggctgcccatcgccaaccccatccccaacttccagtgcggcaccctgcccgagaccggccccaacgagaacctgaccgagagaagcctgcaggacgcccagagactgttcctgatgagcgaggccgtgcagcccgtgacccccgagccctgcgtgacccaggacagcgtgagattcagccacctggtggtggacctggtgcaggccaaggacaccctgtaccacgtgctgtacatcggcaccgagagcggcaccatcctgaaggccctgagcaccgccagcagaagcctgcacggctgctacctggaggagctgcacgtgctgccccccggcagaagagagcccctgagaagcctgagaatcctgcacagcgccagagccctgttcgtgggcctgagagacggcgtgctgagagtgcccctggagagatgcgccgcctacagaagccagggcgcctgcctgggcgccagagacccctactgcggctgggacggcaagcagcagagatgcagcaccctggaggacagcagcaacatgagcctgtggacccagaacatcaccgcctgccccgtgagaaacgtgaccagagacggcggcttcggcccctggagcccctggcagccctgcgagcacctggacggcgacaacagcggcagctgcctgtgcagagccagaagctgcgacagccccagacccagatgcggcggcctggactgcctgggccccgccatccacatcgccaactgcagcagaaacggcgcctggaccccctggagcagctgggccctgtgcagcaccagctgcggcatcggcttccaggtgagacagagaagctgcagcaaccccgcccccagacacggcggcagaatctgcgtgggcaagagcagagaggagagattctgcaacgagaacaccccctgccccgtgcccatcttctgggccagctggggcagctggagcaagtgcagcagcaactgcggcggcggcatgcagagcagaagaagagcctgcgagaacggcaacagctgcctgggctgcggcgtggagttcaagacctgcaaccccgagggctgccccgaggtgagaagaaacaccccctggaccccctggctgcccgtgaacgtgacccagggcggcgccagacaggagcagagattcagattcacctgcagagcccccctggccgacccccacggcctgcagttcggcagaagaagaaccgagaccagaacctgccccgccgacggcagcggcagctgcgacaccgacgccctggtggaggtgctgctgagaagcggcagcaccagcccccacaccgtgagcggcggctgggccgcctggggcccctggagcagctgcagcagagactgcgagctgggcttcagagtgagaaagagaacctgcaccaaccccgagcccagaaacggcggcctgccctgcgtgggcgacgccgccgagtaccaggactgcaacccccaggcctgccccgtgagaggcgcctggagctgctggaccagctggagcccctgcagcgccagctgcggcggcggccactaccagagaaccagaagctgcaccagccccgcccccagccccggcgaggacatctgcctgggcctgcacaccgaggaggccctgtgcgccacccaggcctgccccgagggctggagcccctggagcgagtggagcaagtgcaccgacgacggcgcccagagcagaagcagacactgcgaggagctgctgcccggcagcagcgcctgcgccggcaacagcagccagagcagaccctgcccctacagcgagatccccgtgatcctgcccgccagcagcatggaggaggccaccgactgcgccggcttcaacctgatccacctggtggccaccggcatcagctgcttcctgggcagcggcctgctgaccctggccgtgtacctgagctgccagcactgccagagacagagccaggagagcaccctggtgcaccccgccacccccaaccacctgcactacaagggcggcggcacccccaagaacgagaagtacacccccatggagttcaagaccctgaacaagaacaacctgatccccgacgacagagccaacttctaccccctgcagcagaccaacgtgtacaccaccacctactaccccagccccctgaacaagcacagcttcagacccgaggccagccccggccagagatgcttccccaacagctag

SEQ ID NO: 29745 - DNA, 3267 bp, Artificial Sequence
  derived and/or modified sequence
atgccctgcggcttcagccccagccccgtggcccaccacctggtgcccggcccccccgacacccccgcccagcagctgagatgcggctggaccgtgggcggctggctgctgagcctggtgagaggcctgctgccctgcctgccccccggcgccagaaccgccgagggccccatcatggtgctggccggccccctggccgtgagcctgctgctgcccagcctgaccctgctggtgagccacctgagcagcagccaggacgtgagcagcgagcccagcagcgagcagcagctgtgcgccctgagcaagcaccccaccgtggccttcgaggacctgcagccctgggtgagcaacttcacctaccccggcgccagagacttcagccagctggccctggaccccagcggcaaccagctgatcgtgggcgccagaaactacctgttcagactgagcctggccaacgtgagcctgctgcaggccaccgagtgggccagcagcgaggacaccagaagaagctgccagagcaagggcaagaccgaggaggagtgccagaactacgtgagagtgctgatcgtggccggcagaaaggtgttcatgtgcggcaccaacgccttcagccccatgtgcaccagcagacaggtgggcaacctgagcagaaccatcgagaagatcaacggcgtggccagatgcccctacgaccccagacacaacagcaccgccgtgatcagcagccagggcgagctgtacgccgccaccgtgatcgacttcagcggcagagaccccgccatctacagaagcctgggcagcggcccccccctgagaaccgcccagtacaacagcaagtggctgaacgagcccaacttcgtggccgcctacgacatcggcctgttcgcctacttcttcctgagagagaacgccgtggagcacgactgcggcagaaccgtgtacagcagagtggccagagtgtgcaagaacgacgtgggcggcagattcctgctggaggacacctggaccaccttcatgaaggccagactgaactgcagcagacccggcgaggtgcccttctactacaacgagctgcagagcgccttccacctgcccgagcaggacctgatctacggcgtgttcaccaccaacgtgaacagcatcgccgccagcgccgtgtgcgccttcaacctgagcgccatcagccaggccttcaacggccccttcagataccaggagaaccccagagccgcctggctgcccatcgccaaccccatccccaacttccagtgcggcaccctgcccgagaccggccccaacgagaacctgaccgagagaagcctgcaggacgcccagagactgttcctgatgagcgaggccgtgcagcccgtgacccccgagccctgcgtgacccaggacagcgtgagattcagccacctggtggtggacctggtgcaggccaaggacaccctgtaccacgtgctgtacatcggcaccgagagcggcaccatcctgaaggccctgagcaccgccagcagaagcctgcacggctgctacctggaggagctgcacgtgctgccccccggcagaagagagcccctgagaagcctgagaatcctgcacagcgccagagccctgttcgtgggcctgagagacggcgtgctgagagtgcccctggagagatgcgccgcctacagaagccagggcgcctgcctgggcgccagagacccctactgcggctgggacggcaagcagcagagatgcagcaccctggaggacagcagcaacatgagcctgtggacccagaacatcaccgcctgccccgtgagaaacgtgaccagagacggcggcttcggcccctggagcccctggcagccctgcgagcacctggacggcgacaacagcggcagctgcctgtgcagagccagaagctgcgacagccccagacccagatgcggcggcctggactgcctgggccccgccatccacatcgccaactgcagcagaaacggcgcctggaccccctggagcagctgggccctgtgcagcaccagctgcggcatcggcttccaggtgagacagagaagctgcagcaaccccgcccccagacacggcggcagaatctgcgtgggcaagagcagagaggagagattctgcaacgagaacaccccctgccccgtgcccatcttctgggccagctggggcagctggagcaagtgcagcagcaactgcggcggcggcatgcagagcagaagaagagcctgcgagaacggcaacagctgcctgggctgcggcgtggagttcaagacctgcaaccccgagggctgccccgaggtgagaagaaacaccccctggaccccctggctgcccgtgaacgtgacccagggcggcgccagacaggagcagagattcagattcacctgcagagcccccctggccgacccccacggcctgcagttcggcagaagaagaaccgagaccagaacctgccccgccgacggcagcggcagctgcgacaccgacgccctggtggaggtgctgctgagaagcggcagcaccagcccccacaccgtgagcggcggctgggccgcctggggcccctggagcagctgcagcagagactgcgagctgggcttcagagtgagaaagagaacctgcaccaaccccgagcccagaaacggcggcctgccctgcgtgggcgacgccgccgagtaccaggactgcaacccccaggcctgccccgtgagaggcgcctggagctgctggaccagctggagcccctgcagcgccagctgcggcggcggccactaccagagaaccagaagctgcaccagccccgcccccagccccggcgaggacatctgcctgggcctgcacaccgaggaggccctgtgcgccacccaggcctgccccgagggctggagcccctggagcgagtggagcaagtgcaccgacgacggcgcccagagcagaagcagacactgcgaggagctgctgcccggcagcagcgcctgcgccggcaacagcagccagagcagaccctgcccctacagcgagatccccgtgatcctgcccgccagcagcatggaggaggccaccgactgcgccggcttcaacctgatccacctggtggccaccggcatcagctgcttcctgggcagcggcctgctgaccctggccgtgtacctgagctgccagcactgccagagacagagccaggagagcaccctggtgcaccccgccacccccaaccacctgcactacaagggcggcggcaccccctag

SEQ ID NO: 29746 - DNA, 429 bp, Artificial Sequence
  derived and/or modified sequence
atgccctgcggcttcagccccagccccgtggcccaccacctggtgcccggcccccccgacacccccgcccagcagctgagatgcggctggaccgtgggcggctggctgctgagcctggtgagaggcctgctgccctgcctgccccccggcgccagaaccgccgagggccccatcatggtgctggccggccccctggccgtgagcctgctgctgcccagcctgaccctgctggtgagccacctgagcagcagccaggacgtgagcagcgagcccagcagcgagcagcagctgtgcgccctgagcaagcaccccaccgtggccttcgaggacctgcagccctgggtgagcaacttcacctaccccggcgccagagacttcagccagctggccctggaccccagcggcaaccagctgatcgtgggcgcctag

SEQ ID NO: 29747 - DNA, 255 bp, Artificial Sequence
  derived and/or modified sequence
atgccctgcggcttcagccccagccccgtggcccaccacctggtgcccggcccccccgacacccccgcccagcagctgagatgcggctggaccgtgggcggctggctgctgagcctggtgagaggcctgctgccctgcctgccccccggcgccagaaccgccgagggccccatcatggtgctggccggccccctggccgtgagcctgctgctgcccagcctgaccctgctggtgagccacctgagcagcagctag

SEQ ID NO: 29748 - DNA, 3456 bp, Artificial Sequence
  derived and/or modified sequence
atgccttgtggtttttccccaagccccgttgctcatcacctggtgccaggtcctccagacacacccgcacagcaactgcgatgcggttggactgttggcgggtggttgctaagtctagtgcgggggcttcttccctgcctgcctcctggggctaggacagccgaaggccctatcatggtgctggcagggccgctcgcagtgagtctgctgttaccaagccttaccctcctggtatcccatctgtcatcttcccaggacgtgagctccgagcccagctctgagcagcaattgtgcgccctcagcaagcatcctacagtcgccttcgaagacttgcagccttgggtgtccaacttcacttacccaggagcacgagatttttcacagctagcactggacccttccggaaatcagttgatcgttggagccagaaactacctgttccgcctcagcctggccaatgtgtcccttctgcaggctacagagtgggctagctcagaggatacacgtcggtcatgtcagtcaaaaggaaaaacagaggaggagtgccagaattacgttagagtcctaatagttgcgggacgaaaggtctttatgtgcgggaccaatgccttctcacccatgtgtactagtcgccaagtaggtaacttgtcgaggacgatagaaaagattaatggagtggccagatgcccatatgatcccagacacaactccaccgcagtcatctcgtctcagggagaactgtacgctgctacagtgatcgatttttctggtcgggatccggctatatacagatcattggggtctggccccccactgcgcaccgcgcagtacaattcaaaatggctgaatgagccaaatttcgtagcagcctacgatatcgggctttttgcctatttcttcctgcgcgagaatgcggtggaacacgactgtggaagaactgtatatagccgggtggctcgcgtgtgtaagaacgatgtcggcggtcggttcttactggaagatacttggaccacttttatgaaggcccggctgaactgctccagacccggcgaggtgccattttattataatgaattgcaaagtgccttccatctaccggagcaagatctgatctatggagtcttcacaacaaatgtgaacagcattgcggcctccgccgtgtgtgcgtttaatctaagcgcgatttcccaggcatttaacgggccctttcggtaccaggagaacccacgggcagcgtggcttcccatcgccaaccccataccaaattttcagtgtggtaccctgcccgaaacgggacccaacgagaacctcacagaacgctcactgcaggacgcccaaaggttgttcctgatgtcagaagcagtgcagccagtgactcctgagccctgcgttacccaggactccgttcgtttttcccacttagtcgtggacctcgtacaggctaaagatactctctaccatgtgttgtacattgggactgagtctggtacaattctaaaggcactgtcaacagcatccagatcactccacggctgctacctggaggagctgcatgtcctccctccgggccggagggaacctcttagatccttaagaatcttacactctgcaagagctttgtttgtggggctgcgagatggagtgttgagggtaccccttgagcgctgcgcagcatacagaagtcagggcgcctgcttaggagcaagagatccctactgcggttgggatggcaaacagcagaggtgtagtacccttgaagatagttcaaatatgtcactctggactcaaaacattacggcttgtcccgtgcgcaatgttacccgcgatggaggttttggcccctggtcaccctggcagccctgtgaacatttggatggcgacaactcaggctcctgcctttgccgcgcccgaagctgtgacagtccacggccaaggtgtggcggcctagactgtctggggcctgctatccacattgcaaactgctcgcgtaacggcgcctggaccccttggtctagctgggctctgtgctctacatcatgcggaatcgggtttcaggtccgccagaggtcatgtagtaatcccgccccccggcacgggggacgaatctgcgtgggtaagtccagagaagaacgattctgcaacgagaacaccccatgcccggtgccgatcttttgggcctcatggggctcctggtctaagtgctccagtaattgtgggggaggcatgcaaagtcgacggcgcgcgtgcgagaacgggaatagttgccttggatgtggcgtagaattcaaaacatgtaaccccgaaggatgccccgaggtacgccgtaacaccccatggacgccctggctaccggtgaatgttacacagggaggagcacggcaggagcagcgatttcgctttacctgccgggcccccttagcggacccccatggcctgcagttcggcagacgtaggaccgagactcgcacatgtcctgccgacggatctgggtcatgcgacacggacgctttggttgaggtcttgctgaggtccggcagcaccagcccgcatacagtgagcggcggctgggcagcctggggaccctggtcttcttgtagcagagattgtgagctcggcttccgtgtaagaaagagaacgtgcactaaccccgagcctcgcaacggtggtctgccatgtgtaggggacgccgccgagtaccaggattgcaaccctcaagcttgcccagtaaggggcgcatggtcgtgttggaccagttggagcccctgttcagctagctgtggaggcggacattaccaacgaaccaggagctgcactagtcctgcaccctcgcccggcgaagacatttgcctgggcctgcatactgaagaggccctttgtgcaacacaggcctgtcctgagggctggtccccatggtccgaatggagcaagtgcacggacgatggggcccagtctcgcagtagacattgcgaggagttgttacccgggtccagcgcctgcgccggcaacagctcgcagagccggccatgtccgtactccgagatccctgtcattttacctgcttcctccatggaggaggctacagattgcgccggcttcaacctgatacatctcgtcgccaccggtatcagctgtttccttggctcaggactgcttaccctcgccgtttacctgagttgtcagcactgccagcggcaaagccaggagtccaccctggtccatcccgcgaccccaaatcacttgcactacaagggcggcggcactcccaagaacgaaaagtatactccgatggaattcaagaccctgaataagaacaatctcatcccggatgatagagctaacttttaccctctccagcagacgaatgtctataccaccacttactatccctctccgctgaataagcactcctttcggcccgaggcaagtcctggtcagagatgctttccgaacagctag

SEQ ID NO: 29749 - DNA, 3267 bp, Artificial Sequence
  derived and/or modified sequence
atgccgtgtggcttcagcccttcccccgtggctcatcatcttgtacctggcccgcctgacacacccgcacaacagcttaggtgcgggtggacagtgggaggctggctattaagcctggtgaggggattactgccgtgcctccctcctggggcgaggactgcggaggggcccattatggtgctggccggccccctcgcagtgtcgctgctgctgccttcattgaccctgctggtgagtcacctgtcttcctctcaggatgtgtcctcagagccaagctccgagcagcagctctgtgcactgagcaaacacccaacagtggccttcgaggatctgcagccttgggtcagcaacttcacttatccaggagctagggacttttctcaactggccttggaccccagcggcaaccagcttattgttggcgcgagaaactatctgttcagattgtccctcgcgaatgtctcactcctccaggcaaccgaatgggcctcatcagaggacacacgccgctcctgccaaagcaaaggtaaaacagaggaagagtgtcagaactatgttcgcgtgctgatcgtggccggacgtaaagtgtttatgtgtggaacaaatgcgtttagcccaatgtgtacaagcaggcaggttggcaatctctcccggaccatcgagaagatcaacggtgtcgcacgatgtccatatgacccgagacataactccaccgctgtaatctcaagccaaggagagttatacgcagctactgtgattgactttagcggccgcgatccagccatttaccgtagcctgggcagcggtccaccccttcgaacagctcaatacaacagtaaatggctgaacgaacctaacttcgtcgcggcctatgatatcgggttgtttgcctatttcttcctcagggagaacgccgtcgagcatgactgtggaagaacagtgtactcccgggtcgcgagggtctgtaagaatgacgttgggggtcggttccttctagaggacacctggaccacttttatgaaagctcgcctgaattgctcacgccctggggaagtccccttttactataatgaactgcagtccgcatttcatctcccggaacaggatctgatttacggagtattcacaacaaatgtgaactctatcgctgcctctgctgtatgcgccttcaatctcagtgctatatctcaagcctttaatgggccctttagataccaggagaatcccagggcggcatggctgccaattgccaatcctattccaaacttccaatgcggcacgctcccagaaaccgggcctaatgagaacttaaccgagcgcagcctgcaagatgcccagcgcctgttccttatgagtgaggccgtgcagcccgtcaccccagagccttgcgttacccaagattctgtcaggtttagtcatttggtcgtggacctggtgcaggccaaagatacactgtatcatgtgctgtacatcggcacagaatctggaaccatcttgaaggctctctccactgcgtctcgaagtttgcatggatgctatttagaggaactgcacgttctccctccaggcaggagagagccacttcgctctctgcgaatattacatagcgctagagcgctgttcgtgggattgagagacggcgtgctcagagtgccattggaaaggtgcgcggcttatagatcccagggagcctgcctcggtgccagagatccatactgcgggtgggatggaaaacagcagagatgctcaacactggaagactccagcaacatgtcactatggacccagaacatcactgcatgccctgttcgcaatgtcactagggatggcggattcgggccctggagcccctggcaaccttgtgaacacttggacggtgacaactcaggctcatgcctgtgcagagcacgcagttgtgacagcccccgccctaggtgcggaggcctagattgtctcgggcctgctattcatattgccaactgctctaggaacggggcatggacaccatggtcctcatgggccctttgtagcacgagctgcggaattgggtttcaggtgagacagaggagttgctccaatccggccccccggcacgggggccgaatttgtgtcggaaaatcacgtgaagaacgtttttgtaacgagaatactccatgccccgtacctatcttctgggcctcatggggttcttggtctaagtgctccagcaattgtggcgggggaatgcagagtcggcggcgcgcatgcgagaatggtaacagctgtcttgggtgcggcgtcgagtttaaaacttgtaatccagaaggctgtccagaagtgcgcagaaatacgccatggactccttggctccctgtgaacgtcacacagggtggcgcccgccaggagcagaggttcagatttacctgtcgggcacccttagcggacccgcacgggctccaatttggcaggcgccgcacagaaactcgcacttgccccgccgatggttccggttcctgcgatacagatgccttggtggaggtactcctgagaagcggttccaccagccctcacacagtgagtgggggttgggcggcctggggaccctggtcttcctgttctagggattgcgagctgggttttagagtacgcaaacgaacatgtacaaaccccgaaccaaggaatggcgggctcccatgtgtcggagacgctgctgaataccaggattgcaacccccaggcgtgtccggttcggggcgcgtggagttgttggacttcatggtctccatgttcagcgagttgtggaggtgggcattaccaacgcactcggtcctgcacatcccccgctccttcaccgggggaagatatttgtctgggactacacacagaggaggctctctgtgcgactcaagcctgtcccgaaggatggagcccatggtcagaatggagcaagtgtactgacgacggggcccagagccgtagccggcactgcgaagagctcttgcctggcagtagtgcatgtgctgggaacagctcgcagtctcgtccgtgtccctactcagagataccggtgatcctcccggcatccagcatggaggaggccacagattgtgccgggtttaaccttatccaccttgtcgctaccgggatctcatgtttcctgggatccggcctgctgactctggcagtgtatctgagctgtcaacattgccagcggcagagccaggagtccacgttggttcacccagccacaccgaaccacttacactataaaggcggagggactccctag

SEQ ID NO: 29750 - DNA, 429 bp, Artificial Sequence
  derived and/or modified sequence
atgccgtgcggattctcacccagtcccgtggcccaccacttagtgcctggaccccccgacacgcccgcacaacagcttagatgtggctggaccgtgggtggatggctattaagcttagtgcgtggcctcctcccttgtcttccccctggcgccaggacagcagagggcccaattatggtgctcgccgggcctctggccgtgagcttactgttgccatctctgactctgctggtctctcacttgtcatcttcacaggatgtcagtagtgagcctagcagcgagcaacagctgtgcgccctgagcaagcaccccaccgtggcatttgaggacctgcagccatgggtgagtaacttcacctaccccggcgctcgggatttctcccagctggccctggatccttccgggaaccaactgattgtgggggcctag

SEQ ID NO: 29751 - DNA, 255 bp, Artificial Sequence
  derived and/or modified sequence
atgccttgtggattttccccatctcctgtcgcccatcatctcgtgcccggaccacctgatacaccagcccagcaactacgatgcggttggacagttggcggatggctcctgtccctggtgaggggcctactcccttgccttccgcccggcgcgcggaccgctgagggacccattatggtactggcaggaccactggccgtgagcctcctgttgccctccctgaccttactggtgagccatttatcctccagctag

SEQ ID NO: 29752 - DNA, 3456 bp, Artificial Sequence
  derived and/or modified sequence
atgccctgtggcttcagccccagccctgtggcccaccacctggtgcccggccccccagacaccccagcccagcagctgcgctgtggctggacagtgggcggctggctgctgagcctggtgcggggcctgctgccctgcctgcccccaggggccaggacagctgagggccccatcatggtgctggccggccccctggccgtgtccctgctgctgcccagcctgaccctgctggtgagccacctgagcagcagccaggatgtgtcctctgagcccagcagcgagcagcagctgtgtgccctgagcaagcaccccaccgtggcctttgaggacctgcagccctgggtgagcaacttcacctacccaggggcccgggacttcagccagctggccctggaccccagcggcaaccagctgattgtgggcgccaggaactacctgttccggctgagcctggccaacgtgtccctgctgcaggccacagagtgggccagcagcgaggacaccaggaggagctgccagagcaagggcaagacagaggaggagtgccagaactacgtgcgggtgctgattgtggccggcaggaaggtgttcatgtgtggcaccaatgccttcagccccatgtgcaccagccggcaggtgggcaacctgagcaggaccatcgagaagatcaacggggtggcccgctgcccctatgaccccaggcacaacagcacagctgtgatcagcagccagggcgagctgtatgctgccaccgtgattgacttcagcggccgggaccctgccatctaccgcagcctgggcagcggcccccccctgaggacagcccagtacaacagcaagtggctgaatgagcccaactttgtggccgcctatgacatcggcctgtttgcctacttcttcctgagagaaaatgctgtggagcatgactgtggccgcacagtgtacagccgggtggcccgggtgtgcaagaatgatgtgggcggccgcttcctgctggaggacacctggaccaccttcatgaaggcccggctgaactgcagcaggcctggagaggtgcccttctactacaatgagctgcagagcgccttccacctgcctgagcaggacctgatctacggcgtcttcaccaccaacgtgaacagcattgctgccagcgctgtgtgtgccttcaacctgagcgccatcagccaggccttcaacggccccttccgctaccaggagaaccccagggctgcctggctgcccatcgccaaccccatccccaacttccagtgtggcaccctgcctgagaccggccccaatgaaaacctgacagagaggagcctgcaggatgcccagaggctcttcctgatgtctgaggccgtgcagcctgtgaccccagagccctgtgtgacccaggacagcgtgcgcttcagccacctggtggtggacctggtgcaggccaaggacaccctgtaccacgtgctgtacatcggcacagaaagtggcaccatcctgaaggccctgagcacagccagccgcagcctgcacggctgctacctggaggagctgcacgtgctgcccccaggccggcgggagcccctgcggagcctgcgcatcctgcacagcgcccgggccctgtttgtgggcctgagagatggagtgctgcgggtgcccctggagcgctgtgccgcctaccgcagccagggcgcctgcctgggcgcccgggacccctactgcggctgggatggcaagcagcagcgctgcagcaccctggaggacagcagcaacatgagcctgtggacccagaacatcacagcctgccctgtgagaaatgtgaccagagatggcggcttcggcccctggagcccctggcagccctgtgagcacctggatggagacaacagcggcagctgcctgtgccgggcccggagctgtgacagcccccggccccgctgtggcggcctggactgcctgggccctgccatccacatcgccaactgcagcagaaatggagcctggaccccctggagctcctgggccctgtgcagcaccagctgtggcatcggcttccaggtgcggcagaggagctgcagcaacccagcccccaggcatggaggccgcatctgtgtgggcaagagccgggaggagcgcttctgcaatgaaaacaccccctgccctgtgcccatcttctgggcctcctggggctcctggagcaagtgcagcagcaactgtggcggcggcatgcagagcagaagaagagcctgtgaaaatggaaacagctgcctgggctgcggcgtggagttcaagacctgcaaccctgagggctgcccagaggtgagaagaaacaccccctggaccccctggctgcctgtgaatgtgacccagggcggggcccggcaggagcagcgcttccgcttcacctgccgggcccccctggccgacccccacggcctgcagtttggaagaagaagaacagagaccaggacctgcccagcagatggcagcggcagctgtgacacagatgccctggtggaggtgctgctgcggagcggcagcaccagcccccacacagtgtctgggggctgggccgcctggggcccctggagcagctgcagccgggactgtgagctgggcttccgggtgaggaagaggacctgcaccaaccctgagcccagaaatggaggcctgccctgtgtgggagatgctgctgagtaccaggactgcaacccccaggcctgccctgtgcggggggcctggagctgctggacctcctggagcccctgcagcgccagctgtggcggcggccactaccagaggaccaggagctgcaccagccctgcccccagccctggagaggacatctgcctgggcctgcacacagaggaggccctgtgtgccacccaggcctgcccagagggctggagcccctggagcgagtggagcaagtgcacagatgatggagcccagagccgcagccgccactgtgaggagctgctgcccggcagcagcgcctgtgccggcaacagcagccagagccggccctgcccctacagcgagatccctgtgatcctgcctgccagctccatggaggaggccacagactgtgccggcttcaacctgatccacctggtggccaccggcatcagctgcttcctgggcagcggcctgctgaccctggccgtgtacctgagctgccagcactgccagaggcagagccaggagagcaccctggtgcacccagccacccccaaccacctgcactacaagggcggcggcacccccaagaatgagaagtacacccccatggagttcaagaccctgaacaagaacaacctgatcccagatgaccgggccaacttctaccccctgcagcagaccaacgtgtacaccaccacctactaccccagccccctgaacaagcacagcttccggcctgaggccagccctggccagcgctgcttccccaacagctag

SEQ ID NO: 29753 - DNA, 3267 bp, Artificial Sequence
  derived and/or modified sequence
atgccctgtggcttcagccccagccctgtggcccaccacctggtgcccggccccccagacaccccagcccagcagctgcgctgtggctggacagtgggcggctggctgctgagcctggtgcggggcctgctgccctgcctgcccccaggggccaggacagctgagggccccatcatggtgctggccggccccctggccgtgtccctgctgctgcccagcctgaccctgctggtgagccacctgagcagcagccaggatgtgtcctctgagcccagcagcgagcagcagctgtgtgccctgagcaagcaccccaccgtggcctttgaggacctgcagccctgggtgagcaacttcacctacccaggggcccgggacttcagccagctggccctggaccccagcggcaaccagctgattgtgggcgccaggaactacctgttccggctgagcctggccaacgtgtccctgctgcaggccacagagtgggccagcagcgaggacaccaggaggagctgccagagcaagggcaagacagaggaggagtgccagaactacgtgcgggtgctgattgtggccggcaggaaggtgttcatgtgtggcaccaatgccttcagccccatgtgcaccagccggcaggtgggcaacctgagcaggaccatcgagaagatcaacggggtggcccgctgcccctatgaccccaggcacaacagcacagctgtgatcagcagccagggcgagctgtatgctgccaccgtgattgacttcagcggccgggaccctgccatctaccgcagcctgggcagcggcccccccctgaggacagcccagtacaacagcaagtggctgaatgagcccaactttgtggccgcctatgacatcggcctgtttgcctacttcttcctgagagaaaatgctgtggagcatgactgtggccgcacagtgtacagccgggtggcccgggtgtgcaagaatgatgtgggcggccgcttcctgctggaggacacctggaccaccttcatgaaggcccggctgaactgcagcaggcctggagaggtgcccttctactacaatgagctgcagagcgccttccacctgcctgagcaggacctgatctacggcgtcttcaccaccaacgtgaacagcattgctgccagcgctgtgtgtgccttcaacctgagcgccatcagccaggccttcaacggccccttccgctaccaggagaaccccagggctgcctggctgcccatcgccaaccccatccccaacttccagtgtggcaccctgcctgagaccggccccaatgaaaacctgacagagaggagcctgcaggatgcccagaggctcttcctgatgtctgaggccgtgcagcctgtgaccccagagccctgtgtgacccaggacagcgtgcgcttcagccacctggtggtggacctggtgcaggccaaggacaccctgtaccacgtgctgtacatcggcacagaaagtggcaccatcctgaaggccctgagcacagccagccgcagcctgcacggctgctacctggaggagctgcacgtgctgcccccaggccggcgggagcccctgcggagcctgcgcatcctgcacagcgcccgggccctgtttgtgggcctgagagatggagtgctgcgggtgcccctggagcgctgtgccgcctaccgcagccagggcgcctgcctgggcgcccgggacccctactgcggctgggatggcaagcagcagcgctgcagcaccctggaggacagcagcaacatgagcctgtggacccagaacatcacagcctgccctgtgagaaatgtgaccagagatggcggcttcggcccctggagcccctggcagccctgtgagcacctggatggagacaacagcggcagctgcctgtgccgggcccggagctgtgacagcccccggccccgctgtggcggcctggactgcctgggccctgccatccacatcgccaactgcagcagaaatggagcctggaccccctggagctcctgggccctgtgcagcaccagctgtggcatcggcttccaggtgcggcagaggagctgcagcaacccagcccccaggcatggaggccgcatctgtgtgggcaagagccgggaggagcgcttctgcaatgaaaacaccccctgccctgtgcccatcttctgggcctcctggggctcctggagcaagtgcagcagcaactgtggcggcggcatgcagagcagaagaagagcctgtgaaaatggaaacagctgcctgggctgcggcgtggagttcaagacctgcaaccctgagggctgcccagaggtgagaagaaacaccccctggaccccctggctgcctgtgaatgtgacccagggcggggcccggcaggagcagcgcttccgcttcacctgccgggcccccctggccgacccccacggcctgcagtttggaagaagaagaacagagaccaggacctgcccagcagatggcagcggcagctgtgacacagatgccctggtggaggtgctgctgcggagcggcagcaccagcccccacacagtgtctgggggctgggccgcctggggcccctggagcagctgcagccgggactgtgagctgggcttccgggtgaggaagaggacctgcaccaaccctgagcccagaaatggaggcctgccctgtgtgggagatgctgctgagtaccaggactgcaacccccaggcctgccctgtgcggggggcctggagctgctggacctcctggagcccctgcagcgccagctgtggcggcggccactaccagaggaccaggagctgcaccagccctgcccccagccctggagaggacatctgcctgggcctgcacacagaggaggccctgtgtgccacccaggcctgcccagagggctggagcccctggagcgagtggagcaagtgcacagatgatggagcccagagccgcagccgccactgtgaggagctgctgcccggcagcagcgcctgtgccggcaacagcagccagagccggccctgcccctacagcgagatccctgtgatcctgcctgccagctccatggaggaggccacagactgtgccggcttcaacctgatccacctggtggccaccggcatcagctgcttcctgggcagcggcctgctgaccctggccgtgtacctgagctgccagcactgccagaggcagagccaggagagcaccctggtgcacccagccacccccaaccacctgcactacaagggcggcggcaccccctag

SEQ ID NO: 29754 - DNA, 429 bp, Artificial Sequence
  derived and/or modified sequence
atgccctgtggcttcagccccagccctgtggcccaccacctggtgcccggccccccagacaccccagcccagcagctgcgctgtggctggacagtgggcggctggctgctgagcctggtgcggggcctgctgccctgcctgcccccaggggccaggacagctgagggccccatcatggtgctggccggccccctggccgtgtccctgctgctgcccagcctgaccctgctggtgagccacctgagcagcagccaggatgtgtcctctgagcccagcagcgagcagcagctgtgtgccctgagcaagcaccccaccgtggcctttgaggacctgcagccctgggtgagcaacttcacctacccaggggcccgggacttcagccagctggccctggaccccagcggcaaccagctgattgtgggcgcctag

SEQ ID NO: 29755 - DNA, 255 bp, Artificial Sequence
  derived and/or modified sequence
atgccctgtggcttcagccccagccctgtggcccaccacctggtgcccggccccccagacaccccagcccagcagctgcgctgtggctggacagtgggcggctggctgctgagcctggtgcggggcctgctgccctgcctgcccccaggggccaggacagctgagggccccatcatggtgctggccggccccctggccgtgtccctgctgctgcccagcctgaccctgctggtgagccacctgagcagcagctag

SEQ ID NO: 29756 - DNA, 3456 bp, Artificial Sequence
  derived and/or modified sequence
atgccctgcggcttcagccccagccccgtggcccaccacctggtgccagggccgcctgacacaccagcccagcaattgcggtgcggctggacagtagggggctggctgttatcattggtaagagggctgcttccctgtcttccccccggtgctagaacggctgaaggtccgatcatggtacttgcgggtcctctggcagtaagtctgcttctcccaagcctgacactactggtgtcccatctgagtagctctcaagatgtctctagtgagccaagcagcgaacaacagttgtgtgccctctctaagcaccccaccgtggccttcgaagacctgcaaccctgggttagcaatttcacatatcccggtgccagggactttagccagctggcacttgatccgtcaggcaaccagctcatcgtcggcgccagaaattatcttttcagactgtccctggcaaatgtgtccttgctgcaggcaactgaatgggcctccagtgaagacacgcgacgctcgtgtcaatctaagggcaaaaccgaagaagaatgccaaaactacgtgagagtgctgatcgtggctggccggaaagtttttatgtgcggtaccaacgcattcagccctatgtgcacatcacgccaggttggaaacctttcacgcaccatagaaaaaatcaatggagtggcaaggtgcccttacgacccaagacataactccacagctgttatctcatcacagggagagctttatgccgccacggtaattgactttagtggacgggaccctgccatttatcggagcctgggtagtggtccacctctcagaacagctcaatacaacagcaaatggttgaatgagcctaacttcgtcgccgcctatgacatcggcctgttcgcatatttcttccttcgggaaaacgcagtggagcatgattgcggcagaactgtgtattcaagagtggcccgagtatgcaaaaatgacgttggaggccgatttttgctggaggatacgtggaccacttttatgaaagcacgtctaaactgctctagaccgggtgaagttcccttctattataacgaattgcagagtgcgttccatctacctgaacaggacttaatttatggggtgtttactaccaatgttaatagcattgctgcctctgccgtgtgcgcttttaacctctccgcgatctctcaggcctttaacggcccatttcgttatcaggaaaaccctagggcggcctggctcccgatcgctaatcctatccctaacttccagtgtggcacgctccctgaaacaggccccaatgagaaccttactgagagaagcctgcaggacgctcagcgactgttcctgatgtcagaggccgtgcagcctgtcactcccgagccgtgtgttacacaagacagtgtaaggttctcacaccttgtggtggacctcgtgcaggccaaagataccctgtaccatgtcctgtacatcggtactgagtccggaaccattttgaaggccctgtctaccgcttcacggtccctgcacgggtgttacctggaggaactgcacgttctcccccccggccgcagggaaccccttcgatcattgagaatattacactccgccagggcgttgttcgtgggcttgagggatggggtgctgagggtacctcttgaacgatgtgcggcttatagatcccagggggcttgcctgggggctagggacccctactgtggctgggacggaaagcagcaacgatgtagtactctggaggacagtagcaacatgagcctgtggacccaaaatattactgcgtgtcccgtccggaatgtgacacgcgatgggggcttcggtccgtggtccccctggcagccctgtgaacacctggacggcgacaattctggttcttgtttgtgtagggcacgcagttgcgactcccccaggcctcggtgcggaggtctggactgcctgggccctgctatccacattgccaattgctcaaggaacggcgcttggacaccatggtcctcatgggcattatgctcaaccagctgtgggattggcttccaggtgaggcaacggtcctgtagcaaccccgccccgcgacacggcggacggatatgcgtcggtaagagccgcgaggaaaggttctgtaacgagaataccccctgccctgtcccaattttctgggcgtcttgggggtcatggtcaaagtgcagctccaactgtggcgggggaatgcagagcaggcgcagggcctgcgaaaatggcaactcctgccttgggtgtggcgtggagtttaaaacctgcaatcctgagggatgtcctgaggtgcgccgcaacacaccctggaccccttggttgcctgtgaatgtcacacagggaggtgctcgccaggagcaacggttcaggttcacgtgccgtgctcctctggcagacccccacgggctccagttcggccggagaagaacggagactcgaacatgcccggcagacggctcaggatcttgcgatacagacgccctcgtggaggttttattgaggtccggaagtactagtccgcacacggtgtcgggcggctgggctgcttgggggccctggagctcttgttcacgggactgcgagctgggctttagggtacgcaagcgcacttgtaccaacccagagcctcgaaatggaggcttgccctgtgtcggcgacgctgctgaataccaggactgcaacccacaggcctgccccgtgaggggagcttggtcttgttggacatcttggagcccatgttccgctagctgtggtgggggacattaccagcgtaccaggagctgtactagccctgctcctagccctggagaagacatctgcctgggcctccatactgaagaagccctgtgtgccacccaggcatgcccagagggatggagcccatggtccgagtggtctaaatgcacggatgatggagcccagagcaggtctcggcattgcgaggagctcctacctggtagctccgcatgcgctggaaattcctcccagtcgaggccatgtccttactccgagattcctgtcattcttcccgcctccagcatggaagaggccacagactgcgctggcttcaatcttattcacctggtagccaccggcattagttgttttcttggttccggtttattgaccctagcagtctacttgtcttgtcagcactgccagcgtcagagccaggagtctaccttagtccatcctgccacccccaaccatctgcactacaaagggggcggaacaccaaaaaatgaaaaatacacgccaatggaatttaaaacattaaataaaaataacctgatcccagacgacagagctaatttttacccactgcagcagaccaacgtatacacaacaacatattaccctagcccacttaacaagcactcatttcgccccgaggcttcaccaggccagcggtgctttcccaattcatag

SEQ ID NO: 29757 - DNA, 3267 bp, Artificial Sequence
  derived and/or modified sequence
atgccctgcggcttcagccccagccccgtggcccaccacctggtgccaggcccaccagacactccggcccagcagctgcgctgcggatggacagtgggaggatggctgttgagcctcgtgaggggcttactgccatgtctgccacctggggctagaacagcggagggtcctatcatggtgctggcgggccccctggctgtgtctcttcttctcccctcgcttactctcttggtgtcacatctgtcatcctcccaggatgtgtccagcgagccaagttccgagcaacagctgtgcgcactgagcaagcacccaacagtcgctttcgaagacctgcaaccctgggtatcaaatttcacctaccctggagcccgtgatttctctcagctggctttagatccctcaggaaatcaactgattgttggagccaggaactacctgtttagattgtccttggccaacgtgtcacttttgcaggcaacagaatgggctagtagcgaagacactcgacggagctgccagtctaagggaaagaccgaggaggagtgccaaaattacgtacgggtcctgattgtagcagggcggaaggtgtttatgtgtgggacaaatgcattttctccgatgtgcacttctcgccaggtgggcaacctcagccggaccatagaaaaaatcaatggggtcgctaggtgcccatatgaccccagacataattcgaccgcagtcataagcagtcagggcgagctgtatgccgccacagtgattgactttagtgggcgcgaccccgccatctatcgcagcctaggctccggcccaccacttagaacagctcagtacaattccaaatggctgaacgaaccgaactttgtggcggcttacgacatcggcctgttcgcctatttcttcctgcgtgaaaacgcggttgagcacgattgtggacgaactgtgtacagcagagtggctagagtttgcaagaatgatgtcggtggaaggttccttctcgaggacacatggacgacatttatgaaggcgaggcttaactgctctaggccgggggaagttcctttttattataatgagttacaaagcgctttccacctgccagagcaggacctcatctacggagtgtttacaactaatgtcaacagcatcgcggccagcgccgtctgtgcttttaaccttagtgccatcagccaggcctttaacggcccctttcgttatcaggagaaccccagagcggcctggctgcccattgccaaccctatccccaattttcagtgtggcactcttcctgaaactgggcctaacgagaatctcaccgagcgatccctccaggatgcacagcgtctcttcttaatgagcgaagccgttcaacctgtgacccctgagccgtgtgtgactcaagatagcgtccgattcagccacctcgttgttgacttggttcaagcaaaggatacgttataccacgtcctctatattggcacggaaagtgggacgatcctgaaagcactctctactgcatcacgaagcctccatggctgctacttggaggaattgcacgtgctccccccaggcagacgtgagccactgaggtctctacgcattttgcactcggccagagccttgtttgtcggactgcgggacggggtactgagggtccctctggagcgctgtgccgcatacagatcccagggagcctgccttggggccagggatccctactgtggttgggatggcaaacaacagcgatgttcaacacttgaggattcttctaacatgtcactgtggactcaaaatataacagcctgccccgtgcgaaatgtgacacgggacggaggatttggtccctggagcccgtggcagccatgtgagcacctcgacggcgataattccggaagttgcctgtgtcgtgccaggagctgtgatagccctcggccacgctgcggtggtctcgattgtttggggcctgccatccatattgctaattgctcccgcaacggtgcctggacaccctggtcaagttgggcattgtgtagcactagttgcgggattggcttccaggtgcgtcagaggagctgctctaacccagccccgagacacggcggccggatctgcgttggaaagagcagggaagagaggttctgtaatgagaacactccctgccctgtcccaattttctgggcgtcctggggctcatggagtaagtgctccagtaactgcgggggtggcatgcagagccggcggcgggcctgcgagaatgggaacagctgccttgggtgtggagtggagtttaagacttgtaatcctgaggggtgcccagaggtgaggaggaacacaccctggacaccttggctcccagtaaatgttacccagggaggtgcccggcaggaacaacggttccggtttacatgtagagccccacttgcagatccacacggccttcagtttggacggcgacggacagagacacggacctgcccggcagatggttctggcagttgtgatacagatgccctcgtggaggttcttctgaggtctgggagcacttccccccacactgtgtccggcggatgggccgcctggggaccatggagctcctgttcgagggactgcgaactggggtttcgcgtgcgtaagagaacctgtaccaaccccgagccacggaacggaggcctcccctgcgtgggcgacgcggctgagtatcaggattgtaacccacaggcgtgcccagtgaggggtgcatggtcgtgctggacatcctggtccccttgcagcgcgtcctgtggtggcggccactatcaacgaacccgcagttgcacttcacccgctccctccccaggagaagacatctgtctgggtttgcatactgaagaagctctgtgcgccacccaggcctgcccagaaggctggagcccatggagcgagtggagcaagtgtacagatgatggcgctcagagcaggagccgacactgtgaagaactcctgccaggcagcagtgcttgtgcgggcaacagcagccagagcaggccatgtccatatagtgagatccccgtcatactacccgcaagtagtatggaggaagcaaccgactgtgctggattcaacttgatccatctcgtggcaacaggcattagctgcttcctcggcagtggtcttcttaccctagctgtatacctgtcttgccaacattgccagcgccagtctcaagaatcaacattggtgcacccggcgacacctaatcacctccactataagggcggcggaaccccgtag

SEQ ID NO: 29758 - DNA, 429 bp, Artificial Sequence
  derived and/or modified sequence
atgccctgcggcttcagccccagccccgtggcccaccacctggtgccagggccccccgatactcctgcccagcagctgaggtgcgggtggactgtggggggctggctgttgagcctggtacgcggcctcttgccatgtctcccgccaggcgcccggactgctgaaggacctataatggtgctggccgggcccctggcggtaagcttgctgttacccagcttaaccctgctggtgtcacacctctcaagctctcaagatgtgtcctcagagccgtcaagcgaacagcaactttgtgctctgagcaaacacccgaccgtggccttcgaggacctgcagccatgggtcagcaactttacctatccaggcgctcgagacttctcacagttggctctggaccccagtggtaatcagctcatcgtgggcgcgtag

SEQ ID NO: 29759 - DNA, 255 bp, Artificial Sequence
  derived and/or modified sequence
atgccctgcggcttcagccccagccccgtggcccaccacctggtgcccggtcctcccgatactccagcccaacaactgagatgtggctggactgtgggaggctggctgctgtctctggtgaggggactgctgccatgtctgcccccaggcgcccggaccgctgagggcccaatcatggtgctggctgggccactggccgtgagtctgttgctgccgagtttgacgctcctggtgtcacacttgtcctcctcgtag

SEQ ID NO: 29760 - DNA, 3456 bp, Artificial Sequence
  derived and/or modified sequence
atgccctgcgggttttcacctagcccagttgcccaccatttagttccaggccctcctgacacaccagcccagcagctgcgctgcggctggacagtcggtgggtggctcctctccctggtgcgcggactcttgccatgtctccccccaggagctaggacggcggaagggcctattatggtgctggctggcccactcgccgttagtctgctcctgccatctctgacactgctggttagccacctgtcatctagccaggatgtcagttccgagccttcgtcagagcagcaactttgtgccctaagtaaacatcccactgtggcctttgaggacctacagccatgggtgagcaattttacctacccaggggctcgagacttttcacagctggccttggatcccagcgggaaccagctgattgtgggggcaaggaactatctgtttcggttgtccctggcaaacgtgtcgctgctgcaagctaccgaatgggcaagcagcgaagacactagacggtcttgccagtccaagggcaagactgaggaggaatgccagaactacgttagagtccttatcgtcgctggacgaaaggttttcatgtgtggtaccaatgccttttctccaatgtgcacgtctaggcaggtagggaacctgagcagaaccatcgaaaagattaacggcgtggcacgctgtccttacgacccaaggcacaactcaaccgctgtgatttcttctcagggagagttatacgctgccactgtgatcgatttctccggccgtgatccagcaatctacagaagtctgggttctgggcctcccctgaggactgctcagtacaacagtaagtggctgaatgaacctaattttgtggccgcatatgatatcgggttgtttgcctattttttcctgcgggagaacgcggtggaacatgactgtgggaggacagtctatagccgcgtagcaagagtgtgtaagaacgacgtggggggacgatttctgctcgaggatacatggaccaccttcatgaaggctcgtcttaactgcagcagacccggagaagtgcctttttattacaacgagctgcaaagtgcttttcacctcccagagcaggacctcatttacggtgtttttaccacgaacgttaattcaattgccgcaagcgcagtgtgtgcctttaacctaagtgccatatcacaggcttttaacggtccatttcgatatcaagaaaatccaagggcggcatggctgcctatagctaatcccattccaaattttcagtgcggaacccttccggagactggtcctaacgagaacctcaccgaaagaagcctacaagacgcccaacggttattcttgatgagtgaagcagtgcaacctgtgacaccagaaccgtgtgtcacacaggactctgttcgcttttctcacctggtggtagatttagttcaggccaaagataccctttatcacgtcttgtacattgggaccgagtccggcaccattcttaaggctcttagcaccgcttcacgctccttacatgggtgctacctcgaggagcttcacgtgctgccacccggaaggcgagagccgttgaggagcctgagaatcctccactccgctcgggctctgtttgtcggactgcgggacggtgtactgcgagtgccccttgagcggtgcgctgcctaccggtcccaaggcgcttgtctgggagcaagagatccatactgcggctgggatgggaagcagcaaaggtgttccacattggaagactcttccaacatgagcctgtggacacagaacatcactgcatgccccgtcaggaatgtcaccagggacggcggatttgggccttggtcaccttggcaaccatgtgaacacctcgatggagataatagcggttcttgtttatgccgcgcacggtcgtgtgactctcccaggccgcgatgcgggggactggattgcctaggtccggctatccacatagccaactgctcgcgtaacggcgcatggactccatggtcctcatgggctttatgttccacatcctgtggaatcggtttccaggtaagacagaggtcctgttcaaatcctgcacctcgacatggagggcgaatttgcgtcgggaagtctagagaggagagattttgtaacgagaacacaccttgtcccgtccccatcttttgggcaagctggggctcctggtccaaatgttcaagtaattgcggagggggtatgcagagtcgacgcagggcctgtgagaacggtaattcttgcctcgggtgcggggtggagtttaaaacatgtaatcctgaaggatgccccgaggttaggaggaacactccgtggactccatggctgccggtaaatgtgacccaggggggagctagacaggaacagcggttccgatttacgtgcagagctccgctcgccgatccgcatgggctccagtttgggagaaggcgtaccgaaacccgcacatgccccgcagacggcagcggctcttgtgatactgatgcactcgttgaggttcttctgaggtccggatcaacatctcctcacaccgtttcgggtggctgggccgcatgggggccttggagtagttgcagccgagattgcgagctgggctttagagtgcggaaacggacatgcactaaccccgagcctagaaacgggggtctgccctgcgtcggagacgccgcagagtatcaagactgcaacccacaggcatgtccagtccggggagcatggagttgctggaccagctggtctccctgttcagcctcttgtgggggtggacattaccagcggaccaggagctgcaccagtccagctccctccccaggtgaagacatctgtctcggcctccatactgaagaagctctatgtgcaactcaggcctgtcccgaagggtggagtccttggtccgaatggtcaaagtgtacggacgacggagcccagagccggtctaggcactgtgaggaactcctgcccggaagtagtgcatgcgctgggaatagttcacagtcgagaccttgtccgtactccgagattcctgttatactacctgcctcctcaatggaagaggcaacggactgcgccggattcaacctaattcacctcgttgccaccggcatctcctgttttctgggatccggacttctgaccttggctgtgtatctgtcttgtcagcattgccagaggcagtcccaggagtcaacactggtgcatcctgctacccccaatcatctgcattataagggcggtggaacacccaaaaatgaaaagtatacccccatggagttcaagaccctaaacaaaaacaacttgattcccgatgacagagcgaacttttaccccctacagcagaccaatgtgtacacgaccacatattacccctccccactcaacaaacacagctttcggccagaagcaagccccggacaaaggtgtttcccaaactcttag

SEQ ID NO: 29761 - DNA, 3267 bp, Artificial Sequence
  derived and/or modified sequence
atgccttgcggcttttccccgagtccagtggcccaccatctcgtccccggtcccccagatactccagcccagcagttgagatgcggatggacggtggggggatggctgctgtccctggtcagaggactgcttccctgtcttcctccgggtgccagaactgccgaaggaccaatcatggttctggcgggtccgctcgccgttagcctgctgctgcctagcctgacactcttagtgagtcacctgtcatcttcccaagatgtgtcatcagagccaagttcggagcaacagctgtgtgctctgagcaagcaccctactgtagcctttgaggatctgcagccttgggtgtccaacttcacctatcccggagcacgcgactttagccagctggccctcgatccaagcgggaaccaactgatcgtcggggctaggaattatctctttcgcctctcattggcgaacgtctcccttctccaggctactgaatgggcaagctccgaggatacccggaggagctgtcagtcaaaagggaagactgaggaggagtgtcagaattatgtacgcgtcttgatcgttgcaggccgtaaggtgtttatgtgcgggaccaacgcattcagtccaatgtgtacttcccgtcaggtgggcaatctgagtagaacaatcgagaaaataaacggagtggccagatgcccctacgatccacgccacaatagtacagccgttatctcgagccaaggcgagctgtatgctgctaccgtaatagatttctcgggcagggacccggcaatctatcgctcactaggatctggcccacctctgagaacggctcagtacaactcgaaatggctgaacgagcctaactttgtcgccgcttacgacatcggacttttcgcatacttcttcctgcgggaaaatgctgtggagcacgactgcggccgtactgtgtattcgcgagttgccagagtttgcaaaaatgatgtcggtggtaggttcttgttagaggacacatggaccacatttatgaaagctcggctgaattgctctagacccggtgaagtgcctttttactataatgaattacagtctgccttccatctgccagagcaggatttgatttatggggtgttcaccaccaatgtgaactccatcgctgcctctgccgtgtgcgcgttcaatctgagcgctatctcccaggcctttaacgggccatttaggtatcaggaaaatccacgcgcagcttggctgcctatcgcaaaccctattccgaatttccagtgtgggacccttccggagacgggccctaatgaaaacctgacagagcgttctttgcaggacgcccagaggctgttcctgatgtctgaggccgtccaacccgtcacgcccgagccgtgcgttacccaagactcagtccgatttagccatctcgttgtagatttggtccaagcaaaggataccctgtaccatgtcctgtacatcggaacggagagtggtaccatcctgaaagctctctccaccgcctcgaggagcctccacggctgctacctagaagaactgcatgttctaccgcctggccgacgtgagccactgagatcattacgtattcttcattcagcaagggccctcttcgttgggctgcgggacggagtcctaagagtacctctggaaagatgcgccgcttaccgatcccagggggcatgtcttggagccagggatccttactgcggctgggacggcaaacagcagagatgctccactctggaagattcatcaaatatgtcgctttggacgcagaatataacagcctgtcctgtacggaatgtgactagggatggcggattcggtccctggtccccatggcagccgtgcgagcacctggacggtgataattctggctcttgcctgtgtcgggctaggagctgtgactctcctaggcctcggtgcggaggcctcgactgtctgggaccagccatccacattgccaactgttcccggaatggggcttggacaccgtggagctcctgggccctctgcagtacatcttgtgggatagggtttcaggtgcggcagcggtcctgtagtaatccagctcccaggcatgggggtcgaatttgtgtgggcaagtctcgtgaggagcggttctgtaatgagaacaccccatgtccagtgcctatattttgggcttcctgggggagctggtctaagtgttcttccaactgcggcggaggcatgcagtcgcgcaggcgcgcttgtgaaaacgggaacagttgcttaggttgtggcgtcgaatttaaaacctgcaatcccgaaggctgtcctgaagtgcgtcggaatactccctggactccgtggctcccggttaatgttacccaggggggagcaagacaggagcaacggttcagatttacatgtcgtgccccacttgcagacccacacggcttacagtttgggaggagacggacggagacccgtacatgcccagcagacggctccggatcctgcgacacagatgcactggtggaagtactcctgagatctgggagtacgagcccacatactgtgtcaggaggttgggcggcttgggggccatggtcctcctgtagcagggattgtgagctgggtttcagggttaggaaacgtacttgcactaaccccgagcctagaaacggcggtctcccctgtgttggagatgccgctgagtatcaggactgcaatccgcaagcgtgtcccgttaggggggcttggtcatgctggactagttggagcccttgttctgcaagctgcgggggagggcattaccagcgaacacggagctgcacgtcacctgccccaagcccgggagaggacatctgcttggggctgcacacagaggaagcactgtgcgctacccaggcatgccctgagggctggtccccttggtccgaatggtcaaaatgcacggatgatggcgctcagtctcggtctcgtcactgcgaggaactgctaccgggtagcagcgcatgtgccggaaacagttcccagtccaggccttgtccctactctgagatcccagtgatcttgcccgcatcaagcatggaagaagcaaccgactgtgccggatttaacctgattcatttggtggcgacgggaattagctgttttctggggagcggccttctgactctcgccgtgtacctatcttgccagcattgccagagacagagtcaggaatcaaccctagtccatcccgcaacgcccaaccacctgcactataaaggaggagggaccccttag

SEQ ID NO: 29762 - DNA, 429 bp, Artificial Sequence
  derived and/or modified sequence
atgccctgcggcttctcacccagtcccgtagcccaccaccttgtgccgggtcccccagatacccccgctcagcaacttaggtgcggctggacagtggggggttggctgctctccctcgtacggggtttactgccgtgtctccctccaggcgcaagaaccgccgagggcccaatcatggttttggcaggtcctcttgcagttagtctgttgcttcctagtttgacactcttagtgtcccacctgagtagctcccaggacgtgtcatccgaacctagcagtgagcagcagttatgtgccttgtcaaagcacccaactgtagcctttgaggatctgcaaccctgggtctccaatttcacataccccggtgctcgtgacttcagccagttggcccttgacccatccggcaatcaactgattgtaggcgcttag

SEQ ID NO: 29763 - DNA, 255 bp, Artificial Sequence
  derived and/or modified sequence
atgccttgcggattcagccccagtccagttgcccatcatctcgtgcctggtcccccagatacacctgctcaacagctgcggtgcggttggactgtgggtggatggctgctatcgctagtcagaggcttactgccctgtctaccgccaggtgcgagaaccgctgaaggtcccattatggtccttgctggacccttggctgtaagtctgctgctgcccagcttgactctgcttgtcagtcatctgtctagcagctag

SEQ ID NO: 29764 - protein, 266 aa, Artificial Sequence
  derived and/or modified sequence
MFVELNNLLNTTPDRAEQGKLTLLCDAKTDGSFLVHHFLSFYLKANCKVCFVALIQSFSHYSIVGQKLGVSLTMARERGQLVFLEGLKSAVDVVFQAQKEPHPLQFLREANAGNLKPLFEFVREALKPVDSGEARWTYPVLLVDDLSVLLSLGMGAVAVLDFIHYCRATVCWELKGNMVVLVHDSGDAEDEENDILLNGLSHQSHLILRAEGLATGFCRDVHGQLRILWRRPSQPAVHRDQSFTYQYKIQDKSVSFFAKGMSPAVL

SEQ ID NO: 29765 - protein, 242 aa, Artificial Sequence
  derived and/or modified sequence
MFVELNNLLNTTPDRAEQGKLTLLCDAKTDGSFLVHHFLSFYLKGVSLTMARERGQLVFLEGLKSAVDVVFQAQKEPHPLQFLREANAGNLKPLFEFVREALKPVDSGEARWTYPVLLVDDLSVLLSLGMGAVAVLDFIHYCRATVCWELKGNMVVLVHDSGDAEDEENDILLNGLSHQSHLILRAEGLATGFCRDVHGQLRILWRRPSQPAVHRDQSFTYQYKIQDKSVSFFAKGMSPAVL

SEQ ID NO: 29766 - DNA, 1401 bp, Artificial Sequence
  derived and/or modified sequence
ggtcccatcgaggcacccgcctcattggctgtggctggctcgcaaaagtggcattgcgcatgcgcgcttccttgcgcgagccgggctgtcgggtgtgttttgctctccagcctccgtcgtctctgcagcactccgggttctcctccagagcgctagtcccaggagctcggaatgttcgtggaacttaataacctgcttaacaccacccccgacagggcggagcaggggaaactgactctactctgtgatgccaagacagatgggagtttccttgtacaccactttctctccttctatctcaaagctaattgtaaagtctgctttgtggcactcatccagtccttcagccactacagtatcgtgggacagaagctgggtgtcagcctgaccatggcgcgggagcgtgggcagcttgtgttccttgagggactcaagtctgcagtggacgtcgtcttccaggctcaaaaggagccacaccccctgcagtttctcagggaggctaatgctgggaacttgaaaccattgtttgagtttgtacgggaggccctgaagccagtagacagtggagaggctcggtggacgtacccggtgctgttggtggacgacctcagtgtgctcctgagcctgggcatgggggcggtggctgtgctagacttcattcactactgcagagccaccgtgtgctgggaactaaagggaaacatggtggtccttgtgcacgacagtggagatgcggaggatgaggagaatgacatcctgctgaatggcctcagtcatcagagccatctgatactgcgggctgagggcctggccactggcttctgcagggatgtgcacgggcagctgaggatcctgtggaggagaccatcgcagcccgcagtccaccgggatcagagcttcacttaccagtataagatacaggacaaaagcgtgtccttttttgccaaaggaatgtctcctgctgttctgtgacctgatttcggagcagctgaagctacataggactgtttttggacgtggaagatagagcaacatagcaagaatgggtctttctcctctgtagtaatatttcaggctggaccggcgactccactgtgaccagagggttgagtgctgcagtgatggcatgccttggctgccctgggccctgttcagaaaacacaagggaccacaatcctgcctttgctgagagagaggctggatgctagacccaagtgaaaggggtcctttggagcctttgtttaaatatgccttagccccagctgcccatttttggttgacaagcctttcagagccagagtgggtatagatgtgccagccaggagatggcaccggatggcaggtgtgcaaggtgacaactaggataatcatggctggaataaagtaagtttccacactgga

SEQ ID NO: 29767 - DNA, 1276 bp, Artificial Sequence
  derived and/or modified sequence
attgcgcatgcgcgcttccttgcgcgagccgggctgtcgggtgtgttttgctctccagcctccgtcgtctctgcagcactccgggttctcctccagagcgctagtcccaggagctcggaatgttcgtggaacttaataacctgcttaacaccacccccgacagggcggagcaggggaaactgactctactctgtgatgccaagacagatgggagtttccttgtacaccactttctctccttctatctcaaaggtgtcagcctgaccatggcgcgggagcgtgggcagcttgtgttccttgagggactcaagtctgcagtggacgtcgtcttccaggctcaaaaggagccacaccccctgcagtttctcagggaggctaatgctgggaacttgaaaccattgtttgagtttgtacgggaggccctgaagccagtagacagtggagaggctcggtggacgtacccggtgctgttggtggacgacctcagtgtgctcctgagcctgggcatgggggcggtggctgtgctagacttcattcactactgcagagccaccgtgtgctgggaactaaagggaaacatggtggtccttgtgcacgacagtggagatgcggaggatgaggagaatgacatcctgctgaatggcctcagtcatcagagccatctgatactgcgggctgagggcctggccactggcttctgcagggatgtgcacgggcagctgaggatcctgtggaggagaccatcgcagcccgcagtccaccgggatcagagcttcacttaccagtataagatacaggacaaaagcgtgtccttttttgccaaaggaatgtctcctgctgttctgtgacctgatttcggagcagctgaagctacataggactgtttttggacgtggaagatagagcaacatagcaagaatgggtctttctcctctgtagtaatatttcaggctggaccggcgactccactgtgaccagagggttgagtgctgcagtgatggcatgccttggctgccctgggccctgttcagaaaacacaagggaccacaatcctgcctttgctgagagagaggctggatgctagacccaagtgaaaggggtcctttggagcctttgtttaaatatgccttagccccagctgcccatttttggttgacaagcctttcagagccagagtgggtatagatgtgccagccaggagatggcaccggatggcaggtgtgcaaggtgacaactaggataatcatggctggaataaagtaagtttccacactgg

SEQ ID NO: 29768 - DNA, 801 bp, Artificial Sequence
  derived and/or modified sequence
atgttcgtggagctgaacaacctgctgaacaccacccccgacagagccgagcagggcaagctgaccctgctgtgcgacgccaagaccgacggcagcttcctggtgcaccacttcctgagcttctacctgaaggccaactgcaaggtgtgcttcgtggccctgatccagagcttcagccactacagcatcgtgggccagaagctgggcgtgagcctgaccatggccagagagagaggccagctggtgttcctggagggcctgaagagcgccgtggacgtggtgttccaggcccagaaggagccccaccccctgcagttcctgagagaggccaacgccggcaacctgaagcccctgttcgagttcgtgagagaggccctgaagcccgtggacagcggcgaggccagatggacctaccccgtgctgctggtggacgacctgagcgtgctgctgagcctgggcatgggcgccgtggccgtgctggacttcatccactactgcagagccaccgtgtgctgggagctgaagggcaacatggtggtgctggtgcacgacagcggcgacgccgaggacgaggagaacgacatcctgctgaacggcctgagccaccagagccacctgatcctgagagccgagggcctggccaccggcttctgcagagacgtgcacggccagctgagaatcctgtggagaagacccagccagcccgccgtgcacagagaccagagcttcacctaccagtacaagatccaggacaagagcgtgagcttcttcgccaagggcatgagccccgccgtgctgtag

SEQ ID NO: 29769 - DNA, 729 bp, Artificial Sequence
  derived and/or modified sequence
atgttcgtggagctgaacaacctgctgaacaccacccccgacagagccgagcagggcaagctgaccctgctgtgcgacgccaagaccgacggcagcttcctggtgcaccacttcctgagcttctacctgaagggcgtgagcctgaccatggccagagagagaggccagctggtgttcctggagggcctgaagagcgccgtggacgtggtgttccaggcccagaaggagccccaccccctgcagttcctgagagaggccaacgccggcaacctgaagcccctgttcgagttcgtgagagaggccctgaagcccgtggacagcggcgaggccagatggacctaccccgtgctgctggtggacgacctgagcgtgctgctgagcctgggcatgggcgccgtggccgtgctggacttcatccactactgcagagccaccgtgtgctgggagctgaagggcaacatggtggtgctggtgcacgacagcggcgacgccgaggacgaggagaacgacatcctgctgaacggcctgagccaccagagccacctgatcctgagagccgagggcctggccaccggcttctgcagagacgtgcacggccagctgagaatcctgtggagaagacccagccagcccgccgtgcacagagaccagagcttcacctaccagtacaagatccaggacaagagcgtgagcttcttcgccaagggcatgagccccgccgtgctgtag

SEQ ID NO: 29770 - DNA, 801 bp, Artificial Sequence
  derived and/or modified sequence
atgtttgtcgaattgaataatctgctaaatacgacacctgatagggcggaacagggcaagcttacccttctgtgcgatgccaagacagacggtagtttcctggtgcaccacttcctctcattttatttaaaagctaattgtaaagtctgctttgtcgcattgattcaaagcttctcccattatagtatcgtcgggcagaagctgggagtttccctaacgatggcccgggaacgcgggcagttagtcttcctagagggtttgaagagtgccgtggacgtcgtctttcaggcgcagaaggaaccacacccgctccagtttctcagggaggccaatgctgggaatttaaagcctttgtttgagttcgttcgagaagccttaaagccagtggattctggcgaggctagatggacataccccgtgctgcttgtcgatgacctaagcgttttgctgagcctgggcatgggcgcggtcgccgtcctggactttattcactactgtagagctactgtttgttgggagctgaaaggcaatatggtagtgctggtgcacgatagcggagatgcagaggatgaagaaaacgatattttgctgaacgggctaagtcaccagagtcacctaatcctccgagcagagggtctggctaccgggttttgcagggacgtacacggacagctgcggatcctctggaggaggccatcacaaccagccgtgcatagggatcagtcctttacataccagtacaagatacaggataagagtgtctcctttttcgcaaaaggaatgagcccagccgttctatag

SEQ ID NO: 29771 - DNA, 729 bp, Artificial Sequence
  derived and/or modified sequence
atgtttgtggagctgaataatctgctcaataccacgcctgacagggctgaacaggggaaactgacgctgttatgcgatgcaaaaaccgatgggtcttttttggtgcatcacttcttgagcttctaccttaaaggcgtaagcctaaccatggctcgcgaacgtggccaactggtctttctggaaggactcaagtctgcggtggatgtggttttccaggcccagaaggaacctcatcctttgcagtttctgagggaagctaacgccggtaacctgaagcctctatttgagtttgtacgcgaggccctgaagccggtcgattcaggagaagcccgatggacttaccccgtgttgctagtcgatgatttgtctgtgttgctgtctttaggcatgggcgccgtcgccgtgctagattttatccactattgtcgggccacagtgtgctgggaacttaaaggaaatatggtagttctggtgcacgacagtggagatgccgaagatgaggagaatgacatactgctcaacgggttgtctcaccaaagccacctgattctgagggccgaagggctggctactggcttttgccgggacgtgcacggtcagctgagaatcctgtggcgtagacctagccaacctgctgtgcatcgcgaccagtcattcacgtatcagtacaagatccaggacaagagcgtaagtttcttcgctaagggcatgtccccggctgttctgtag

SEQ ID NO: 29772 - DNA, 801 bp, Artificial Sequence
  derived and/or modified sequence
atgtttgtggagctgaacaacctgctgaacaccaccccagacagagctgagcagggcaagctgaccctgctgtgtgatgccaagacagatggcagcttcctggtgcaccacttcctgtccttctacctgaaggccaactgcaaggtgtgctttgtggccctgatccagagcttcagccactacagcatcgtgggccagaagctgggcgtgtccctgaccatggcccgggagcggggccagctggtgttcctggagggcctgaagtctgctgtggatgtggtgttccaggcccagaaggagccccaccccctgcagttcctgcgggaggccaatgccggcaacctgaagcccctgtttgaatttgtgcgggaggccctgaagcctgtggacagcggggaggcccgctggacctaccctgtgctgctggtggatgacctgtctgtgctgctgagcctgggcatgggcgctgtggccgtgctggacttcatccactactgccgggccaccgtgtgctgggagctgaagggcaacatggtggtgctggtgcatgattctggagatgctgaagatgaggagaatgacatcctgctgaatggcctgagccaccagagccacctgatcctgcgggcagagggcctggccaccggcttctgcagagatgtgcacggccagctgcgcatcctgtggaggcggcccagccagcctgctgtgcaccgggaccagagcttcacctaccagtacaagatccaggacaagtctgtgtccttctttgccaagggcatgagccctgctgtgctgtag

SEQ ID NO: 29773 - DNA, 729 bp, Artificial Sequence
  derived and/or modified sequence
atgtttgtggagctgaacaacctgctgaacaccaccccagacagagctgagcagggcaagctgaccctgctgtgtgatgccaagacagatggcagcttcctggtgcaccacttcctgtccttctacctgaagggcgtgtccctgaccatggcccgggagcggggccagctggtgttcctggagggcctgaagtctgctgtggatgtggtgttccaggcccagaaggagccccaccccctgcagttcctgcgggaggccaatgccggcaacctgaagcccctgtttgaatttgtgcgggaggccctgaagcctgtggacagcggggaggcccgctggacctaccctgtgctgctggtggatgacctgtctgtgctgctgagcctgggcatgggcgctgtggccgtgctggacttcatccactactgccgggccaccgtgtgctgggagctgaagggcaacatggtggtgctggtgcatgattctggagatgctgaagatgaggagaatgacatcctgctgaatggcctgagccaccagagccacctgatcctgcgggcagagggcctggccaccggcttctgcagagatgtgcacggccagctgcgcatcctgtggaggcggcccagccagcctgctgtgcaccgggaccagagcttcacctaccagtacaagatccaggacaagtctgtgtccttctttgccaagggcatgagccctgctgtgctgtag

SEQ ID NO: 29774 - DNA, 801 bp, Artificial Sequence
  derived and/or modified sequence
atgttcgtggagctgaacaacctgctgaacaccacccccgaccgggccgagcaggggaaactgaccctactctgtgacgctaagactgatgggtcctttctggtgcaccacttcctgtcattttacctgaaggcaaattgcaaggtgtgtttcgttgctttgatccagtccttttctcattactccattgtgggacaaaaattgggagtgtccctgacgatggcgagggagagagggcagctggtgtttctcgaaggtctgaagtcagctgtggacgtcgtcttccaggcccagaaagagccacaccctctccagttcttaagagaggctaatgcaggtaacctaaagcccttgtttgagttcgtgcgtgaggccctgaaaccagttgactctggggaggctagatggacttatccagtactgctggtggatgatctgtccgtgcttctgtccttagggatgggcgcagtcgccgtgctggacttcatacactactgccgtgcgacggtgtgttgggagctgaaggggaatatggtggttctggtgcacgactctggtgatgctgaggacgaagagaatgatattctgctgaatgggcttagtcatcagtctcacttaattctgcgtgccgaggggctggcaactggattctgtagagatgtgcatgggcaactaaggattctgtggcgacggccctcccagccagctgtccacagagaccagtcatttacatatcagtataagatccaggataagtccgtgtcattttttgctaagggtatgtcacctgcagttctttag

SEQ ID NO: 29775 - DNA, 729 bp, Artificial Sequence
  derived and/or modified sequence
atgttcgtggagctgaacaacctgctgaacaccacccccgaccgggccgaacaggggaaattaaccctcttgtgtgacgccaaaaccgatggtagctttctggtgcaccacttcctttccttctatctgaaaggagtctccctgacaatggcacgagaacggggccagctggtgtttctggaggggctgaagagcgcggtggacgtagtttttcaggcacagaaagagccccaccctttacaatttctgcgggaggccaatgccggcaatctcaagccattattcgaattcgtcagagaagctttgaaacccgtcgactccggtgaggcccgttggacctacccagttttgttagtggacgatctgagcgtgctgttgagccttggaatgggcgccgtggccgtgctcgatttcatacattattgtcgcgcaaccgtgtgttgggagctgaaaggcaatatggtggtgctagtccatgattccggggacgccgaggacgaggagaacgacatcctgttgaacggcttgtcccaccagagccatttaattctccgcgctgaaggcttagcaacaggcttttgcagagacgtacatggccaactgcgcattttgtggcggcggccatctcagcctgccgttcatagggaccagagcttcacttaccagtacaaaatacaggacaaaagtgtctcattcttcgcaaagggcatgtctccggctgtgctgtag

SEQ ID NO: 29776 - DNA, 801 bp, Artificial Sequence
  derived and/or modified sequence
atgtttgtcgaactgaataatttattgaatacaacacccgacagagcagaacagggtaagctgaccctcctgtgtgatgcgaagacagacggatcttttttggtgcatcacttcttgagtttttatttaaaggccaactgtaaggtatgcttcgtagctctgatccagtcattcagtcattatagcattgtgggccaaaagctgggcgtatcccttactatggccagggagcgagggcagcttgtgttccttgagggtttaaagagcgctgtggatgtggtgttccaggcacaaaaagagccccatccactgcagttcttaagagaggcaaatgctggcaatctgaaaccgctgttcgagttcgtccgagaggccctgaagccggtcgattccggtgaggcacgctggacctacccagtcctgcttgtggatgacctgagtgtgttattgtccttggggatgggcgcagtggccgtgctggactttatccattactgtagggccacagtctgctgggagctgaagggcaacatggtcgtgttggttcacgatagcggtgacgccgaggacgaggagaacgatatccttctgaacggactgagccaccagtcccacctgatcctgagggcagagggtctcgcaaccgggttctgtcgtgacgtccatggacagctgaggatcctgtggaggcgtccctcgcagccagccgttcatagagaccagtccttcacctatcagtacaagattcaggataagagtgttagcttttttgcaaaaggcatgagccccgctgtgctgtag

SEQ ID NO: 29777 - DNA, 729 bp, Artificial Sequence
  derived and/or modified sequence
atgtttgtggagctgaataatctcctgaacaccaccccggacagggccgagcagggcaaactcactttgttatgtgacgccaagaccgatgggagctttttggttcatcactttttatccttctacttaaaaggagtgtccctcaccatggcccgagagcgagggcaactggttttccttgaggggctgaagtccgcagtcgatgtggtgtttcaggcccaaaaggagccacatccccttcagtttctgcgggaagccaacgccggtaacctgaaacccctgtttgaatttgtcagagaagcattgaagcccgttgatagtggagaggctcggtggacataccctgttctgctcgtggatgacctgagcgttctcctgtctctgggaatgggggcagtagcggtgctcgactttattcactattgtagggctactgtgtgttgggagctcaaagggaatatggttgtgttggtgcacgattcaggtgacgccgaagacgaggagaatgacatattgctaaatggcttatctcaccagtctcacctgattctgagagcggaaggcctggccacaggcttttgtcgtgacgtgcatggccagcttagaatcctgtggagaaggccatctcagccagcagtgcatagggatcagtcatttacctatcagtacaaaattcaggataaaagcgtatccttctttgccaaagggatgagtcctgccgtcctgtag

SEQ ID NO: 29778 - protein, 264 aa, Artificial Sequence
  derived and/or modified sequence
MLRLLRLALAFYGRTADPAERQGPQQQGLPQGDTQLTTVQGVVTSFCGDYGMIDESIYFSSDVVTGNVPLKVGQKVNVVVEEDKPHYGLRAIKVDVVPRHLYGAGPSDSGTRVLIGCVTSINEDNIYISNSIYFSIAIVSEDFVPYKGDLLEVEYSTEPGISNIKATSVKPIRCIHTEEVCITSVHGRNGVIDYTIFFTLDSVKLPDGYVPQVDDIVNVVMVESIQFCFIWRAISITPVHKSSSGFQDDGGLGRPKRERRSQSI

SEQ ID NO: 29779 - DNA, 795 bp, Artificial Sequence
  derived and/or modified sequence
atgctgagactgctgagactggccctggccttctacggcagaaccgccgaccccgccgagagacagggcccccagcagcagggcctgccccagggcgacacccagctgaccaccgtgcagggcgtggtgaccagcttctgcggcgactacggcatgatcgacgagagcatctacttcagcagcgacgtggtgaccggcaacgtgcccctgaaggtgggccagaaggtgaacgtggtggtggaggaggacaagccccactacggcctgagagccatcaaggtggacgtggtgcccagacacctgtacggcgccggccccagcgacagcggcaccagagtgctgatcggctgcgtgaccagcatcaacgaggacaacatctacatcagcaacagcatctacttcagcatcgccatcgtgagcgaggacttcgtgccctacaagggcgacctgctggaggtggagtacagcaccgagcccggcatcagcaacatcaaggccaccagcgtgaagcccatcagatgcatccacaccgaggaggtgtgcatcaccagcgtgcacggcagaaacggcgtgatcgactacaccatcttcttcaccctggacagcgtgaagctgcccgacggctacgtgccccaggtggacgacatcgtgaacgtggtgatggtggagagcatccagttctgcttcatctggagagccatcagcatcacccccgtgcacaagagcagcagcggcttccaggacgacggcggcctgggcagacccaagagagagagaagaagccagagcatctag

SEQ ID NO: 29780 - DNA, 1445 bp, Artificial Sequence
  derived and/or modified sequence
agagggagaagtcagcggagaagctgggagctcctttggaggctgcggtgtccctgactctcctgaggggggctcactaacgggtgggtcccatgccacagtgtctgaggagaagcaggaagtgagtccctgaggagacgccgtgacctgagggcttcccttactgaggaggcctcgtgcttcatctgccacaagcggtgcccaggccggtggtgacaactgggacgatgctcaggcttctgagacttgctttggccttctacgggaggacggccgaccctgcagagcgacagggcccacagcagcagggcctcccacaaggtgacacccagttgacaactgtgcagggagttgtcacaagtttctgtggtgattatggcatgattgatgagtcgatctacttcagtagtgatgttgtgactggcaacgtgcctctaaaagttggacaaaaagttaatgtggttgtggaagaagataaaccacattatggattgagagcaatcaaggtggatgttgtgcctcgccatctttatggtgctggaccctcagactcaggaaccagagttttaattggatgtgttacttctataaatgaagataatatttatattagtaacagcatttatttttccatagccattgtttctgaagattttgtgccttataagggtgacttgttagaagttgaatattccactgagccaggcatctcaaacatcaaggcaacttctgtgaagcccatccgttgtattcatacggaagaggtctgcattactagcgtacatggaagaaatggggtgatagattatactatttttttcaccttggattctgtgaaacttcctgatggatacgtacctcaagtagatgatatcgtcaatgtggtcatggtggagagcattcagttctgctttatttggagagcgatttctatcaccccagtgcataaatccagcagcggattccaggatgacggaggcctgggacggcccaaaagggaacgtcggagccaaagcatttaactgaaaaggcatcagggacagcatgttaaaggcatgatttaaagttacaatttgacttcagttttgagccccgttatgctgcctgtacaacctgtattgttccatagcctctttcatcttctgtcacccacataacttgcggtgtttgttgttttacttgttccttcttccccatgctagaatgtaaactccacaatggcaggatgtcttttaatctggtttttttttttcttttttctttctttttttttttctgttgtcattaaagcatcaccaagcacttagaagagtgcctggcagactcaatgagcagataaaatgttattaagttcaatgactgaatgactgggccagcaatgatacttacctgtggttcattcatcactggttccttaggaataaaattgttgagcaatgcactaa

SEQ ID NO: 29781 - DNA, 795 bp, Artificial Sequence
  derived and/or modified sequence
atgctccggttgctaagattagccttggctttttacggacggacagccgacccggccgagcgccaaggaccccagcagcagggattaccacagggtgatacccagctgactaccgtgcagggcgtagtgacaagtttttgtggggactatggtatgatcgatgaaagcatttacttcagttccgatgtcgtgactggtaacgtacccttaaaggtgggccagaaggtgaacgtcgtcgtggaagaggataagccccattacggactaagagctattaaggtggatgttgtgccccggcatctgtatggagcgggtccttcagactccggcacaagggtgctcatcgggtgtgtgaccagcattaacgaagataacatctacatttctaacagtatttactttagcatcgctattgtgtctgaggactttgtgccctacaagggcgatctgttggaggttgaatactctacagagcccggaatttccaacatcaaagccacctccgtcaaacccattcgatgtatccataccgaggaggtttgcatcacatccgtgcacggacggaatggtgttatagattacactatcttcttcacgctggacagcgtgaagcttcctgatggttatgtccctcaagttgatgatattgtgaatgtggtaatggtcgagtcaatacaattctgcttcatttggcgagccatctccattacgcctgtgcacaagtcctctagcggattccaggatgatggaggtcttggcaggcccaagcgggagcgcaggtcgcagtccatctag

SEQ ID NO: 29782 - DNA, 795 bp, Artificial Sequence
  derived and/or modified sequence
atgctgcggctgctgcggctggccctggccttctacggccgcacagctgaccctgctgagcggcagggcccccagcagcagggcctgccccagggcgacacccagctgaccaccgtgcagggcgtggtgaccagcttctgtggggactatggcatgattgatgagagcatctacttcagcagtgatgtggtgactggaaatgtgcccctgaaggtgggccagaaggtgaatgtggtggtggaggaggacaagccccactacggcctgcgggccatcaaggtggatgtggtgcccaggcacctgtatggagctggccccagcgacagcggcaccagggtgctgattggctgtgtgaccagcatcaatgaagacaacatctacatcagcaacagcatctacttcagcatcgccatcgtgtctgaagattttgtgccctacaagggggacctgctggaggtggagtacagcacagagcccggcatcagcaacatcaaggccacctctgtgaagcccatccgctgcatccacacagaggaggtgtgcatcacctctgtgcacggcagaaatggagtcatcgactacaccatcttcttcaccctggacagcgtgaagctgcctgatggctacgtgccccaggtggatgacatcgtgaatgtggtgatggtggagagcatccagttctgcttcatctggagggccatcagcatcacccctgtgcacaagagcagcagcggcttccaggatgatggcggcctgggccggcccaagcgggagaggaggagccagagcatctag

SEQ ID NO: 29783 - DNA, 795 bp, Artificial Sequence
  derived and/or modified sequence
atgctgcggctgctgcggctggccctggccttctacggccggaccgccgaccctgccgagcggcaaggaccccaacaacagggcctgcctcagggggacacacagcttaccaccgtgcagggagtagtgacatcattttgcggggactacgggatgatcgacgagtccatctatttttcctctgacgtcgtgacaggcaatgttccgctcaaagtgggccagaaagtgaacgtggtggtggaggaggataagccacactacgggctgagagcaatcaaggtcgacgtcgtgccgcgccatctgtacggggctggtccttcagactccgggacacgcgtactcatcggatgcgtcacaagtataaatgaagacaacatctacataagcaatagcatttatttttcaattgcaatcgtctctgaagacttcgtaccctataaaggcgacctgcttgaggtcgaatactccactgagcccggtatttcaaacatcaaggccacttcagtgaaacccatacgctgcattcatactgaggaagtgtgcatcaccagtgtccatggtcgtaatggcgtgatcgactacactatttttttcactcttgactctgttaaactccctgatggatacgtgccccaggtggacgatatcgtcaacgtggtaatggttgagtccattcagttttgcttcatttggagggccatatcaattacgccagtgcataaatctagttcagggttccaggacgacgggggactgggacgccccaagagggaaagacgctcacagtctatttag

SEQ ID NO: 29784 - DNA, 795 bp, Artificial Sequence
  derived and/or modified sequence
atgctacgattactgagacttgctcttgcattctacggccgaaccgcggatcccgctgagcgacagggccctcaacagcaggggttgcctcagggcgacacccagctcaccaccgtacagggcgtggttactagtttttgcggggactacggcatgatcgacgagtctatatacttctcaagtgacgtggtgaccggtaacgtgcctctgaaggtgggacaaaaggtgaatgtagtcgtagaggaggacaaaccccactatggccttcgagctatcaaggtcgatgtggttccgagacacttgtatggcgcagggccaagtgatagcggaactagagttctaattggctgtgtgaccagtatcaatgaagacaacatctatatatccaatagcatctatttttcgattgccatcgtcagcgaagatttcgtcccgtacaagggggacctgttggaggtggaatattccaccgagcccggtatttccaatatcaaggcaacaagtgtcaagccaataaggtgtatacatactgaggaggtctgtattaccagtgtgcacgggcgaaatggcgtgatcgactacactatcttttttacactcgactctgtaaagctgcccgacggctatgtgccccaggttgacgacatcgtcaacgtggtcatggtggaaagcatccagttctgcttcatctggcgtgcaatcagcattacacctgtgcacaagtccagcagtggatttcaggatgatgggggactggggaggccaaaaagggaaaggcggtcccagagcatatag

SEQ ID NO: 29785 - protein, 342 aa, Artificial Sequence
  derived and/or modified sequence
MAQVLIVGAGMTGSLCAALLRRQTSGPLYLAVWDKAEDSGGRMTTACSPHNPQCTADLGAQYITCTPHYAKKHQRFYDELLAYGVLRPLSSPIEGMVMKEGDCNFVAPQGISSIIKHYLKESGAEVYFRHRVTQINLRDDKWEVSKQTGSPEQFDLIVLTMPVPEILQLQGDITTLISECQRQQLEAVSYSSRYALGLFYEAGTKIDVPWAGQYITSNPCIRFVSIDNKKRNIESSEIGPSLVIHTTVPFGVTYLEHSIEDVQELVFQQLENILPGLPQPIATKCQKWRHSQVTNAAANCPGQMTLHHKPFLACGGDGFTQSNFDGCITSALCVLEALKNYI

SEQ ID NO: 29786 - DNA, 1029 bp, Artificial Sequence
  derived and/or modified sequence
atggcacaggtgttgatcgtgggtgccggaatgacaggatccctctgcgcagccctactccggcgccagacttccggacctctctatctcgccgtatgggacaaggcagaggactcagggggcagaatgaccacagcatgtagcccacataacccgcagtgtaccgctgacctcggggctcagtatatcacttgtacgccacattacgccaaaaagcatcagaggttctatgatgagctgttggcatacggcgtgttgagaccgctctcgagtcctatcgaaggcatggtgatgaaggaaggagactgcaacttcgtggccccacaggggatcagcagcatcataaaacattatctgaaggagtccggagccgaggtttactttaggcatagagtaacgcagattaacctgagggacgataaatgggaagtgagtaaacagacaggaagtcctgagcagttcgacctgatagtgctgacgatgcctgtcccagagatcctgcagctccagggcgacatcacaactctcatctcggagtgccagagacagcagctcgaagctgtgagctatagtagtcgctacgccctgggattattctacgaagctggaactaaaatcgacgtgccgtgggccggccaatatataacctcaaacccatgtattcgtttcgtgtcgatcgacaacaaaaagcgcaacatcgaatcatcagaaattggaccgtctttggtgatccatacaacggtaccttttggggtcacctatttggagcatagcatagaggacgtgcaggagctggtgtttcagcaactggagaatatcctgcccggattgccccagccaatcgccactaaatgccagaaatggcgccattctcaggttactaacgctgcggccaactgccctggccaaatgacactgcatcacaaacctttcctggcctgtggaggagatggctttacgcagtccaatttcgatggatgtataacttctgccctgtgcgtgttggaggcattgaagaattacatttag

SEQ ID NO: 29787 - DNA, 1029 bp, Artificial Sequence
  derived and/or modified sequence
atggcccaggtgctgattgtgggcgccggcatgacaggcagcctgtgtgccgccctgctgcggcggcagaccagcggccccctgtacctggccgtgtgggacaaggcagaagattctgggggccgcatgaccacagcctgcagcccccacaacccccagtgcacagctgacctgggcgcccagtacatcacctgcaccccccactacgccaagaagcaccagcgcttctatgatgagctgctggcctatggagtgctgcggcccctgagcagccccatcgagggcatggtgatgaaggagggggactgcaactttgtggccccccagggcatcagcagcatcatcaagcactacctgaaggagagcggggctgaggtgtacttccgccaccgggtgacccagatcaacctgagagatgacaagtgggaggtgtccaagcagacaggcagccctgagcagtttgacctgattgtgctgaccatgcctgtgcctgagatcctgcagctgcagggcgacatcaccaccctcatcagcgagtgccagaggcagcagctggaggccgtgtcctacagcagccgctatgccctgggcctcttctatgaggccggcaccaagattgatgtgccctgggccggccagtacatcaccagcaacccctgcatccgctttgtgtccattgacaacaagaagagaaatattgagagcagcgagatcggccccagcctggtgatccacaccaccgtgcccttcggcgtgacctacctggagcacagcattgaagatgtgcaggagctggtgttccagcagctggagaacatcctgcccggcctgccccagcccatcgccaccaagtgccagaagtggaggcacagccaggtgaccaatgctgctgccaactgccccggccagatgaccctgcaccacaagcccttcctggcctgtggaggagatggcttcacccagagcaactttgatggctgcatcaccagcgccctgtgtgtgctggaggccctgaagaactacatctag

SEQ ID NO: 29788 - DNA, 1029 bp, Artificial Sequence
  derived and/or modified sequence
atggcccaggtgctgatcgtgggcgccggcatgaccggcagcctgtgcgctgccctgttgagacgccaaacttccggccccctgtaccttgctgtttgggataaggccgaggattcaggaggtaggatgaccacggcctgctccccccacaacccacagtgcacagcagacctcggcgcccagtatatcacatgcactcctcactacgcgaaaaagcaccaacgattttacgacgagttgctggcttacggcgtcctgcgacccctgtcttcccctatcgaaggaatggtcatgaaggagggcgattgtaatttcgtggccccacagggtatatccagcatcatcaagcattacctcaaggagtccggtgcggaagtctattttagacatcgggtgacgcaaattaatctccgggatgataaatgggaagtcagcaaacagacagggagtcccgaacaattcgacctgatcgttctgactatgccagtgcctgagatccttcagctgcaaggggacattaccacgctgatcagcgaatgtcaacgccagcagttagaggcagtaagctactctagccggtacgctcttggcctgttctacgaagcaggaactaaaatcgatgtgccctgggctggccagtacatcacttccaatccgtgtatccgatttgtgtccattgacaacaaaaagcggaacatcgagtcctccgagattggccctagcctagtgattcacacaacagtaccctttggcgtaacctacctagagcacagcatcgaagatgttcaggaattggtttttcaacagttggagaacatcctgcctggtctgccccaacccattgctacaaagtgccagaaatggcgccactcacaggtgaccaatgccgccgccaactgccccggacagatgacgctacatcacaagccattccttgcatgcggcggcgacggattcacccagagcaattttgatggatgcataacatctgccctttgtgtgttagaagctctgaagaattatatttag

SEQ ID NO: 29789 - DNA, 1029 bp, Artificial Sequence
  derived and/or modified sequence
atggcccaggttctgatcgtcggggcagggatgaccggttctctctgcgctgccttgcttaggaggcagactagtggacccctgtatcttgctgtttgggacaaagctgaggatagtggaggtagaatgaccactgcctgctctcctcacaatccccagtgtacagccgatctgggcgctcaatatattacttgtacaccacactacgctaagaaacatcaaaggttctacgacgagctgctggcttatggggtgctacgcccactgtcctcacccattgaaggaatggtgatgaaggaaggagactgtaattttgtggctccacagggaatatcatctattatcaagcattatttgaaagaaagcggcgctgaggtatactttagacatcgcgttacacagattaatctcagagacgataaatgggaggtctccaaacagacaggttccccggaacagttcgacctcatagtattaacaatgccagtccccgagattctgcagctgcagggagacatcactacactaatcagcgagtgccagagacagcagttggaggctgtcagctacagtagtagatatgccctcggactgttctatgaagcgggtacaaagatagacgtgccctgggccggtcaatacatcacaagcaacccctgcatccgttttgtgagcatcgacaacaaaaagagaaatattgaatctagtgagattgggcctagtctggtcatacatacaactgtgccattcggagtcacatatctcgagcactctatagaggacgtgcaggaactggtcttccagcagctggagaacatactccctggactcccacagccaatcgcaaccaaatgtcagaaatggcggcactcccaggttacaaatgcagccgctaattgtccgggacaaatgactctccaccacaaaccatttctggcctgtggcggtgacgggtttacgcagtctaatttcgacggctgtataacctccgccctgtgcgtgctagaggccctgaagaactacatttag

SEQ ID NO: 29790 - DNA, 1447 bp, Artificial Sequence
  derived and/or modified sequence
gcggatcgctgctccctctcgccatggcgcaggtgctgatcgtgggcgccgggatgacaggaagcttgtgcgctgcgctgctgaggaggcagacgtccggtcccttgtaccttgctgtgtgggacaaggctgaggactcagggggaagaatgactacagcctgcagtcctcataatcctcagtgcacagctgacttgggtgctcagtacatcacctgcactcctcattatgccaaaaaacaccaacgtttttatgatgaactgttagcctatggcgttttgaggcctctaagctcgcctattgaaggaatggtgatgaaagaaggagactgtaactttgtggcacctcaaggaatttcttcaattattaagcattacttgaaagaatcaggtgcagaagtctacttcagacatcgtgtgacacagatcaacctaagagatgacaaatgggaagtatccaaacaaacaggctcccctgagcagtttgatcttattgttctcacaatgccagttcctgagattctgcagcttcaaggtgacatcaccaccttaattagtgaatgccaaaggcagcaactggaggctgtgagctactcctctcgatatgctctgggcctcttttatgaagctggtacgaagattgatgtcccttgggctgggcagtacatcaccagtaatccctgcatacgcttcgtctccattgataataagaagcgcaatatagagtcatcagaaattgggccttccctcgtgattcacaccactgtcccatttggagttacatacttggaacacagcattgaggatgtgcaagagttagtcttccagcagctggaaaacattttgccgggtttgcctcagccaattgctaccaaatgccaaaaatggagacattcacaggttacaaatgctgctgccaactgtcctggccaaatgactctgcatcacaaacctttccttgcatgtggaggggatggatttactcagtccaactttgatggctgcatcacttctgccctatgtgttctggaagctttaaagaattatatttagtgcctatatccttattctctacatgtgtattgggtttttattttcacaattttctgttattgattattttgttttctattttgctaagaaaaattactggaaaattgttcttcacttattatcatttttcatgtggagtataaaatcaattttgtaattttgatagttacaacccatgctagaatggaaattcctcacaccttgcaccttccctacttttctgaattgctatgactactccttgttggaggaaaagtggtacttaaaaaataacaaacgactctctcaaaaaaattacattaaatcacaataacagtttgtgtgccaaaaacttgattatccttatgaaaatttcaattctgaataaagaataatcacattatcaaagccccatc

SEQ ID NO: 29791 - DNA, 1029 bp, Artificial Sequence
  derived and/or modified sequence
atggcccaggtgctgatcgtgggcgccggcatgaccggcagcctgtgcgccgccctgctgagaagacagaccagcggccccctgtacctggccgtgtgggacaaggccgaggacagcggcggcagaatgaccaccgcctgcagcccccacaacccccagtgcaccgccgacctgggcgcccagtacatcacctgcaccccccactacgccaagaagcaccagagattctacgacgagctgctggcctacggcgtgctgagacccctgagcagccccatcgagggcatggtgatgaaggagggcgactgcaacttcgtggccccccagggcatcagcagcatcatcaagcactacctgaaggagagcggcgccgaggtgtacttcagacacagagtgacccagatcaacctgagagacgacaagtgggaggtgagcaagcagaccggcagccccgagcagttcgacctgatcgtgctgaccatgcccgtgcccgagatcctgcagctgcagggcgacatcaccaccctgatcagcgagtgccagagacagcagctggaggccgtgagctacagcagcagatacgccctgggcctgttctacgaggccggcaccaagatcgacgtgccctgggccggccagtacatcaccagcaacccctgcatcagattcgtgagcatcgacaacaagaagagaaacatcgagagcagcgagatcggccccagcctggtgatccacaccaccgtgcccttcggcgtgacctacctggagcacagcatcgaggacgtgcaggagctggtgttccagcagctggagaacatcctgcccggcctgccccagcccatcgccaccaagtgccagaagtggagacacagccaggtgaccaacgccgccgccaactgccccggccagatgaccctgcaccacaagcccttcctggcctgcggcggcgacggcttcacccagagcaacttcgacggctgcatcaccagcgccctgtgcgtgctggaggccctgaagaactacatctag

SEQ ID NO: 29792 - protein, 586 aa, Artificial Sequence
  derived and/or modified sequence
MAASGVEKSSKKKTEKKLAAREEAKLLAGFMGVMNNMRKQKTLCDVILMVQERKIPAHRVVLAAASHFFNLMFTTNMLESKSFEVELKDAEPDIIEQLVEFAYTARISVNSNNVQSLLDAANQYQIEPVKKMCVDFLKEQVDASNCLGISVLAECLDCPELKATADDFIHQHFTEVYKTDEFLQLDVKRVTHLLNQDTLTVRAEDQVYDAAVRWLKYDEPNRQPFMVDILAKVRFPLISKNFLSKTVQAEPLIQDNPECLKMVISGMRYHLLSPEDREELVDGTRPRRKKHDYRIALFGGSQPQSCRYFNPKDYSWTDIRCPFEKRRDAACVFWDNVVYILGGSQLFPIKRMDCYNVVKDSWYSKLGPPTPRDSLAACAAEGKIYTSGGSEVGNSALYLFECYDTRTESWHTKPSMLTQRCSHGMVEANGLIYVCGGSLGNNVSGRVLNSCEVYDPATETWTELCPMIEARKNHGLVFVKDKIFAVGGQNGLGGLDNVEYYDIKLNEWKMVSPMPWKGVTVKCAAVGSIVYVLAGFQGVGRLGHILEYNTETDKWVANSKVRAFPVTSCLICVVDTCGANEETLET

SEQ ID NO: 29793 - protein, 538 aa, Artificial Sequence
  derived and/or modified sequence
MVQERKIPAHRVVLAAASHFFNLMFTTNMLESKSFEVELKDAEPDIIEQLVEFAYTARISVNSNNVQSLLDAANQYQIEPVKKMCVDFLKEQVDASNCLGISVLAECLDCPELKATADDFIHQHFTEVYKTDEFLQLDVKRVTHLLNQDTLTVRAEDQVYDAAVRWLKYDEPNRQPFMVDILAKVRFPLISKNFLSKTVQAEPLIQDNPECLKMVISGMRYHLLSPEDREELVDGTRPRRKKHDYRIALFGGSQPQSCRYFNPKDYSWTDIRCPFEKRRDAACVFWDNVVYILGGSQLFPIKRMDCYNVVKDSWYSKLGPPTPRDSLAACAAEGKIYTSGGSEVGNSALYLFECYDTRTESWHTKPSMLTQRCSHGMVEANGLIYVCGGSLGNNVSGRVLNSCEVYDPATETWTELCPMIEARKNHGLVFVKDKIFAVGGQNGLGGLDNVEYYDIKLNEWKMVSPMPWKGVTVKCAAVGSIVYVLAGFQGVGRLGHILEYNTETDKWVANSKVRAFPVTSCLICVVDTCGANEETLET

SEQ ID NO: 29794 - protein, 386 aa, Artificial Sequence
  derived and/or modified sequence
MAASGVEKSSKKKTEKKLAAREEAKLLAGFMGVMNNMRKQKTLCDVILMVQERKIPAHRVVLAAASHFFNLMFTTNMLESKSFEVELKDAEPDIIEQLLHYKFFKMKNRKDGRVSVSYAILIQGLKIYEIYSTNFPEHFTEVYKTDEFLQLDVKRVTHLLNQDTLTVRAEDQVYDAAVRWLKYDEPNRQPFMVDILAKVRFPLISKNFLSKTVQAEPLIQDNPECLKMVISGMRYHLLSPEDREELVDGTRPRRKKHDYRIALFGGSQPQSCRYFNPKDYSWTDIRCPFEKRRDAACVFWDNVVYILGGSQLFPIKRMDCYNVVKDSWYSKLGPPTPRDSLAACAAEGKIYTSGGSEVGNSALYLFCLIPVKFMILPQKHGLSCVQ

SEQ ID NO: 29795 - protein, 427 aa, Artificial Sequence
  derived and/or modified sequence
MAASGVEKSSKKKTEKKLAAREEAKLLAGFMGVMNNMRKQKTLCDVILMVQERKIPAHRVVLAAASHFFNLMFTTNMLESKNFLSKTVQAEPLIQDNPECLKMVISGMRYHLLSPEDREELVDGTRPRRKKHDYRIALFGGSQPQSCRYFNPKDYSWTDIRCPFEKRRDAACVFWDNVVYILGGSQLFPIKRMDCYNVVKDSWYSKLGPPTPRDSLAACAAEGKIYTSGGSEVGNSALYLFECYDTRTESWHTKPSMLTQRCSHGMVEANGLIYVCGGSLGNNVSGRVLNSCEVYDPATETWTELCPMIEARKNHGLVFVKDKIFAVGGQNGLGGLDNVEYYDIKLNEWKMVSPMPWKGVTVKCAAVGSIVYVLAGFQGVGRLGHILEYNTETDKWVANSKVRAFPVTSCLICVVDTCGANEETLET

SEQ ID NO: 29796 - protein, 510 aa, Artificial Sequence
  derived and/or modified sequence
MLESKSFEVELKDAEPDIIEQLVEFAYTARISVNSNNVQSLLDAANQYQIEPVKKMCVDFLKEQVDASNCLGISVLAECLDCPELKATADDFIHQHFTEVYKTDEFLQLDVKRVTHLLNQDTLTVRAEDQVYDAAVRWLKYDEPNRQPFMVDILAKVRFPLISKNFLSKTVQAEPLIQDNPECLKMVISGMRYHLLSPEDREELVDGTRPRRKKHDYRIALFGGSQPQSCRYFNPKDYSWTDIRCPFEKRRDAACVFWDNVVYILGGSQLFPIKRMDCYNVVKDSWYSKLGPPTPRDSLAACAAEGKIYTSGGSEVGNSALYLFECYDTRTESWHTKPSMLTQRCSHGMVEANGLIYVCGGSLGNNVSGRVLNSCEVYDPATETWTELCPMIEARKNHGLVFVKDKIFAVGGQNGLGGLDNVEYYDIKLNEWKMVSPMPWKGVTVKCAAVGSIVYVLAGFQGVGRLGHILEYNTETDKWVANSKVRAFPVTSCLICVVDTCGANEETLET

SEQ ID NO: 29797 - DNA, 1761 bp, Artificial Sequence
  derived and/or modified sequence
atggctgccagtggagtcgaaaagagtagtaagaaaaagacggagaaaaaattagccgctcgagaggaggccaagctgctggccggctttatgggcgtgatgaacaatatgcgtaagcagaagacactctgcgatgtaatcctgatggtgcaggaacggaagatcccagcgcaccgcgtggttctggccgctgccagtcacttctttaatctgatgtttaccaccaatatgctggaatcgaaatcattcgaggtggagctcaaggatgcggaaccggatattatcgagcaactcgtcgagttcgcttacactgctcggataagcgtgaactccaataatgtacagagtctgctcgacgctgcgaatcaataccagattgagcctgtgaagaagatgtgcgttgactttctgaaagaacaggtcgacgcatccaactgcctgggcatttcggtcctcgccgagtgcctcgactgtcctgagctcaaagcaactgccgatgactttattcaccagcatttcacggaagtttacaagacagacgaatttttgcaacttgacgtgaaaagagtgactcatcttctgaaccaagatacactgaccgttagggcagaagaccaggtatacgatgcagccgttcgatggttgaagtacgacgagcccaatcgccagccattcatggttgatatcctggctaaggtccgatttccgctgatctcaaaaaatttcctgagtaagaccgtgcaggccgagcctttgattcaagacaatccagaatgtttaaaaatggttatcagtggtatgcgataccacctgctgtctcctgaggaccgagaagagctcgtggatggtactcgtccaagacggaaaaagcacgactacaggattgccttgttcggaggaagccagccacagtcttgccgttatttcaatccaaaggattattcttggaccgacattaggtgcccctttgaaaaacgccgggacgctgcctgtgtattttgggataatgtggtctatatactgggcggaagccaactgttccccattaaacgaatggactgttacaacgttgtcaaagacagttggtattcaaagcttggaccacctactcccagggattccctcgccgcctgtgccgcagagggcaaaatctacacatccgggggaagcgaggttggcaactccgctctctacctctttgaatgctacgatactaggacagaatcttggcacacgaaaccttctatgctaacccagaggtgttctcacgggatggtggaggccaacggcttgatttacgtgtgtggggggtcactggggaataacgtgtctggtagggtcttgaactcttgcgaggtttacgaccccgcaacggaaacttggacagagttgtgtccgatgatagaagcccgcaagaaccatggcctcgtgttcgtgaaggacaaaatctttgctgttgggggccagaatggcttgggagggctcgacaatgttgaatattacgacattaaattgaacgaatggaagatggtctcccccatgccctggaaaggtgttacagtgaaatgcgcggccgtcggaagtatagtttatgtgttggctgggtttcagggggtcgggaggctgggccacattttagagtacaacacagagacagataaatgggtcgccaattcaaaggtacgcgcgtttcccgttaccagttgcctgatatgtgttgtggacacttgcggggctaacgaggagacgcttgaaacatag

SEQ ID NO: 29798 - DNA, 1617 bp, Artificial Sequence
  derived and/or modified sequence
atggtacaggagcggaaaatccccgcacatcgagtagtgctggctgccgcatcccactttttcaacttaatgtttaccaccaacatgctggagtctaaaagcttcgaggtggaactgaaagatgccgagcccgatatcatcgaacagttagttgagttcgcatacacggcaaggatctcagtgaatagcaacaatgtgcagtctttattggatgctgcgaaccagtaccaaattgaacctgtaaaaaagatgtgcgtggattttctgaaggagcaggtggatgctagtaactgcttgggcatttctgtgctggccgagtgtctggattgcccagaactgaaagctaccgctgatgattttatacatcagcacttcactgaagtgtacaaaactgacgaattccttcagctcgatgtaaagcgggtgacccacctcctcaaccaagacaccctaacagtacgcgccgaggaccaagtgtatgacgcagcagtgcggtggctgaagtacgatgagcctaacaggcaacctttcatggtagatatcctcgcgaaagttagattcccccttatttcgaaaaacttcctgtcaaaaacagtgcaggctgagcccctgatccaggacaaccccgaatgcctgaaaatggtcatcagcggcatgcggtatcatttactaagtcccgaggaccgtgaggagcttgtcgatggcacccggccgagaagaaagaagcacgactacagaatagcgcttttcggcgggtcccagccacagtcctgccgttatttcaatcctaaggactattcctggactgacataagatgccccttcgaaaaaagacgcgatgcggcttgtgtcttttgggacaacgtggtttatatactcggcggctcccagctgttccccattaagagaatggactgctataatgtcgtgaaagacagctggtacagcaagctgggcccgccaactcccagagattctctggctgcttgcgccgcagaaggaaagatctacacaagcggggggagcgaggtggggaacagcgcactttacctgttcgagtgttacgatacaagaactgagtcatggcacacaaagccatctatgttgactcagagatgcagtcacggtatggtcgaagccaacggcctgatctatgtatgcggtggttccctcgggaataacgtctcaggcagagtactgaattcctgcgaggtctacgatccagccacagaaacatggaccgaactgtgtcccatgattgaagctagaaaaaaccacggtttagtattcgtcaaggataagatctttgctgtcggggggcagaacggtttgggaggcttagacaatgtggaatattatgacattaagctcaacgagtggaagatggtcagccccatgccctggaagggggtgacagttaagtgcgctgcagtgggctcaattgtctacgtactagcaggcttccagggcgtcgggcggctcgggcatatcctggaatataacaccgagacagacaagtgggtcgccaattcaaaggttagagcttttcccgtcacgagctgtctgatctgtgtggtcgacacgtgtggagcaaacgaggagacgttagagacatag

SEQ ID NO: 29799 - DNA, 1161 bp, Artificial Sequence
  derived and/or modified sequence
atggctgcctccggagtagagaagagcagcaagaaaaagactgagaagaagctggcagcgagagaggaggccaagcttctggccggatttatgggggtgatgaacaacatgaggaagcagaaaacgctgtgtgacgtcattctcatggtgcaggagcgaaagattccggctcatcgagtcgtgttggcagctgccagccactttttcaacttgatgttcacaacaaatatgctcgaatcgaaatctttcgaggtggagctcaaagatgccgagcccgacattattgaacagctattacactacaaatttttcaagatgaagaaccgcaaagacgggcgtgtgtctgttagctatgctatcctcatccagggtctcaaaatctacgagatctacagtacaaattttcccgaacacttcacggaggtgtacaaaacagacgaattcttgcaactggacgtaaagcgagtgacacatctgcttaaccaggacactctcaccgttcgcgcagaggatcaggtctatgatgccgccgtccgatggctgaagtacgatgagcctaacaggcaaccatttatggtagacatacttgcgaaagtccgcttccctctcatctctaagaacttcctgtcaaagactgtgcaggccgagccactcattcaagacaatccggagtgcctgaagatggtgatcagcggcatgcggtaccacctcctcagccccgaggatcgggaggagctcgtggacgggacgcgcccaaggcgcaaaaaacatgattacaggattgccctgttcggtggctctcagccccagtcttgtcgatacttcaacccaaaggattattcatggactgacatccgttgcccattcgaaaagcgacgcgacgccgcctgcgtgttttgggacaatgtagtgtatatcctcggaggatcccagctgttccccatcaagagaatggactgttataatgttgtgaaagacagttggtattctaaactgggaccacctactccacgggatagcctcgccgcctgcgccgcagaggggaaaatctatacctctggtggaagcgaagtgggtaacagcgccttgtatttattctgcctgatcccggtgaagtttatgatcctcccccaaaaacacggactgtcttgcgtgcaatag

SEQ ID NO: 29800 - DNA, 1533 bp, Artificial Sequence
  derived and/or modified sequence
atgttggagtctaaaagcttcgaagtcgaacttaaggatgcagagccggatatcattgaacagctcgttgaattcgcttataccgccaggatcagtgttaacagcaacaatgtgcagtcactgctggacgccgccaatcagtatcagattgaacctgttaaaaagatgtgtgtggacttcctgaaagagcaggttgatgctagcaactgccttggcatctctgttctggcggaatgcctcgattgtccagaactcaaggctactgctgatgatttcatccaccagcacttcactgaggtgtacaaaacagacgagttcttgcagttggatgtcaaaagggttacacatctgctgaaccaagataccctcactgtacgtgctgaggaccaagtttatgacgcggccgtaagatggctcaaatacgacgaacccaaccgccaaccatttatggttgatattcttgcaaaggttaggtttcctctaatctccaaaaattttctgagcaagaccgtacaggcagagccactgatacaggataatcctgagtgtctcaagatggtcatcagcggtatgagataccatctgctttctcccgaagaccgggaggaacttgtcgatggcacacgtccgcgtaggaaaaaacatgattatcggatcgccctgttcggtggaagtcagccgcagagctgtcgttacttcaacccaaaagattactcttggacagatatacgatgcccctttgagaaacgaagagacgccgcatgcgtgttctgggataacgtggtgtatatccttggaggtagccagctgtttccaatcaagcggatggattgttacaatgtcgtgaaagacagctggtacagcaaactaggacctcccacgccccgcgacagcttggccgcgtgtgccgctgaggggaagatttacacatccggggggagtgaggtgggcaactcggctctgtatctgtttgagtgttatgatacccggactgagtcctggcatactaagccaagtatgctgactcaaaggtgcagtcacggcatggtggaagctaatgggctcatctacgtttgcgggggttctctggggaacaatgtgagcggacgggtcttaaacagttgcgaagtgtacgatccagcaaccgagacctggacggagctttgcccgatgatcgaagcgcggaaaaatcatggtttagtctttgtgaaggacaaaatatttgccgtgggaggccaaaacgggttgggaggactggacaatgttgagtattacgatatcaagctgaacgaatggaagatggtttctcctatgccatggaaaggcgtgactgtcaaatgcgccgccgtgggtagtatcgtttatgtgctagccggctttcaaggcgttggcagattaggacatatcttagaatacaataccgaaaccgataaatgggttgcaaatagcaaagtgcgggcctttcctgtcactagctgtttgatctgcgtagtagacacgtgcggggcaaacgaagagacgctggaaacttag

SEQ ID NO: 29801 - DNA, 3127 bp, Artificial Sequence
  derived and/or modified sequence
cgggttctgcccggggacgcagcccagttggtagcgtcgctccctgagcgtttctaagggggccgcccggccttgtctttcggcagtggccgagccaccgccgcctgccgcgcgttccagagctgggcgctgcagctgcactgccgatcgccgtgtttggtcgatagaatccccagtgtgcccagagagtgcgacccctcgcccggcccggcgagccccgggcgtgaaccgagctgagggaggatggcagcctctggggtggagaagagcagcaagaagaagaccgagaagaaacttgctgctcgggaagaagctaaattgttggcgggtttcatgggcgtcatgaataacatgcggaaacagaaaacgttgtgtgacgtgatcctcatggtccaggaaagaaagatacctgctcatcgtgttgttcttgctgcagccagtcatttttttaacttaatgttcacaactaacatgcttgaatcaaagtcctttgaagtagaactcaaagatgctgaacctgatattattgaacaactggtggaatttgcttatactgctagaatttccgtgaatagcaacaatgttcagtctttgctggatgcagcaaaccaatatcagattgaacctgtgaagaaaatgtgtgttgattttttgaaagaacaagttgatgcttcaaattgtcttggtataagtgtgctagcggagtgtctagattgtcctgaattgaaagcaactgcagatgactttattcatcagcactttactgaagtttacaaaactgatgaatttcttcaacttgatgtcaagcgagtaacacatcttctcaaccaggacactctgactgtgagagcagaggatcaggtttatgatgctgcagtcaggtggttgaaatacgatgaacctaatcgccagccatttatggttgatatccttgctaaagtcaggtttcctcttatatcaaagaatttcttaagtaaaacggtacaagctgaaccacttattcaagacaatcctgaatgccttaagatggtgataagtggaatgaggtaccatctactgtctccagaggaccgagaagaacttgtagatggcacaagacctagaagaaagaaacatgactaccgcatagccctatttggaggctctcaaccacagtcttgtagatattttaacccaaaggattatagctggacagacatccgctgcccctttgaaaaacgaagagatgcagcatgcgtgttttgggacaatgtagtatacattttgggaggctctcagcttttcccaataaagcgaatggactgctataatgtagtgaaggatagctggtattcgaaactgggtcctccgacacctcgagacagccttgctgcatgtgctgcagaaggcaaaatttatacatctggaggttcagaagtaggaaactcagctctgtatttatttgagtgctatgatacgagaactgaaagctggcacacaaagcccagcatgctgacccagcgctgcagccatgggatggtggaagccaatggcctaatctatgtttgtggtggaagtttaggaaacaatgtttctgggagagtgcttaattcctgtgaagtttatgatcctgccacagaaacatggactgagctgtgtccaatgattgaagccaggaagaatcatgggctggtatttgtaaaagacaagatatttgctgtgggtggtcagaatggtttaggtggtctggacaatgtggaatattacgatattaagttgaacgaatggaagatggtctcaccaatgccatggaagggtgtaacagtgaaatgtgcagcagttggctctatagtttatgtcttggctggttttcagggtgttggtcgattaggacacattctcgaatataataccgaaacagacaaatgggttgccaactccaaagttcgtgcttttccagtcacaagttgtttaatttgtgttgtcgatacttgtggagcaaatgaagagacccttgaaacatgaaaaatgagtggacttcagactcatcagagactctaaaatatagccaccagtgctttgttccaggagtttggtgacaaagttttggtttggtgttttggtaaagaaagtttcaagtgaaatgaggttcctataaaatagatgtttcttttatatggatttccttaattcaaagatcatattttagctggccacaaaaccaagaacatatctagcaagaaaacttgaaaaagtataagcatttgttaaaaatgtgaatttcttgaatgaatttcacatttgtaactatgattttggcagaatagaagattggctcatcagtgaagcgcagtatcttagctctagattctattttcatgcatcacagaagtgctatacggttaggtctgtttgtgctcagtcaagaactaagaaatagtatgaattgtaagtcaagatgggcaactcagatggagcagcttagtctcacagtttgcttgtctatttattttatttagtgccaaatgtattccattttaaaagtaagccagagtgagtcaaggcatatacacactttctcacaaaacttcctaaacagatttgggggtttaatatgtccaactcctcatgaaatatattcaatccacttaaatatattccatctttttaacataaaatgtaaagcttagcacccatcattaatttatgtctctgttttatccagtggttaaaaaaggattctgcctctttagtcctcactgttaaataaaacccaatcatagtaagtgattaactagcaaaaagtaaagctatttatagcaaatttctagatcattagaaaagcactggtagttgtacaatatcagtgttgactttgaacttctttaacgagatcatgaattcttttcccttagccaaaacatgaaatatttaacctagttgtctctaaaagttttgtaatcatgagttagatatatgtcatctcctattcattgcttttatgtgatcaataaatcttttacaaacccaactactcatttccttcctagtaatactttgcctttttcactgtgtatggaatgaaacatgtaaagctgtcacaatcaatgtttttatctgataatattaaatattttttaacttaaaa

SEQ ID NO: 29802 - DNA, 3231 bp, Artificial Sequence
  derived and/or modified sequence
cgcagttggtagaggggcgcgtaaaacaattctcgagcaaaagtgcttctcgtctgccgaggatgtagctcccaagtcagactcctgggggactcctcaggctggctttcgccgtcgggtatcggttgtgtaacagctctgccctagttatctctttgtggggcgaggatccttccattggcgagccgttttaaggtgccgtgagatcttgtgtgaagaaacccgttggcatagcccaaaccgaagcccccaaagggaggagagttgctggcctgacatcagctgctcttaaataaggatccccgccccctcctgtgttccccggtggagctagttgaagaggagtcctcctgttcgtgctaatttagagcagaagcagccatcgataaataccatgccatcttctaagggcactgtgcgcctctgttattaagaggagctctttgttctgtccttggtgtgtggtgcattcgtgaaattctgcagcacatcggcgaaagaaaacgttgtgtgacgtgatcctcatggtccaggaaagaaagatacctgctcatcgtgttgttcttgctgcagccagtcatttttttaacttaatgttcacaactaacatgcttgaatcaaagtcctttgaagtagaactcaaagatgctgaacctgatattattgaacaactggtggaatttgcttatactgctagaatttccgtgaatagcaacaatgttcagtctttgctggatgcagcaaaccaatatcagattgaacctgtgaagaaaatgtgtgttgattttttgaaagaacaagttgatgcttcaaattgtcttggtataagtgtgctagcggagtgtctagattgtcctgaattgaaagcaactgcagatgactttattcatcagcactttactgaagtttacaaaactgatgaatttcttcaacttgatgtcaagcgagtaacacatcttctcaaccaggacactctgactgtgagagcagaggatcaggtttatgatgctgcagtcaggtggttgaaatacgatgaacctaatcgccagccatttatggttgatatccttgctaaagtcaggtttcctcttatatcaaagaatttcttaagtaaaacggtacaagctgaaccacttattcaagacaatcctgaatgccttaagatggtgataagtggaatgaggtaccatctactgtctccagaggaccgagaagaacttgtagatggcacaagacctagaagaaagaaacatgactaccgcatagccctatttggaggctctcaaccacagtcttgtagatattttaacccaaaggattatagctggacagacatccgctgcccctttgaaaaacgaagagatgcagcatgcgtgttttgggacaatgtagtatacattttgggaggctctcagcttttcccaataaagcgaatggactgctataatgtagtgaaggatagctggtattcgaaactgggtcctccgacacctcgagacagccttgctgcatgtgctgcagaaggcaaaatttatacatctggaggttcagaagtaggaaactcagctctgtatttatttgagtgctatgatacgagaactgaaagctggcacacaaagcccagcatgctgacccagcgctgcagccatgggatggtggaagccaatggcctaatctatgtttgtggtggaagtttaggaaacaatgtttctgggagagtgcttaattcctgtgaagtttatgatcctgccacagaaacatggactgagctgtgtccaatgattgaagccaggaagaatcatgggctggtatttgtaaaagacaagatatttgctgtgggtggtcagaatggtttaggtggtctggacaatgtggaatattacgatattaagttgaacgaatggaagatggtctcaccaatgccatggaagggtgtaacagtgaaatgtgcagcagttggctctatagtttatgtcttggctggttttcagggtgttggtcgattaggacacattctcgaatataataccgaaacagacaaatgggttgccaactccaaagttcgtgcttttccagtcacaagttgtttaatttgtgttgtcgatacttgtggagcaaatgaagagacccttgaaacatgaaaaatgagtggacttcagactcatcagagactctaaaatatagccaccagtgctttgttccaggagtttggtgacaaagttttggtttggtgttttggtaaagaaagtttcaagtgaaatgaggttcctataaaatagatgtttcttttatatggatttccttaattcaaagatcatattttagctggccacaaaaccaagaacatatctagcaagaaaacttgaaaaagtataagcatttgttaaaaatgtgaatttcttgaatgaatttcacatttgtaactatgattttggcagaatagaagattggctcatcagtgaagcgcagtatcttagctctagattctattttcatgcatcacagaagtgctatacggttaggtctgtttgtgctcagtcaagaactaagaaatagtatgaattgtaagtcaagatgggcaactcagatggagcagcttagtctcacagtttgcttgtctatttattttatttagtgccaaatgtattccattttaaaagtaagccagagtgagtcaaggcatatacacactttctcacaaaacttcctaaacagatttgggggtttaatatgtccaactcctcatgaaatatattcaatccacttaaatatattccatctttttaacataaaatgtaaagcttagcacccatcattaatttatgtctctgttttatccagtggttaaaaaaggattctgcctctttagtcctcactgttaaataaaacccaatcatagtaagtgattaactagcaaaaagtaaagctatttatagcaaatttctagatcattagaaaagcactggtagttgtacaatatcagtgttgactttgaacttctttaacgagatcatgaattcttttcccttagccaaaacatgaaatatttaacctagttgtctctaaaagttttgtaatcatgagttagatatatgtcatctcctattcattgcttttatgtgatcaataaatcttttacaaacccaactactcatttccttcctagtaatactttgcctttttcactgtgtatggaatgaaacatgtaaagctgtcacaatcaatgttttt

SEQ ID NO: 29803 - DNA, 2932 bp, Artificial Sequence
  derived and/or modified sequence
atagtgcccccgcctccttgcgcgaagtgcgcaggctcctgggcagggctcgggttctgcccggggacgcagcccagttggtagcgtcgctccctgagcgtttctaagggggccgcccggccttgtctttcggcagtggccgagccaccgccgcctgccgcgcgttccagagctgggcgctgcagctgcactgccgatcgccgtgtttggtcgatagaatccccagtgtgcccagagagtgcgacccctcgcccggcccggcgagccccgggcgtgaaccgagctgagggaggatggcagcctctggggtggagaagagcagcaagaagaagaccgagaagaaacttgctgctcgggaagaagctaaattgttggcgggtttcatgggcgtcatgaataacatgcggaaacagaaaacgttgtgtgacgtgatcctcatggtccaggaaagaaagatacctgctcatcgtgttgttcttgctgcagccagtcatttttttaacttaatgttcacaactaacatgcttgaatcaaagtcctttgaagtagaactcaaagatgctgaacctgatattattgaacaactgttgcactacaaattcttcaaaatgaaaaaccgcaaggatggaagagtttcagtatcctatgccatactaattcaaggactgaaaatttatgaaatttactcaactaattttcctgaacactttactgaagtttacaaaactgatgaatttcttcaacttgatgtcaagcgagtaacacatcttctcaaccaggacactctgactgtgagagcagaggatcaggtttatgatgctgcagtcaggtggttgaaatacgatgaacctaatcgccagccatttatggttgatatccttgctaaagtcaggtttcctcttatatcaaagaatttcttaagtaaaacggtacaagctgaaccacttattcaagacaatcctgaatgccttaagatggtgataagtggaatgaggtaccatctactgtctccagaggaccgagaagaacttgtagatggcacaagacctagaagaaagaaacatgactaccgcatagccctatttggaggctctcaaccacagtcttgtagatattttaacccaaaggattatagctggacagacatccgctgcccctttgaaaaacgaagagatgcagcatgcgtgttttgggacaatgtagtatacattttgggaggctctcagcttttcccaataaagcgaatggactgctataatgtagtgaaggatagctggtattcgaaactgggtcctccgacacctcgagacagccttgctgcatgtgctgcagaaggcaaaatttatacatctggaggttcagaagtaggaaactcagctctgtatttattttgcttaattcctgtgaagtttatgatcctgccacagaaacatggactgagctgtgtccaatgattgaagccaggaagaatcatgggctggtatttgtaaaagacaagatatttgctgtgggtggtcagaatggtttaggtggtctggacaatgtggaatattacgatattaagttgaacgaatggaagatggtctcaccaatgccatggaagggtgtaacagtgaaatgtgcagcagttggctctatagtttatgtcttggctggttttcagggtgttggtcgattaggacacattctcgaatataataccgaaacagacaaatgggttgccaactccaaagttcgtgcttttccagtcacaagttgtttaatttgtgttgtcgatacttgtggagcaaatgaagagacccttgaaacatgaaaaatgagtggacttcagactcatcagagactctaaaatatagccaccagtgctttgttccaggagtttggtgacaaagttttggtttggtgttttggtaaagaaagtttcaagtgaaatgaggttcctataaaatagatgtttcttttatatggatttccttaattcaaagatcatattttagctggccacaaaaccaagaacatatctagcaagaaaacttgaaaaagtataagcatttgttaaaaatgtgaatttcttgaatgaatttcacatttgtaactatgattttggcagaatagaagattggctcatcagtgaagcgcagtatcttagctctagattctattttcatgcatcacagaagtgctatacggttaggtctgtttgtgctcagtcaagaactaagaaatagtatgaattgtaagtcaagatgggcaactcagatggagcagcttagtctcacagtttgcttgtctatttattttatttagtgccaaatgtattccattttaaaagtaagccagagtgagtcaaggcatatacacactttctcacaaaacttcctaaacagatttgggggtttaatatgtccaactcctcatgaaatatattcaatccacttaaatatattccatctttttaacataaaatgtaaagcttagcacccatcattaatttatgtctctgttttatccagtggttaaaaaaggattctgcctctttagtcctcactgttaaataaaacccaatcatagtaagtgattaactagcaaaaagtaaagctatttatagcaaatttctagatcattagaaaagcactggtagttgtacaatatcagtgttgactttgaacttctttaacgagatcatgaattcttttcccttagccaaaacatgaaatatttaacctagttgtctctaaaagttttgtaatcatgagttagatatatgtcatctcctattcattgcttttatgtgatcaataaatcttttacaaacccaactactcatttccttcctagtaatactttgcctttttcactgtgtatggaatgaaacatgtaaagctgtcacaatcaatgtttttatctgataatattaaatattttttaactt

SEQ ID NO: 29804 - DNA, 1970 bp, Artificial Sequence
  derived and/or modified sequence
ctgcccggggacgcagcccagttggtagcgtcgctccctgagcgtttctaagggggccgcccggccttgtctttcggcagtggccgagccaccgccgcctgccgcgcgttccagagctgggcgctgcagctgcactgccgatcgccgtgtttggtcgatagaatccccagtgtgcccagagagtgcgacccctcgcccggcccggcgagccccgggcgtgaaccgagctgagggaggatggcagcctctggggtggagaagagcagcaagaagaagaccgagaagaaacttgctgctcgggaagaagctaaattgttggcgggtttcatgggcgtcatgaataacatgcggaaacagctaacatgcttgaatcaaagtcctttgaagtagaactcaaagatgctgaacctgatattattgaacaactggtggaatttgcttatactgctagaatttccgtgaatagcaacaatgttcagtctttgctggatgcagcaaaccaatatcagattgaacctgtgaagaaaatgtgtgttgattttttgaaagaacaagttgatgcttcaaattgtcttggtataagtgtgctagcggagtgtctagattgtcctgaattgaaagcaactgcagatgactttattcatcagcactttactgaagtttacaaaactgatgaatttcttcaacttgatgtcaagcgagtaacacatcttctcaaccaggacactctgactgtgagagcagaggatcaggtttatgatgctgcagtcaggtggttgaaatacgatgaacctaatcgccagccatttatggttgatatccttgctaaagtcaggtttcctcttatatcaaagaatttcttaagtaaaacggtacaagctgaaccacttattcaagacaatcctgaatgccttaagatggtgataagtggaatgaggtaccatctactgtctccagaggaccgagaagaacttgtagatggcacaagacctagaagaaagaaacatgactaccgcatagccctatttggaggctctcaaccacagtcttgtagatattttaacccaaaggattatagctggacagacatccgctgcccctttgaaaaacgaagagatgcagcatgcgtgttttgggacaatgtagtatacattttgggaggctctcagcttttcccaataaagcgaatggactgctataatgtagtgaaggatagctggtattcgaaactgggtcctccgacacctcgagacagccttgctgcatgtgctgcagaaggcaaaatttatacatctggaggttcagaagtaggaaactcagctctgtatttatttgagtgctatgatacgagaactgaaagctggcacacaaagcccagcatgctgacccagcgctgcagccatgggatggtggaagccaatggcctaatctatgtttgtggtggaagtttaggaaacaatgtttctgggagagtgcttaattcctgtgaagtttatgatcctgccacagaaacatggactgagctgtgtccaatgattgaagccaggaagaatcatgggctggtatttgtaaaagacaagatatttgctgtgggtggtcagaatggtttaggtggtctggacaatgtggaatattacgatattaagttgaacgaatggaagatggtctcaccaatgccatggaagggtgtaacagtgaaatgtgcagcagttggctctatagtttatgtcttggctggttttcagggtgttggtcgattaggacacattctcgaatataataccgaaacagacaaatgggttgccaactccaaagttcgtgcttttccagtcacaagttgtttaatttgtgttgtcgatacttgtggagcaaatgaagagacccttgaaacatgaaaaatgagtggacttcagactcatcagagactctaaaatatagccaccagtgctttgttccaggagtttggtgac

SEQ ID NO: 29805 - DNA, 1761 bp, Artificial Sequence
  derived and/or modified sequence
atggccgccagcggcgtggagaagagcagcaagaagaagacagagaagaagctggccgcccgggaggaggccaagctgctggccggcttcatgggcgtgatgaacaacatgaggaagcagaagaccctgtgtgatgtgatcctgatggtgcaggagaggaagatcccagcccaccgggtggtgctggccgccgccagccacttcttcaacctgatgttcaccaccaacatgctggagagcaagagctttgaggtggagctgaaggatgctgagccagacatcatcgagcagctggtggagtttgcctacacagcccgcatctctgtgaacagcaacaacgtgcagagcctgctggatgctgccaaccagtaccagatcgagcctgtgaagaagatgtgtgtggacttcctgaaggagcaggtggatgccagcaactgcctgggcatctctgtgctggccgagtgcctggactgcccagagctgaaggccacagcagatgacttcatccaccagcacttcacagaggtgtacaagacagatgagttcctgcagctggatgtgaagagggtgacccacctgctgaaccaggacaccctgactgtgcgggcagaggaccaggtgtatgatgctgctgtgcgctggctgaagtatgatgagcccaaccggcagcccttcatggtggacatcctggccaaggtgcgcttccccctcatcagcaagaacttcctgagcaagacagtgcaggccgagcccctcatccaggacaaccctgagtgcctgaagatggtgatcagcggcatgagataccacctgctgagcccagaagatcgggaggagctggtggatggcacccggcccaggaggaagaagcatgactacagaattgccctgtttggaggcagccagccccagagctgccgctacttcaaccccaaggactacagctggacagacatccgctgcccctttgagaagagaagagatgctgcctgtgtgttctgggacaacgtggtgtacatcctgggcggcagccagctgttccccatcaagaggatggactgctacaacgtggtgaaggacagctggtacagcaagctgggcccccccaccccccgggacagcctggccgcctgtgccgctgagggcaagatctacaccagcggcggcagcgaggtgggcaacagcgccctgtacctgtttgaatgttatgacaccaggacagagagctggcacaccaagcccagcatgctgacccagcgctgcagccacggcatggtggaggccaacggcctcatctacgtgtgtggcggcagcctgggcaacaacgtgtctggccgggtgctgaacagctgtgaggtgtatgaccctgccacagagacctggacagagctgtgccccatgattgaggccaggaagaaccacggcctggtgtttgtgaaggacaagatctttgctgtgggcggccagaatggcctgggcggcctggacaacgtggagtactatgacatcaagctgaatgagtggaagatggtgagccccatgccctggaagggcgtgacagtgaagtgtgccgctgtgggcagcatcgtgtatgtgctggccggcttccagggcgtgggccgcctgggccacatcctggagtacaacacagaaacagacaagtgggtggccaacagcaaggtgcgggccttccctgtgaccagctgcctgatctgtgtggtggacacctgtggggccaatgaggagaccctggagacctag

SEQ ID NO: 29806 - DNA, 1617 bp, Artificial Sequence
  derived and/or modified sequence
atggtgcaggagaggaagatcccagcccaccgggtggtgctggccgccgccagccacttcttcaacctgatgttcaccaccaacatgctggagagcaagagctttgaggtggagctgaaggatgctgagccagacatcatcgagcagctggtggagtttgcctacacagcccgcatctctgtgaacagcaacaacgtgcagagcctgctggatgctgccaaccagtaccagatcgagcctgtgaagaagatgtgtgtggacttcctgaaggagcaggtggatgccagcaactgcctgggcatctctgtgctggccgagtgcctggactgcccagagctgaaggccacagcagatgacttcatccaccagcacttcacagaggtgtacaagacagatgagttcctgcagctggatgtgaagagggtgacccacctgctgaaccaggacaccctgactgtgcgggcagaggaccaggtgtatgatgctgctgtgcgctggctgaagtatgatgagcccaaccggcagcccttcatggtggacatcctggccaaggtgcgcttccccctcatcagcaagaacttcctgagcaagacagtgcaggccgagcccctcatccaggacaaccctgagtgcctgaagatggtgatcagcggcatgagataccacctgctgagcccagaagatcgggaggagctggtggatggcacccggcccaggaggaagaagcatgactacagaattgccctgtttggaggcagccagccccagagctgccgctacttcaaccccaaggactacagctggacagacatccgctgcccctttgagaagagaagagatgctgcctgtgtgttctgggacaacgtggtgtacatcctgggcggcagccagctgttccccatcaagaggatggactgctacaacgtggtgaaggacagctggtacagcaagctgggcccccccaccccccgggacagcctggccgcctgtgccgctgagggcaagatctacaccagcggcggcagcgaggtgggcaacagcgccctgtacctgtttgaatgttatgacaccaggacagagagctggcacaccaagcccagcatgctgacccagcgctgcagccacggcatggtggaggccaacggcctcatctacgtgtgtggcggcagcctgggcaacaacgtgtctggccgggtgctgaacagctgtgaggtgtatgaccctgccacagagacctggacagagctgtgccccatgattgaggccaggaagaaccacggcctggtgtttgtgaaggacaagatctttgctgtgggcggccagaatggcctgggcggcctggacaacgtggagtactatgacatcaagctgaatgagtggaagatggtgagccccatgccctggaagggcgtgacagtgaagtgtgccgctgtgggcagcatcgtgtatgtgctggccggcttccagggcgtgggccgcctgggccacatcctggagtacaacacagaaacagacaagtgggtggccaacagcaaggtgcgggccttccctgtgaccagctgcctgatctgtgtggtggacacctgtggggccaatgaggagaccctggagacctag

SEQ ID NO: 29807 - DNA, 1161 bp, Artificial Sequence
  derived and/or modified sequence
atggccgccagcggcgtggagaagagcagcaagaagaagacagagaagaagctggccgcccgggaggaggccaagctgctggccggcttcatgggcgtgatgaacaacatgaggaagcagaagaccctgtgtgatgtgatcctgatggtgcaggagaggaagatcccagcccaccgggtggtgctggccgccgccagccacttcttcaacctgatgttcaccaccaacatgctggagagcaagagctttgaggtggagctgaaggatgctgagccagacatcatcgagcagctgctgcactacaagttcttcaagatgaagaacaggaaggatggccgggtgtctgtgtcctatgccatcctgatccagggcctgaagatctatgagatctacagcaccaacttccctgagcacttcacagaggtgtacaagacagatgagttcctgcagctggatgtgaagagggtgacccacctgctgaaccaggacaccctgactgtgcgggcagaggaccaggtgtatgatgctgctgtgcgctggctgaagtatgatgagcccaaccggcagcccttcatggtggacatcctggccaaggtgcgcttccccctcatcagcaagaacttcctgagcaagacagtgcaggccgagcccctcatccaggacaaccctgagtgcctgaagatggtgatcagcggcatgagataccacctgctgagcccagaagatcgggaggagctggtggatggcacccggcccaggaggaagaagcatgactacagaattgccctgtttggaggcagccagccccagagctgccgctacttcaaccccaaggactacagctggacagacatccgctgcccctttgagaagagaagagatgctgcctgtgtgttctgggacaacgtggtgtacatcctgggcggcagccagctgttccccatcaagaggatggactgctacaacgtggtgaaggacagctggtacagcaagctgggcccccccaccccccgggacagcctggccgcctgtgccgctgagggcaagatctacaccagcggcggcagcgaggtgggcaacagcgccctgtacctgttctgcctgatccctgtgaagttcatgatcctgccccagaagcacggcctgagctgtgtgcagtag

SEQ ID NO: 29808 - DNA, 1533 bp, Artificial Sequence
  derived and/or modified sequence
atgctggagagcaagagctttgaggtggagctgaaggatgctgagccagacatcatcgagcagctggtggagtttgcctacacagcccgcatctctgtgaacagcaacaacgtgcagagcctgctggatgctgccaaccagtaccagatcgagcctgtgaagaagatgtgtgtggacttcctgaaggagcaggtggatgccagcaactgcctgggcatctctgtgctggccgagtgcctggactgcccagagctgaaggccacagcagatgacttcatccaccagcacttcacagaggtgtacaagacagatgagttcctgcagctggatgtgaagagggtgacccacctgctgaaccaggacaccctgactgtgcgggcagaggaccaggtgtatgatgctgctgtgcgctggctgaagtatgatgagcccaaccggcagcccttcatggtggacatcctggccaaggtgcgcttccccctcatcagcaagaacttcctgagcaagacagtgcaggccgagcccctcatccaggacaaccctgagtgcctgaagatggtgatcagcggcatgagataccacctgctgagcccagaagatcgggaggagctggtggatggcacccggcccaggaggaagaagcatgactacagaattgccctgtttggaggcagccagccccagagctgccgctacttcaaccccaaggactacagctggacagacatccgctgcccctttgagaagagaagagatgctgcctgtgtgttctgggacaacgtggtgtacatcctgggcggcagccagctgttccccatcaagaggatggactgctacaacgtggtgaaggacagctggtacagcaagctgggcccccccaccccccgggacagcctggccgcctgtgccgctgagggcaagatctacaccagcggcggcagcgaggtgggcaacagcgccctgtacctgtttgaatgttatgacaccaggacagagagctggcacaccaagcccagcatgctgacccagcgctgcagccacggcatggtggaggccaacggcctcatctacgtgtgtggcggcagcctgggcaacaacgtgtctggccgggtgctgaacagctgtgaggtgtatgaccctgccacagagacctggacagagctgtgccccatgattgaggccaggaagaaccacggcctggtgtttgtgaaggacaagatctttgctgtgggcggccagaatggcctgggcggcctggacaacgtggagtactatgacatcaagctgaatgagtggaagatggtgagccccatgccctggaagggcgtgacagtgaagtgtgccgctgtgggcagcatcgtgtatgtgctggccggcttccagggcgtgggccgcctgggccacatcctggagtacaacacagaaacagacaagtgggtggccaacagcaaggtgcgggccttccctgtgaccagctgcctgatctgtgtggtggacacctgtggggccaatgaggagaccctggagacctag

SEQ ID NO: 29809 - DNA, 1761 bp, Artificial Sequence
  derived and/or modified sequence
atggccgccagcggcgtggagaagagcagcaagaagaagaccgagaagaaacttgcagctcgggaagaggctaaactcctagcgggcttcatgggtgtcatgaacaacatgcgcaaacaaaagactctgtgtgatgtgatccttatggtgcaagaaagaaaaattcctgctcatcgcgttgtgctggcagccgcctcccatttttttaacctcatgttcacaaccaatatgctcgagtcaaaaagtttcgaagtggagctgaaggacgctgaacctgacatcattgaacagcttgtggagtttgcttacacagcccgtatctccgtgaattctaataatgtacagagtctgttggacgcagcaaatcagtatcaaatagagcctgtgaaaaagatgtgtgtggatttcctgaaggaacaggtcgatgcatctaactgcttggggatctctgtacttgccgagtgtttggactgcccggagttaaaagcaactgccgatgacttcatccaccagcattttaccgaagtgtataagacggatgaattcctgcagctggacgtcaagcgcgtcacccacctactgaaccaggatacgctcaccgttagggccgaggatcaggtctatgatgccgctgtccgttggcttaaatatgacgagcctaacagacagccttttatggtggacattctggccaaggtcaggtttccccttatttcgaagaactttctgagcaagacagtgcaagccgaacccctcatccaagataatcccgagtgcttaaagatggtaatcagtggcatgcgctaccacctgctaagtcccgaggaccgtgaagaactggttgatgggaccagacctcggagaaagaagcacgattatcgaatagccttgttcgggggaagtcaaccccagagttgcaggtatttcaaccctaaggactactcatggactgacattaggtgccctttcgagaagcgtcgggatgccgcctgcgtcttttgggataacgtggtttacatattgggaggtagccagctcttccctataaagcggatggactgctacaatgtggtaaaggactcttggtatagcaagctaggcccacccactcccagagactctttagccgcctgtgccgccgagggtaaaatttacacctccggggggagcgaggtggggaacagcgctctgtatctcttcgagtgctacgacacaaggaccgagagttggcacacaaaacccagtatgctgacacagcgatgttcccatggcatggttgaggctaatgggctgatctacgtttgcggtggaagcctgggaaacaacgtgtcaggacgggtgctcaatagctgcgaggtctatgaccctgccaccgaaacatggaccgaattgtgcccaatgattgaagccagaaagaaccatggactcgtatttgtgaaggataagatttttgcagtcggcggccagaatggactgggcggcctggataacgtcgagtactacgacataaagctgaatgagtggaaaatggtatctccaatgccatggaagggagtgaccgtcaagtgtgccgccgttggtagtatcgtgtacgttttagcaggtttccagggagtgggtagactggggcatatactcgaatataatactgagactgataagtgggtggcaaactcaaaagtcagagcctttccagtcacctcctgccttatttgcgtagtggacacctgcggcgcaaatgaagaaacactcgagacttag

SEQ ID NO: 29810 - DNA, 1617 bp, Artificial Sequence
  derived and/or modified sequence
atggtgcaggagcggaagatccccgcccaccgggtggtgctggccgcggcttcacactttttcaatctcatgttcactacgaacatgctcgagagtaagagcttcgaagtggaactgaaagacgccgaacccgatataatagagcagttggtggagtttgcgtacactgcacgcatttctgtgaattctaacaacgtccagtcattgctcgacgcagcaaaccagtaccagatcgaaccagtaaaaaaaatgtgcgtagattttttgaaggaacaggtagacgcaagcaactgtctgggtatttcagtgctggctgaatgtctagattgtccggagcttaaagcaacagcggacgatttcattcatcagcactttacagaagtgtacaagacggatgaatttctacaattggatgtgaaacgggtgacacatttactgaatcaggacacactgacagtccgcgcggaggaccaggtgtatgacgcagccgtccgctggcttaaatatgatgagcccaaccggcagccgtttatggtcgacatcctggcaaaggtgaggtttcccctgatatccaagaatttccttagcaagacggttcaggcggaaccattgattcaggacaaccctgagtgcctaaaaatggtgatttccggcatgcggtaccacttgttatcaccagaggacagagaagagctggtggacgggactcgcccacgtcgtaagaagcacgactaccgcattgctctgttcggcggctcccaaccacaaagctgcaggtattttaatcccaaagattattcctggaccgacattaggtgcccttttgagaagagaagggacgccgcttgcgtattctgggacaacgttgtgtacatcctcggcggctcgcagctgttccccatcaaacgtatggattgctataacgtggttaaagactcatggtacagcaaactaggtccaccaacaccgcgggattcgctggctgcctgcgccgcagaagggaagatttacacctccggagggagcgaggttggaaactctgccctttaccttttcgagtgctatgatactaggacggagtcttggcatactaaaccatcaatgctgacacaaagatgcagtcatggcatggtggaagctaacgggcttatttacgtctgtggtgggtccctgggcaacaacgtgagtggccgcgtgctgaatagttgcgaagtctacgacccagccaccgagacttggactgagctgtgccccatgattgaggcgaggaagaaccacggtctggtgttcgtcaaagataagatttttgcagtagggggacagaacggtctgggcggccttgacaacgtcgaatactacgacataaagctgaacgagtggaaaatggtctctcccatgccatggaagggggtgactgtcaagtgcgcagcagtgggtagcatcgtctatgtgcttgccggtttccagggcgtgggcagattaggacacattctggaatacaacaccgagaccgataagtgggtggccaatagcaaagttcgagcatttccagtcacctcatgtcttatctgcgtggttgacacatgcggcgccaatgaggagactctggagacttag

SEQ ID NO: 29811 - DNA, 1161 bp, Artificial Sequence
  derived and/or modified sequence
atggccgccagcggcgtggagaagagcagcaagaagaagaccgagaagaagctggccgcacgcgaggaagccaagctgctggccgggttcatgggggtaatgaataacatgcgaaaacagaagaccctctgcgacgtcatcctgatggtgcaagagcgcaaaatccccgcacatagggtcgtgttggctgctgcctcccacttttttaatctaatgtttacaacaaacatgctggaatctaagtctttcgaagtggaacttaaggacgccgagcctgatatcattgagcagttgttacattacaagttctttaaaatgaagaacagaaaagacggccgcgtttctgtatcatacgccatactcatccaaggcctgaaaatttatgaaatttacagcaccaattttccagaacacttcacagaggtgtataagaccgacgaatttctgcagcttgacgttaaaagggtgactcacctgctgaatcaggacaccctgacggtccgtgctgaagatcaagtgtacgatgctgcggtgaggtggttgaagtatgacgagcctaaccggcagccttttatggttgacattctagccaaagtcaggtttcctctgatttcaaaaaattttctgtcaaaaacagtccaggctgagccactcatccaggataacccggaatgcctgaaaatggtgattagtggaatgaggtaccacctgttgtctcctgaggatagggaagagctggtggacgggacacggcctaggagaaagaaacacgactacagaattgcactattcgggggttcacaaccgcagagttgccgctattttaatccaaaggattactcatggactgatatcagatgtccatttgaaaagcgcagagacgctgcgtgcgtcttctgggacaatgtggtgtacatcttaggcgggtctcagcttttccccatcaaaagaatggattgctataatgtggtgaaagatagttggtactcaaaactcggcccgcccacacctcgtgattctctggccgcctgcgcggcggaggggaagatctataccagcggtggcagcgaagttggcaattccgccctctatcttttctgcctcataccagtgaagtttatgatactgccacagaagcacgggttaagttgtgtacagtag

SEQ ID NO: 29812 - DNA, 1533 bp, Artificial Sequence
  derived and/or modified sequence
atgctggagagcaagagcttcgaggtggagctgaaggacgccgagcccgatatcatagagcaactggtggagttcgcatataccgcccgaattagtgtgaattcaaacaatgttcagtccttactcgatgctgctaaccagtaccagatagagcctgtaaagaaaatgtgcgttgactttctcaaagagcaagtcgatgctagcaactgcctaggcatatccgtgcttgccgagtgccttgactgtccagagctgaaagctacggctgacgattttatccaccagcatttcacggaggtctacaagacggatgagtttctccagctggacgtgaaacgggtgacacacctcctgaatcaagacaccctgaccgttcgcgctgaagatcaagtgtatgacgccgctgttcgatggctgaaatatgacgagcctaacaggcagcctttcatggtggacatcttggccaaggtcaggttccctcttatttccaagaactttttgtcaaaaaccgttcaggcggaaccactgattcaggataaccccgagtgtctaaagatggtcattagtggaatgcgatatcatctgctgagccctgaagacagggaagagctggtggatggaactaggcctagaaggaaaaagcatgactatagaatcgctctgttcggaggctctcagccccagtcttgcagatacttcaatccgaaagattacagctggacagacattcgctgcccgttcgaaaagagaagagacgctgcatgtgtgttctgggataacgtggtgtatatcctgggtggctcccagctctttcctataaaacggatggactgctataatgtggttaaagattcgtggtacagcaaattagggcctcccacaccacgagattcacttgcggcatgcgctgccgagggaaagatttacacttctggcggttcagaagtaggcaattctgccttgtacctttttgaatgctatgatactcggacagagtcatggcacaccaagccgagcatgctgacacagcgctgttctcatggcatggtcgaggcaaacggactcatttacgtttgcggggggtccctggggaacaatgtgtccggtagggtgttaaattcgtgcgaggtatatgaccctgcaacagagacatggaccgaactgtgccccatgatcgaggcaaggaagaaccatggtctagtcttcgtgaaggacaagatcttcgcagttggaggacaaaacggccttggaggcctggacaacgtcgagtactacgatattaagcttaacgaatggaaaatggtgtcccccatgccctggaagggcgtgaccgtgaagtgtgccgcagtagggtccatagtgtacgttctcgccggatttcaaggtgttggccgcttagggcatatcctggaatacaacaccgaaaccgacaaatgggtcgcaaactccaaggtacgcgccttccctgtgactagttgcctaatctgtgttgttgatacttgcggggctaacgaggagactctggaaacatag

SEQ ID NO: 29813 - DNA, 1761 bp, Artificial Sequence
  derived and/or modified sequence
atggcagcctctggagtagagaaatcatcaaagaaaaaaacagagaagaagttagctgcccgagaggaagcgaagctgttggcgggatttatgggcgtgatgaacaacatgagaaagcagaaaacactgtgtgatgtaattttgatggttcaggaaaggaagattccagcccatagggttgtcctcgccgctgccagtcacttctttaacctgatgttcaccaccaatatgctggaatctaagagtttcgaagttgagcttaaagatgcggaacccgacattattgaacagctggtggagttcgcttatacagccagaatcagtgtgaatagtaataacgtgcagagcctactggatgctgccaatcaataccagatcgagccagtgaagaagatgtgtgtggactttctcaaggagcaagtcgacgcctctaattgtttagggatatccgtcctggcagagtgcctcgattgtccagaactcaaagccacagccgatgactttatccaccaacactttaccgaggtctataaaaccgatgagttcctacaattagatgtgaagcgggttacccatttactgaatcaggacacactgacagtgcgtgccgaggaccaggtctacgacgcagcagtccggtggttaaagtacgacgagccgaatagacagccatttatggtggatatactagctaaggtgagattccccctcataagcaagaattttctgtccaaaacagtgcaggccgaaccgttaatccaagataaccccgagtgtctgaaaatggtgatttccgggatgaggtaccacttgctgtcccctgaagacagggaagagcttgtggatggcactagacctaggcgtaaaaaacacgattaccgtatcgcattattcggcggatcccagcctcagtcatgccggtactttaatcctaaagactatagttggacagatatacgttgtccttttgaaaagaggagagatgctgcttgcgtgttctgggacaacgtcgtgtacattctgggcggatctcagctgttccctattaaaagaatggactgctataacgttgtcaaagattcatggtattccaagctgggtcctccaaccccccgtgactctctggctgcatgtgccgcagagggtaagatctacacgtccgggggatcggaagtcggtaattcagctctgtacctgttcgaatgttatgatacacgcaccgagtcgtggcacactaaaccctccatgctcacacaacggtgcagtcacggaatggtagaggcaaatggcttgatatacgtctgtggcggtagtctcggcaataatgtatccggacgcgttcttaatagttgcgaggtctacgatccagcaaccgaaacctggactgaactgtgcccgatgatagaggcacggaagaaccacggtttggtcttcgtgaaggacaagatcttcgcagtgggtggccagaacggtctaggcggactcgacaacgtggaatactacgacataaagctgaacgagtggaaaatggtgagtcctatgccgtggaaaggtgtgaccgtgaagtgcgcggcagtggggagcatcgtgtacgtgctcgccggttttcagggggtcggccgattgggacacatcctggaatacaatacagagacagataaatgggttgcgaatagtaaagtgcgagccttccccgtgacttcttgtctaatatgcgtggtagacacgtgtggcgcaaatgaggagactttggagacctag

SEQ ID NO: 29814 - DNA, 1617 bp, Artificial Sequence
  derived and/or modified sequence
atggtccaggagcgcaaaatacccgctcacagggtggtgctggctgcagcatctcatttttttaatctgatgtttactacaaatatgctcgaatccaaaagcttcgaggtggagctcaaagacgcagaacccgatattattgaacagcttgttgaatttgcatataccgcaagaataagcgtgaacagcaacaacgttcagtccttgctcgacgccgctaatcagtatcagatagaacctgtaaagaagatgtgcgtggactttctaaaggaacaggtcgatgcgtcaaactgtctaggcattagcgtgctggctgagtgtttggactgtcctgagctcaaagccactgctgacgattttatccaccagcattttaccgaggtgtataagacggacgagtttctgcagctagacgtgaagcgggtcacccacctgctaaaccaggatactctcacagtcagggccgaagatcaggtgtacgacgctgctgtgcgctggctcaagtatgacgaaccaaatcgccagccattcatggtggacatcctggctaaggtgcgattccccctgatctccaaaaatttcctgtcaaagaccgtccaggcagagccgctgattcaagacaaccccgagtgccttaaaatggtcatatccggaatgcgctatcacctgttgtcccccgaggaccgggaagaactggtagacggtactcgtcctcgacgaaaaaagcacgactacaggattgcactgtttggtgggagccaacctcagagctgccggtattttaatcccaaagattactcatggaccgacatcaggtgccctttcgaaaagagaagggacgccgcatgcgtgttctgggataatgtagtgtatattctgggtggctctcagttgtttcctattaagcgtatggactgctacaacgttgtaaaggactcctggtattccaagctcggccctcctactccccgtgactctctcgccgcatgtgctgccgaaggcaagatctacacctctggcggtagcgaagttgggaatagcgcactctatctcttcgagtgctatgatacacggactgaaagctggcacaccaagccatcaatgctcacccagaggtgctctcatggtatggtcgaagccaatggattgatttacgtttgcggaggctcactggggaataacgtgtccgggcgtgttctgaactcttgcgaagtgtacgacccagccaccgaaacttggaccgaactgtgtccgatgattgaggctcgcaagaatcatgggcttgtgtttgtgaaggataaaatcttcgctgtgggcggacaaaatggcctgggtggattggacaatgttgaatactacgacattaagctaaacgagtggaagatggtgagtccgatgccatggaaaggcgtaactgttaagtgcgcagctgtcggtagtatcgtttacgtgctggctggctttcagggcgttggtcggctcggccacattttggagtataacacagagaccgacaaatgggtcgccaactccaaggtcagagcctttcctgtcacctcatgtcttatttgtgtggtcgacacatgtggcgctaacgaggagacactagaaacatag

SEQ ID NO: 29815 - DNA, 1161 bp, Artificial Sequence
  derived and/or modified sequence
atggccgcatctggggtggagaaatcctctaagaagaagacagagaaaaagctcgccgctcgtgaagaagctaagctgcttgccggatttatgggggttatgaacaacatgcgaaaacagaaaactttatgcgacgttatactcatggtacaggaacggaaaatcccagctcacagagtggttctagccgctgcatcacattttttcaacttgatgttcacgacaaatatgttggaaagtaagtcgtttgaggtcgagctgaaggacgctgaacctgacatcatagagcagctgcttcactacaaatttttcaaaatgaaaaacagaaaggatggcagggtgtccgtctcctacgccatcctgatccaggggctcaaaatctacgaaatttatagcacgaattttccagaacactttacggaagtttataaaaccgatgaatttttacagttggatgtgaaacgggtcacccacctcctcaatcaggacacgttaacagtaagggcagaggaccaggtgtacgacgccgctgtgaggtggctcaagtatgacgaacctaaccggcagcctttcatggtcgacattctggcaaaggtgagatttccactgatcagcaagaactttctgagcaaaacagtgcaggcggagccacttattcaggacaaccctgaatgtttgaagatggtgatatctggcatgaggtatcatctgctgagcccagaggatcgggaggaactggtcgatgggacgaggccacggagaaagaagcatgactatcgaatcgctctcttcgggggatcccagccccaatcatgccgctacttcaatccaaaagactactcttggaccgatatacgctgtcccttcgagaagaggcgggacgccgcttgtgtgttttgggacaacgtggtgtatattctggggggaagccagctgtttcctatcaagcgtatggactgctacaacgtcgtcaaagatagctggtactctaaattaggacccccaacgcctcgagattcactggcagcctgtgccgcagagggcaagatctatacctccggcggttccgaagtggggaactctgctttgtatctgttctgcctgatccctgtgaagttcatgatcctgccacagaaacatggcttatcatgtgtgcagtag

SEQ ID NO: 29816 - DNA, 1533 bp, Artificial Sequence
  derived and/or modified sequence
atgctcgaaagtaagagtttcgaggtcgagctcaaggacgcagagccagacatcatcgagcaacttgtggagttcgcctacaccgctcggatttcggtcaattctaataacgtacagagcctgctggatgccgctaaccaataccaaattgagccagtcaagaagatgtgtgttgactttctgaaagaacaggtcgacgcctctaattgtctgggcatatcggtactggctgagtgtttagactgccccgagctgaaagcaacagctgacgactttatccatcagcattttactgaggtctataagaccgatgaatttctgcagctcgatgttaagcgtgtcactcacctgcttaatcaggataccctgacggtcagagccgaggaccaggtttacgatgctgccgtacgatggttgaagtatgacgaacccaatcgccagccattcatggtggacattcttgccaaggtgcggttcccccttatctcaaagaacttcctgtcaaagacagtgcaagcagaacccctcatccaggataacccagagtgtttaaaaatggtcattagcgggatgcgataccatcttcttagccctgaagaccgtgaggagctcgtcgacggtaccaggccacgcagaaagaagcatgactatagaatcgctctgttcggaggctcgcagccgcagagctgtcgctatttcaacccaaaagactactcatggacagatatcagatgtcccttcgagaagaggcgagatgccgcttgcgtgttttgggataacgtggtgtacatcctgggtggtagccagctgtttcccatcaagcgtatggactgctacaacgtcgtgaaagattcctggtattcgaagttgggcccaccaacccctcgggattccttggcggcttgtgcggcagagggtaagatttacactagcgggggtagcgaggtgggaaactctgccttatatttgttcgaatgttacgacactaggacagaaagttggcacaccaaacctagcatgttaacccagcgatgctctcacgggatggtcgaggcgaatgggctgatttacgtctgcggcggatctctgggaaacaacgtttctggtagagtgttgaatagttgtgaggtttatgaccctgccaccgaaacgtggactgaactgtgcccaatgatcgaggctcgaaagaaccacgggctggtgtttgtgaaagacaaaatctttgccgtcggagggcaaaacggcttagggggattggataacgtagagtactacgatatcaagctcaacgagtggaagatggtgtcacctatgccttggaaaggagttaccgtgaaatgcgccgctgtgggatctattgtgtacgtgctcgcgggttttcagggtgtcggcaggttagggcacatcttggaatacaacacagaaaccgataagtgggttgctaactctaaggttagggcctttcctgtcacaagctgcctcatctgtgtagtggatacatgtggcgcaaatgaggagaccctcgaaacgtag

SEQ ID NO: 29817 - DNA, 1761 bp, Artificial Sequence
  derived and/or modified sequence
atggccgccagcggcgtggagaagagcagcaagaagaagaccgagaagaagctggccgccagagaggaggccaagctgctggccggcttcatgggcgtgatgaacaacatgagaaagcagaagaccctgtgcgacgtgatcctgatggtgcaggagagaaagatccccgcccacagagtggtgctggccgccgccagccacttcttcaacctgatgttcaccaccaacatgctggagagcaagagcttcgaggtggagctgaaggacgccgagcccgacatcatcgagcagctggtggagttcgcctacaccgccagaatcagcgtgaacagcaacaacgtgcagagcctgctggacgccgccaaccagtaccagatcgagcccgtgaagaagatgtgcgtggacttcctgaaggagcaggtggacgccagcaactgcctgggcatcagcgtgctggccgagtgcctggactgccccgagctgaaggccaccgccgacgacttcatccaccagcacttcaccgaggtgtacaagaccgacgagttcctgcagctggacgtgaagagagtgacccacctgctgaaccaggacaccctgaccgtgagagccgaggaccaggtgtacgacgccgccgtgagatggctgaagtacgacgagcccaacagacagcccttcatggtggacatcctggccaaggtgagattccccctgatcagcaagaacttcctgagcaagaccgtgcaggccgagcccctgatccaggacaaccccgagtgcctgaagatggtgatcagcggcatgagataccacctgctgagccccgaggacagagaggagctggtggacggcaccagacccagaagaaagaagcacgactacagaatcgccctgttcggcggcagccagccccagagctgcagatacttcaaccccaaggactacagctggaccgacatcagatgccccttcgagaagagaagagacgccgcctgcgtgttctgggacaacgtggtgtacatcctgggcggcagccagctgttccccatcaagagaatggactgctacaacgtggtgaaggacagctggtacagcaagctgggcccccccacccccagagacagcctggccgcctgcgccgccgagggcaagatctacaccagcggcggcagcgaggtgggcaacagcgccctgtacctgttcgagtgctacgacaccagaaccgagagctggcacaccaagcccagcatgctgacccagagatgcagccacggcatggtggaggccaacggcctgatctacgtgtgcggcggcagcctgggcaacaacgtgagcggcagagtgctgaacagctgcgaggtgtacgaccccgccaccgagacctggaccgagctgtgccccatgatcgaggccagaaagaaccacggcctggtgttcgtgaaggacaagatcttcgccgtgggcggccagaacggcctgggcggcctggacaacgtggagtactacgacatcaagctgaacgagtggaagatggtgagccccatgccctggaagggcgtgaccgtgaagtgcgccgccgtgggcagcatcgtgtacgtgctggccggcttccagggcgtgggcagactgggccacatcctggagtacaacaccgagaccgacaagtgggtggccaacagcaaggtgagagccttccccgtgaccagctgcctgatctgcgtggtggacacctgcggcgccaacgaggagaccctggagacctag

SEQ ID NO: 29818 - DNA, 1617 bp, Artificial Sequence
  derived and/or modified sequence
atggtgcaggagagaaagatccccgcccacagagtggtgctggccgccgccagccacttcttcaacctgatgttcaccaccaacatgctggagagcaagagcttcgaggtggagctgaaggacgccgagcccgacatcatcgagcagctggtggagttcgcctacaccgccagaatcagcgtgaacagcaacaacgtgcagagcctgctggacgccgccaaccagtaccagatcgagcccgtgaagaagatgtgcgtggacttcctgaaggagcaggtggacgccagcaactgcctgggcatcagcgtgctggccgagtgcctggactgccccgagctgaaggccaccgccgacgacttcatccaccagcacttcaccgaggtgtacaagaccgacgagttcctgcagctggacgtgaagagagtgacccacctgctgaaccaggacaccctgaccgtgagagccgaggaccaggtgtacgacgccgccgtgagatggctgaagtacgacgagcccaacagacagcccttcatggtggacatcctggccaaggtgagattccccctgatcagcaagaacttcctgagcaagaccgtgcaggccgagcccctgatccaggacaaccccgagtgcctgaagatggtgatcagcggcatgagataccacctgctgagccccgaggacagagaggagctggtggacggcaccagacccagaagaaagaagcacgactacagaatcgccctgttcggcggcagccagccccagagctgcagatacttcaaccccaaggactacagctggaccgacatcagatgccccttcgagaagagaagagacgccgcctgcgtgttctgggacaacgtggtgtacatcctgggcggcagccagctgttccccatcaagagaatggactgctacaacgtggtgaaggacagctggtacagcaagctgggcccccccacccccagagacagcctggccgcctgcgccgccgagggcaagatctacaccagcggcggcagcgaggtgggcaacagcgccctgtacctgttcgagtgctacgacaccagaaccgagagctggcacaccaagcccagcatgctgacccagagatgcagccacggcatggtggaggccaacggcctgatctacgtgtgcggcggcagcctgggcaacaacgtgagcggcagagtgctgaacagctgcgaggtgtacgaccccgccaccgagacctggaccgagctgtgccccatgatcgaggccagaaagaaccacggcctggtgttcgtgaaggacaagatcttcgccgtgggcggccagaacggcctgggcggcctggacaacgtggagtactacgacatcaagctgaacgagtggaagatggtgagccccatgccctggaagggcgtgaccgtgaagtgcgccgccgtgggcagcatcgtgtacgtgctggccggcttccagggcgtgggcagactgggccacatcctggagtacaacaccgagaccgacaagtgggtggccaacagcaaggtgagagccttccccgtgaccagctgcctgatctgcgtggtggacacctgcggcgccaacgaggagaccctggagacctag

SEQ ID NO: 29819 - DNA, 1161 bp, Artificial Sequence
  derived and/or modified sequence
atggccgccagcggcgtggagaagagcagcaagaagaagaccgagaagaagctggccgccagagaggaggccaagctgctggccggcttcatgggcgtgatgaacaacatgagaaagcagaagaccctgtgcgacgtgatcctgatggtgcaggagagaaagatccccgcccacagagtggtgctggccgccgccagccacttcttcaacctgatgttcaccaccaacatgctggagagcaagagcttcgaggtggagctgaaggacgccgagcccgacatcatcgagcagctgctgcactacaagttcttcaagatgaagaacagaaaggacggcagagtgagcgtgagctacgccatcctgatccagggcctgaagatctacgagatctacagcaccaacttccccgagcacttcaccgaggtgtacaagaccgacgagttcctgcagctggacgtgaagagagtgacccacctgctgaaccaggacaccctgaccgtgagagccgaggaccaggtgtacgacgccgccgtgagatggctgaagtacgacgagcccaacagacagcccttcatggtggacatcctggccaaggtgagattccccctgatcagcaagaacttcctgagcaagaccgtgcaggccgagcccctgatccaggacaaccccgagtgcctgaagatggtgatcagcggcatgagataccacctgctgagccccgaggacagagaggagctggtggacggcaccagacccagaagaaagaagcacgactacagaatcgccctgttcggcggcagccagccccagagctgcagatacttcaaccccaaggactacagctggaccgacatcagatgccccttcgagaagagaagagacgccgcctgcgtgttctgggacaacgtggtgtacatcctgggcggcagccagctgttccccatcaagagaatggactgctacaacgtggtgaaggacagctggtacagcaagctgggcccccccacccccagagacagcctggccgcctgcgccgccgagggcaagatctacaccagcggcggcagcgaggtgggcaacagcgccctgtacctgttctgcctgatccccgtgaagttcatgatcctgccccagaagcacggcctgagctgcgtgcagtag

SEQ ID NO: 29820 - DNA, 1533 bp, Artificial Sequence
  derived and/or modified sequence
atgctggagagcaagagcttcgaggtggagctgaaggacgccgagcccgacatcatcgagcagctggtggagttcgcctacaccgccagaatcagcgtgaacagcaacaacgtgcagagcctgctggacgccgccaaccagtaccagatcgagcccgtgaagaagatgtgcgtggacttcctgaaggagcaggtggacgccagcaactgcctgggcatcagcgtgctggccgagtgcctggactgccccgagctgaaggccaccgccgacgacttcatccaccagcacttcaccgaggtgtacaagaccgacgagttcctgcagctggacgtgaagagagtgacccacctgctgaaccaggacaccctgaccgtgagagccgaggaccaggtgtacgacgccgccgtgagatggctgaagtacgacgagcccaacagacagcccttcatggtggacatcctggccaaggtgagattccccctgatcagcaagaacttcctgagcaagaccgtgcaggccgagcccctgatccaggacaaccccgagtgcctgaagatggtgatcagcggcatgagataccacctgctgagccccgaggacagagaggagctggtggacggcaccagacccagaagaaagaagcacgactacagaatcgccctgttcggcggcagccagccccagagctgcagatacttcaaccccaaggactacagctggaccgacatcagatgccccttcgagaagagaagagacgccgcctgcgtgttctgggacaacgtggtgtacatcctgggcggcagccagctgttccccatcaagagaatggactgctacaacgtggtgaaggacagctggtacagcaagctgggcccccccacccccagagacagcctggccgcctgcgccgccgagggcaagatctacaccagcggcggcagcgaggtgggcaacagcgccctgtacctgttcgagtgctacgacaccagaaccgagagctggcacaccaagcccagcatgctgacccagagatgcagccacggcatggtggaggccaacggcctgatctacgtgtgcggcggcagcctgggcaacaacgtgagcggcagagtgctgaacagctgcgaggtgtacgaccccgccaccgagacctggaccgagctgtgccccatgatcgaggccagaaagaaccacggcctggtgttcgtgaaggacaagatcttcgccgtgggcggccagaacggcctgggcggcctggacaacgtggagtactacgacatcaagctgaacgagtggaagatggtgagccccatgccctggaagggcgtgaccgtgaagtgcgccgccgtgggcagcatcgtgtacgtgctggccggcttccagggcgtgggcagactgggccacatcctggagtacaacaccgagaccgacaagtgggtggccaacagcaaggtgagagccttccccgtgaccagctgcctgatctgcgtggtggacacctgcggcgccaacgaggagaccctggagacctag

SEQ ID NO: 29821 - protein, 290 aa, Artificial Sequence
  derived and/or modified sequence
MPFDFRRFDIYRKVPKDLTQPTYTGAIISICCCLFILFLFLSELTGFITTEVVNELYVDDPDKDSGGKIDVSLNISLPNLHCELVGLDIQDEMGRHEVGHIDNSMKIPLNNGAGCRFEGQFSINKVPGNFHVSTHSATAQPQNPDMTHVIHKLSFGDTLQVQNIHGAFNALGGADRLTSNPLASHDYILKIVPTVYEDKSGKQRYSYQYTVANKEYVAYSHTGRIIPAIWFRYDLSPITVKYTERRQPLYRFITTICAIIGGTFTVAGILDSCIFTASEAWKKIQLGKMH

SEQ ID NO: 29822 - DNA, 873 bp, Artificial Sequence
  derived and/or modified sequence
atgcccttcgacttcagaagattcgacatctacagaaaggtgcccaaggacctgacccagcccacctacaccggcgccatcatcagcatctgctgctgcctgttcatcctgttcctgttcctgagcgagctgaccggcttcatcaccaccgaggtggtgaacgagctgtacgtggacgaccccgacaaggacagcggcggcaagatcgacgtgagcctgaacatcagcctgcccaacctgcactgcgagctggtgggcctggacatccaggacgagatgggcagacacgaggtgggccacatcgacaacagcatgaagatccccctgaacaacggcgccggctgcagattcgagggccagttcagcatcaacaaggtgcccggcaacttccacgtgagcacccacagcgccaccgcccagccccagaaccccgacatgacccacgtgatccacaagctgagcttcggcgacaccctgcaggtgcagaacatccacggcgccttcaacgccctgggcggcgccgacagactgaccagcaaccccctggccagccacgactacatcctgaagatcgtgcccaccgtgtacgaggacaagagcggcaagcagagatacagctaccagtacaccgtggccaacaaggagtacgtggcctacagccacaccggcagaatcatccccgccatctggttcagatacgacctgagccccatcaccgtgaagtacaccgagagaagacagcccctgtacagattcatcaccaccatctgcgccatcatcggcggcaccttcaccgtggccggcatcctggacagctgcatcttcaccgccagcgaggcctggaagaagatccagctgggcaagatgcactag

SEQ ID NO: 29823 - DNA, 2881 bp, Artificial Sequence
  derived and/or modified sequence
ggcgagtggcgagtggcgagtgtcaggggggcggccggcgggggcggggcggccggaggaggcgttggcagcgggctcggacccacgcggcgccgcggcccgcctggcctgcagcgctcccacccccggcggcggcacgatgccctttgacttcaggaggtttgacatctacaggaaggtgcccaaggaccttacgcagccaacgtacaccggggccattatctccatctgctgctgcctcttcatcctcttcctcttcctctcggagctcaccggatttataacgacagaagttgtgaacgagctctatgtcgatgacccagacaaggacagcggtggcaagatcgacgtcagtctgaacatcagtttacccaatctgcactgcgagttggttgggcttgacattcaggatgagatgggcaggcacgaagtgggccacatcgacaactccatgaagatcccgctgaacaatggggcaggctgccgcttcgaggggcagttcagcatcaacaaggtccccggcaacttccacgtgtccacacacagtgccacagcccagccacagaacccagacatgacgcatgtcatccacaagctctcctttggggacacgctacaggtccagaacatccacggagctttcaatgctctcgggggagcagacagactcacctccaaccccctggcctcccacgactacatcctgaagattgtgcccacggtttatgaggacaagagtggcaagcagcggtactcctaccagtacacggtggccaacaaggaatacgtcgcctacagccacacgggccgcatcatccctgcaatctggttccgctacgacctcagccccatcacggtcaagtacacagagagacggcagccgctgtacagattcatcaccacgatctgtgccatcattggcgggaccttcaccgtcgccggcatcctggactcatgcatcttcacagcctctgaggcctggaagaagatccagctgggcaagatgcattgacgccacacccagcctaatggccgaggaccctgggcatcgccagccttgcctccagtgccctgtctcctttggccctcaatctggtcccaaatctggctgtgtcccaaagggtgtgtgggaagtggggggaaagtagaggatggctcgatgttttgcagctacctcttttccccgtgtttctttttagacaaattacactgcctgaagttgcagttcccctttccctggggagccccaagaacagagtcaggcaaggggtggggagtccagggatcttggggacccctcctaggagagctgcagtctcttccctcaggggaacatcccagaatgcatatcgatcagctctcagccaggcttcgacaatctcgcagcccccactaggtggacacattaatgatttggtttctcccctgggcagccaacctgccccagaggcaccagacctgggctttcagctttgggaccaggctgcccaaaggtactcctttatacacccggcaccttccacgaaagatggtacttcccaagcaagcccctatgatttgtcactatagatggaaccctgacttctgccccatcccttcctgcccaacctagaacccaggcctcaagtctttaccccacccctttcttgttcttccaagaagcagatgcccagttgctcagcagcagcggtagagacttgaatctgcccaccagtcacaaggcgggtcacagattcctcttcctctcttctcctcgttcctctgaaccctccaccaatgtgcctcagcctgtgtgctgtgtggcaacagcattctggttcccactgccaagatctcccaccactctgctgggatctgcagtggcagggagtgggggttgtgtaaaggggaagtcatcttttgagatccagatagacatggtttgtgcacttacgtccagatgggaagcatccttcctgcaaccctaaaataatcatgcagcctctcagacggacgccatcggtcccaaggccttaggtggaggaagcaaagcaggccaggcctgtcctgtccgtggacctctaccttctggactccctacgggtgcagagcacttgggtttctctacagccatcgtggcccacttgacactgtgctcctccatcagctggtcacatgccaacacgttcccagcccctgaggcagctccagggtgccccacctgctcctgaggtgggtccctaccctgctgctcctcttcatcctttcccttttgtcctgaaagggaggagcaatggtccaggcattaattccacccagggaattttagctatgccctcatgtcccagggagagagccacacgcctgttttccatttatagcaagattgtttgcatacttttgtaatgaaggggagtgtccagtggaaggatttttaaaattatcttatggatagctcaagtctctgccatttgtaatttttggctctaagctccgattggagacgcttctccttgtgcatgtgagttgactgatgttgtgagtgtaaatgcatttggttatttctggtatcggtggccacttggatggatttttttacattctgttccccagttacaggaaggagtccctttggtgtgtgaatatgtgtgcctgtagagggtggggcagggtggggtggggatggaaatgtgtggcatgcacatgagttgaaattcttttatgcatttttttgaagaaaaaaaaaaaaacaactctgaggacataggggatgtcagtttcctatggaagagacacctctgacccgttattcttataatcaaaatctgaagggaaaaaaatgttttagttctttccccactcgttgggttcaactagattaaaaggctgattttcagaaata

SEQ ID NO: 29824 - DNA, 873 bp, Artificial Sequence
  derived and/or modified sequence
atgccctttgattttagacggttcgacatttacagaaaggtgcctaaggaccttactcagcctacatataccggagccattatcagcatctgttgctgtctctttattcttttcctgtttttgagcgagcttactggttttataactacggaagtcgtgaacgagctctatgtggacgatccagacaaggactccggcgggaagatcgacgtctccttgaatatctcgctcccaaacctgcactgtgagctggttggtttagacatccaagacgagatggggcgccatgaagtgggtcacattgacaatagcatgaaaattcccctgaacaacggcgcgggctgtcggttcgaaggccagtttagcattaacaaagttcccggcaattttcacgtctctactcacagtgctaccgctcaaccacagaaccccgacatgacacacgttatccacaagctttcgttcggcgacaccctgcaagtgcaaaatatccacggcgccttcaatgccctgggcggggccgataggctgacttcaaatcccctggcaagccatgattatatcttgaagatcgtgcccacggtctacgaagacaagtcaggcaagcagagatacagttatcagtatacggtggcgaataaagaatatgttgcatattctcacacagggcgaatcattcctgcgatctggtttcggtatgatcttagtccgattacagtgaaatacactgagcgacgccagccactgtatcgctttatcacaactatctgcgccatcatcggagggacattcacggtcgccgggatcttagactcatgtatatttaccgcgtcagaagcttggaaaaaaattcagctggggaaaatgcattag

SEQ ID NO: 29825 - DNA, 873 bp, Artificial Sequence
  derived and/or modified sequence
atgccctttgacttccgccgctttgacatctacaggaaggtgcccaaggacctgacccagcccacctacaccggggccatcatcagcatctgctgctgcctcttcatcctcttcctgttcctgtctgagctgaccggcttcatcaccacagaggtggtgaatgagctgtatgtggatgatcctgacaaggacagcggcggcaagattgatgtgtccctgaacatcagcctgcccaacctgcactgtgagctggtgggcctggacatccaggatgagatgggcagacatgaggtgggccacatcgacaacagcatgaagatccccctgaacaatggagctggctgccgctttgagggccagttcagcatcaacaaggtgcccggcaacttccacgtgtccacccacagcgccacagcccagccccagaacccagacatgacccacgtgatccacaagctgagctttggagacaccctgcaggtgcagaacatccatggagccttcaatgccctgggcggcgctgaccggctgaccagcaaccccctggccagccatgactacatcctgaagatcgtgcccaccgtgtatgaggacaagagcggcaagcagcgctacagctaccagtacacagtggccaacaaggagtatgtggcctacagccacacaggccgcatcatcccagccatctggttccgctatgacctgagccccatcaccgtgaagtacacagaaagacggcagcccctgtaccgcttcatcaccaccatctgtgccatcatcggcggcaccttcaccgtggccggcatcctggacagctgcatcttcaccgccagcgaggcctggaagaagatccagctgggcaagatgcactag

SEQ ID NO: 29826 - DNA, 873 bp, Artificial Sequence
  derived and/or modified sequence
atgcccttcgacttccggcggttcgacatctaccggaaggtgcccaaggacctcactcagccaacgtacacaggcgctatcataagtatctgttgttgcctcttcatcctgttcctgtttctgagcgaactgacggggttcattacaactgaagtagtgaatgaattatatgttgacgaccccgataaggacagcggcggcaagatcgacgttagtctgaacatatctttgcccaacttgcactgtgagctggtgggtctggatatacaggacgagatgggccgccatgaggtagggcacatcgacaattccatgaaaatccctttgaacaacggggccgggtgcaggttcgaggggcagttctcgatcaataaagtcccaggtaatttccacgtctccacccacagcgcaacagctcagccccagaatcctgacatgacccacgtgatccacaagctgtcgttcggcgacacactacaggtgcagaacatccacggcgccttcaacgctctcgggggagccgataggctcacctccaatcctctggcatctcatgactacatcctgaagattgtgcctaccgtctatgaggataagagtggcaagcaacgctactcttatcagtacaccgtggcaaataaagagtacgtagcctacagccacaccggacgcattatccccgccatttggtttcgatatgacctgtcccccatcaccgttaagtacaccgagcgcagacagccgttgtatcggttcatcaccaccatctgcgctatcattggcggaactttcactgtggcgggaattttagatagctgcattttcaccgcttcagaagcatggaaaaaaatccagctgggaaagatgcactag

SEQ ID NO: 29827 - DNA, 873 bp, Artificial Sequence
  derived and/or modified sequence
atgccgttcgacttccggagatttgatatttaccgaaaagttccaaaggatctgacccagcccacctacactggagccatcatctcaatttgttgctgcctgtttatcctattcttatttctctcggaattgacagggttcatcacgacagaggtggttaatgagctctacgtcgatgaccccgacaaagatagcggcggtaaaatagacgtctctttaaatattagtctgcccaatctgcattgtgagctggtgggactggatatccaggacgaaatggggaggcacgaggttgggcacatcgataacagtatgaagatacctctcaacaacggtgccggatgcagatttgagggtcagttttcgatcaacaaggtgccgggtaatttccatgtttccactcacagtgctaccgcccagccgcagaacccggacatgacacacgtgatccataagttgtcttttggtgataccctccaggtgcagaatatccacggcgctttcaatgctctgggcggtgcagaccgcctcacctccaaccctcttgccagtcacgactacattcttaagatagtgcccaccgtgtatgaggacaaaagcggcaagcagcgctactcttaccagtacaccgtggccaataaggagtacgttgcctattcacataccggtcgaattattcccgctatctggtttcgctacgacttgagtcccataactgtgaagtacactgaacggaggcaacctctctatcggttcataaccacgatctgtgcaatcatagggggtactttcaccgttgccggaatcctggacagctgcatttttaccgcaagcgaagcgtggaagaagatacagttggggaagatgcactag

SEQ ID NO: 29828 - protein, 359 aa, Artificial Sequence
  derived and/or modified sequence
MDCGSVGGQRTQRLPGRQRLLFLPVGLSGRPGGSETSARRCLSALSDGLGALRPRAPAARGGVSRASPLLLLLLVPSPRLAAAAPRRQLGDWERSRLGYAAPPAGRSSAWRCSPGVAAAAGALPQYHGPAPALVSCRRELSLSAGSLQLERKRRDFTSSGSRKLYFDTHALVCLLEDNGFATQQAEIIVSALVKILEANMDIVYKDMVTKMQQEITFQQVMSQIANVKKDMIILEKSEFSALRAENEKIKLELHQLKQQVMDEVIKVRTDTKLDFNLEKSRVKELYSLNEKKLLELRTEIVALHAQQDRALTQTDRKIETEVAGLKTMLESHKLDNIKYLAGSIFTCLTVALGFYRLWI

SEQ ID NO: 29829 - DNA, 1240 bp, Artificial Sequence
  derived and/or modified sequence
gcgcgcccggcaggaaagggcggtcctgcgctgtggcccacgctcgctcccgctgtcggactctgggcctggaccgcgcgtggccggcgccaaaagcgagaggcatgagcgcgcgcccgggccagtgaactgctcggggatggactgcggctcggtcggcggccagaggacccagcgcctgcccggccgccagcggcttctcttcttgcccgtgggcctcagcggaagaccgggcggcagcgaaacctcagcacgccgctgcctctctgcgctctccgacggtctgggggcgctgcgccctcgcgccccggcggcccgcggcggcgtgtcacgtgcctcaccgctgctcctcctcctgctagtgccctccccgcgcttggccgccgcagccccgcgccggcagctcggggactgggagcgctcgcgcctcgggtatgccgcacccccggccgggcgcagcagcgcgtggaggtgctcaccgggcgtcgccgctgccgccggcgcccttccccagtaccacggcccggcgcctgcactcgtttcctgcaggagagagctaagcttgtctgctggatccctgcagctggagcgcaaaaggagagatttcacctcttctgggagcaggaaactctacttcgacactcatgccttagtgtgcttactggaagacaatgggtttgctactcaacaagcagaaatcattgtgtctgcattggtcaagatcctggaggccaacatggacatcgtctacaaagatatggtcaccaagatgcagcaggaaatcacttttcagcaagtaatgtctcagattgcgaatgtgaaaaaggatatgattattttggagaagagtgaattttcagccctcagagcagaaaatgagaaaataaaactcgaactacatcagttaaaacaacaagtaatggatgaagtgatcaaagtccgaacagataccaaattagacttcaacctagaaaagagcagagtaaaagaattgtattcattgaacgaaaagaagctgctggaattgagaacagaaatagtggcattgcatgcccagcaagatcgggcccttacccagacagacaggaagatcgaaactgaggttgctggcctcaaaaccatgcttgagtcacacaagcttgataatattaaatatttagcagggtctatatttacgtgcctaacagtagctctgggattttatcgcctgtggatctaataaagtgtctatttaaagtga

SEQ ID NO: 29830 - DNA, 1080 bp, Artificial Sequence
  derived and/or modified sequence
atggactgcggcagcgtgggcggccagagaacccagagactgcccggcagacagagactgctgttcctgcccgtgggcctgagcggcagacccggcggcagcgagaccagcgccagaagatgcctgagcgccctgagcgacggcctgggcgccctgagacccagagcccccgccgccagaggcggcgtgagcagagccagccccctgctgctgctgctgctggtgcccagccccagactggccgccgccgcccccagaagacagctgggcgactgggagagaagcagactgggctacgccgccccccccgccggcagaagcagcgcctggagatgcagccccggcgtggccgccgccgccggcgccctgccccagtaccacggccccgcccccgccctggtgagctgcagaagagagctgagcctgagcgccggcagcctgcagctggagagaaagagaagagacttcaccagcagcggcagcagaaagctgtacttcgacacccacgccctggtgtgcctgctggaggacaacggcttcgccacccagcaggccgagatcatcgtgagcgccctggtgaagatcctggaggccaacatggacatcgtgtacaaggacatggtgaccaagatgcagcaggagatcaccttccagcaggtgatgagccagatcgccaacgtgaagaaggacatgatcatcctggagaagagcgagttcagcgccctgagagccgagaacgagaagatcaagctggagctgcaccagctgaagcagcaggtgatggacgaggtgatcaaggtgagaaccgacaccaagctggacttcaacctggagaagagcagagtgaaggagctgtacagcctgaacgagaagaagctgctggagctgagaaccgagatcgtggccctgcacgcccagcaggacagagccctgacccagaccgacagaaagatcgagaccgaggtggccggcctgaagaccatgctggagagccacaagctggacaacatcaagtacctggccggcagcatcttcacctgcctgaccgtggccctgggcttctacagactgtggatctag

SEQ ID NO: 29831 - DNA, 1080 bp, Artificial Sequence
  derived and/or modified sequence
atggactgtggcagcgtgggaggacagcgaacacagcggttgccgggcagacagaggctgttattcctcccagtcggactaagcgggcggcctggtggctcagagacatctgccagacgttgcctgtcagctctgtctgacggcctgggtgccctgaggccgagggcgcccgccgcccggggaggggtgagccgagcctctccactgctccttctcctcttggttccttcaccacgcctcgctgccgctgcgcctcggcgccaattgggtgactgggaacgatcccgactgggctacgcagcacctccggccggccggtcgtccgcgtggcgctgtagccccggggtggccgcagcagccggtgcacttccccagtatcatggccccgctcctgcccttgtgtcctgcagacgggagctttccctcagtgctggatctctacaactcgaacgcaaacgccgcgactttacctcatccggctctaggaagttatattttgacacgcatgctctggtctgcctgctggaagacaatggatttgcaacacagcaagctgagatcatcgtgtccgcgctggttaagatcctcgaagcgaacatggacattgtgtataaggatatggtgacgaaaatgcaacaggagataaccttccagcaggtgatgtcccagatcgcaaatgtcaaaaaagacatgatcatcctagagaaatctgagttcagcgcactgcgagccgagaacgaaaaaattaagctcgagctgcaccaactcaagcagcaggtgatggacgaggtcattaaggtgcgaactgacaccaaacttgattttaacttagaaaaatcacgtgttaaggaactgtattctttgaacgaaaagaagctcttggagctccgaactgagatcgttgctttgcatgctcagcaggacagggctttgacccagacagaccggaaaatcgaaacggaggtggcaggactaaaaaccatgctggagtctcacaaactggataatattaaatatctggccggatctatatttacttgcctgaccgtcgccctcgggttctacaggctatggatctag

SEQ ID NO: 29832 - DNA, 1080 bp, Artificial Sequence
  derived and/or modified sequence
atggactgtggctctgtgggcggccagaggacccagaggctgcccggccggcagaggctgctcttcctgcctgtgggcctgagcggccggcctgggggcagcgagaccagcgcccggcgctgcctgagcgccctgagtgatggcctgggcgccctgcggccccgggccccagctgcccggggcggcgtgtcccgggccagccccctgctgctgctgctgctggtgcccagcccccggctggccgctgctgccccccggcggcagctgggggactgggagaggagccggctgggctacgccgcccccccagctggccgcagcagcgcctggcgctgcagccctggggtggccgctgctgctggggccctgccccagtaccacggccctgccccagccctggtgtcctgcagaagagagctgagcctgtctgctggcagcctgcagctggagaggaagagaagagacttcaccagcagcggcagcaggaagctgtactttgacacccacgccctggtgtgcctgctggaggacaatggatttgccacccagcaggccgagatcatcgtgtctgccctggtgaagatcctggaggccaacatggacatcgtgtacaaggacatggtgaccaagatgcagcaggagatcaccttccagcaggtgatgagccagatcgccaacgtgaagaaggacatgatcatcctggagaagtctgagttcagcgccctgcgggcagaaaatgagaagatcaagctggagctgcaccagctgaagcagcaggtgatggatgaggtgatcaaggtgaggacagacaccaagctggacttcaacctggagaagagccgggtgaaggagctgtacagcctgaatgagaagaagctgctggagctgaggacagagatcgtggccctgcacgcccagcaggaccgggccctgacccagacagacaggaagattgaaacagaggtggccggcctgaagaccatgctggagagccacaagctggacaacatcaagtacctggccggcagcatcttcacctgcctgactgtggccctgggcttctaccgcctgtggatctag

SEQ ID NO: 29833 - DNA, 1080 bp, Artificial Sequence
  derived and/or modified sequence
atggactgcggcagcgtgggcggccagcggacccagcggctgcccggaaggcagcgtttgctctttctcccggtgggcctgagcggaaggccgggaggcagcgagaccagcgcacggcggtgtctgtccgccctcagcgatggcctgggtgctcttagaccgcgcgcacccgcagccagagggggcgtctcccgtgcatcgcctttattattgctgctgttggtacccagccccagacttgccgccgctgccccacgacgccagctgggagattgggagagatcccgccttgggtacgcggccccacccgcagggcgctctagcgcttggaggtgcagccctggtgtggcagctgctgccggggcactgccccagtatcatggccctgctcccgcccttgtcagctgccgacgagagctcagcctctctgccggatcactccagctggagcgaaagcggcgggacttcacttctagcggttctaggaaactttacttcgacactcacgcactcgtgtgtcttcttgaggataatgggtttgcaacacaacaggcagagattatcgtttccgccctcgtcaaaatcttagaagccaacatggatatcgtatataaagacatggttacaaagatgcagcaggagattacattccagcaggttatgtctcagatagctaacgtgaagaaggacatgatcatcctagaaaagtcggagttctctgctctaagggctgagaatgaaaagattaagctcgagttacatcagctgaagcaacaggtaatggatgaggtcattaaagtccggacagatactaagcttgacttcaacctcgaaaaatctcgggtaaaagaactgtatagcctgaacgaaaaaaaattactcgaactcagaacggaaattgtggcactgcacgcacaacaagatcgggctttgacgcagaccgatagaaaaatcgagactgaggtggctggtcttaaaactatgctggagtcacataagttggataatatcaaatacttggccggtagtatttttacctgtttgacagtcgcgctgggcttctaccggctgtggatctag

SEQ ID NO: 29834 - DNA, 1080 bp, Artificial Sequence
  derived and/or modified sequence
atggattgtggcagcgttggtggccaacgcacccagcgcttgccaggcaggcagagattgctgtttctgcctgtgggtctttcaggtagacccggtggtagtgaaacatctgccagaagatgtctgtccgctctgtccgacgggcttggggcacttaggccaagggcaccagcagcacgtggtggagtgtctagggcctcaccccttttactcctcttgttagtcccgtcaccacgcctggcagcagctgctccacgaagacaactgggagattgggagagatccaggctcggctacgcggcaccccctgctggaaggagttcagcatggaggtgttctcctggcgttgcggctgcggcaggagcattgcctcaatatcatgggcctgcccctgctctcgttagctgtaggcgggagctgagtctctccgccggaagccttcagctcgaaagaaaacgtcgggattttacctcatcagggtcccgtaagctgtattttgacactcacgcactcgtttgcttgctcgaggataatggtttcgctacacaacaggccgagattatcgtttctgccctggtgaagatcctcgaggctaatatggacattgtttataaggacatggtaaccaaaatgcagcaggaaatcaccttccagcaagtgatgagccagattgcgaacgtcaagaaggatatgatcattttggaaaagtcagagttcagtgctttgagggcagagaacgagaagataaaattggaactccaccagctcaagcaacaggtcatggatgaagttattaaggtgagaaccgatactaagttggactttaacctagagaagagcagagtaaaggagctgtattcattaaacgagaaaaaattgctggaattaaggaccgagattgttgccttgcatgcccagcaggatagggcactgactcagactgacagaaagattgaaaccgaggtggcagggctaaaaaccatgttggaaagtcacaagctggacaatataaagtatctggcagggagcattttcacatgtctgaccgttgcgctcggcttttataggttatggatatag

SEQ ID NO: 29835 - protein, 1240 aa, Artificial Sequence
  derived and/or modified sequence
MSVKEGAQRKWAALKEKLGPQDSDPTEANLESADPELCIRLLQMPSVVNYSGLRKRLEGSDGGWMVQFLEQSGLDLLLEALARLSGRGVARISDALLQLTCVSCVRAVMNSRQGIEYILSNQGYVRQLSQALDTSNVMVKKQVFELLAALCIYSPEGHVLTLDALDHYKTVCSQQYRFSIVMNELSGSDNVPYVVTLLSVINAVILGPEDLRARTQLRNEFIGLQLLDVLARLRDLEDADLLIQLEAFEEAKAEDEEELLRVSGGVDMSSHQEVFASLFHKVSCSPVSAQLLSVLQGLLHLEPTLRSSQLLWEALESLVNRAVLLASDAQECTLEEVVERLLSVKGRPRPSPLVKAHKSVQANLDQSQRGSSPQNTTTPKPSVEGQQPAAAAACEPVDHAQSESILKVSQPRALEQQASTPPPPPPPPLLPGSSAEPPPPPPPPPLPSVGAKALPTAPPPPPLPGLGAMAPPAPPLPPPLPGSCEFLPPPPPPLPGLGCPPPPPPLLPGMGWGPPPPPPPLLPCTCSPPVAGGMEEVIVAQVDHGLGSAWVPSHRRVNPPTLRMKKLNWQKLPSNVAREHNSMWASLSSPDAEAVEPDFSSIERLFSFPAAKPKEPTMVAPRARKEPKEITFLDAKKSLNLNIFLKQFKCSNEEVAAMIRAGDTTKFDVEVLKQLLKLLPEKHEIENLRAFTEERAKLASADHFYLLLLAIPCYQLRIECMLLCEGAAAVLDMVRPKAQLVLAACESLLTSRQLPIFCQLILRIGNFLNYGSHTGDADGFKISTLLKLTETKSQQNRVTLLHHVLEEAEKSHPDLLQLPRDLEQPSQAAGINLEIIRSEASSNLKKLLETERKVSASVAEVQEQYTERLQASISAFRALDELFEAIEQKQRELADYLCEDAQQLSLEDTFSTMKAFRDLFLRALKENKDRKEQAAKAERRKQQLAEEEARRPRGEDGKPVRKGPGKQEEVCVIDALLADIRKGFQLRKTARGRGDTDGGSKAASMDPPRATEPVATSNPAGDPVGSTRCPASEPGLDATTASESRGWDLVDAVTPGPQPTLEQLEEGGPRPLERRSSWYVDASDVLTTEDPQCPQPLEGAWPVTLGDAQALKPLKFSSNQPPAAGSSRQDAKDPTSLLGVLQAEADSTSEGLEDAVHSRGARPPAAGPGGDEDEDEEDTAPESALDTSLDKSFSEDAVTDSSGSGTLPRARGRASKGTGKRRKKRPSRSQEGLRPRPKAK

SEQ ID NO: 29836 - DNA, 480 bp, Artificial Sequence
  derived and/or modified sequence
atgcaccaaacccacgccatccagcgcctggaggtcctgccaagcttttccaacgagtcccctacaagcagggaaacttcagagtcttggacgaaccaggatgacatcttttacgcgtatgcttccatgtcacccggtgctgagcacaggggcaccacacaattactgagatttcagctggctccaataaagaagctcgagggtagtctgcagacccactttttgctgtcctccctccacccacgtatgaccttccctggtcgtgccggtggaggcgaggccggaagccggccacctcgaagaccttgggctgggattctcatcctgcagctcccttctacaaggggcggacggaggtccggccacggggctgtaagatcttgggggccatggaaggtggtcgccgaacagccagtcggaggtaccgatccgcctgcacacggtggccgtgggcgtccctctcccaacgaaaacacatag

SEQ ID NO: 29837 - protein, 1027 aa, Artificial Sequence
  derived and/or modified sequence
MAQNTENHDPVGSILIQIHEDLYQLKEKLTKFSPEEKGETLDIQSLETAIKRTEVGLRIHIEKYLNVVNQNVLTTSVNDESLYTPQASKWLLPTVIDQKSFIFPQESEGTFWQPQRQHSSSLPVFPRAKIKVSKLIKGSNISSLTVLPSSHCTDPYFTPIPVLQADAHKGILSMIERGLIPPTARITFQNPPITPRAAPLHSFDEARKIPTVATFTIPREPPPSPAEVKFFPKKQRSKGKSRRSRGHHDRKAMKVKTPLRALKSLWDYDFLIYDGVIDNTAPDFLAFKEHFSLAWGGIFSLLEHVEKFLRNYAIPEVKIKGNNLVALLPEFELTNKLTRYDLLSVLEDPAHVQMLINLPGQRYKGQDGNSEAAMKIQATWKCYKARKFFLFYRQQKWASGVIAIAWLLYCHKTRLKKILKESRQRHLENFRIRAKHLAANWNRIRTSRRTIIHIPSLGYSQPVREHIADFNTQQNMQLGRLCDILDANVNVIYICSHHMNDELVLYYKKILSLHAAVKSGNLEDRSDLQDRFKIITPEAVNIFPKHHMCLATHLMYSPKAIKRIKNLIRGTEAYIVSGLLHRDDLAVADMLDIPILGSEPELAHLYSTKSGGKRVFDSANVAVPPGIYDIYSQQQMIEQLSQLITDHLQIQRWLFKMDSEFRGNGTAFCDIPSYLKCYKWVLKESSRYGLEDWRKKWAQEPALVKISEELAGILAQHAQPVNEKRFPTWRKFLQTFLSQGGVIEAFPPADNVTNLTVDMLIEPNGKISVLSTGDQLHAESPFISSGTTVPQTSVDPQVLTYLCLQIGKACRMRDVVGYFSIDLVTFIDPSTLEQQVWATGLNLAYSDQLALTQLTLYLTNGHLDCSLSTLEVPRFVPKERKKTKCMSALSMPMLATSRYAVMTTQLRHSNLSLVFHYVFLQICRAHGIGYDVEERQGTVFILYEHLKRHKLGMLTIGEDLQGVLMTFARHLFIIHQEISAPNMQGETNFKTTIADIETILRVTKENKMRFEEEQQSKDDKNLSKPKK

SEQ ID NO: 29838 - DNA, 3084 bp, Artificial Sequence
  derived and/or modified sequence
atggcccagaacactgagaaccacgacccggtcggttcaatattgattcagatccacgaggatttatatcagttaaaggaaaagctcacaaagttctcacctgaggaaaaaggggaaacccttgacatacaaagtcttgagacagctattaagcgtaccgaagtaggccttcgcattcatatcgaaaagtacctcaacgttgtaaaccagaatgtcctgaccacatcagtcaacgatgaatctctgtacacacctcaggcgagcaaatggctgttaccgactgtgatcgatcagaagagctttatatttccccaggagtctgagggcaccttctggcagccccagaggcagcactcgagcagcctgcctgtcttccccagggccaaaattaaggtgagcaagctgattaaggggagtaatatctctagtctgacagtgctgcctagttctcactgtactgatccatacttcaccccaatccctgttctccaggccgatgcccataagggcatcctgtccatgattgaaagggggctgattccacccactgctcgcataaccttccagaacccacccatcactccaagagctgcaccactccactcattcgacgaggcccgcaagatacctactgtggcaacattcaccatccccagagagccgccaccttcaccagctgaggtgaagttctttcccaagaagcagaggagcaaggggaagtcaaggagatctcgaggacatcacgatagaaaagcgatgaaggtgaagacacccttacgggccctgaagtccctttgggattatgatttcctgatctacgatggggtgatcgataacaccgctcctgacttcctggccttcaaggagcatttcagcctggcgtggggcggcatcttctctttacttgaacacgtcgaaaaatttctccggaattatgctattcccgaggtaaagattaagggcaacaacctggtcgctctgctgccagaattcgaacttacaaataagctcacacgctacgacctgctgtctgtgctggaggaccccgcgcatgtgcagatgctgatcaatttgcctggacagcgatacaagggacaggatggcaactcggaagccgcaatgaaaatccaagcaacttggaagtgttacaaggcacgtaagtttttccttttttacaggcagcagaaatgggccagtggggtgatcgccatcgcctggctgttatattgccacaagacccgtctcaaaaagattttaaaagagtcacgccagcgccacttagaaaactttcgtatcagagctaagcatctggccgccaattggaacaggatcagaacctctcggcgcaccattatccatattccttcactggggtattcacagccagtgagggagcacatagctgatttcaacacccagcagaatatgcagctaggtcgactctgtgatattctagacgctaatgtgaacgtaatctacatttgttcccaccacatgaacgacgagttagtgctctactacaaaaaaatcctgtctttgcacgctgcagtaaagtcaggtaacctcgaggacagatctgatctgcaggatcgctttaagattataactccggaagccgtaaatatatttcctaaacaccatatgtgtttggccactcacctgatgtactctccaaaggcaatcaaacgaataaagaatctcattcgggggaccgaggcatatattgtgtcagggttattgcaccgcgacgatctggccgtggccgacatgttagacattcccatccttggttctgaacccgaacttgctcacctatacagtactaaaagtgggggcaaaagggtgttcgactccgcaaacgtggcagtacccccaggaatttatgatatctactcacagcagcaaatgattgagcagctttcgcaactgataactgaccatctccaaatccagcgatggctctttaaaatggacagcgagtttcgtggaaacggcactgcattttgcgacatacctagctatctgaaatgctacaaatgggttttgaaagagagcagccgctacgggctggaggattggcgcaaaaagtgggctcaggaacctgccctcgtcaaaatctctgaagagcttgccggcatcctcgcccagcacgcccagcccgtgaacgaaaagcggtttcctacctggagaaagtttctgcagacttttctcagccagggcggggtgatcgaagccttccccccggccgacaacgtaactaacctgaccgtggacatgctgattgagccaaatggaaaaatctcagtgcttagtactggcgaccagctgcatgcagagagcccatttatttcctccggcaccacagtgccccagacttctgtggacccccaggtcctgacctatctttgtctgcagatcggcaaagcctgccgtatgagagacgttgtcggctacttcagcatcgacctcgttacttttatagaccctagcactctcgaacagcaggtttgggccacaggactgaatctggcatatagtgatcagttggccctcacccagctgactctttacttaacaaatgggcatctggactgctcacttagcacattggaggtgcctaggtttgtccccaaggagcgaaagaagacaaagtgcatgagcgccttgtccatgccaatgttggctactagtcgctacgccgttatgacaacacagcttaggcactctaatctcagtctggtctttcattacgtattcttgcagatttgtcgcgctcatggaattgggtacgacgtcgaagaacgccagggcactgtttttatactgtacgagcacttaaagcgccacaagctaggcatgttaactattggagaggacctgcagggcgtgctgatgacattcgcccgccacctgtttatcatccaccaggagatttctgcccccaacatgcagggagaaacgaatttcaagaccacaattgcggacattgaaactatcctgagggtaaccaaggagaacaagatgcggtttgaggaggagcaacagtcgaaggacgacaagaacctttcaaaacctaagaaatag

SEQ ID NO: 29839 - DNA, 4208 bp, Artificial Sequence
  derived and/or modified sequence
tccggctgaaggtttccgtgcttggaaaccgcgcctccgcggaggtagccgttccctgacctagccatggcacagaacactgaaaaccacgaccctgtcggatccatcttaatccagatccatgaagacctttatcagttaaaggagaaattaacaaaattctcacctgaggaaaaaggagagactctagacattcagagtcttgaaacagcaatcaaaaggactgaagtggggttaagaattcacattgagaagtatttaaatgttgtaaaccagaatgtattaacgacttctgttaatgatgagagcttatatactccccaggcttccaaatggttacttccaactgtaattgatcagaaatcatttattttccctcaggaatctgagggtacattttggcaaccccaaagacagcacagttcatctctgcctgtctttccaagagcaaagataaaggtttcgaagttaatcaaagggtctaacatatccagcctcacggttctgccatcttctcattgcacagatccctatttcactcctataccagtcttacaagcagatgcccacaaagggattttaagtatgatagaacgagggctgattccaccaacagcaaggattacctttcagaatccacccattacacccagagcagctcctctgcatagttttgatgaagcacgtaagattccaactgtagccactttcactatacctcgggaaccacctccatctccagcagaagtgaagttctttcccaagaaacaaagatcaaaggggaaaagcagaaggtcaagaggacatcatgataggaaggccatgaaagtcaaaacacctttgagagccctgaaatcactgtgggattatgactttttaatttatgatggtgtcatagacaatacagccccagacttcttagcattcaaggaacattttagcttagcttggggaggtattttttctctcttggaacacgtcgagaagtttctcaggaactatgctataccagaagtcaaaataaaagggaataatttggtggccctccttccagagtttgagctgacgaataaacttaccagatatgaccttctctcagtgttagaggacccagctcatgtccaaatgctgataaatcttccagggcaaaggtacaagggccaagatggaaattcggaggccgccatgaagatccaagccacatggaaatgctacaaagcaagaaaattcttcctcttttatcgccagcagaagtgggcatcaggtgtgattgccattgcttggctgttatattgccataagactcgactaaagaagatactaaaggaatcacgtcagagacacctggagaattttcgcattcgagccaagcatctggcagccaactggaatcgcatcaggacctccaggaggactattatccatatcccatcattagggtattcccagcctgtgagagaacatattgccgatttcaacacacagcagaacatgcagctggggaggctgtgtgacatcttagatgccaatgtgaatgtcatctacatctgctcccatcatatgaatgacgagttagtgctgtattacaaaaaaatcctaagtctacatgcagccgtcaaatctgggaaccttgaggacagaagtgacctgcaggacaggttcaaaattatcacacctgaagctgtaaacatcttccctaagcatcatatgtgcctggccactcacctgatgtacagtcccaaggcaatcaaaagaataaaaaatctcatccgaggaacagaggcctacatcgtcagcgggctcctccacagagatgatttagctgtggccgatatgttagacatacccatcctgggctctgagcctgaactagctcatctttatagtaccaaatctggaggcaaacgtgtctttgacagtgccaatgtggcagttcctcctggaatatatgatatttatagtcagcaacagatgatagagcagctgagtcagctgataactgatcacctgcaaatacagcgttggctctttaaaatggactctgagttccgaggaaatgggactgcattttgtgatattccttcctacctaaagtgctacaaatgggtgctaaaggagagtagcagatatggccttgaagactggagaaagaaatgggcacaagagccagctttggtgaagatctctgaggagctggcgggcattttagcacagcacgcacagccagtcaatgagaaacggttcccgacgtggaggaaattcctccaaacatttctcagtcaagggggtgtgatcgaagcattcccacctgcagacaatgtcaccaacctcacagtggacatgctgatagagcccaacgggaaaatcagcgtgctgtcgacaggggaccagcttcatgctgaaagccccttcatctcctctggtaccaccgtgcctcagacctcagtggatccccaagttctcacttatttgtgcctccaaattggaaaagcctgcagaatgagagatgtggttggttacttttcgatagatctggtgacttttatagatccaagcaccttggaacaacaggtgtgggcaaccggccttaacctcgcatatagtgaccagctggccctgactcaactcaccttatacctgacaaacggccatctggattgcagtttgagcaccctggaagtgccccgctttgttccaaaggaaaggaagaaaaccaaatgcatgagtgcgctgtcaatgccgatgctggcaaccagtcgctatgcagtgatgaccacccagctaagacacagcaatctctcactggttttccactatgtttttctccagatctgtagggcccatggcattggctatgatgttgaggaaaggcaaggaactgtttttatattatatgagcacctgaagagacacaagttgggaatgttaacaatcggcgaggatctccagggggtcctcatgacctttgctcgccatctcttcatcatccatcaagaaatatcagcacctaatatgcaaggcgagaccaattttaagaccaccattgctgatattgaaactattctaagagtaacaaaggaaaacaaaatgagatttgaagaggagcaacagtccaaagatgataaaaacctctctaaacccaagaaatgatcctggaatacagtacataacaatttggatcccagtctggaataaaaagggcaatttttttttctgttagaaataaaagccaggggaaattggtttgctttgtgtgctaggaggtgaatcagaacagattataatgaaatgctctttttaaaacattgtttattaagtgatcttattttatttattaaaccaaaacttatttgtgttttcatttgagagtgttgaacaatcccttcttcttctcaaactcagaaaaaagtaatctgataaaagaagaaagttaaaagtcttactgatatcacctccgcatttacttcctcataggcctcaggattatgtagcttttattttttatgttttataaagttttctcctatttctaatagtccatcgatcttctgcatttataggtttgaataaaggcttaagaattgctatttgtcaaaacacaaatgcctttttttcaaagcttcaaattatattgaaattatatttatatgaatttttaagtgactatcattcatcgtgtttttgttataccaagccactattgtctgctattgttgccatttttcaaaaagtaggataagccagcatctagttaaccaaagcatcagaatgtatctaggtggcagtatctgctcttagtttaagatggagtgtagctcgagctctgtagcttgaataaacatttgtattctctagttctccatttaatacagcagtaggattttttcaagtttagttcaacattatactacctttaaaaaggcagactgttaagattgtagtagtgctgactctaactttcagcattcacttcataattgtccaaaaatatttccacatcagtgagctttactgaagggtgaaataaaagcaaattacaacaccaaaaccattattgttttaaagaatgacctttatgtctataaaaatattttagtgtattggggaaaggaataggatttttacctgtggaatttcaataatttgttaactgtgattcagccacaggctaagagtttctgtaataaaattaacatttgtgtgtgtca

SEQ ID NO: 29840 - DNA, 3084 bp, Artificial Sequence
  derived and/or modified sequence
atggcccagaacacagagaaccacgaccctgtgggcagcatcctgatccagatccacgaggacctgtaccagctgaaggagaagctgaccaagttcagccctgaggagaagggggagaccctggacatccagagcctggagacagccatcaagaggacagaggtgggcctgcgcatccacatcgagaagtacctgaatgtggtgaaccagaatgtgctgaccacctctgtgaatgatgagagcctgtacaccccccaggccagcaagtggctgctgcccaccgtcatcgaccagaagagcttcatcttcccccaggagagcgagggcaccttctggcagccccagaggcagcacagcagcagcctgcctgtgttcccccgggccaagatcaaggtgtccaagctgatcaagggcagcaacatcagcagcctgactgtgctgcccagcagccactgcacagacccctacttcacccccatccctgtgctgcaggctgatgcccacaagggcatcctgtccatgattgagcggggcctcatccccccaacagcccgcatcaccttccagaacccccccatcacccccagggctgcccccctgcacagctttgatgaggccaggaagatccccaccgtggccaccttcaccatcccccgggagcccccacccagccctgctgaggtgaagttcttccccaagaagcagaggagcaagggcaagagccgccgcagccggggccaccacgacaggaaggccatgaaggtgaagacccccctgcgggccctgaagagcctgtgggactatgacttcctgatctatgatggagtgattgacaacacagccccagacttcctggccttcaaggagcacttcagcctggcctggggcggcatcttcagcctgctggagcacgtggagaagttcctgaggaactatgccatccctgaggtgaagatcaagggcaacaacctggtggccctgctgcctgagtttgagctgaccaacaagctgaccaggtatgacctgctgtctgtgctggaggaccctgcccacgtgcagatgctgatcaacctgcccggccagcgctacaagggccaggacggcaacagcgaggccgccatgaagatccaggccacctggaagtgctacaaggccaggaagttcttcctgttctaccggcagcagaagtgggccagcggggtcatcgccatcgcctggctgctgtactgccacaagacccggctgaagaagatcctgaaggagagccggcagaggcacctggagaacttccgcatccgggccaagcacctggccgccaactggaaccgcatccgcaccagcaggaggaccatcatccacatccccagcctgggctacagccagcctgtgcgggagcacatcgctgacttcaacacccagcagaacatgcagctgggccgcctgtgtgacatcctggatgccaacgtgaatgtcatctacatctgcagccaccacatgaatgatgagctggtgctgtactacaagaagatcctgagcctgcatgctgctgtgaagagcggcaacctggaggacagaagtgacctgcaggaccgcttcaagatcatcaccccagaggccgtgaacatcttccccaagcaccacatgtgcctggccacccacctgatgtacagccccaaggccatcaagaggatcaagaacctgatccggggcacagaggcctacatcgtgtctggcctgctgcacagagatgacctggccgtggccgacatgctggacatccccatcctgggcagcgagcctgagctggcccacctgtacagcaccaagagcggcggcaagagggtgtttgacagcgccaacgtggccgtgcccccaggcatctatgacatctacagccagcagcagatgattgagcagctgagccagctgatcacagaccacctgcagatccagcgctggctgttcaagatggattctgagttcagaggaaatggaacagccttctgtgacatccccagctacctgaagtgctacaagtgggtgctgaaggagagcagccgctatggcctggaggactggaggaagaagtgggcccaggagcccgccctggtgaagatcagcgaggagctggccggcatcctggcccagcacgcccagcctgtgaatgagaagcgcttccccacctggaggaagttcctgcagaccttcctgagccagggcggcgtgattgaggccttccccccagctgacaacgtgaccaacctgactgtggacatgctgattgagcccaacgggaagatctctgtgctgagcactggagaccagctgcacgccgagagccccttcatcagcagcggcaccaccgtgccccagacctctgtggacccccaggtgctgacctacctgtgcctgcagatcggcaaggcctgcaggatgagagatgtggtgggctacttcagcattgacctggtgaccttcatcgaccccagcaccctggagcagcaggtgtgggccaccggcctgaacctggcctacagcgaccagctggccctgacccagctgaccctgtacctgaccaacggccacctggactgcagcctgagcaccctggaggtgcccaggtttgtgcccaaggagaggaagaagaccaagtgcatgtctgccctgtccatgcccatgctggccaccagccgctatgctgtgatgaccacccagctgcggcacagcaacctgagcctggtgttccactacgtgttcctgcagatctgccgggcccacggcatcggctatgatgtggaggagcggcagggcaccgtcttcatcctgtatgagcacctgaagaggcacaagctgggcatgctgaccatcggggaggacctgcagggcgtgctgatgacctttgcccggcacctgttcatcatccaccaggagatcagcgcccccaacatgcagggcgagaccaacttcaagaccaccatcgctgacatcgagaccatcctgcgggtgaccaaggagaacaagatgagatttgaggaggagcagcagagcaaggatgacaagaacctgagcaagcccaagaagtag

SEQ ID NO: 29841 - DNA, 3084 bp, Artificial Sequence
  derived and/or modified sequence
atggcccagaacaccgagaaccacgaccccgtgggcagcatcctgatccagatccatgaggatttgtatcagctgaaagagaaacttacaaagttttctcccgaggagaagggggagaccctggatattcagtctttggaaactgccattaagagaacggaagtcggcctccggatccatatcgagaagtatctaaacgtggtgaaccagaacgtgctcaccacaagcgtaaacgacgaatcgctgtacacacctcaagcttctaagtggcttctgccaaccgtgatagatcagaagagcttcatttttccccaggaaagtgaaggcactttttggcaacctcagcgccaacatagcagctctctacccgtgtttcctagggcaaaaattaaggtgagtaagctgattaagggatccaacataagctcgctaaccgtgctgccttcatcacactgcacggatccttacttcacccctattccagtgttgcaggccgacgcacacaaggggatactgtctatgattgaacgggggctgataccacccacggctcgcattacctttcagaacccaccaattacccccagggccgctcctctgcactcatttgatgaagccaggaaaattccaaccgttgccaccttcaccattcctagagagccaccgccatcgcccgctgaggtcaaatttttccccaagaagcagagatctaagggaaaatctcgtaggagccgcggtcatcacgatagaaaggccatgaaggtgaagacccctttgcgagccctcaaatcactatgggactatgatttcctcatatacgacggtgttattgataataccgcacccgacttcttggctttcaaggagcatttctccctggcttgggggggcattttttcactactggaacatgtcgagaaattcttgaggaattacgcgattccagaggttaagatcaaggggaataacctggtcgccttactgcccgagttcgaactaacgaacaagctcaccagatatgacttgctgtccgtccttgaagaccctgcccatgtgcagatgctcattaatctccccggacaaagatacaagggtcaggacggcaactctgaggccgcaatgaaaatccaagccacctggaaatgttacaaagctcggaagttcttcctgttttaccgccagcagaagtgggctagcggtgtcatagccatcgcgtggttactgtactgtcacaaaactcggctcaagaaaattctgaaggagagccggcaaaggcatctggagaatttcaggataagggctaagcacttggctgcaaattggaatcggatcagaacctctcgtaggaccattatacatatccccagccttgggtattcgcaacctgttcgggagcacatcgctgacttcaacacccagcagaacatgcagcttgggcgactctgtgacatattagatgcaaatgtgaacgtgatatacatatgttcccatcacatgaatgatgaattggtgctttactataagaaaattctatctttgcacgccgcagtgaagtcgggcaaccttgaggatcggtcagacttacaggataggttcaagatcatcacccccgaggccgtgaatatattcccaaaacaccatatgtgtctggcaacacatttaatgtacagcccaaaggctattaagaggattaaaaatctaattaggggtaccgaagcctacatagtcagtgggctcctgcatcgggacgaccttgccgtggctgacatgttggacattcccatccttgggagcgagcccgagctcgcacatctgtactcgactaagtctggtggaaagagggtgttcgattccgcaaacgtcgcagtaccacctggtatttatgacatatacagtcagcagcagatgattgaacagctgagtcaattgatcacagatcatcttcaaattcagaggtggctcttcaaaatggacagcgagtttaggggcaacgggacggcgttctgcgacataccaagttatcttaagtgctacaagtgggtgttgaaagagtcttcgcgttacggattggaggattggcggaaaaagtgggcacaggagcccgcactggtcaaaatcagtgaggagcttgccgggatcttggcacagcatgcccagccggtgaacgaaaagcgcttccctacgtggcgtaagtttttgcagacctttctttcacagggaggagtgatcgaggcctttccccctgcagataatgtcaccaaccttactgtagacatgctgatagagcccaatgggaagatctctgtgctgtccaccggagatcagttacatgcggaaagcccattcataagttctgggaccaccgtgccacagacaagtgttgacccacaggtccttacatacctctgcttacagattgggaaggcttgccgcatgagggatgtcgtgggatacttttcaattgatctggtgaccttcattgatccaagtacattggaacagcaggtctgggcaacagggctcaacctggcctacagcgaccaactggcgcttactcagctcacactttacctgactaacgggcaccttgattgctctctgagtactctagaggtcccaaggttcgtgcctaaggagaggaagaaaacaaagtgcatgtccgctctgtccatgcctatgctggccacttcaagatacgctgtgatgacgacccagctgcgccacagcaatctcagcctcgtatttcactacgtttttctgcagatctgccgggcccatggcatcggctacgatgtggaggaacgtcagggaactgtatttatcctatatgaacaccttaaacggcataagcttgggatgttaaccatcggggaggacttgcagggcgttctgatgactttcgctaggcaccttttcatcatccaccaagaaatttctgcccccaacatgcagggggagaccaatttcaagaccaccattgctgacattgagactattctgcgggtgaccaaagagaataagatgcggtttgaggaggaacagcagtccaaagacgataagaacctgagcaagcctaaaaaatag

SEQ ID NO: 29842 - DNA, 3084 bp, Artificial Sequence
  derived and/or modified sequence
atggcgcaaaacaccgagaaccacgacccagtgggcagcatattgattcagatccatgaagacctttatcagttaaaagagaaacttactaaattttctcctgaagagaagggagagaccctggacatccaatctttggagactgccattaagagaacagaggtcgggctgcgtatccatatcgaaaagtatctgaacgtcgttaatcagaacgtgcttaccaccagcgtgaacgatgaaagtctgtatacacctcaagcctcgaagtggctgcttcctacagtcatcgaccaaaaatcttttatttttcctcaagaatcggaaggaactttctggcagccacaacgacagcatagttcatcccttccagtgtttccaagggccaagattaaagtgagtaaactcatcaaaggaagtaacatttcatccctgactgtcttacctagctctcactgtactgacccttacttcacaccaattccagtgttgcaggctgatgcgcataaaggcattctctccatgattgagagggggttgataccgccaactgcccgtatcacattccagaacccacctatcacgccgcgagctgctcccttacatagttttgacgaggctcgaaagatccccaccgtggccaccttcaccatccccagggagcctcccccttcgccagcggaggtcaaattcttccctaagaagcagcgttccaagggaaagagcaggcggagccgaggtcatcatgacagaaaggccatgaaggttaaaaccccgctcagggccctcaagtctctgtgggattacgacttccttatttatgacggcgtgattgataatactgccccagacttcctagctttcaaggaacacttttccctcgcctggggtggaatcttctccctgcttgaacacgtcgaaaagttcctacgcaactacgccattcccgaggtaaagattaagggaaataatctcgttgcgctcttaccagaatttgagcttacaaacaaattaacacgctatgaccttctgtctgtgctggaagatcccgctcatgtccagatgcttataaaccttccagggcagcgctacaagggacaagacggaaacagtgaggctgcaatgaagattcaggccacttggaagtgctacaaagctagaaagttttttttattttatcggcaacagaagtgggccagcggagtcattgcaattgcctggctgttgtattgtcacaagacacgcctcaagaaaatcctcaaggagagccggcagaggcatttagagaattttcgaatcagagctaagcacctggcagctaattggaatcgcattcgtacgtctagacgcacgattattcacataccatctcttggatattcacagcccgtgcgtgaacatatagccgatttcaacacccagcagaatatgcagctgggcagactttgtgatatccttgacgccaatgtgaatgtgatctacatctgtagtcaccacatgaatgacgaattagtgctctactataaaaagatactctcgctgcacgctgctgtgaaaagcggcaatctcgaggataggtcagatctccaagatcggtttaaaattatcactcccgaggctgtgaatatctttccgaagcatcatatgtgcctcgccacccacctgatgtacagccccaaggctattaaacggatcaagaatcttattagaggcaccgaagcatacatcgtgtccggtctactccatcgcgatgatttggccgtggccgatatgctggatattcccatccttgggtccgaacctgagctggcacatctgtattctacaaaatcaggcggaaagcgtgtctttgattccgccaatgtggcggtccctcctgggatctacgatatctacagtcaacaacaaatgattgagcaactgagccagctgattaccgatcatctccagatacagcggtggctgtttaagatggattcagagtttcgcggtaatggcacggcgttctgtgacattcccagctatctgaagtgctacaagtgggtactcaaggagagctccagatacggccttgaggactggaggaagaaatgggcccaggagcccgctcttgttaagatctctgaggaactggctggtatacttgcccagcatgcccagcccgtaaatgaaaagcgtttccccacctggagaaagttcctccaaacattcctgtctcagggcggtgtcatcgaagccttcccgccagcggataatgtgaccaaccttaccgtggacatgctaatagagcccaatggcaaaataagcgtcctgagtacaggcgatcagttgcatgcggagagtccatttattagcagcgggacaacggtcccccaaacttcagtggatcctcaagtcctgacttatttatgcctacaaatcgggaaggcctgccggatgagggacgtcgttgggtacttttccatcgatctagtcacatttatcgaccccagcacactggaacagcaggtttgggctacaggactgaacttagcgtattcagaccagctcgcactcacccaactgactctgtacttgaccaacggccatctggattgttccttgagcacactggaggtcccccgatttgtgccgaaagagagaaaaaagactaaatgcatgagtgccctgagtatgcctatgttggcaaccagccggtatgccgtgatgacaacccagcttcgccacagcaatctctcgctcgtttttcattatgtttttcttcaaatatgccgcgctcacggtatcggctatgatgtggaggaacgccagggaacagtatttatcttgtacgaacacttgaaacgtcataagctggggatgctgacgatcggcgaggatttacagggagtgctgatgactttcgctcggcatcttttcatcatccatcaggagatctctgctcctaatatgcagggtgaaacaaacttcaaaactactattgccgacatcgaaactatcttgcgggtgactaaagaaaataagatgagatttgaagaggaacagcagtccaaagacgacaaaaacttgtctaaacccaagaaatag

SEQ ID NO: 29843 - DNA, 3084 bp, Artificial Sequence
  derived and/or modified sequence
atggcccagaacaccgagaaccacgaccccgtgggcagcatcctgatccagatccacgaggacctgtaccagctgaaggagaagctgaccaagttcagccccgaggagaagggcgagaccctggacatccagagcctggagaccgccatcaagagaaccgaggtgggcctgagaatccacatcgagaagtacctgaacgtggtgaaccagaacgtgctgaccaccagcgtgaacgacgagagcctgtacaccccccaggccagcaagtggctgctgcccaccgtgatcgaccagaagagcttcatcttcccccaggagagcgagggcaccttctggcagccccagagacagcacagcagcagcctgcccgtgttccccagagccaagatcaaggtgagcaagctgatcaagggcagcaacatcagcagcctgaccgtgctgcccagcagccactgcaccgacccctacttcacccccatccccgtgctgcaggccgacgcccacaagggcatcctgagcatgatcgagagaggcctgatcccccccaccgccagaatcaccttccagaacccccccatcacccccagagccgcccccctgcacagcttcgacgaggccagaaagatccccaccgtggccaccttcaccatccccagagagcccccccccagccccgccgaggtgaagttcttccccaagaagcagagaagcaagggcaagagcagaagaagcagaggccaccacgacagaaaggccatgaaggtgaagacccccctgagagccctgaagagcctgtgggactacgacttcctgatctacgacggcgtgatcgacaacaccgcccccgacttcctggccttcaaggagcacttcagcctggcctggggcggcatcttcagcctgctggagcacgtggagaagttcctgagaaactacgccatccccgaggtgaagatcaagggcaacaacctggtggccctgctgcccgagttcgagctgaccaacaagctgaccagatacgacctgctgagcgtgctggaggaccccgcccacgtgcagatgctgatcaacctgcccggccagagatacaagggccaggacggcaacagcgaggccgccatgaagatccaggccacctggaagtgctacaaggccagaaagttcttcctgttctacagacagcagaagtgggccagcggcgtgatcgccatcgcctggctgctgtactgccacaagaccagactgaagaagatcctgaaggagagcagacagagacacctggagaacttcagaatcagagccaagcacctggccgccaactggaacagaatcagaaccagcagaagaaccatcatccacatccccagcctgggctacagccagcccgtgagagagcacatcgccgacttcaacacccagcagaacatgcagctgggcagactgtgcgacatcctggacgccaacgtgaacgtgatctacatctgcagccaccacatgaacgacgagctggtgctgtactacaagaagatcctgagcctgcacgccgccgtgaagagcggcaacctggaggacagaagcgacctgcaggacagattcaagatcatcacccccgaggccgtgaacatcttccccaagcaccacatgtgcctggccacccacctgatgtacagccccaaggccatcaagagaatcaagaacctgatcagaggcaccgaggcctacatcgtgagcggcctgctgcacagagacgacctggccgtggccgacatgctggacatccccatcctgggcagcgagcccgagctggcccacctgtacagcaccaagagcggcggcaagagagtgttcgacagcgccaacgtggccgtgccccccggcatctacgacatctacagccagcagcagatgatcgagcagctgagccagctgatcaccgaccacctgcagatccagagatggctgttcaagatggacagcgagttcagaggcaacggcaccgccttctgcgacatccccagctacctgaagtgctacaagtgggtgctgaaggagagcagcagatacggcctggaggactggagaaagaagtgggcccaggagcccgccctggtgaagatcagcgaggagctggccggcatcctggcccagcacgcccagcccgtgaacgagaagagattccccacctggagaaagttcctgcagaccttcctgagccagggcggcgtgatcgaggccttcccccccgccgacaacgtgaccaacctgaccgtggacatgctgatcgagcccaacggcaagatcagcgtgctgagcaccggcgaccagctgcacgccgagagccccttcatcagcagcggcaccaccgtgccccagaccagcgtggacccccaggtgctgacctacctgtgcctgcagatcggcaaggcctgcagaatgagagacgtggtgggctacttcagcatcgacctggtgaccttcatcgaccccagcaccctggagcagcaggtgtgggccaccggcctgaacctggcctacagcgaccagctggccctgacccagctgaccctgtacctgaccaacggccacctggactgcagcctgagcaccctggaggtgcccagattcgtgcccaaggagagaaagaagaccaagtgcatgagcgccctgagcatgcccatgctggccaccagcagatacgccgtgatgaccacccagctgagacacagcaacctgagcctggtgttccactacgtgttcctgcagatctgcagagcccacggcatcggctacgacgtggaggagagacagggcaccgtgttcatcctgtacgagcacctgaagagacacaagctgggcatgctgaccatcggcgaggacctgcagggcgtgctgatgaccttcgccagacacctgttcatcatccaccaggagatcagcgcccccaacatgcagggcgagaccaacttcaagaccaccatcgccgacatcgagaccatcctgagagtgaccaaggagaacaagatgagattcgaggaggagcagcagagcaaggacgacaagaacctgagcaagcccaagaagtag

SEQ ID NO: 29844 - protein, 124 aa, Artificial Sequence
  derived and/or modified sequence
MWKGCLTLYTGRGGELQKIGEFCMVYSEVPNFSEPNPDYRGQQNKGAQSEQKNNSMNSNMGTGTFGPVGNGVHTGPESREHQFSHAGRSNGRGLINPQLQGTASNQTVMTTISNGRDPRRAFKR

SEQ ID NO: 29845 - protein, 204 aa, Artificial Sequence
  derived and/or modified sequence
MNRVNDPLIFIRDIKPGLKNLNVVFIVLEIGRVTKTKDGHEVRSCKVADKTGSITISVWDEIGGLIQPGDIIRLTRGYASMWKGCLTLYTGRGGELQKIGEFCMVYSEVPNFSEPNPDYRGQQNKGAQSEQKNNSMNSNMGTGTFGPVGNGVHTGPESREHQFSHAGRSNGRGLINPQLQGTASNQTVMTTISNGRDPRRAFKR

SEQ ID NO: 29846 - DNA, 615 bp, Artificial Sequence
  derived and/or modified sequence
atgaaccgggtgaatgacccacttatttttatccgggatatcaagccaggcttgaagaatctaaatgttgtgttcattgtgctcgaaatcggaagggttactaaaaccaaagacggccatgaagtaagatcatgcaaagtagcagataaaacaggtagcataactatttccgtgtgggacgagattggggggctgatacaaccaggagatatcattcgtctcaccagagggtatgcatcaatgtggaaggggtgtctcaccctgtacactggcaggggcggagagctgcagaaaatcggggagttctgcatggtgtacagtgaagtgccaaatttcagtgagccaaatcctgactacaggggtcagcagaataaaggagcccaatcagagcagaagaacaattccatgaattccaacatgggaaccggaacattcgggccggtcggaaacggggtccataccgggccggagagccgggagcaccaattctcccatgccggccgcagcaatggcaggggcctcatcaacccccagttgcagggtactgcctcaaatcagacagtaatgactaccatatctaacggcagggatccaaggagggcatttaagagatag

SEQ ID NO: 29847 - DNA, 615 bp, Artificial Sequence
  derived and/or modified sequence
atgaacagagtgaatgaccccctcatcttcatccgggacatcaagccaggcctgaagaacctgaatgtggtgttcatcgtgctggagatcggccgggtgaccaagaccaaggatggccacgaggtgcgcagctgcaaggtggccgacaagacaggcagcatcaccatctctgtgtgggatgagatcggcggcctcatccagcccggggacatcatccggctgacccggggctacgcctccatgtggaagggctgcctgaccctgtacacaggccggggcggggagctgcagaagattggagagttctgcatggtgtacagcgaggtgcccaacttcagcgagcccaacccagactaccggggccagcagaacaagggggcccagagcgagcagaagaacaacagcatgaacagcaacatgggcaccggcacctttggacctgtgggcaatggagtgcacacaggccctgagagccgggagcaccagttcagccacgccggccgcagcaatggccggggcctcatcaacccccagctgcagggcacagccagcaaccagacagtgatgaccaccatcagcaatggccgggacccccggcgggccttcaagaggtag

SEQ ID NO: 29848 - DNA, 615 bp, Artificial Sequence
  derived and/or modified sequence
atgaaccgggtgaacgaccccctgatcttcatccgggacatcaagccagggctcaagaatctgaacgttgtgtttattgtgttggaaatcggtagagttacaaagacaaaagacgggcatgaggttaggagctgtaaggtggccgacaagacgggtagcataaccatctcagtttgggatgagatcggcggcctgattcaaccaggcgatattattcgtttaactcgcgggtatgctagtatgtggaagggctgtctaaccctgtatacaggtaggggcggagaattgcagaagattggagaattttgcatggtgtactccgaagtgcctaattttagcgagcctaaccccgattaccgaggccagcagaataaaggggcccagagtgagcagaagaacaactcaatgaattcaaatatgggaaccggtaccttcggcccggtcgggaatggggtgcatactggacccgaatcacgagagcatcagttttcacatgccggtcgctctaacggtcgtgggctgatcaatccccaattgcagggcacagccagcaaccagactgtcatgacgacaatctcgaacgggagggatccccgtcgggcattcaagaggtag

SEQ ID NO: 29849 - DNA, 843 bp, Artificial Sequence
  derived and/or modified sequence
ccttcccggagcccgggacaggctgggcgcgcgcccgtgtgagtgagcgggactcagggcagaagtgtcccctcactgcgtttttttttccttttatccaaagaacggggcagttagtacgcttgccttcctgtcgcccggttgggagcggggttggtgtgcggagtggttcgcctttttttctttagaacttgacgcgtgaccaaaaccaaagacggccatgaagtgagatcgtgcaaagtagcagataaaacgggcagcatcactatttccgtgtgggatgagatcggaggtcttatacagccaggggatattattcggttgaccagagggtatgcatccatgtggaaaggatgtctgacactttatactggaaggggtggtgaacttcaaaaaattggggaattttgtatggtttattcagaagtgccaaatttcagtgaacccaacccagattatcgaggacagcagaacaaaggggcacagagtgaacagaagaataattccatgaatagtaatatgggtacaggtacatttggaccagtgggaaatggtgttcacactggccctgaatcaagggaacaccagttttcacatgctggcagaagcaatggccggggacttataaatccacaactacaaggaacagctagtaatcaaacagtgatgaccacaataagtaatggcagggaccctcggagagcctttaaaagatgacctatgctaaatactcatgtgtagtttttatactacatgccctacttgaacacttattgcacttttatttattgttaactgtgaaaagtacgtcctttattgggtttccttttatattcttggttt

SEQ ID NO: 29850 - DNA, 3387 bp, Artificial Sequence
  derived and/or modified sequence
agtcgctgtttgggacgctgggtgtgcggtgttctgtctccgctcccgtttcgctgtcacagcccgttccttcccggagcccgggacaggctgggcgcgcgcccgtgacgcgtgaccaaaaccaaagacggccatgaagtgagatcgtgcaaagtagcagataaaacgggcagcatcactatttccgtgtgggatgagatcggaggtcttatacagccaggggatattattcggttgaccagagggtatgcatccatgtggaaaggatgtctgacactttatactggaaggggtggtgaacttcaaaaaattggggaattttgtatggtttattcagaagtgccaaatttcagtgaacccaacccagattatcgaggacagcagaacaaaggggcacagagtgaacagaagaataattccatgaatagtaatatgggtacaggtacatttggaccagtgggaaatggtgttcacactggccctgaatcaagggaacaccagttttcacatgctggcagaagcaatggccggggacttataaatccacaactacaaggaacagctagtaatcaaacagtgatgaccacaataagtaatggcagggaccctcggagagcctttaaaagatgacctatgctaaatactcatgtgtagtttttatactacatgccctacttgaacacttattgcacttttatttattgttaactgtgaaaagtacgtcctttattgggtttccttttatattcttggtttgttaagaagaatggtttgtttttatagcaaaactgttaagctgctcgagtctcctgttgaagaatgggaacactgaaaagtaggggcatttatttttagagtaaaaagattattggatagcctttaaaaaacctgcacccatttcatgggtgagttacttaagacatcagctttatagcctctatgagtctatcttctgtataagttttgtaatatttaacataaggcttaatgggagatgttcttttgtcttgtattcagatattgccaactaaagcaataaccatcaaaaaacacaagaacttgtcaatgctagcagtaatttttgagtgtttgtggctctcggaatgattgacttcgttcagtgactactattaagattttccaaggactgactcatcccaaatttttgttgtattaccaaaaaaacagattccttatcagaatttggaatagaatgtgatctctattgcaacaagtaattttaaaagaaagctacatttattttagagtagtgctcctaacatgtattatcaactttgtggattacattggaggaaaatttaaaactggggccttgaatatttattttttgaaactaccatgttaaatactgaagtataatttgggggagttataaagttatgataaacattcatctgattattttaaacaatagttgtggtagataaacatactggaggtgagtcaaattgaattcatatagtaacatgcagtctgaagtcctagttacttaataggtactcagcctggagtgaaaatcctgggtactgactttgagaggagtgagtgtgcatgttgtcaaagtttctgaacacagttcacatagccttattagcaaaagttttaagaaatggctctatcaaagaagcaattgcagctttattcagaaatataaaagtggaatttatgtacatgtcataagtggtacccacttcccctttttactgtagggtggataactcttaggatttaactctttgaatattatctcttgaataaagcatgtgttaatgttaacaaacctacgtaatttttgccctttcaatgacttacagtggagagccagtacatcttaactactgttgtagtgatggtatcaacctcatggttacttagctctgcatttgttgctttgttttttttccacttcaaatcacaaaataagtagattttgttttctgaaaactccatagcatttgaatacaaaaagttgtgccagattgtttgccctaattcactgtgtttaacaaatatttcagtacacactatgtattaggcactgtgtggaaagtgttaaggggtagacaaaataccgaataatctccacaagtttatttgtggtctatagtacttttgtaactggggttacaaaaattatagaaatttttttcctttgttcatatgcatattcatgattataatttggctttgtttgtgattaatgttttcttaagattttcacattatagaatacctcaaaagaagttgtctaaggactgggatagagagtatgtttcataaaattgtagatgtttagaatttttaaaaaccctacaaattagtatatgattgttttatataagtaagataggagcaacactttaaattatttgtgggagaatacagcattaaaggtgattttaaaagaaaaaaatttggaattttagaaaatttaaatgctgtcaggtatggaatgctgggcttccaatcctggcctcattgtctcctcacctgtgatgttggatgagttattacacttgaaatgtctttaagccttaggttccacaagtatgaaaacaagtaagtaacagtatcctttctagacttgtttaagatttccatgtaagtaattataatgacttctgacacataataatgtcgtcttataccccaacagtaggaaaaaaatgcagaattcagtatgaaagtattgttaccctttaacacagtggtccccaacctttttggcaccagagaccagtctcctggaagacagtttttccgtgggatcgggggatggttttgggatgaaactgttccacctcaggtcatcagtcattagttagattctcataaggagcgtgcaacctcaatcccttgcatactcatttcacaatagggttcatgctcctatgagaatctaatgccaccactcatctgacaggaggtggagctcaggcagtaagtctccctcgcccgccactcacctgctgggcgttcctgttcctagcaggccagaattgatactgatctaggggttggggacccctgcttaacatgttgagattaaatggagaaagacttaagcttttacttttgtgattgacacttgcttcaataatgtaaccttgttctgtgtttttatcatttattaacaaatttcttttttcttaagggaagcctccaaaatcaaagaaaagtgagttacaatccataatgaatatttgccttaccagcctactggaacacattcatcaagaacttaagaggaagaaagttttctgccttcctccttcctagtgctctcagctatcaactttgaaataagtttaaacaacacctactgaaaacaaaaaccacttagtataaaaatatcccccaccagaa

SEQ ID NO: 29851 - DNA, 1878 bp, Artificial Sequence
  derived and/or modified sequence
cgcccctgtcccgggagggtgggaagctttgaccccgccctgcccactcgcgtctccgcagccgtagccgcgcctgtcccaatatgaatagggtcaacgacccacttatttttataagagatattaagcccggactgaaaaacttaaatgtcgtctttattgtcctggagataggacgcgtgaccaaaaccaaagacggccatgaagtgagatcgtgcaaagtagcagataaaacgggcagcatcactatttccgtgtgggatgagatcggaggtcttatacagccaggggatattattcggttgaccagagggtatgcatccatgtggaaaggatgtctgacactttatactggaaggggtggtgaacttcaaaaaattggggaattttgtatggtttattcagaagtgccaaatttcagtgaacccaacccagattatcgaggacagcagaacaaaggggcacagagtgaacagaagaataattccatgaatagtaatatgggtacaggtacatttggaccagtgggaaatggtgttcacactggccctgaatcaagggaacaccagttttcacatgctggcagaagcaatggccggggacttataaatccacaactacaaggaacagctagtaatcaaacagtgatgaccacaataagtaatggcagggaccctcggagagcctttaaaagatgacctatgctaaatactcatgtgtagtttttatactacatgccctacttgaacacttattgcacttttatttattgttaactgtgaaaagtacgtcctttattgggtttccttttatattcttggtttgttaagaagaatggtttgtttttatagcaaaactgttaagctgctcgagtctcctgttgaagaatgggaacactgaaaagtaggggcatttatttttagagtaaaaagattattggatagcctttaaaaaacctgcacccatttcatgggtgagttacttaagacatcagctttatagcctctatgagtctatcttctgtataagttttgtaatatttaacataaggcttaatgggagatgttcttttgtcttgtattcagatattgccaactaaagcaataaccatcaaaaaacacaagaacttgtcaatgctagcagtaatttttgagtgtttgtggctctcggaatgattgacttcgttcagtgactactattaagattttccaaggactgactcatcccaaatttttgttgtattaccaaaaaaacagattccttatcagaatttggaatagaatgtgatctctattgcaacaagtaattttaaaagaaagctacatttattttagagtagtgctcctaacatgtattatcaactttgtggattacattggaggaaaatttaaaactggggccttgaatatttattttttgaaactaccatgttaaatactgaagtataatttgggggagttataaagttatgataaacattcatctgattattttaaacaatagttgtggtagataaacatactggaggtgagtcaaattgaattcatatagtaacatgcagtctgaagtcctagttacttaataggtactcagcctggagtgaaaatcctgggtactgactttgagaggagtgagtgtgcatgttgtcaaagtttctgaacacagttcacatagccttattagcaaaagttttaagaaatggctctatcaaagaagcaattgcagctttattcagaaatataaaagtggaatttatgtacatgtcataagtggtacccacttcccctttttactgtagggtggataactcttaggatttaactctttgaatattatctcttgaataaagcatgtgttaatgttaacaaacctacgtaa

SEQ ID NO: 29852 - DNA, 615 bp, Artificial Sequence
  derived and/or modified sequence
atgaaccgagtgaatgaccctcttatttttatccgcgacatcaagcctgggttgaagaacctcaacgtggtgttcatcgtgctggagattggaagagtgacaaagacaaaggacggacatgaagttcggtcatgcaaggtggccgacaagactggctcaattactatttctgtctgggacgaaattggtggtttaatccaacccggtgacattattagactgacgaggggctacgcgagcatgtggaagggctgcctaactttgtacactggtcgcggtggggaattacagaagatcggagaattctgtatggtgtacagtgaggttcctaactttagtgagcccaaccccgattatcgtgggcagcagaataaaggagcgcagagcgagcagaagaataacagtatgaactccaatatgggcactgggacttttggaccagttgggaatggggtacatacagggcctgagagccgggagcatcaattttcccacgcaggccgtagcaatggacgcggtttgatcaaccctcagctgcagggtactgcgtcgaatcagaccgtaatgactacaatctccaacggaagggaccccaggagagccttcaagagatag

SEQ ID NO: 29853 - DNA, 615 bp, Artificial Sequence
  derived and/or modified sequence
atgaacagagtgaacgaccccctgatcttcatcagagacatcaagcccggcctgaagaacctgaacgtggtgttcatcgtgctggagatcggcagagtgaccaagaccaaggacggccacgaggtgagaagctgcaaggtggccgacaagaccggcagcatcaccatcagcgtgtgggacgagatcggcggcctgatccagcccggcgacatcatcagactgaccagaggctacgccagcatgtggaagggctgcctgaccctgtacaccggcagaggcggcgagctgcagaagatcggcgagttctgcatggtgtacagcgaggtgcccaacttcagcgagcccaaccccgactacagaggccagcagaacaagggcgcccagagcgagcagaagaacaacagcatgaacagcaacatgggcaccggcaccttcggccccgtgggcaacggcgtgcacaccggccccgagagcagagagcaccagttcagccacgccggcagaagcaacggcagaggcctgatcaacccccagctgcagggcaccgccagcaaccagaccgtgatgaccaccatcagcaacggcagagaccccagaagagccttcaagagatag

SEQ ID NO: 29854 - protein, 422 aa, Artificial Sequence
  derived and/or modified sequence
MAPWPPKGLVPAMLWGLSLFLNLPGPIWLQPSPPPQSSPPPQPHPCHTCRGLVDSFNKGLERTIRDNFGGGNTAWEEENLSKYKDSETRLVEVLEGVCSKSDFECHRLLELSEELVESWWFHKQQEAPDLFQWLCSDSLKLCCPAGTFGPSCLPCPGGTERPCGGYGQCEGEGTRGGSGHCDCQAGYGGEACGQCGLGYFEAERNASHLVCSACFGPCARCSGPEESNCLQCKKGWALHHLKCVDIDECGTEGANCGADQFCVNTEGSYECRDCAKACLGCMGAGPGRCKKCSPGYQQVGSKCLDVDECETEVCPGENKQCENTEGGYRCICAEGYKQMEGICVKEQIPGAFPILTDLTPETTRRWKLGSHPHSTYVKMKMQRDEATFPGLYGKQVAKLGSQSRQSDRGTRLIHSQQASSQR

SEQ ID NO: 29855 - DNA, 1269 bp, Artificial Sequence
  derived and/or modified sequence
atggcaccctggcccccaaagggtttggtgccagcgatgctgtggggactgtccctctttctgaacttgccgggcccaatatggctgcaaccgtcaccaccaccccagtcaagcccacccccacagccccacccgtgtcacacttgtagaggcctcgtggatagcttcaacaagggccttgaaaggacaatcagggacaatttcggaggggggaatactgcctgggaggaggaaaacctgagcaagtataaagactctgagacgcggctggtggaggtcttggaaggcgtgtgctccaaaagcgatttcgaatgccatagactgttggagttaagcgaggagctggtcgagtcttggtggttccacaagcaacaagaggcgcccgacctctttcaatggctgtgttccgatagtctcaagctatgttgcccagccggtacatttggcccctcttgtcttccttgccctggcggtacagagaggccttgcggcggctacggccagtgtgagggcgagggcacgcgcgggggatctggccattgcgattgccaggctggctatggtggggaagcttgcgggcagtgcggcctgggatacttcgaggctgaacgtaacgcttctcatcttgtgtgtagcgcctgctttggcccatgtgcccgttgtagtggccccgaagaaagcaactgtcttcagtgcaagaagggatgggccctccatcatctcaagtgtgttgatatagatgaatgcggaacggagggtgcgaattgtggcgctgaccagttctgtgttaatacagaaggcagttacgaatgcagagattgtgcaaaggcatgtctcgggtgcatgggggcggggcccggccgatgtaaaaaatgctcgccaggttaccaacaggtggggtctaaatgcttggatgtggatgaatgcgaaaccgaggtgtgccccggagagaataagcaatgtgaaaacaccgagggaggctataggtgcatctgcgctgaaggctacaagcaaatggaaggaatctgtgtgaaggaacagatacccggagcattcccgatcctgacagacttgacgcccgagacaactcgccggtggaagctgggcagtcacccacactcgacatatgttaaaatgaaaatgcaaagggatgaagccacattcccaggcctgtatggcaagcaagtagctaaactgggcagccagtccaggcagtcagacagaggtacgaggctgatccattctcaacaggccagttctcagcggtag

SEQ ID NO: 29856 - DNA, 1269 bp, Artificial Sequence
  derived and/or modified sequence
atggccccctggccacccaagggcctggtgcctgccatgctgtggggcctgagcctcttcctgaacctgcccggccccatctggctgcagcccagccccccaccccagagcagccccccaccccagccccacccctgccacacctgccggggcctggtggacagcttcaacaagggcctggagaggaccatccgggacaactttggaggcggcaacacagcctgggaggaggagaacctgagcaagtacaaggacagcgagacccggctggtggaggtgctggagggcgtgtgcagcaagagtgactttgagtgccaccggctgctggagctgtctgaggagctggtggagagctggtggttccacaagcagcaggaggccccagacctcttccagtggctgtgcagcgacagcctgaagctgtgctgcccagctggcaccttcggccccagctgcctgccctgccctgggggcacagagcggccctgtggcggctacggccagtgtgagggggagggcacccggggcggcagcggccactgtgactgccaggccggctatggaggagaggcctgtggccagtgtggcctgggctactttgaggccgagagaaatgccagccacctggtgtgcagcgcctgcttcggcccctgtgcccgctgcagcggccctgaggagagcaactgcctgcagtgcaagaagggctgggccctgcaccacctgaagtgtgtggacattgatgaatgtggcacagaaggagccaactgtggggctgaccagttctgtgtgaacacagagggcagctatgagtgccgggactgtgccaaggcctgcctgggctgcatgggcgccggccctggccgctgcaagaagtgcagccctggctaccagcaggtgggcagcaagtgcctggatgtggatgaatgtgaaacagaggtgtgccctggagagaacaagcagtgtgagaacacagagggcggctaccgctgcatctgtgccgagggctacaagcagatggagggcatctgtgtgaaggagcagatccctggggccttccccatcctgacagacctgaccccagagaccacccggcgctggaagctgggcagccacccccacagcacctacgtgaagatgaagatgcagagagatgaggccaccttccctggcctgtatggcaagcaggtggccaagctgggcagccagagccggcagagcgaccggggcaccaggctcatccacagccagcaggccagcagccagaggtag

SEQ ID NO: 29857 - DNA, 1269 bp, Artificial Sequence
  derived and/or modified sequence
atggccccctggccccccaagggcctggtgcccgccatgctgtggggcctctcactgttcctgaatcttcccgggcccatttggctgcagcctagcccaccacctcagagtagcccaccgccccaaccccacccgtgtcacacatgccgggggttggttgattcctttaacaaaggcctggagcggaccatccgagataatttcggaggcggcaatacagcatgggaagaggagaacctatctaaatataaggactctgaaactcggctggttgaagttctggagggagtgtgctctaaaagcgactttgaatgtcaccgtctcctcgaactttccgaagaactggttgagagctggtggttccacaagcagcaagaagcccccgacctgtttcagtggctgtgcagtgacagcttgaagttgtgttgtcccgcgggcacattcgggccctcttgcctcccgtgtcctggcggtaccgaaagaccttgtggtggatatggccagtgtgagggagaaggcacgaggggaggttccggccattgtgactgtcaggccggctatggtggagaggcttgtggccagtgtggactaggctacttcgaggccgaacgcaacgcctcccacctcgtgtgcagcgcatgcttcggaccatgtgcccgatgcagtgggcccgaggaatccaattgcctgcaatgtaagaagggctgggccctgcatcacctgaagtgtgttgatatcgatgaatgcgggacggagggcgctaactgcggggctgaccagttctgcgttaacacagaggggtcctatgagtgcagggattgtgcaaaagcatgtctgggctgtatgggagcaggccctggacgttgcaaaaagtgcagtccagggtaccagcaggtgggatccaagtgtttagacgtggacgaatgcgagaccgaagtctgtccgggcgagaacaaacagtgcgaaaacaccgagggagggtaccgatgtatttgtgcggagggatataagcaaatggagggcatttgtgtgaaagaacagatccccggggcttttcccatcctgacagacctcaccccggagaccacgaggcgctggaagctgggatcccacccacacagtacctacgtgaagatgaagatgcagcgcgacgaggctaccttccctgggctgtatggaaagcaggtggcgaaacttggcagtcagtctaggcaatctgataggggcaccaggttgattcattcgcagcaggcttcaagtcagcgctag

SEQ ID NO: 29858 - DNA, 1269 bp, Artificial Sequence
  derived and/or modified sequence
atggctccctggcctccaaagggtcttgtgccggcaatgttgtggggcctcagtctgttcttgaaccttcccggtccgatctggctgcagccttcacctcctccccagtcctctccaccaccccagccacatccgtgccatacctgcaggggtctcgtggactcatttaacaaaggcctagaaagaaccattagagacaacttcggtggcggtaatacagcctgggaggaggaaaatctgagcaagtataaggacagcgagaccagactggtcgaggtcctcgaaggtgtgtgttcaaagagcgactttgagtgccacaggctcctagaactctccgaggagcttgtcgaaagctggtggttccacaagcagcaagaagctccagatctctttcaatggctttgctcagatagtctgaaactttgctgtcccgcagggaccttcggtccctcttgtcttccctgtcccggagggactgagagaccctgtggtgggtacggtcaatgtgaaggggaggggactaggggtggtagcggccactgcgactgtcaagccggttacgggggtgaagcctgtggtcagtgtgggctcgggtattttgaggccgagcgaaatgcctctcatctggtgtgcagcgcgtgctttggcccatgtgctcggtgctcaggcccagaggagagcaattgcctgcagtgcaagaagggatgggccctgcatcatctcaagtgtgtagatattgatgagtgcgggaccgagggcgctaactgcggagccgatcagttttgtgtgaacactgagggtagctatgaatgcagggattgcgctaaggcctgtctagggtgcatgggggcaggaccaggccgatgtaagaagtgttccccagggtatcagcaggttggctccaaatgcctggacgttgatgagtgtgagaccgaggtgtgtccaggtgagaacaagcagtgcgaaaatacagaagggggttatagatgtatatgtgcggagggatataagcagatggaggggatatgcgtgaaagagcagatcccaggcgcattcccaattttgaccgacctgactcctgaaaccaccagacgatggaaactgggctctcaccctcactccacctacgtgaaaatgaaaatgcagagagacgaggcaacttttcccggattatacggaaagcaggtggcgaaactaggcagccagtctaggcagagcgacagaggaactcgtctcattcactctcagcaagcctcatcgcagcggtag

SEQ ID NO: 29859 - DNA, 1994 bp, Artificial Sequence
  derived and/or modified sequence
aggagacggcccacggcgcccgcgggctggggcggtcgcttcttccttctccgtggcctacgagggtccccagcctgggtaaagatggccccatggcccccgaagggcctagtcccagctatgctctggggcctcagcctcttcctcaacctcccaggacctatctggctccagccctctccacctccccagtcttctcccccgcctcagccccatccgtgtcatacctgccggggactggttgacagctttaacaagggcctggagagaaccatccgggacaactttggaggtggaaacactgcctgggaggaagagaatttgtccaaatacaaagacagtgagacccgcctggtagaggtgctggagggtgtgtgcagcaagtcagacttcgagtgccaccgcctgctggagctgagtgaggagctggtggagagctggtggtttcacaagcagcaggaggccccggacctcttccagtggctgtgctcagattccctgaagctctgctgccccgcaggcaccttcgggccctcctgccttccctgtcctgggggaacagagaggccctgcggtggctacgggcagtgtgaaggagaagggacacgagggggcagcgggcactgtgactgccaagccggctacgggggtgaggcctgtggccagtgtggccttggctactttgaggcagaacgcaacgccagccatctggtatgttcggcttgttttggcccctgtgcccgatgctcaggacctgaggaatcaaactgtttgcaatgcaagaagggctgggccctgcatcacctcaagtgtgtagacattgatgagtgtggcacagagggagccaactgtggagctgaccaattctgcgtgaacactgagggctcctatgagtgccgagactgtgccaaggcctgcctaggctgcatgggggcagggccaggtcgctgtaagaagtgtagccctggctatcagcaggtgggctccaagtgtctcgatgtggatgagtgtgagacagaggtgtgtccgggagagaacaagcagtgtgaaaacaccgagggcggttatcgctgcatctgtgccgagggctacaagcagatggaaggcatctgtgtgaaggagcagatcccaggtgcattccccatcttaactgatttaacccctgaaacaacccgacgctggaagttgggttctcatccccactctacatatgtaaaaatgaagatgcagagagatgaagctactttcccagggctatatggcaagcaagtcgcaaagctgggatcccaatccagacagtctgaccgtggaacgagactcatacacagtcagcaggcttcttctcagagatgacagaagacgagttggtggtgctgcagcagatgttctttggcatcatcatctgtgcactggccacgctggctgctaagggcgacttggtgttcaccgccatcttcattggggctgtggcggccatgactggctactggttgtcagagcgcagtgaccgtgtgctggagggcttcatcaagggcagataatcgcggccaccacctgtaggacctcctcccacccacgctgcccccagagcttgggctgccctcctgctggacactcaggacagcttggtttatttttgagagtggggtaagcacccctacctgccttacagagcagcccaggtacccaggcccgggcagacaaggcccctggggtaaaaagtagccctgaaggtggataccatgagctcttcacctggcggggactggcaggcttcacaatgtgtgaatttcaaaagtttttccttaatggtggctgctagagctttggcccctgcttaggattaggtggtcctcacaggggtggggccatcacagctccctcctgccagctgcatgctgccagttcctgttctgtgttcaccacatccccacaccccattgccacttatttattcatctcaggaaataaagaaaggtcttggaaagttaaaa

SEQ ID NO: 29860 - DNA, 1269 bp, Artificial Sequence
  derived and/or modified sequence
atggccccctggccccccaagggcctggtgcccgccatgctgtggggcctgagcctgttcctgaacctgcccggccccatctggctgcagcccagcccccccccccagagcagcccccccccccagccccacccctgccacacctgcagaggcctggtggacagcttcaacaagggcctggagagaaccatcagagacaacttcggcggcggcaacaccgcctgggaggaggagaacctgagcaagtacaaggacagcgagaccagactggtggaggtgctggagggcgtgtgcagcaagagcgacttcgagtgccacagactgctggagctgagcgaggagctggtggagagctggtggttccacaagcagcaggaggcccccgacctgttccagtggctgtgcagcgacagcctgaagctgtgctgccccgccggcaccttcggccccagctgcctgccctgccccggcggcaccgagagaccctgcggcggctacggccagtgcgagggcgagggcaccagaggcggcagcggccactgcgactgccaggccggctacggcggcgaggcctgcggccagtgcggcctgggctacttcgaggccgagagaaacgccagccacctggtgtgcagcgcctgcttcggcccctgcgccagatgcagcggccccgaggagagcaactgcctgcagtgcaagaagggctgggccctgcaccacctgaagtgcgtggacatcgacgagtgcggcaccgagggcgccaactgcggcgccgaccagttctgcgtgaacaccgagggcagctacgagtgcagagactgcgccaaggcctgcctgggctgcatgggcgccggccccggcagatgcaagaagtgcagccccggctaccagcaggtgggcagcaagtgcctggacgtggacgagtgcgagaccgaggtgtgccccggcgagaacaagcagtgcgagaacaccgagggcggctacagatgcatctgcgccgagggctacaagcagatggagggcatctgcgtgaaggagcagatccccggcgccttccccatcctgaccgacctgacccccgagaccaccagaagatggaagctgggcagccacccccacagcacctacgtgaagatgaagatgcagagagacgaggccaccttccccggcctgtacggcaagcaggtggccaagctgggcagccagagcagacagagcgacagaggcaccagactgatccacagccagcaggccagcagccagagatag

SEQ ID NO: 29861 - protein, 633 aa, Artificial Sequence
  derived and/or modified sequence
MKAIKKSLTEEEYLYLDFSHQTEGCIFPLHTSVTLFLLSYCDCKIFKICLVVTKEVSRDSSLLRDDLIQDVEIQIISRQELPPIVQNCCLPAVVERSDNFCRAGLAVVLRHIIQKSYEADPLKKELLELLGFKKTCLKACAEVSQWTRLCELTIPLAIENFLRESSDQPPTIPVEILQLEKKLSEPVRVHNDDKLRRQKLKQQKADGVGPPLTKGKAKSKVHTQETSEGLDSSSKSLELKVAFSKLTVQEEPATTNREPSHIRKAKASDLPPLEHVFAEGLYFTLADIVLLPCIHHFLVIISRKFSEKLVEFPLLASWYQRIQEVPGVKTAASKCGIQFLHLPKLLTTSTEQHPNLCEVPGVEEQSDPLFIGGPRPTMAKLMEKGIEVMFSPHPCPTWTLDWNVLPAAVSPKEGKMSSDRALRKQQQLNNLVYVVTNQAKPGDRIVDFCSGGGHVGIVLAHMLPSCQVTLIENKELSLIRAKKRSDELGLSNIWFIQANMEYFTGMFNIGVALHACGVATDMVIEHCIKTRASFVTCPCCYGFIQNTSKFNFPKSEQFKKTLSYKEHMILCRFADQTAVQLPPQRRLIGKQCMCLVDLDRARAAEECGYSVQVISMEPESCSPKNNMIVGVPI

SEQ ID NO: 29862 - protein, 167 aa, Artificial Sequence
  derived and/or modified sequence
MKAIKKSLTEEEYLYLDFSHQTEGCIFPLHTSVTLFLLSYCDCKIFKICLVVTKEVSRDSSLLRDDLIQDVEIQIISRQELPPIVQNCCLPAVVERSDNFCRAGLAVVLRHIIQKSYEADPLKKELLELLGFKKTCLKACAEVSQWTRLCELTIPLAIENFLRESSD

SEQ ID NO: 29863 - protein, 166 aa, Artificial Sequence
  derived and/or modified sequence
MKAIKKSLTEEEYLYLDFSHQTEGCIFPLHTSVTLFLLSYCDCKIFKICLVVTKEVSRDSSLLRDDLIQDVEIQIISRQELPPIVQNCCLPAVVERSDNFCRAGLAVVLRHIIQKSYEADPLKKELLELLGFKKTCLKACAEVSQWTRLCELTIPLAIENFLRESS

SEQ ID NO: 29864 - protein, 40 aa, Artificial Sequence
  derived and/or modified sequence
MKAIKKSLTEEEYLYLDFSHQTEGCIFPLHTSVTLFLLSY

SEQ ID NO: 29865 - DNA, 1902 bp, Artificial Sequence
  derived and/or modified sequence
atgaaggccatcaagaagagcctgaccgaggaggagtacctgtacctggacttcagccaccagaccgagggctgcatcttccccctgcacaccagcgtgaccctgttcctgctgagctactgcgactgcaagatcttcaagatctgcctggtggtgaccaaggaggtgagcagagacagcagcctgctgagagacgacctgatccaggacgtggagatccagatcatcagcagacaggagctgccccccatcgtgcagaactgctgcctgcccgccgtggtggagagaagcgacaacttctgcagagccggcctggccgtggtgctgagacacatcatccagaagagctacgaggccgaccccctgaagaaggagctgctggagctgctgggcttcaagaagacctgcctgaaggcctgcgccgaggtgagccagtggaccagactgtgcgagctgaccatccccctggccatcgagaacttcctgagagagagcagcgaccagccccccaccatccccgtggagatcctgcagctggagaagaagctgagcgagcccgtgagagtgcacaacgacgacaagctgagaagacagaagctgaagcagcagaaggccgacggcgtgggcccccccctgaccaagggcaaggccaagagcaaggtgcacacccaggagaccagcgagggcctggacagcagcagcaagagcctggagctgaaggtggccttcagcaagctgaccgtgcaggaggagcccgccaccaccaacagagagcccagccacatcagaaaggccaaggccagcgacctgccccccctggagcacgtgttcgccgagggcctgtacttcaccctggccgacatcgtgctgctgccctgcatccaccacttcctggtgatcatcagcagaaagttcagcgagaagctggtggagttccccctgctggccagctggtaccagagaatccaggaggtgcccggcgtgaagaccgccgccagcaagtgcggcatccagttcctgcacctgcccaagctgctgaccaccagcaccgagcagcaccccaacctgtgcgaggtgcccggcgtggaggagcagagcgaccccctgttcatcggcggccccagacccaccatggccaagctgatggagaagggcatcgaggtgatgttcagcccccacccctgccccacctggaccctggactggaacgtgctgcccgccgccgtgagccccaaggagggcaagatgagcagcgacagagccctgagaaagcagcagcagctgaacaacctggtgtacgtggtgaccaaccaggccaagcccggcgacagaatcgtggacttctgcagcggcggcggccacgtgggcatcgtgctggcccacatgctgcccagctgccaggtgaccctgatcgagaacaaggagctgagcctgatcagagccaagaagagaagcgacgagctgggcctgagcaacatctggttcatccaggccaacatggagtacttcaccggcatgttcaacatcggcgtggccctgcacgcctgcggcgtggccaccgacatggtgatcgagcactgcatcaagaccagagccagcttcgtgacctgcccctgctgctacggcttcatccagaacaccagcaagttcaacttccccaagagcgagcagttcaagaagaccctgagctacaaggagcacatgatcctgtgcagattcgccgaccagaccgccgtgcagctgcccccccagagaagactgatcggcaagcagtgcatgtgcctggtggacctggacagagccagagccgccgaggagtgcggctacagcgtgcaggtgatcagcatggagcccgagagctgcagccccaagaacaacatgatcgtgggcgtgcccatctag

SEQ ID NO: 29866 - DNA, 504 bp, Artificial Sequence
  derived and/or modified sequence
atgaaggccatcaagaagagcctgaccgaggaggagtacctgtacctggacttcagccaccagaccgagggctgcatcttccccctgcacaccagcgtgaccctgttcctgctgagctactgcgactgcaagatcttcaagatctgcctggtggtgaccaaggaggtgagcagagacagcagcctgctgagagacgacctgatccaggacgtggagatccagatcatcagcagacaggagctgccccccatcgtgcagaactgctgcctgcccgccgtggtggagagaagcgacaacttctgcagagccggcctggccgtggtgctgagacacatcatccagaagagctacgaggccgaccccctgaagaaggagctgctggagctgctgggcttcaagaagacctgcctgaaggcctgcgccgaggtgagccagtggaccagactgtgcgagctgaccatccccctggccatcgagaacttcctgagagagagcagcgactag

SEQ ID NO: 29867 - DNA, 501 bp, Artificial Sequence
  derived and/or modified sequence
atgaaggccatcaagaagagcctgaccgaggaggagtacctgtacctggacttcagccaccagaccgagggctgcatcttccccctgcacaccagcgtgaccctgttcctgctgagctactgcgactgcaagatcttcaagatctgcctggtggtgaccaaggaggtgagcagagacagcagcctgctgagagacgacctgatccaggacgtggagatccagatcatcagcagacaggagctgccccccatcgtgcagaactgctgcctgcccgccgtggtggagagaagcgacaacttctgcagagccggcctggccgtggtgctgagacacatcatccagaagagctacgaggccgaccccctgaagaaggagctgctggagctgctgggcttcaagaagacctgcctgaaggcctgcgccgaggtgagccagtggaccagactgtgcgagctgaccatccccctggccatcgagaacttcctgagagagagcagctag

SEQ ID NO: 29868 - DNA, 2154 bp, Artificial Sequence
  derived and/or modified sequence
aacagatgattccctgattctccagagagattacacacttcgtttgtggctaaggtgacccaatgaaagaagaaaatgaaagccataaagaaaagtcttacagaagaagaatacctgtacctggacttttctcaccaaacagaaggatgcatctttcctcttcatacatctgtaactttatttctgttatcttactgtgactgtaaaatctttaaaatttgcttagttgtcaccaaagaggtgagtagagatagttcactactaagagatgacctgatccaggatgttgaaatacagattatttcaaggcaggagctcccaccaatagtccaaaattgctgtttgcctgcagtagtagaacgatcagacaatttttgtagagcaggacttgctgttgtattgagacacataatccagaaatcctatgaagcagaccccttaaagaaggaacttttggaacttctgggctttaaaaagacttgcttgaaagcctgtgctgaagttagtcagtggaccaggctatgtgaactcaccatccctttggctattgagaattttctcagagaatcttctgaccagcccccaactatacctgtagaaatactacagctagagaaaaagcttagtgagcctgttagagtgcataatgatgataaactccgcaggcagaagctcaagcaacagaaggctgatggagttgggcctccccttactaagggaaaggcaaagagcaaggtccacacacaggaaacatctgaagggttggattcttcatccaagagtctggaactgaaagtggcattctcaaagctcacagtacaggaagaaccagctactaccaacagagagccttctcacatcagaaaagcaaaagcctccgaccttccacctctggagcatgtgtttgcagaagggctttacttcactctggcagatattgtgctcttgccctgtatccatcatttcttggtaattatcagcaggaaattttctgagaagctggtagaatttccattgctagcctcttggtaccagaggattcaggaagtgccaggagtaaaaacagcagcttctaagtgtgggatccaatttctccatttaccaaagttgttgacaacctcaactgaacagcatccaaacttatgtgaagtcccaggtgtagaagagcaaagcgatcctttatttataggaggaccaagaccaaccatggccaagttaatggaaaagggcattgaagtgatgttttctccccacccttgccctacttggactcttgattggaatgttctccctgcagcagtcagcccaaaggaaggtaaaatgtccagtgatcgagctttgaggaagcagcaacagttgaacaaccttgtctatgtggtaacaaatcaggccaaacctggtgacagaattgtggatttctgcagcggtgggggccatgttggaattgtccttgctcacatgctgccatcatgtcaggttacattaatagaaaacaaggaattatcattaattcgtgctaagaagagaagtgatgaactgggtttaagcaacatttggttcattcaagcaaatatggaatattttactgggatgtttaatattggagtagcattgcatgcttgtggagtggcaacagacatggtgattgagcactgtatcaaaacacgggcttccttcgtcacatgcccttgctgttatggtttcattcagaacacctcaaagttcaattttccaaaaagtgaacaattcaagaaaactttatcatacaaggaacacatgattctgtgcagatttgcagaccagacagctgtccagctcccaccccaacgaaggctcataggaaaacagtgcatgtgcttggtggatctggatcgagcaagagctgcagaagaatgtggatactccgttcaagtgatatccatggagccagagagctgctctcccaaaaataacatgattgtgggagtccccatttaaaatgagatattcacatttgatattttgccatccgtcttcacgttggatgcccagtggcattcaggaggttcttggcataactaggaaacagcattagccatcttgaacctattgtgctcaggaaggaaagcaacagggaaatcttggaagtaaaggctccctgcaaagcatcacaaa

SEQ ID NO: 29869 - DNA, 1902 bp, Artificial Sequence
  derived and/or modified sequence
atgaaggccattaagaagagcctgacagaagaggaatatctttatctggatttcagtcaccagactgagggatgcatcttcccactacatacatcagtgaccttgttcttgctctcttactgcgactgcaaaatattcaagatttgccttgtggtgactaaagaagtatctcgtgattcgtctctcctcagggacgacctcatccaggatgtggaaatccaaattatttcaagacaggaactgcctccaatagtccagaactgctgcttgcccgccgttgtcgaaagatctgataatttctgtagggctgggctggcagtggtgctgcgccatattatacaaaagtcctatgaggccgacccactgaaaaaggaactgctggagttacttggtttcaaaaagacatgcctcaaagcgtgtgctgaagtgagccagtggacccgcctgtgtgagctaacaataccgctggctatcgagaacttcctgagggaaagctccgaccagccccctacaatccctgtggagatcttacaactggagaaaaaactctcagaacccgtccgcgttcataacgacgataagctgagaagacagaagctgaagcaacagaaagcagacggtgttggtccaccgttaacaaagggaaaagccaaatcaaaggtgcacacacaggagacttccgagggccttgatagttcctctaagagtctcgagctaaaagtggcgttttctaagctcacggtccaggaggaaccagccactaccaacagggagccgagtcacatccggaaggccaaagcatccgacctgcctccactggagcacgtgttcgccgagggcctctacttcactctggcagatattgtactgcttccttgcattcatcacttccttgtgatcatctcccggaagtttagcgaaaagctagtggagtttcctctccttgcttcttggtaccagcggatacaggaggtgccgggcgtaaagacggctgcttcaaagtgcggcatacagtttctgcatttgccgaagctccttaccactagtaccgagcagcaccccaatctttgtgaagtgcctggcgttgaggagcagtccgaccccttattcattgggggcccccggcctaccatggcgaagctgatggagaaagggattgaggtgatgttttccccccacccctgccccacctggactctcgattggaatgtactccctgctgcggtcagccctaaggagggtaagatgtcgagcgaccgtgccctccgtaagcaacaacaactcaacaacctagtgtacgtcgttacaaaccaagccaaaccaggggaccggatcgtagacttctgcagtggaggtgggcatgtgggcattgtcctggcccatatgctgcctagttgtcaagtgacactgatagagaacaaagaactatcccttatcagagccaagaagcgctcggatgaacttggcttaagtaacatttggtttatccaagccaatatggaatactttactggcatgttcaacattggtgtggctctacatgcttgtggggttgctacagacatggtcatcgagcactgtattaaaactagagcttctttcgtaacttgtccttgctgttatggcttcattcagaatacctctaaatttaacttccccaaatctgagcaatttaagaaaactttgtcatacaaggagcatatgatactttgtagattcgccgatcagacggccgtgcagctacctcctcagcgacggttgattggaaaacaatgcatgtgcttggtggacctggaccgcgcgagggcagccgaggagtgcggctattccgtgcaggtaattagcatggagccagagtcatgttctccaaaaaacaatatgatagtcggcgtaccaatttag

SEQ ID NO: 29870 - DNA, 1902 bp, Artificial Sequence
  derived and/or modified sequence
atgaaagcgatcaagaagagtctgactgaagaagaatatctgtacctcgatttttcacatcagaccgagggatgtatttttcccctgcatacctcagtgacgctgtttttattatcatactgcgattgtaagattttcaagatctgtctcgtggtgaccaaggaagtttcgagggacagtagcctgcttcgcgatgaccttatccaggacgttgaaattcagattatttctaggcaggagcttccacccattgtgcaaaactgctgtctgccagccgtggtggagaggtctgataacttttgtagagctggtctcgcggtggtattacggcacatcattcagaagagctacgaagcagatccactgaagaaggagttactggagctgctgggtttcaagaaaacatgtcttaaggcttgcgccgaggtgtcccagtggactcggctctgtgagttgactattccattagcaattgagaactttctcagagaaagctccgaccagccacccactattcccgtcgagatcctgcagctggaaaaaaagctgtccgagccagttagagttcacaatgatgataagttaagacgccagaagctgaagcagcagaaggccgacggcgtaggacccccattaactaaaggcaaggccaagtctaaggttcacacgcaggagacaagcgaggggctggattcctccagtaagagcttggagctgaaggtggctttttcaaaactgactgttcaggaggagcccgcaaccacaaatagggagccctcgcatatccgtaaagccaaggcctctgatctccctccgcttgagcatgtgttcgccgaaggattgtacttcactctggccgacatcgtccttctgccatgcatacatcattttctggtgataataagccgcaaattcagcgaaaaacttgttgagtttccacttctggcatcttggtatcagagaatccaagaggtcccaggggtgaagaccgcggcatctaaatgcggcattcaattccttcacttacccaagctgttgactacttccaccgagcagcacccgaatctttgtgaagtaccaggcgtcgaagagcagagcgaccctctgttcatcggaggcccccgacccactatggctaagctgatggagaagggtattgaggtaatgttcagcccgcatccgtgccctacctggaccctagattggaatgtactgcccgccgctgtctcccccaaggagggcaagatgagctctgatagagccctgaggaagcagcagcaattgaataacctggtctacgtggttactaatcaggcaaagcccggggaccgtattgtggatttttgttccggcggtggccatgtgggcattgtgttagctcacatgttgccatcctgccaggtgactctcattgagaacaaagaactctctctgattagggctaagaaacgaagcgatgagctcgggctgtccaatatatggttcattcaagctaatatggaatacttcacgggaatgtttaacatcggagtggcactgcacgcatgcggagtcgccactgacatggtgattgagcattgtatcaagacacgtgcctctttcgtgacttgcccttgctgttatggctttatccagaatacctctaagttcaatttccccaagagcgaacagttcaaaaaaacactgtcttacaaagagcacatgatcctctgcaggtttgccgatcagaccgccgttcaactccctccacaacgacggcttataggcaagcagtgtatgtgtctggtcgatttggacagagccagggccgctgaggagtgtgggtactccgttcaggtcatatcaatggaacctgagtcttgcagtcctaaaaataatatgatcgtcggcgttcctatttag

SEQ ID NO: 29871 - DNA, 504 bp, Artificial Sequence
  derived and/or modified sequence
atgaaggcaattaagaagagcctgaccgaggaggagtatctctacctggacttttcccaccaaacagaagggtgtatcttcccactgcacacttcagtgacactgtttctactgagttattgcgactgcaaaattttcaagatttgtctggtagtcactaaggaggtgtctagagatagcagtctcctcagagatgacctgattcaggatgtggaaatccaaattatttctcgacaggaactgccccctatcgtccagaattgctgtctgcccgctgttgtggaaagatctgacaacttctgccgtgccggcctggccgtggtgctcagacacataatccagaagtcatatgaggctgacccactgaaaaaagagttgctcgaattgctcggatttaaaaaaacttgcttgaaagcatgtgctgaggtgtctcaatggacacggctctgcgaactgaccattcctcttgcaattgaaaacttcctgcgggagtcttcagactag

SEQ ID NO: 29872 - DNA, 501 bp, Artificial Sequence
  derived and/or modified sequence
atgaaggcgattaagaagtccctcaccgaggaagagtatctgtatctggatttctcccaccagactgaagggtgcattttccctctacatacttcagttaccctgttcctgctgagctactgtgattgcaaaatctttaagatctgtctcgtggtgacaaaggaggtttcaagggactcaagcctcctccgggacgatctgattcaagacgtcgagattcagattatctcccggcaggaacttccgccgatcgtgcagaactgttgtctgccggcagtcgtggaacggagcgacaatttttgccgagcaggcctggctgtggtccttcgacatatcatccaaaagtcctacgaggctgacccactgaaaaaagaactgctggaattgctcggttttaagaagacatgcttaaaagcttgtgccgaggtctctcagtggacacggctctgtgaattgacaattcccctcgccattgaaaattttttacgagaatcctcatag

SEQ ID NO: 29873 - DNA, 1902 bp, Artificial Sequence
  derived and/or modified sequence
atgaaagctatcaaaaaaagcctgaccgaggaagagtatctctatctggacttttcccatcagactgagggttgcatcttcccactgcatactagtgtcaccctttttctgctttcatattgtgattgtaaaatctttaaaatctgtctggttgtgactaaggaagtgagccgtgatagttcccttctgagggacgacttgatccaggacgtggaaattcaaatcatctcccgccaggagctacctcccatcgtgcagaactgttgcttaccagcggtggtggagagatccgataacttctgtcgggccggtctggctgtggtgctgcggcatatcattcagaagagctacgaagctgacccattgaaaaaggaactgctggagcttctgggattcaaaaagacctgtcttaaggcatgtgcagaggtatcccagtggacaaggttatgcgagctcacaatcccactcgccatcgagaactttcttcgcgaatctagcgaccagccgcctacaatacccgtggagatcctgcaactggagaaaaagctgtcagaacctgtccgcgtgcacaacgatgacaagctccgccgccagaaactgaagcagcagaaagcagatggagtgggccctcccctgacaaagggcaaggcgaaaagcaaggtccatacacaggaaacctccgagggactggatagctctagtaaatccctcgaactcaaagtcgcattttctaagcttactgtgcaggaggaacctgccacaacaaacagagagccctcccacatccgcaaggccaaggccagcgatctgccccctttggagcacgtgtttgcggaaggcttgtacttcacgctggctgacatcgttctgttgccatgcattcaccactttctcgttataatcagtcgcaagttttccgagaagctcgtggaattccccctcctcgcttcttggtatcagaggatccaggaggtgccaggggtcaagacagccgcatctaaatgcggcatacagttcttgcaccttcccaagctactgacaacatccacagagcaacatcctaacctgtgtgaggtccctggcgtggaagaacaatctgatcctctattcatcggcgggccccggcctaccatggcaaaactcatggaaaaaggcatcgaagtcatgttcagcccacacccctgccccacctggactttagactggaatgtgctacccgccgccgtgagcccgaaggaggggaaaatgagctccgaccgcgccctaagaaagcagcagcaactgaacaatttagtttacgtggtcaccaatcaggctaagcccggggaccggattgttgatttctgttcgggcggagggcacgttgggatcgttctcgcccacatgctgcccagctgtcaggtaaccttaatcgagaacaaagagctcagccttataagggccaagaaaagatccgatgaattgggccttagcaacatctggtttatccaggcaaatatggaatactttaccggaatgttcaatataggcgtggcactgcacgcttgtggcgtggccacagatatggttatcgagcattgtatcaagactcgtgcaagctttgtgacctgcccttgctgttacgggtttatccagaatacatccaaatttaactttcccaagtccgaacaatttaaaaagacgctatcctacaaagaacacatgatcttgtgccgattcgccgatcaaacagcagttcagttaccacctcagcgaagactgatcggcaagcagtgtatgtgtctcgtcgacctggatagggcccgagccgccgaagaatgtgggtacagcgtgcaagtgatcagcatggaaccggaatcctgcagccccaagaacaacatgatcgtgggagtgcccatttag

SEQ ID NO: 29874 - DNA, 1902 bp, Artificial Sequence
  derived and/or modified sequence
atgaaggccatcaagaagagcctgacagaggaggagtacctgtacctggacttcagccaccagacagagggctgcatcttccccctgcacacctctgtgaccctcttcctgctgagctactgtgactgcaagatcttcaagatctgcctggtggtgaccaaggaggtgtcccgggacagcagcctgctgagagatgacctgatccaggatgtggagatccagatcatcagccggcaggagctgccccccatcgtgcagaactgctgcctgcctgctgtggtggagaggagtgacaacttctgcagagctggcctggccgtggtgctgcggcacatcatccagaagagctatgaagctgaccccctgaagaaggagctgctggagctgctgggcttcaagaagacctgcctgaaggcctgtgccgaggtgtcccagtggacccggctgtgtgagctgaccatccccctggccatcgagaacttcctgcgggagagcagtgaccagccccccaccatccctgtggagatcctgcagctggagaagaagctgtctgagcctgtgcgggtgcacaatgatgacaagctgcggcggcagaagctgaagcagcagaaggcagatggagtgggcccccccctgaccaagggcaaggccaagagcaaggtgcacacccaggagaccagcgagggcctggacagcagcagcaagagcctggagctgaaggtggccttcagcaagctgactgtgcaggaggagcccgccaccaccaaccgggagcccagccacatcaggaaggccaaggccagtgacctgccccccctggagcacgtgtttgctgagggcctgtacttcaccctggccgacatcgtgctgctgccctgcatccaccacttcctggtgatcatcagcaggaagttcagcgagaagctggtggagttccccctgctggcctcctggtaccagaggatccaggaggtgcctggggtgaagacagctgccagcaaatgtggcatccagttcctgcacctgcccaagctgctgaccaccagcacagagcagcaccccaacctgtgtgaggtgcctggggtggaggagcagagcgaccccctcttcatcggcggcccccggcccaccatggccaagctgatggagaagggcatcgaggtgatgttcagcccccacccctgccccacctggaccctggactggaatgtgctgcctgctgctgtgagccccaaggagggcaagatgagcagtgaccgggccctgaggaagcagcagcagctgaacaacctggtgtatgtggtgaccaaccaggccaagccaggggacagaattgtggacttctgcagcggcggcggccacgtgggcatcgtgctggcccacatgctgcccagctgccaggtgaccctgattgagaacaaggagctgagcctcatccgggccaagaagagaagtgatgagctgggcctgagcaacatctggttcatccaggccaacatggagtacttcaccggcatgttcaacattggagtggccctgcacgcctgtggggtggccacagacatggtgattgagcactgcatcaagacccgggccagctttgtgacctgcccctgctgctacggcttcatccagaacaccagcaagttcaacttccccaagtctgagcagttcaagaagaccctgagctacaaggagcacatgatcctgtgccgctttgctgaccagacagctgtgcagctgcccccccagaggaggctcatcggcaagcagtgcatgtgcctggtggacctggaccgggcccgggctgctgaggagtgtggctacagcgtgcaggtgatctccatggagcctgagagctgcagccccaagaacaacatgattgtgggcgtgcccatctag

SEQ ID NO: 29875 - DNA, 504 bp, Artificial Sequence
  derived and/or modified sequence
atgaaggccatcaagaagagcctgacagaggaggagtacctgtacctggacttcagccaccagacagagggctgcatcttccccctgcacacctctgtgaccctcttcctgctgagctactgtgactgcaagatcttcaagatctgcctggtggtgaccaaggaggtgtcccgggacagcagcctgctgagagatgacctgatccaggatgtggagatccagatcatcagccggcaggagctgccccccatcgtgcagaactgctgcctgcctgctgtggtggagaggagtgacaacttctgcagagctggcctggccgtggtgctgcggcacatcatccagaagagctatgaagctgaccccctgaagaaggagctgctggagctgctgggcttcaagaagacctgcctgaaggcctgtgccgaggtgtcccagtggacccggctgtgtgagctgaccatccccctggccatcgagaacttcctgcgggagagcagtgactag

SEQ ID NO: 29876 - DNA, 501 bp, Artificial Sequence
  derived and/or modified sequence
atgaaggccatcaagaagagcctgacagaggaggagtacctgtacctggacttcagccaccagacagagggctgcatcttccccctgcacacctctgtgaccctcttcctgctgagctactgtgactgcaagatcttcaagatctgcctggtggtgaccaaggaggtgtcccgggacagcagcctgctgagagatgacctgatccaggatgtggagatccagatcatcagccggcaggagctgccccccatcgtgcagaactgctgcctgcctgctgtggtggagaggagtgacaacttctgcagagctggcctggccgtggtgctgcggcacatcatccagaagagctatgaagctgaccccctgaagaaggagctgctggagctgctgggcttcaagaagacctgcctgaaggcctgtgccgaggtgtcccagtggacccggctgtgtgagctgaccatccccctggccatcgagaacttcctgcgggagagcagctag

SEQ ID NO: 29877 - DNA, 4049 bp, Artificial Sequence
  derived and/or modified sequence
atgaaagccataaagaaaagtcttacagaagaagaatacctgtacctggacttttctcaccaaacagaaggatgcatctttcctcttcatacatctgtaactttatttctgttatcttactgtgactgtaaaatctttaaaatttgcttagttgtcaccaaagaggtgagtagagatagttcactactaagagatgacctgatccaggatgttgaaatacagattatttcaaggcaggagctcccaccaatagtccaaaattgctgtttgcctgcagtagtagaacgatcagacaatttttgtagagcaggacttgctgttgtattgagacacataatccagaaatcctatgaagcagaccccttaaagaaggaacttttggaacttctgggctttaaaaagacttgcttgaaagcctgtgctgaagttagtcagtggaccaggctatgtgaactcaccatccctttggctattgagaattttctcagagaatcttctgaccagcccccaactatacctgtagaaatactacagctagagaaaaagcttagtgagcctgttagagtgcataatgatgataaactccgcaggcagaagctcaagcaacagaaggctgatggagttgggcctccccttactaagggaaaggcaaagagcaaggtccacacacaggaaacatctgaagggttggattcttcatccaagagtctggaactgaaagtggcattctcaaagctcacagtacaggaagaaccagctactaccaacagagagccttctcacatcagaaaagcaaaagcctccgaccttccacctctggagcatgtgtttgcagaagggctttacttcactctggcagatattgtgctcttgccctgtatccatcatttcttggtaattatcagcaggaaattttctgagaagctggtagaatttccattgctagcctcttggtaccagaggattcaggaagtgccaggagtaaaaacagcagcttctaagtgtgggatccaatttctccatttaccaaagttgttgacaacctcaactgaacagcatccaaacttatgtgaagtcccaggtgtagaagagcaaagcgatcctttatttataggaggaccaagaccaaccatggccaagttaatggaaaagggcattgaagtgatgttttctccccacccttgccctacttggactcttgattggaatgttctccctgcagcagtcagcccaaaggaaggtaaaatgtccagtgatcgagctttgaggaagcagcaacagttgaacaaccttgtctatgtggtaacaaatcaggccaaacctggtgacagaattgtggatttctgcagcggtgggggccatgttggaattgtccttgctcacatgctgccatcatgtcaggttacattaatagaaaacaaggaattatcattaattcgtgctaagaagagaagtgatgaactgggtttaagcaacatttggttcattcaagcaaatatggaatattttactgggatgtttaatattggagtagcattgcatgcttgtggagtggcaacagacatggtgattgagcactgtatcaaaacacgggcttccttcgtcacatgcccttgctgttatggtttcattcagaacacctcaaagttcaattttccaaaaagtgaacaattcaagaaaactttatcatacaaggaacacatgattctgtgcagatttgcagaccagacagctgtccagctcccaccccaacgaaggctcataggaaaacagtgcatgtgcttggtggatctggatcgagcaagagctgcagaagaatgtggatactccgttcaagtgatatccatggagccagagagctgctctcccaaaaataacatgattgtgggagtccccatttaaaatgagatattcacatttgatattttgccatccgtcttcacgttggatgcccagtggcattcaggaggttcttggcataactaggaaacagcattagccatcttgaacctattgtgctcaggaaggaaagcaacagggaaatcttggaagtaaaggctccctgcaaagcatcacaaatgctttacaatgtgtgattaaaggactgctggtttttatagtgagaatcccctgaagtctcagctgccaaaagaataatactagtggaggttccatcacaggaataacaatttccttctcacttcacaagctcctctgatcttgccaatgtgatgtttaattcaaaacagcgcacttacagcctttattttatacttatttagatattcacatgggaactgaaagtagactcagtggagttttttgttttttatatttttaacaattgtactttttctatcactttaaaaaaatctagtcaggtaattatagtacagttatttttaagctggggttagttgaacttgtatagcatttaatatactccttttaaatatatttctgccaggcatggtggctcatgcctataatcccagcactttgagaggccaaggtgggaggatcatttgagcccaggatatcgagaccagcctgcactacaaaaaaatccaaaaaatgaggtgggaggatcacttgagcccaggaagtcaaggctgcagtgagccttgatagcgccactgcactcctgcctgggaaaatgagacccagactcaaaataaatcaatgaatgaattaataaacaaataaataaataaataaatttcccataaattaccaaatgagattgtcactggttcaaattattaaataattgccataaatttcctattacgggaatgtggaatttggacatacattttaacaataagtacattgattaatacatttaagtttataagtaattattgaggatccagtattttcaagaccttggcctagtttcttttcaattcaaagatgagttgcaaaagacataatgttttgcctatggaagtagatcatctagaagaaaaagattaaagaattagttaagcttttttttttttttttttttgagacagagtttcactcttgttgcccaggctggaattcagtggctcgatcttggctcaccacaacctctgcattctcctgcctcagcctcccgagtagctaggattataggcacctgccaccatgcccggctaattttgtttgtaattttagtagagatggggtttctccatgttggccaggctggtttcgaactcctgacctcaggtgatctacccgcctcagcctcccaaagtgctgaaattacaggcgtgagccacctcacctggccatgttctttatggaatactacaatgtgttgtcacaggatttgttattcagatgtcaatcatttttatttatatatttctgggtaaaacttattagtggtgtgaggagtgcagaatatggaagcttacctaaattctttttctgccagccaacattttaaaagacaaatgatgcatcctttctcaatgctgctaattctttaaattttacatgtcccaatttattccatttgagatttattttaatgttttcaacccctgtgtaacatgtatcatgaggagaaagcactatcattgatcatcactatggattaaaatataggaatattttacagggcagtatgggtgggggtgggagacatattggaatcgtgttttctgggataaaatttttaaaaagaattaatcattagccctgagtattttagtcatttgtgcctatagaaaacaacatgctcttttattgtggactttcttcttttaagtgaggtttaatttatatacaatacaataacagatttttaagtattcatttgagatgttttgacaactgtatatatacatgtaaccatcactggaatcagatatagaatattccccttaaatattgtcaggtaaacacattgagaatattttttccagtctgtggcttacctacttattttcataatgaatgttttacttgtgatgaagatttaacttacccttttactttaatgattaatattttctgtgttctttctaataaattttacgaactctgaggtt

SEQ ID NO: 29878 - DNA, 1902 bp, Artificial Sequence
  derived and/or modified sequence
atgaaggccatcaagaagagcctgaccgaggaggagtacctgtacctggatttctctcaccaaaccgaaggctgtatcttccccctgcacacgtcggttaccttatttctacttagttactgtgattgcaagattttcaaaatttgtctcgtggtcacaaaggaagtgtcaagagatagctcgctgctgagggacgatctcattcaggatgtggagatccagatcatctcacggcaagagctgccacccatcgtgcagaattgctgcctaccagcagtggtggaacgcagcgataatttttgtcgggccggtttagctgtggttctgcggcatatcatccagaagtcatatgaggcggatcctctgaagaaagagctgctggagctactggggtttaaaaaaacttgtctcaaggcctgtgccgaggtgtcacagtggacccggctgtgcgaactgaccatacctcttgccatcgagaatttccttcgtgagtcttccgaccaaccaccaaccatccccgttgaaatcttacaacttgaaaagaagttgtccgaacctgtccgggtccacaatgatgataagctgcgcagacaaaagctgaagcaacagaaggctgacggcgtgggcccacctctcaccaagggcaaagcaaagagcaaggtgcacacccaggaaacgagtgaagggctggattcaagcagcaagtcactagaactaaaggttgccttcagcaagctgacagtacaggaggaacccgccactaccaaccgggaaccgagtcacattcgcaaggctaaagcctccgacttgccacccctagaacacgtgtttgccgaggggctgtatttcacgttggctgacattgtcttgttgccttgcatccaccatttcctagtgataattagtcggaaattttctgagaagctcgtcgagttccccctacttgcgagttggtatcagaggattcaggaagttcccggagttaagacagcagcctctaagtgtgggattcaattcctccacctcccaaagctgctaactacaagtaccgaacagcaccctaacctgtgtgaggttccaggtgttgaggaacagtctgatccactgtttatcggggggccccgacccactatggcgaaactcatggagaaggggatcgaagtgatgttcagcccccacccgtgccctacctggaccctggactggaatgtgttgccagccgcagtgagtccaaaagaggggaaaatgtcctccgatagagctctgcgcaaacaacaacagcttaacaatttggtctacgtggtgacaaatcaggccaaacctggggacagaattgtcgacttctgctcaggtggcggccacgtggggatcgtcttggctcacatgctgccctcttgtcaggtgacgctcattgagaacaaggaattaagtctgatacgagcgaagaaacgaagcgacgagctggggctgagtaacatttggtttatacaggccaacatggagtacttcacgggaatgttcaacatcggagtcgccctgcacgcatgcggagtcgccaccgatatggtgatcgagcactgtataaagacgcgagcaagctttgttacttgcccctgttgttacggtttcatccagaacacaagcaaatttaattttcctaaatccgagcagtttaaaaagaccctctcttataaggagcatatgattctctgccggttcgccgatcagaccgctgtgcagctgccgcctcagaggcgtctgattggtaaacagtgcatgtgtttggtggacttggatagggctagagccgccgaagagtgtggatatagcgtgcaggtaatttccatggagcccgaatcatgttctcctaagaataatatgatagtcggagtccccatctag

SEQ ID NO: 29879 - DNA, 1902 bp, Artificial Sequence
  derived and/or modified sequence
atgaaggccatcaagaagagcctgaccgaggaggagtacctgtacctggacttctcacaccagacagagggctgtatcttcccactccacacaagtgtgaccctgttcttactgagctattgcgactgtaagattttcaaaatctgtttagtggtgacaaaagaagtaagccgggatagctcgctactgcgcgatgatcttatccaagacgtagagatccagatcatttcgcgacaagaactcccaccaatagttcagaactgttgcctgccggctgtggtggagaggagcgataatttctgcagagccggcttggctgtggtcctgagacacataatccagaagagttacgaagcggatcccttgaagaaagaactgctggagctgcttggatttaaaaagacatgcctgaaagcctgcgcggaggtatcacaatggacaagactgtgtgaattaacaatccctctggcaatcgaaaatttcttacgggaatcttctgaccagccaccaactattcccgtcgaaattctgcagctggaaaagaagcttagcgagcccgtcagagtccacaatgacgataagcttaggagacagaaacttaaacagcaaaaggccgatggggtgggtccccccctgaccaagggaaaagccaaatctaaggtgcacacacaagagacctcagagggactggactcatcctcgaagagcctcgagctgaaggttgcgttttcaaagttgactgtgcaggaggaacccgcaacaacgaatcgtgagccctctcatataagaaaagcaaaagcctcagatctgcccccactggagcacgtgttcgcagaaggtctatacttcacccttgcagatatagtgctgctcccatgtatccatcacttccttgtgatcatcagccgtaagtttagtgaaaaactcgttgagtttcctttgctcgcttcttggtaccagcgcattcaggaagtccccggagtgaagaccgccgcaagtaagtgtggcatccagttcttgcatctcccaaagctcctgaccactagcaccgagcagcaccctaatctctgcgaagtgcccggagtggaagagcagtccgacccattgttcatcggaggacctcggcccactatggccaagttaatggaaaaggggattgaggttatgttcagccctcatccgtgcccgacatggactctggactggaacgtactgccggcggccgtttccccaaaagaaggcaaaatgtctagcgatagggctttgcgtaaacagcagcagttgaataaccttgtatacgtagtgacaaaccaagccaagcccggcgaccgcattgtggacttctgcagcgggggcgggcatgttggtattgtgcttgctcatatgttgccttcctgccaggtcacactgattgaaaacaaggaattgtccttaattcgcgcaaaaaaacgaagcgatgaattagggttgtccaatatatggttcattcaggcaaacatggagtactttacaggaatgtttaacattggcgttgccctgcatgcttgtggcgtagccacagacatggtgattgagcactgtatcaaaaccagggcatcattcgtcacctgtccatgctgctatggcttcatccaaaatacctctaaattcaatttccccaagagcgaacaattcaaaaagaccctgagttacaaggagcacatgattttgtgtaggtttgcagatcaaactgccgttcagctgcctcctcagaggcgcctcattgggaagcagtgtatgtgtctcgtggacttagatcgagctcgcgccgcagaggaatgcggctactctgtacaagttatttctatggagcccgaatcctgctcccctaagaacaacatgattgtgggcgttccaatttag

SEQ ID NO: 29880 - DNA, 504 bp, Artificial Sequence
  derived and/or modified sequence
atgaaggccatcaagaagagcctgaccgaggaggagtacctgtacctagacttttcacaccagacggaaggatgcatctttccgctccacacctctgttaccctgtttttgctgtcttattgcgactgtaaaatctttaagatctgcctggtggtgaccaaagaggtgtcccgggacagctccctcctcagagatgacctgatccaggatgtggaaattcagataatttctcggcaagagctgccgcccatcgtccagaactgttgcctcccagctgtcgtggaacgttccgataacttctgccgcgcagggctcgcagtcgtcttacgccacataatccagaaatcgtatgaggcggatccgctcaaaaaagagctgctcgagttgctggggttcaagaaaacttgtctcaaggcctgtgcggaagtgtcgcagtggacacggctctgcgagttgaccatcccattagccatagagaactttctgcgcgagtcaagtgattag

SEQ ID NO: 29881 - DNA, 501 bp, Artificial Sequence
  derived and/or modified sequence
atgaaggccatcaagaagagcctgaccgaggaggagtacctgtacttagacttttctcaccaaaccgaaggatgtatatttcctctccatacatctgttactctcttcttacttagctactgtgattgcaaaatttttaaaatttgccttgtcgtaaccaaagaagtaagtagagactcatctcttctaagagacgatctgatccaagacgtggagatacagattatctccagacaagaattgcccccgatcgtacagaattgctgtctacccgctgtggtggagcgctcggacaatttttgccgggcagggctggccgtggtacttaggcacattatccagaagtcctacgaagcagatcccctcaagaaagagctgctcgagctgctcgggttcaaaaagacatgtctgaaggcgtgtgcagaggtaagtcagtggacgagactgtgcgaacttaccattccactcgctattgagaacttcctgcgcgagagctcttag

SEQ ID NO: 29882 - DNA, 1902 bp, Artificial Sequence
  derived and/or modified sequence
atgaaggccatcaagaagagcctgaccgaggaggagtacctgtaccttgatttttcacaccagaccgaggggtgtatattccccttgcacaccagcgtaactttatttctactatcttactgcgattgtaagatattcaaaatctgcctagtggtaacgaaggaagttagtagagactcttccttactgagggatgatcttatccaggacgttgaaatccagatcatttctaggcaggagcttccacctatcgttcagaattgctgtctccccgcagtcgtggaaaggagcgacaatttctgtcgggccggcctggccgtggtgttaaggcacattattcagaaatcttatgaagcagacccactgaagaaggaattgctggaactgctgggattcaaaaagacctgccttaaggcctgcgcggaagtcagtcagtggacccgcttgtgtgaactgacaatcccccttgccatagagaacttccttcgcgaatcttccgaccagccccctacaattccggtcgagatcctgcagctggagaaaaagttgtctgagccagtgcgagtgcacaatgacgacaagttgcggcgacagaagctcaaacaacagaaggccgatggcgttggcccccccctgacaaaaggcaaggcaaaaagcaaggttcatacgcaggagacatccgagggcctggatagcagttcgaaatcactggagctcaaggtggcctttagcaaacttaccgtccaggaagaacccgccacaaccaatagagaacctagtcatatccggaaggctaaagcttccgatctgccgcctctcgaacacgtgttcgcagagggtctgtattttacgctggctgatatcgtcttgctcccctgtattcatcactttcttgttataatctcacgaaaattctccgaaaaacttgtcgaattcccactcctcgccagctggtatcaacgtattcaggaggttcctggcgttaagacagccgcctccaaatgcggaatacagttcttacacctaccaaagttgttgaccacgtccactgagcagcaccccaatctctgcgaggtgccaggagtggaggagcagtctgaccctctcttcatcggcggtccccgaccaaccatggcaaagctgatggaaaaaggaatcgaagtgatgttttctccacatccctgtccaacttggacgctggactggaacgttttaccagctgcggtgagcccaaaggaagggaaaatgagctcagacagggctctcagaaagcaacagcagctcaataatctggtgtacgtggtgaccaatcaggcaaagcctggtgatcggattgtcgatttttgttctggggggggccacgtgggtatcgtgctagctcacatgctgccatcttgccaggtgactctgattgagaacaaggaactgtcactgattagagccaagaagcgatccgatgagttgggtctgagtaatatatggttcatccaggctaacatggaatactttactgggatgttcaacattggcgtagctctccacgcatgcggagtggccactgacatggtgattgagcattgtatcaagacaagggcctcattcgtcacctgcccctgttgctacggatttatccagaacacatctaagttcaacttcccaaagtctgaacagttcaagaaaaccttatcctacaaggaacacatgatattatgccgctttgctgaccagactgcggtacagctaccgcctcaaagaagacttatcggcaaacaatgtatgtgcctggtcgatttggaccgggcccgagctgctgaggagtgcggttacagcgttcaggtaatttccatggaacctgagtcatgttctccaaagaacaatatgatcgtgggcgttccgatttag

SEQ ID NO: 29883 - DNA, 1902 bp, Artificial Sequence
  derived and/or modified sequence
atgaaagcaattaagaagtctctgacagaagaagaatacctgtacctggactttagtcatcagactgagggctgcattttcccactgcacaccagtgtgaccctgtttcttctgagttattgtgactgtaaaatcttcaagatatgtttggtggtcaccaaagaagtctcccgcgactctagcctgttaagggacgacctgattcaggatgtcgaaatccagatcatcagccggcaggagctgccacctattgtgcagaactgttgcctgccggcagtcgtggaaagatctgataatttttgtcgcgcagggcttgcagtggtgctgcgtcatattatccaaaaaagctacgaggccgaccccctgaaaaaagagcttctagaactgctgggctttaaaaagacctgcctgaaggcctgtgccgaagtgagccagtggactcgcttgtgtgagctgaccattccgttggcaatagagaacttccttagggaaagtagcgaccagccacccaccattcccgtggagatcctgcagctagagaaaaagttgagcgagcctgtgcgggtgcataacgatgacaagctgagaaggcagaagcttaagcaacagaaggcagatggcgtcggcccaccgttaaccaagggcaaagcaaagagcaaagtgcacacacaagaaacttcagaaggccttgattctagttctaagagcttggagttaaaggtggcattctccaagctgactgtgcaggaggagcctgccacaactaatcgggagccaagccatatcagaaaagccaaagcttccgacctgcctcctctcgagcacgtttttgctgaaggactttatttcacgctggctgacattgtcctcctcccttgcatacaccactttctggtcatcattagtaggaaattttcagaaaaactggtggaatttccacttctggcctcttggtaccaacgcattcaggaggtccctggagtgaagacagccgcatccaagtgcggaattcagtttcttcacctgccgaaactcttaactacatcaactgaacagcatcctaatctctgcgaagtcccaggtgtagaagagcagtctgacccgctcttcattgggggtccgaggccaacaatggctaagttgatggagaagggcatagaagtcatgttttccccacacccgtgtcctacatggactctggattggaacgtgcttcccgctgcagttagcccaaaggaagggaagatgagcagcgacagagccctgaggaaacagcagcaactgaataaccttgtgtatgtggtgacgaaccaggctaaacctggggatcggatcgtggatttctgctccgggggtggccatgtcggtattgtcctggctcacatgctcccatcctgccaagtgaccctgatcgagaataaggagctatccctgattcgcgctaaaaagcgatcagacgaacttgggctctccaacatttggtttattcaggccaacatggagtatttcacaggaatgttcaacatcggcgttgcactccacgcttgtggagtcgcaaccgacatggtgatcgagcattgcataaaaactagagcttcctttgtcacctgcccttgctgttacggctttatccagaacacaagtaaatttaattttcctaagtccgaacagtttaaaaaaacactgtcctacaaggaacatatgattctctgtcgcttcgccgaccagaccgcagtacagctgccccctcagaggcggctgatcgggaaacagtgcatgtgcctcgtagacctcgatagggctagagccgcagaagagtgtggctatagcgtgcaggtgatctctatggagcctgagtcatgcagcccgaagaataacatgatcgttggagtgcccatttag

SEQ ID NO: 29884 - DNA, 1902 bp, Artificial Sequence
  derived and/or modified sequence
atgaaagccatcaaaaaatccttgaccgaggaggaatatctgtacctggatttctctcatcagacagagggatgcatcttcccccttcataccagcgtgaccttgttcctgctgtcttactgcgattgtaagatatttaaaatctgcctcgtggtgaccaaagaggtatcacgggattcttctctgctgcgcgacgaccttatccaagacgtcgagatacagatcatatcccgccaggagctgccacccattgttcagaactgttgtctaccggcagtggttgaaagatctgacaacttttgtcgagccggtctggcggttgttctgaggcatataatccagaaaagctacgaagctgatccactgaagaaagaactgctagagctgttaggcttcaagaaaacatgcttaaaggcctgcgccgaggtatcgcagtggactaggctgtgcgagctcaccataccccttgccattgaaaatttcttgagagagtcctcagaccagcccccaacaattcctgtagagattttacagctggagaaaaagttatctgagccagtgagagtgcacaatgacgataaactccggcgacagaaactcaaacaacagaaagcagacggagtgggccctcccctcacgaagggcaaagccaagtcaaaggtgcacacacaggagacttctgaaggcttggactccagcagcaagagcttagagctcaaagtcgctttttcaaaactgactgttcaagaagaacccgctacaaccaaccgcgaaccatcccacattaggaaggcaaaggcgtccgacctcccacccctagaacacgtgttcgcggaagggctctacttcaccctggccgacatagttcttcttccctgcatccaccacttccttgtcattatcagcagaaagttttccgagaaactagttgaattccccttgctggccagttggtatcagcgtatccaagaggtaccgggtgtgaaaaccgctgcatcaaaatgtggcatccaatttcttcatctgccgaaactgcttacaacatctacagagcagcatccaaatctctgtgaagtgcctggggtcgaggagcagagcgatccattgtttatcggaggccctcggccaaccatggctaagctcatggagaaaggtattgaagtgatgttttccccacatccttgcccaacatggactcttgattggaatgtgcttcccgcagctgtgagtcccaaagaaggaaagatgagctctgaccgagccttgcgtaaacagcagcaattgaacaatctggtctatgtcgtaaccaatcaggccaagcctggcgaccgaatcgtggacttctgcagcggcggagggcacgtgggaatcgttctggcacatatgttgccgtcttgccaggtgactctgatagaaaataaggagctctcgttgattcgcgctaaaaaaaggtccgatgagttgggtctgtcaaatatttggttcatccaggccaatatggaatatttcacaggcatgttcaatattggagttgctctgcatgcctgtggagtggcaaccgacatggtgatagagcattgcattaaaacccgggcatcttttgtgacgtgtccatgctgttatgggttcatacaaaatacaagcaagttcaattttccaaaatcagagcagttcaaaaagacactgagctacaaggagcacatgatcctgtgtcgtttcgccgatcaaaccgcagtgcagctgcctccacaacggcgtttaatcggcaagcaatgtatgtgtcttgttgacctggatagagcccgagcagctgaggagtgtgggtatagtgtgcaggtcatctcgatggaaccggagagttgttctcccaaaaataatatgatcgtgggtgtgcccatctag

SEQ ID NO: 29885 - DNA, 504 bp, Artificial Sequence
  derived and/or modified sequence
atgaaagcaatcaagaaatctctgacagaggaggagtacctgtatctggatttttcacatcaaaccgagggctgcatatttccactccacacctccgttacactatttcttctgagttattgcgactgcaaaatctttaagatctgcctggtggtgaccaaggaagtttctcgggattcaagtctgctccgtgatgacttaatccaggacgttgaaattcagattatttcccggcaggaattaccccctatcgtccaaaattgttgcttacctgctgtagtggaaaggtctgataacttttgtcgagctgggctggcagtggtactccggcatattatccagaagtcttacgaagcagaccctttgaaaaaagagctcttagagctgctgggcttcaagaaaacctgtctgaaggcctgcgccgaggtgtcgcaatggacaaggctgtgcgagctgaccatccccttggccatcgagaactttctgagagagagttctgattag

SEQ ID NO: 29886 - DNA, 501 bp, Artificial Sequence
  derived and/or modified sequence
atgaaggccattaaaaaatcactaaccgaggaagagtatttatacctggattttagccatcaaacagagggctgcatcttccccctgcatacatccgtgacactctttctgctgagttactgtgactgcaagatcttcaagatctgcctcgttgtgacaaaagaggtttcgcgcgatagcagcctgcttcgggatgatttgattcaggatgtggagattcagataatttctagacaggagctgcctccaatcgtgcaaaactgttgtttacctgccgtcgttgagagatccgacaatttttgtcgcgctgggttagctgtggttcttcgccacataatccagaaaagctatgaggccgaccctctcaaaaaggagctcttagaactcctcggattcaaaaaaacttgtctaaaagcctgcgccgaggtgtctcagtggacccggttgtgcgaactcaccattcccctcgctattgagaattttttgagggagtcctcttag

SEQ ID NO: 29887 - DNA, 1902 bp, Artificial Sequence
  derived and/or modified sequence
atgaaggctataaaaaaatctcttactgaggaagaatacctctacctggactttagccatcagaccgagggctgtatcttccctctgcacacttcggtaactttgtttttgttgtcctactgtgactgcaagatctttaaaatatgtcttgtcgtaacgaaagaagtcagcagagatagctctctgctgcgggatgatctgatccaggatgtggagatccagataatctcgcgccaggagttgccacctatcgtacaaaattgctgtctgccagccgtggtcgaacgctctgacaacttttgtcgtgccggacttgccgtagttctgaggcatatcatccagaagtcctacgaggccgaccctctgaaaaaggagctgttggagcttctgggtttcaagaaaacttgcctcaaggcctgcgccgaggtcagccagtggacgcgcctatgtgaacttaccatccccctggcgatcgagaacttcctccgtgagtcctccgatcagccaccaacaatacccgttgaaatcctccagctggagaagaaactctcagaacctgttcgagttcacaatgacgacaagctgagacgccagaaactcaaacagcagaaggccgatggagtgggccctcccctaaccaagggcaaggccaagtccaaggtacatacccaggaaactagcgaggggcttgatagttctagcaagtctcttgagttgaaagtggcattttcgaaactgactgtacaggaggaaccggctacaaccaatcgggagccaagccatatccgaaaagctaaggctagtgatttgccgccactcgagcacgtctttgccgaaggcctctattttacactggcagacatcgtgcttctgccctgtatacaccactttctggttattatcagtcgcaagttctcagagaagctggtcgagttccctctcctggcgagctggtatcagcgcatccaggaagtccccggagtgaaaacagctgccagcaagtgcggaatccaattcctccatcttccaaagctgctgactacttcgactgaacagcacccaaacttgtgtgaggtgcccggagttgaggaacagagcgaccccctgttcataggcggtcccaggcccacaatggctaagctgatggagaagggtatagaggttatgttcagccctcatccttgtcccacatggaccctggattggaacgtgctgcctgcagcggtgtcgcctaaggaaggtaagatgagctctgatcgcgctctgcgcaagcaacagcaattaaacaacctggtgtatgtggtgaccaatcaagccaagcctggagaccgcatcgtggacttttgctctggcggaggtcatgtcggcattgttctggcgcacatgctgccttcatgtcaagtgacactaattgagaacaaggaactgagcctcattcgagctaagaaacgcagtgacgagcttggactgagcaatatctggtttattcaggctaacatggaatacttcaccgggatgttcaatatcggagtggcgctgcatgcctgcggagtggctactgatatggttatcgaacattgtatcaaaacaagagcttctttcgtgacatgcccttgttgctacggttttatacagaacacatccaaatttaactttccaaaaagcgaacaatttaagaagacactatcttacaaagaacatatgatcctgtgccggtttgccgatcaaactgcggtccagttgccaccccagcggaggctgattgggaagcaatgtatgtgcctggtcgatctggatcgcgctcgggctgcagaggagtgcggatacagtgtccaggtaattagtatggaacccgaatcctgtagccccaagaacaacatgatcgtgggcgtaccgatatag

SEQ ID NO: 29888 - DNA, 718 bp, Artificial Sequence
  derived and/or modified sequence
acttcgtttgtggctaaggttactgtaagcttttcacttaaaaacttttcctacttctttaccagataagaaaacagctaattttaatcactggcttttgttctctaggacttaactgcatcccatattacgtatttaatgagcttgaaaaaatctcagtgtttttcttatcgtttttgaccctaaatatttaaggtgacccaatgaaagaagaaaatgaaagccataaagaaaagtcttacagaagaagaatacctgtacctggacttttctcaccaaacagaaggatgcatctttcctcttcatacatctgtaactttatttctgttatcttactgtgactgtaaaatctttaaaatttgcttagttgtcaccaaagaggtgagtagagatagttcactactaagagatgacctgatccaggatgttgaaatacagattatttcaaggcaggagctcccaccaatagtccaaaattgctgtttgcctgcagtagtagaacgatcagacaatttttgtagagcaggacttgctgttgtattgagacacataatccagaaatcctatgaagcagaccccttaaagaaggaacttttggaacttctgggctttaaaaagacttgcttgaaagcctgtgctgaagttagtcagtggaccaggctatgtgaactcaccatccctttggctattgagaattttctcagagaatcttctgacc

SEQ ID NO: 29889 - DNA, 578 bp, Artificial Sequence
  derived and/or modified sequence
agatgattccctgattctccagagagattacacacttcgtttgtggctaaggttactgtgacccaatgaaagaagaaaatgaaagccataaagaaaagtcttacagaagaagaatacctgtacctggacttttctcaccaaacagaaggatgcatctttcctcttcatacatctgtaactttatttctgttatcttactgtgactgtaaaatctttaaaatttgcttagttgtcaccaaagaggtgagtagagatagttcactactaagagatgacctgatccaggatgttgaaatacagattatttcaaggcaggagctcccaccaatagtccaaaattgctgtttgcctgcagtagtagaacgatcagacaatttttgtagagcaggacttgctgttgtattgagacacataatccagaaatcctatgaagcagaccccttaaagaaggaacttttggaacttctgggctttaaaaagacttgcttgaaagcctgtgctgaagttagtcagtggaccaggctatgtgaactcaccatccctttggctattgagaattttctcagagaatcttctga

SEQ ID NO: 29890 - DNA, 4273 bp, Artificial Sequence
  derived and/or modified sequence
atgacggccggcgcgagtattttccacataaggtggctgtcgtttttctcctggcgtctgtggaggcgagtggtctgcgggcagcagctcccagaggcagccttggaattccagctcggactgggcgggaaggcgcaggcggcccaggtcgccgacacgctcacgcaccctccctgcctggccgcgcctctgcgaccaggtgacccaatgaaagaagaaaatgaaagccataaagaaaagtcttacagaagaagaatacctgtacctggacttttctcaccaaacagaaggatgcatctttcctcttcatacatctgtaactttatttctgttatcttactgtgactgtaaaatctttaaaatttgcttagttgtcaccaaagaggtgagtagagatagttcactactaagagatgacctgatccaggatgttgaaatacagattatttcaaggcaggagctcccaccaatagtccaaaattgctgtttgcctgcagtagtagaacgatcagacaatttttgtagagcaggacttgctgttgtattgagacacataatccagaaatcctatgaagcagaccccttaaagaaggaacttttggaacttctgggctttaaaaagacttgcttgaaagcctgtgctgaagttagtcagtggaccaggctatgtgaactcaccatccctttggctattgagaattttctcagagaatcttctgaccagcccccaactatacctgtagaaatactacagctagagaaaaagcttagtgagcctgttagagtgcataatgatgataaactccgcaggcagaagctcaagcaacagaaggctgatggagttgggcctccccttactaagggaaaggcaaagagcaaggtccacacacaggaaacatctgaagggttggattcttcatccaagagtctggaactgaaagtggcattctcaaagctcacagtacaggaagaaccagctactaccaacagagagccttctcacatcagaaaagcaaaagcctccgaccttccacctctggagcatgtgtttgcagaagggctttacttcactctggcagatattgtgctcttgccctgtatccatcatttcttggtaattatcagcaggaaattttctgagaagctggtagaatttccattgctagcctcttggtaccagaggattcaggaagtgccaggagtaaaaacagcagcttctaagtgtgggatccaatttctccatttaccaaagttgttgacaacctcaactgaacagcatccaaacttatgtgaagtcccaggtgtagaagagcaaagcgatcctttatttataggaggaccaagaccaaccatggccaagttaatggaaaagggcattgaagtgatgttttctccccacccttgccctacttggactcttgattggaatgttctccctgcagcagtcagcccaaaggaaggtaaaatgtccagtgatcgagctttgaggaagcagcaacagttgaacaaccttgtctatgtggtaacaaatcaggccaaacctggtgacagaattgtggatttctgcagcggtgggggccatgttggaattgtccttgctcacatgctgccatcatgtcaggttacattaatagaaaacaaggaattatcattaattcgtgctaagaagagaagtgatgaactgggtttaagcaacatttggttcattcaagcaaatatggaatattttactgggatgtttaatattggagtagcattgcatgcttgtggagtggcaacagacatggtgattgagcactgtatcaaaacacgggcttccttcgtcacatgcccttgctgttatggtttcattcagaacacctcaaagttcaattttccaaaaagtgaacaattcaagaaaactttatcatacaaggaacacatgattctgtgcagatttgcagaccagacagctgtccagctcccaccccaacgaaggctcataggaaaacagtgcatgtgcttggtggatctggatcgagcaagagctgcagaagaatgtggatactccgttcaagtgatatccatggagccagagagctgctctcccaaaaataacatgattgtgggagtccccatttaaaatgagatattcacatttgatattttgccatccgtcttcacgttggatgcccagtggcattcaggaggttcttggcataactaggaaacagcattagccatcttgaacctattgtgctcaggaaggaaagcaacagggaaatcttggaagtaaaggctccctgcaaagcatcacaaatgctttacaatgtgtgattaaaggactgctggtttttatagtgagaatcccctgaagtctcagctgccaaaagaataatactagtggaggttccatcacaggaataacaatttccttctcacttcacaagctcctctgatcttgccaatgtgatgtttaattcaaaacagcgcacttacagcctttattttatacttatttagatattcacatgggaactgaaagtagactcagtggagttttttgttttttatatttttaacaattgtactttttctatcactttaaaaaaatctagtcaggtaattatagtacagttatttttaagctggggttagttgaacttgtatagcatttaatatactccttttaaatatatttctgccaggcatggtggctcatgcctataatcccagcactttgagaggccaaggtgggaggatcatttgagcccaggatatcgagaccagcctgcactacaaaaaaatccaaaaaatgaggtgggaggatcacttgagcccaggaagtcaaggctgcagtgagccttgatagcgccactgcactcctgcctgggaaaatgagacccagactcaaaataaatcaatgaatgaattaataaacaaataaataaataaataaatttcccataaattaccaaatgagattgtcactggttcaaattattaaataattgccataaatttcctattacgggaatgtggaatttggacatacattttaacaataagtacattgattaatacatttaagtttataagtaattattgaggatccagtattttcaagaccttggcctagtttcttttcaattcaaagatgagttgcaaaagacataatgttttgcctatggaagtagatcatctagaagaaaaagattaaagaattagttaagcttttttttttttttttttttgagacagagtttcactcttgttgcccaggctggaattcagtggctcgatcttggctcaccacaacctctgcattctcctgcctcagcctcccgagtagctaggattataggcacctgccaccatgcccggctaattttgtttgtaattttagtagagatggggtttctccatgttggccaggctggtttcgaactcctgacctcaggtgatctacccgcctcagcctcccaaagtgctgaaattacaggcgtgagccacctcacctggccatgttctttatggaatactacaatgtgttgtcacaggatttgttattcagatgtcaatcatttttatttatatatttctgggtaaaacttattagtggtgtgaggagtgcagaatatggaagcttacctaaattctttttctgccagccaacattttaaaagacaaatgatgcatcctttctcaatgctgctaattctttaaattttacatgtcccaatttattccatttgagatttattttaatgttttcaacccctgtgtaacatgtatcatgaggagaaagcactatcattgatcatcactatggattaaaatataggaatattttacagggcagtatgggtgggggtgggagacatattggaatcgtgttttctgggataaaatttttaaaaagaattaatcattagccctgagtattttagtcatttgtgcctatagaaaacaacatgctcttttattgtggactttcttcttttaagtgaggtttaatttatatacaatacaataacagatttttaagtattcatttgagatgttttgacaactgtatatatacatgtaaccatcactggaatcagatatagaatattccccttaaatattgtcaggtaaacacattgagaatattttttccagtctgtggcttacctacttattttcataatgaatgttttacttgtgatgaagatttaacttacccttttactttaatgattaatattttctgtgttctttctaataaattttacgaactctgaggttataa

SEQ ID NO: 29891 - protein, 409 aa, Artificial Sequence
  derived and/or modified sequence
MWLTWPFCFLTITLREEGVCHLESVDLQQQIMTIIDELGKASAKAQNLSAPITSASRMQSNRHVVYILKDSSARPAGKGAIIGFIKVGYKKLFVLDDREAHNEVEPLCILDFYIHESVQRHGHGRELFQYMLQKERVEPHQLAIDRPSQKLLKFLNKHYNLETTVPQVNNFVIFEGFFAHQHRPPAPSLRATRHSRAAAVDPTPAAPARKLPPKRAEGDIKPYSSSDREFLKVAVEPPWPLNRAPRRATPPAHPPPRSSSLGNSPERGPLRPFVPEQELLRSLRLCPPHPTARLLLAADPGGSPAQRRRTRGTPPGLVAQSCCYSRHGGVNSSSPNTGNQDSKQGEQETKNRSASEEQALSQDGSGEKPMHTAPPQAPAPPAQSWTVGGDILNARFIRNLQERRSTRPW

SEQ ID NO: 29892 - DNA, 1230 bp, Artificial Sequence
  derived and/or modified sequence
atgtggctgacctggcccttctgcttcctgaccatcaccctgagagaggagggcgtgtgccacctggagagcgtggacctgcagcagcagatcatgaccatcatcgacgagctgggcaaggccagcgccaaggcccagaacctgagcgcccccatcaccagcgccagcagaatgcagagcaacagacacgtggtgtacatcctgaaggacagcagcgccagacccgccggcaagggcgccatcatcggcttcatcaaggtgggctacaagaagctgttcgtgctggacgacagagaggcccacaacgaggtggagcccctgtgcatcctggacttctacatccacgagagcgtgcagagacacggccacggcagagagctgttccagtacatgctgcagaaggagagagtggagccccaccagctggccatcgacagacccagccagaagctgctgaagttcctgaacaagcactacaacctggagaccaccgtgccccaggtgaacaacttcgtgatcttcgagggcttcttcgcccaccagcacagaccccccgcccccagcctgagagccaccagacacagcagagccgccgccgtggaccccacccccgccgcccccgccagaaagctgccccccaagagagccgagggcgacatcaagccctacagcagcagcgacagagagttcctgaaggtggccgtggagcccccctggcccctgaacagagcccccagaagagccaccccccccgcccaccccccccccagaagcagcagcctgggcaacagccccgagagaggccccctgagacccttcgtgcccgagcaggagctgctgagaagcctgagactgtgccccccccaccccaccgccagactgctgctggccgccgaccccggcggcagccccgcccagagaagaagaaccagaggcaccccccccggcctggtggcccagagctgctgctacagcagacacggcggcgtgaacagcagcagccccaacaccggcaaccaggacagcaagcagggcgagcaggagaccaagaacagaagcgccagcgaggagcaggccctgagccaggacggcagcggcgagaagcccatgcacaccgcccccccccaggcccccgccccccccgcccagagctggaccgtgggcggcgacatcctgaacgccagattcatcagaaacctgcaggagagaagaagcaccagaccctggtag

SEQ ID NO: 29893 - DNA, 1728 bp, Artificial Sequence
  derived and/or modified sequence
atggagttcccgttcgatgtggacgcgctgttcccggagcggatcacggtgctggaccagcacctgaggcccccagcccgccgacccggaaccacaacgccggcccggtgacagctcaaacccaccctctggcccttttctcccggttcctctccaaacctggtccaggcaccacgcccccttctcactgactagtgatcgccccttttgatgtccaggcctgcctttttggtgacctctgaccctgggcctagtgggattgatcagcgcttggatctgtgacctttcaccccgggcccaaaatgtcccaatcaaaggatgtggttgacctggcctttctgcttcctcacaataaccttaagggaggagggagtgtgccaccttgaaagtgttgatctacagcagcaaattatgaccattatagatgaactgggcaaggcttctgccaaggcccagaatctttccgctcctatcactagtgcatcaaggatgcagagtaaccgccatgttgtttatattctcaaagacagttcagcccgaccggctggaaaaggagccattattggtttcatcaaagttggatacaagaagctctttgtactggatgatcgtgaggctcataatgaggtagaaccactttgcatcctggacttttacatccatgagtctgtgcaacgccatggccatgggcgagaactcttccagtatatgttgcagaaggagcgagtggaaccgcaccaactggcaattgaccgaccctcacagaagctgctgaaattcctgaataagcactacaatctggagaccacagtcccacaggtgaacaactttgtgatctttgaaggcttctttgcccatcaacatcggccccctgctccctctctgagggcaactcgacactctcgtgctgctgcagtcgatcccacgcccgctgctccagcaaggaagctgccacccaagagagcagagggagacatcaagccatactcctctagtgaccgagaatttctgaaggtagctgtggagcctccttggcccctaaacagggcccctcgccgcgccacacctccagcccacccacccccccgctccagcagcctgggaaactcaccagaacgaggtcccctccgcccctttgtgccagagcaggagctgctgcgttccttgcgcctctgccccccacaccctaccgcccgccttctgttggctgctgaccctgggggcagcccagctcaacgtcgtcgcaccagggggactcccccaggtctggtagcccaaagctgctgctacagccgccatgggggggtgaattcctcatcccccaatacaggcaaccaagactccaagcagggagaacaggaaacaaagaataggtctgccagtgaggagcaggccttgtcacaggatgggtctggggagaagcccatgcacacagctcctccacaggccccggccccgccagcccagtcctggacagtgggtggggacatactcaacgccaggttcattcgaaacctgcaggaacgtcgcagcaccaggccttggtgaccgcagccccgtcaaacatcttcaaagtattatttctccctcactacaggaaagagccaaagcccaaccctcataatagatggatacattcattcattcattcattcagcaggcttatcagattcaagtcatttgtatcttttaaccagaccaataaaagtatttatttttatcacaaga

SEQ ID NO: 29894 - DNA, 1230 bp, Artificial Sequence
  derived and/or modified sequence
atgtggctcacctggcctttctgtttccttaccattaccctccgggaggagggtgtctgccacctggagtccgtagatcttcagcagcagatcatgacaattattgacgagcttgggaaggctagtgctaaggcacagaatttaagtgctcctatcaccagcgcatctaggatgcagtctaatagacacgtggtgtacatcctgaaggattccagtgccagacctgcaggcaagggagccatcatcgggttcattaaggtaggctacaagaagttatttgtgctggacgatcgggaagctcataacgaggtcgaacccctgtgtatactagatttttatatccacgaatccgtgcagagacacgggcatgggagagaactctttcagtatatgctgcagaaagagcgtgtggagccacaccaactggccattgaccgcccttcccaaaagctgctgaagtttctgaataaacactataatctggaaaccactgtgcctcaggtcaataatttcgtcatctttgaaggtttttttgcccaccagcacagaccaccagccccctcgcttagggccacacgccactccagggcagctgccgtagaccctacacccgccgcccctgctcggaaactgcccccaaagagagccgagggagatatcaaaccttattcaagctctgatagagaattcctgaaagtggccgtcgagccgccgtggcccctgaacagagcccccagacgtgcaacacccccagcacaccctccaccgagatcatcatcattgggtaactctccagagcgaggaccgctgagaccctttgtgcccgagcaggagctcctgagatcattgaggctttgccctccccatccgacagctcggcttcttctggccgcggatcctggaggatctcccgcacagcgccggaggactcgcggcacccctccagggctggtagcacagtcttgttgctacagccgtcacggaggtgtaaatagcagcagccccaataccgggaaccaagactctaaacagggggagcaagaaaccaaaaatcgttccgcctcggaagagcaagctttgtctcaggatggaagtggcgagaaaccaatgcacacagctccccctcaagcgccggcccctcctgcccagtcctggacagtcggcggggacatcctgaatgctcgattcattcgtaatctgcaggaaaggcgaagcacaaggccttggtag

SEQ ID NO: 29895 - DNA, 1230 bp, Artificial Sequence
  derived and/or modified sequence
atgtggcttacatggccattttgctttctaaccattaccttaagggaggaaggagtatgccacttagagagcgtggacctccagcagcagattatgacaataatcgatgaactcggaaaggccagtgctaaagcacagaatctgagcgcccccattaccagtgctagccggatgcagagtaatcgtcatgtggtgtacatccttaaggattcaagcgcccgtccggcaggcaagggcgctataatcggattcataaaagtaggctataagaaactgtttgtgctggatgaccgcgaagcccacaacgaagtagaacctttgtgtatcctcgacttttacatccatgagtcagtccagcgtcatgggcacggaagggaactgtttcagtacatgctgcagaaggagcgagttgagcctcaccagctagctatcgatcgccctagccagaaactgttgaagttcctgaataaacattacaaccttgaaaccaccgtgccacaggtcaataatttcgttatcttcgagggcttctttgcccatcaacatcgacctccagcccccagcctgagagcaactcgccattcaagagctgcagcagtcgacccgacgcctgcagctcctgccaggaagctgccaccaaagcgggccgaaggcgacataaagccatactcctctagcgatagggaattccttaaggtggcagttgagccaccttggcctcttaaccgcgcaccgcggagggcaacacccccggctcacccacctccccgtagtagctccctcggaaacagccccgaacgcggcccacttcgccccttcgttcccgaacaggaattattgagatcactgcgcctttgtccacctcacccaacagcaaggttgcttctggccgcagatcccggcggcagcccagcacagcgaagaaggacaagaggcactccccctggtcttgttgcacagagctgttgttacagccgccatgggggtgtcaatagttctagtcccaacactggaaatcaggacagcaagcagggcgagcaggagacaaaaaaccggagtgcatctgaagaacaggccctcagtcaggacggctcaggagagaaacccatgcatactgctcccccgcaggcaccggcaccccccgcccagagctggaccgtgggcggagatattctgaacgctcgctttattcggaatctgcaggagagaaggtccacccgaccatggtag

SEQ ID NO: 29896 - DNA, 1230 bp, Artificial Sequence
  derived and/or modified sequence
atgtggctgacttggccattctgcttcctgacaatcactctacgcgaagagggcgtctgtcacctcgaatccgtagacttgcagcagcagattatgacaatcatagatgaactgggcaaagccagcgctaaggcccagaatctgagtgcaccaataaccagcgcttcacgcatgcagtccaatcgtcatgtggtttacatcctcaaggacagcagcgcccgcccagcaggaaaaggggccataattggcttcattaaagtcggatataaaaaactcttcgtcttggacgacagagaggcacacaatgaagtggagccactgtgcatcctggatttttatattcacgaatctgtgcaaaggcacggccatggccgggaactttttcaatatatgctgcaaaaggaacgcgtcgaacctcaccagctggccattgaccggccatcccagaagttattgaagtttctgaacaaacactataacctggaaactaccgttccgcaggttaacaactttgtaatcttcgagggcttcttcgctcatcagcacagaccacctgctccaagcctgcgcgccacgcgtcacagcagagcagcagctgttgatcctacacctgccgctccagccagaaagctaccccctaagcgtgccgaaggggatatcaagccttacagtagctctgacagggaattccttaaagtcgctgtcgaacccccctggcctcttaatagggccccaagacgggccacaccccccgcacaccctccccctcgaagctcatccctgggtaactctcctgagagaggtccactccgcccatttgtgcccgagcaggaacttctccgcagtttgcgtctctgccctccccaccccaccgcaaggcttctactggctgcagacccgggcggatcaccagcccagagacgacgaacacgcggcacccccccgggcctggtggcacagtcttgttgttatagccgccatggaggggtgaattcctcctcaccaaacaccgggaaccaggactctaaacaaggagagcaggagacaaaaaacagaagcgcatctgaggaacaagccctgtcccaggacggctctggtgaaaagccaatgcacacagcccctccgcaggcgcctgcacccccagcacagagttggactgtcggaggcgatatactgaatgcgcggttcattagaaacctgcaggaacgacgatctacacgcccttggtag

SEQ ID NO: 29897 - DNA, 1230 bp, Artificial Sequence
  derived and/or modified sequence
atgtggctcacgtggcctttttgtttcctcacaataactctgcgagaggaaggcgtgtgtcacctggagtctgtggacctccagcagcagatcatgaccatcatcgacgaacttgggaaggcatccgccaaggcgcagaatctctcagcccccatcacatccgcttcgaggatgcagtcaaaccggcacgtcgtgtatattttaaaagacagcagcgctagaccggcagggaagggcgccatcatcggattcattaaggtgggttacaagaagctattcgtgttggacgacagggaagcccacaatgaggtcgagcctctctgcattcttgacttttatatccatgagtccgtgcaaagacatggacacggaagggagcttttccagtacatgttgcaaaaggagcgggtcgagccccatcagctggccatcgacaggccttctcaaaagctgctaaagtttttgaacaaacactataatttggaaactactgtgccgcaagtgaataatttcgttatatttgagggtttcttcgcgcatcagcacaggcctcctgccccctctctccgtgcgacaaggcactccagggctgccgcggtcgacccaaccccggccgctcccgctcgcaaacttccgcctaagcgggccgagggagacattaagccctatagttcgtctgatagagagttcttaaaggtggccgtcgagcccccttggccccttaatagggccccacggagagccacccctccagcccacccaccaccaaggtcctcgtccttgggcaactccccggaacgcggcccccttaggcccttcgttccggaacaggagttgctccgcagcctgagactctgtcctccgcacccaacggcgcgcctgctgctggccgctgatcccggaggaagtcctgcacaacgcaggcgcaccaggggcacccccccaggtctggttgcacaatcatgctgctactcccggcacggaggagtgaactcgagtagccccaacacgggcaatcaggatagcaagcagggggagcaggaaacaaagaaccgctcagcctcagaggagcaggccttaagccaggacggttccggagagaagcccatgcacaccgccccaccccaggccccagctccccccgcccagtcttggactgtggggggtgacatcctgaacgctaggtttataagaaacttgcaggaaagaaggagcaccaggccctggtag

SEQ ID NO: 29898 - DNA, 1230 bp, Artificial Sequence
  derived and/or modified sequence
atgtggctgacttggcccttttgctttttaaccattacattaagggaagaaggagtttgtcatctcgagtcggtggatctccagcagcagataatgacgattatagacgagctgggtaaagcctccgcaaaagctcagaacctcagtgctccgatcacctccgccagtaggatgcagtctaatagacacgtggtttacattttgaaggattcatcagcacgccccgccggtaagggtgcgataattggttttataaaggtcggctataagaagctgttcgtgctagatgaccgcgaagcacacaatgaagtcgagccactgtgcatccttgatttctacatacacgaaagcgtgcagcggcatggccatggacgagaattgtttcaatatatgctgcagaaggagagggtcgagcctcatcagttggcaatagacagaccttcccagaaattgctcaaattcctcaacaaacactacaatttagaaaccacagtcccacaggtgaacaactttgtcatttttgaggggttcttcgcacaccagcatagacccccggcaccatccttgagggccacccgccattcccgggcagccgctgtggaccccacacccgcagcgccagcacgtaagcttccacctaagagagcagaaggtgacattaaaccttattccagctcagaccgggagttcctcaaggtcgccgtggaacccccttggcccctgaatagggccccccggcgagccacccctccagctcatccccccccgaggtcgagttcattgggaaactctcctgagcgcggacctcttaggcccttcgtgccagagcaagagctgttgagatcgctccggctgtgcccccctcacccaactgcacgtctgttgctggctgcggaccctggcgggagccctgctcaacgcagacgtactaggggcacgccccccgggctggtggctcagtcatgctgctactctcggcatggaggggtgaatagctcaagtcctaataccgggaaccaggattcaaaacagggggagcaggagacaaaaaaccgcagtgcttccgaggaacaagcactgtcccaagatggatccggcgagaaacccatgcacactgcacctcctcaagcaccggcacctccagcccagagctggacagttgggggggacattctgaacgctcgattcatcagaaatcttcaggaacgtaggagcacccgcccatggtag

SEQ ID NO: 29899 - DNA, 1230 bp, Artificial Sequence
  derived and/or modified sequence
atgtggctcacatggcccttttgtttcttgactattaccctccgcgaagagggggtctgccatctggagagtgtcgacctacagcagcagattatgaccatcatcgacgaactcggcaaagcttctgccaaggcacagaacctttctgcccctatcacctctgcgtcccgcatgcagagcaacaggcacgtcgtgtatatcctgaaggattccagcgcaaggcccgccgggaagggtgccattattggctttattaaagttggctataaaaagttatttgtcctggacgatagagaagcacataacgaggtcgaacctctatgcatcctggacttttatattcatgaatccgttcagcggcatggccacggacgcgaactcttccaatatatgctgcaaaaagaaagagtggagccgcaccagctcgccatcgaccgccctagccaaaagctgttgaaatttttgaacaaacactataacctggaaaccaccgtaccgcaggtgaacaatttcgtcatttttgaagggtttttcgcacatcagcacagaccacctgctccttccctgagggccactcgccactcaagggccgcagcagtggatccaacccctgcagcacctgcccggaagctcccccccaagcgagctgagggcgatattaagccatactcttctagcgaccgcgagtttttgaaggttgctgttgaacccccgtggcccctgaacagggcaccccgccgggctacgccgcctgcccaccccccgccgcgatcgtcttctctgggaaatagcccagagagggggccactaagaccatttgtgcccgagcaagaactcctgcggagcttgagactttgcccgccacaccccactgcacggctgctgctagcggccgatcccggcggctcacccgcccaaaggcggcgcactaggggaacaccgccagggcttgtggcccagtcatgttgctattcacgccacggaggcgtgaatagtagttcgcccaacactggcaaccaggacagcaaacaaggtgagcaggaaaccaaaaaccgctccgccagcgaggagcaggcacttagccaggacggctcaggggaaaagcctatgcacacagccccaccacaggctcccgcccctcccgcccagtcttggacagtaggcggcgacatcctgaatgctcgtttcattcgtaatctgcaggaacggcgctccacacgcccatggtag

SEQ ID NO: 29900 - DNA, 1230 bp, Artificial Sequence
  derived and/or modified sequence
atgtggttaacctggcctttttgttttctgacaattacgctgagagaggagggggtgtgtcatctcgagagcgtcgatctgcagcaacagataatgaccattatcgatgaactggggaaagccagtgctaaggctcagaacttgagcgcccccataacctcggcgtcccgcatgcagagcaatcgccatgtggtctacatcctgaaggacagcagcgcccgccccgcaggcaagggcgccattatcggatttatcaaagttggatataagaaactatttgtgctcgatgatcgcgaagctcataatgaggttgaaccactgtgtattctggacttttatatccacgaaagcgttcagcgccatggccacggtcgggagctcttccagtatatgctgcagaaagagagggtggaacctcaccagctggccattgatcgaccatcacagaagctgttgaagttccttaataagcactacaaccttgagactacagtcccccaggtgaacaacttcgttatatttgaaggcttttttgcccaccagcaccgaccccccgccccaagcttgagggccaccaggcacagtcgggctgccgctgtagaccccacccccgctgccccagcacgcaaactgccacccaagagagctgagggtgatatcaagccctactctagctcagaccgggaatttctcaaggtggctgtggaacctccttggccgctcaatcgcgcgcctagaagggccactcctccggctcatcctccaccacgctcctctagcctgggcaactcgccagaacggggtcccctcagaccgttcgtgccagaacaggagctcctgcgctctctgaggctctgtccccctcacccaacagcacgactcttgctcgccgcagatcctggggggtcgcctgctcagcgccggagaacgaggggcacacctccagggctggtggcccagtcgtgctgctacagtcggcacgggggagtgaactcttcctcccccaacaccggaaatcaggacagcaaacaaggcgaacaggagaccaaaaatcgctcagccagcgaggaacaggcattgagccaggacggctcaggggagaagcctatgcacactgccccccctcaagcccctgctccccctgctcagagctggactgttggtggtgacattctgaatgcccgctttattcggaatttacaagaaaggcgctctactcgcccctggtag

SEQ ID NO: 29901 - DNA, 1230 bp, Artificial Sequence
  derived and/or modified sequence
atgtggctgacctggcccttctgcttcctgaccatcaccctgcgggaggagggcgtgtgccacctggagagcgtggacctgcagcagcagatcatgaccatcattgatgagctgggcaaggccagcgccaaggcccagaacctgagcgcccccatcaccagcgccagcaggatgcagagcaacagacatgtggtgtacatcctgaaggacagcagcgcccggcctgctgggaagggggccatcatcggcttcatcaaggtgggctacaagaagctgtttgtgctggatgaccgggaggcccacaatgaggtggagcccctgtgcatcctggacttctacatccatgaatctgtgcagagacatggccacggccgggagctgttccagtacatgctgcagaaggagcgggtggagccccaccagctggccatcgaccggcccagccagaagctgctgaagttcctgaacaagcactacaacctggagaccaccgtgccccaggtgaacaactttgtgatctttgagggcttctttgcccaccagcaccggcccccagcccccagcctgcgggccaccaggcacagcagagctgctgctgtggaccccaccccagctgccccagccaggaagctgccccccaagagagctgagggggacatcaagccctacagcagcagtgaccgggagttcctgaaggtggccgtggagcccccctggcccctgaacagagccccccggcgggccaccccaccagcccaccccccacccaggagcagcagcctgggcaacagccctgagcggggccccctgcggccctttgtgcctgagcaggagctgctgcggagcctgcggctgtgccccccccaccccacagcccggctgctgctggccgctgaccccggcggcagccctgcccagaggaggaggacccggggcaccccacctggcctggtggcccagagctgctgctacagcagacatggaggagtgaacagcagcagccccaacacaggcaaccaggacagcaagcagggcgagcaggagaccaagaacagaagtgccagcgaggagcaggccctgagccaggacggcagcggggagaagcccatgcacacagccccaccccaggccccagcccccccagcccagagctggacagtgggcggggacatcctgaatgcccgcttcatccggaacctgcaggagaggaggagcacccggccctggtag

SEQ ID NO: 29902 - DNA, 1230 bp, Artificial Sequence
  derived and/or modified sequence
atgtggctgacctggcccttctgcttcctgaccatcaccctgcgggaagaaggggtatgccacctggaatccgtggacctgcagcagcaaattatgaccattatcgacgaactgggcaaggcttccgccaaggcgcagaacctttcagctccgatcacttcagcttcccgcatgcagagcaatcggcatgttgtatacattctgaaagacagcagcgcccggcccgccgggaaaggtgccataatcggttttattaaagttgggtacaaaaaactcttcgttctggacgatagagaggcccataatgaggtggaacctttgtgcatcctagacttctacattcatgagtccgtgcagcgccacgggcatgggcgcgagcttttccagtacatgcttcaaaaagaacgagtggaaccacatcaattagccattgaccggcccagccagaaactactgaaattccttaataagcattacaatctcgagacaaccgtgccccaagtgaacaacttcgtgatattcgaagggttttttgcccaccagcatcgtcctcctgccccgtcacttcgagccacaagacactctcgggcagcagctgtggaccccaccccggccgcgccggccagaaaactgccaccaaagcgggcagaaggtgatatcaaaccctactcatcatctgatagggagtttctgaaagtcgcagtcgaaccaccctggccactcaaccgcgcgccaaggagggccacaccacctgcgcatcctcctccacgctcaagtagtctcggtaatagcccagagcggggacctctgcgcccttttgttcccgagcaggaattgcttcgtagcctgcgactgtgtccaccccatcctacggctcgcctgttgctggccgccgaccccgggggctcacctgcacagagacggcgcacaagaggaaccccgcccgggctggttgcccagagctgctgttatagcagacatgggggcgtcaactcttcatcgcccaacactggcaatcaggactctaagcagggagaacaggagacaaagaataggtctgcatcagaagagcaagccctgagccaagatggtagcggtgaaaaacctatgcatacagcacccccacaggcaccagctccaccagcccagtcatggactgtgggcggcgatattctcaacgcccgcttcatccgtaatttgcaggagcggcggtctacaagaccatggtag

SEQ ID NO: 29903 - DNA, 1230 bp, Artificial Sequence
  derived and/or modified sequence
atgtggctgacctggcccttctgcttcctgaccatcaccctgcgggaggagggcgtgtgccatctagagagcgtcgatcttcagcagcaaattatgaccattattgatgagttaggaaaggctagcgcaaaagctcagaacctgagtgcccccattacctctgcgtcacgcatgcagtccaataggcacgttgtctatattctgaaagacagctcggcacgccccgcaggtaagggggccattataggcttcatcaaagtggggtataagaaactctttgtcctcgacgatcgtgaggctcacaacgaagttgaaccactgtgcatacttgacttttatatacacgagagtgtccagcgccatgggcatggacgcgaactctttcagtacatgttacagaaggaacgcgtcgagcctcatcagctggccattgaccggcctagtcagaaactgctgaagttcttaaacaagcactacaacctggagaccacagtgccacaggtaaacaacttcgtgatatttgaagggttcttcgcacaccaacatcgcccgccggccccgtcccttagggctactcgtcactctcgcgcggccgcggtggaccccacgcccgctgcccctgcacggaagttaccccccaaacgcgcagagggagatatcaaaccctattcgtccagtgaccgagagttcttaaaagtagccgttgagcccccatggcccctgaaccgggccccccgcagagctacccctcccgctcaccccccgccccggtccagcagcctcggcaactctcccgaacggggccccttgaggccttttgtcccagagcaagaactcctacggtcccttcgattgtgcccaccacatcctaccgcccgcctgctgctggccgcggatccaggtggatcgcccgcccagagacggagaactagagggactccccctggtttggtggcccaaagctgctgttactcacggcatggtggggtcaacagctcctccccaaataccggtaatcaggacagcaaacagggcgagcaggaaaccaaaaacaggtccgctagcgaagaacaggctctgtcacaggacggatccggcgagaagcctatgcacaccgcccctccacaggcacctgcccctcccgcccaaagttggacggtgggcggagatatcctgaacgcgaggttcatccggaatttgcaagagcggaggagtactagaccgtggtag

SEQ ID NO: 29904 - DNA, 1230 bp, Artificial Sequence
  derived and/or modified sequence
atgtggctgacctggcccttctgcttcctgaccatcaccctgcgggaggagggtgtgtgtcatttggagagcgtggatctccagcagcagataatgacaattatagacgaactcggcaaggcgagtgctaaggcccagaacctgagcgcgcctatcacaagcgcctctcggatgcagagcaatcggcacgtggtttatatactcaaggactcaagtgcgcgacctgccggcaagggcgctatcatcggcttcattaaagtgggctataaaaaactcttcgttctagacgatcgggaggctcacaatgaggtcgaacccttatgtatattggatttttacatccacgaatctgtgcagcggcacggccatggcagagagcttttccaatatatgctccagaaggagcgagttgaacctcaccagctagccattgatagaccgagtcagaaattgctgaagttcctgaacaagcactataacctggagactacggtgcctcaggtgaacaactttgtaatctttgagggttttttcgcgcatcagcaccgaccaccagcgccaagtttaagggccacccgccactctcgcgccgccgccgtggaccctacccccgccgccccagctaggaagctccccccaaaaagagctgagggtgacataaagccctattcctccagcgatcgggaattcctgaaggtggcagttgagcccccctggccactcaaccgcgccccccgacgagctacacccccagctcatccaccaccgagatcatccagcttggggaacagtcccgaaaggggtcctctgaggccatttgtaccagaacaggaactactgcggtctctgcgactctgcccacctcatccaacagctagactgcttctggccgccgacccgggaggcagccctgctcaaagacggaggacccgaggcaccccgcctggacttgttgcacaatcctgttgctacagccgccacggaggagtgaattccagcagtccaaatactggcaatcaggactctaaacagggcgaacaagaaaccaaaaacagatccgctagtgaggagcaggccctcagccaggatgggtcaggagaaaagcctatgcataccgctccaccccaggcacccgctccgcctgcacagtcctggacagtgggcggggacattttgaatgctcggtttatccgaaatttacaagagcgacggtccacgcggccatggtag

SEQ ID NO: 29905 - DNA, 1230 bp, Artificial Sequence
  derived and/or modified sequence
atgtggctgacctggcccttctgcttcctgaccatcaccctgcgggaagaaggagtatgtcatctcgaatctgtcgaccttcagcagcagataatgactataatcgacgaattgggtaaagctagcgcaaaggcacagaatttgtccgctcccattacctctgcatcccggatgcagtcgaatcgacacgttgtttacatcctcaaggattcctcagccagacccgcaggaaagggtgcaatcatcgggttcataaaggttggctacaaaaaattgttcgtgttggatgatcgcgaagcccataacgaggtagagccactatgtatcctcgatttctacatacacgagtcagttcagagacacggccacggtcgagagttgtttcaatacatgcttcaaaaggaaagagtggaaccacaccagctcgcaatagatcggccttcacagaaactactgaaattcctcaacaaacactacaaccttgagacaaccgtgccccaggtgaataacttcgtaatctttgagggattttttgcgcaccagcacagacccccagcccctagcctgcgagctaccagacactctcgcgctgcggctgtggacccaaccccagccgctcctgcacggaagttgccacccaaaagagcggagggagacatcaagccttattcttcttccgatagagagttcttgaaagtagccgttgagccaccttggcccctgaatagggcgcctagaagggccacaccccccgcacatcctccaccccgctcaagctctttaggcaactctcccgaacgaggcccattacgcccttttgttcctgagcaggagctattgaggtctctgcgcctttgcccgccacacccaaccgctcgattgctgttagccgcagacccgggcggctccccagcacagaggcgccgtacccgcggcaccccccctggcttagtagctcagtcttgctgttattccagacacgggggcgtcaactcgtcaagtcccaatacgggcaaccaggattcgaaacagggtgagcaagaaactaagaaccggtccgcttcagaagagcaggctctttctcaggatgggagcggtgagaaaccgatgcacacagcccccccacaggccccagccccccccgctcaaagctggaccgttggtggggatattctgaacgctcggttcatacgaaatctgcaagagagaaggagcacccggccatggtag

SEQ ID NO: 29906 - DNA, 1230 bp, Artificial Sequence
  derived and/or modified sequence
atgtggctgacctggcccttctgcttcctgaccatcaccctgcgggaagaaggcgtgtgtcacctcgaaagtgtggatctgcagcagcaaataatgaccattatcgatgagctgggcaaggcctcggctaaggcccagaatctctctgccccaatcaccagcgcatccaggatgcagagcaacagacacgttgtctacattctcaaggactctagcgcaagaccagccgggaaaggagcaatcatcggattcattaaggtgggctataagaagttgttcgtgctggatgacagggaagcacacaacgaagtggaacctctgtgcatcctggatttctatatccacgaatctgtccaacgacacgggcacggcagagagctctttcagtatatgttgcagaaagagagagttgagccccaccagctcgcgatcgacagacccagccagaaactcctgaaatttctgaataaacattataacctcgaaactacagtgccacaggtgaacaatttcgtcattttcgaaggcttcttcgcacaccaacaccggccgcccgccccttcactgcgtgccaccaggcactcacgggcagccgctgtcgacccaacacctgcagctcccgctcgaaagctgccccctaaacgcgctgagggcgacatcaaaccatattcttcttccgatcgggaattccttaaggtggccgtggagcccccttggccactgaatcgagcgccaaggagagccacaccaccagcacatcctccgccgcgcagcagctcccttggaaattcacctgagagagggcctttaagaccatttgtgccagagcaggagcttcttaggtccctgcgcctgtgtcctcctcatcctacagcccgtctcctgctcgctgcggaccctggcggttctcctgcacagagacgtcggaccagaggaactcctcctggcttggtggctcagagctgctgttacagccgtcacggaggcgtcaatagctcatccccgaacactggtaatcaagacagcaaacaaggtgagcaggaaacaaagaatcgctccgctagcgaggagcaggctctatcacaggacggctctggcgagaagccaatgcacaccgcacccccgcaggccccagcacccccggctcaaagttggaccgttgggggagacattttgaatgcccgattcatccgaaatctccaggaaagacgaagtacaaggccatggtag

SEQ ID NO: 29907 - DNA, 1230 bp, Artificial Sequence
  derived and/or modified sequence
atgtggctgacctggcccttctgcttcctgaccatcaccctgcgggaagagggggtttgccacctcgaaagcgtagacctccaacagcagatcatgacaatcattgatgagctggggaaggcatccgccaaagcacagaacctaagcgcccccataacttcagctagccgaatgcaatccaatcggcatgtggtgtatatcttgaaagactctagcgccaggcctgcgggcaaaggagccatcattggtttcatcaaggttggttataagaagctgttcgtcctggacgacagggaggctcacaatgaagtcgaaccactctgtatcctggatttttacatccatgagagcgtccagagacatgggcatggccgcgagttattccagtacatgctgcagaaagaacgggtcgaacctcaccagcttgctatagacaggcctagtcaaaagttactgaaattccttaataagcattacaatctggagacaactgtgccccaggtcaacaattttgtgatcttcgaaggtttcttcgcccaccaacatagaccccccgcgccaagcttgagagccacacgccactcacgagccgctgcagtggatcccacgcccgccgcgccggctaggaagctgccccctaaacgcgctgagggagacatcaagccctactcatcctccgatcgggaatttctgaaagtggccgtggaaccgccatggccgctgaatcgtgcacccaggagagcaactccccccgctcaccccccgccaagatcttcatccctgggtaattcgcccgaaaggggaccacttcggccgttcgtgcctgagcaggagttgctgcgctccctccggctgtgcccccctcaccctaccgctaggcttctgctcgcagccgatcccggcggctcccctgctcagcgacgacgcactcgcggcacgccgcccggtctggtcgctcagtcatgttgttattccaggcatggaggagttaactcatcttctcctaacaccggaaaccaggattcaaagcagggcgagcaggagacgaagaacaggtctgcatcggaagaacaagcattgtctcaggacggatctggcgaaaaaccaatgcacactgctcctcctcaggcacctgctcctcccgcacagtcatggactgtcgggggtgacatactcaacgcccggttcatccggaacttgcaagaacgtaggtcaacgcgcccttggtag

SEQ ID NO: 29908 - DNA, 1230 bp, Artificial Sequence
  derived and/or modified sequence
atgtggctgacctggcccttctgcttcctgaccatcaccctgcgggaggaaggggtgtgtcacctggaatccgtcgatctccagcagcaaatcatgacaattattgacgagctggggaaagccagtgctaaagcacagaacctgtctgcccctatcaccagcgccagtcgtatgcaaagtaacaggcatgtcgtgtacatactgaaggattcctctgcaagacccgcgggtaaaggcgctataattggattcatcaaggtgggctataagaaactcttcgtgctggacgaccgcgaggctcacaatgaggttgaacccttgtgcatcttggacttctacatccacgagagtgtacagagacacggacatgggcgggaactattccaatacatgctccaaaaggagagggtggagccccatcagctcgccatcgaccgaccttctcagaagcttttgaagttcttgaacaaacactataacctagaaaccaccgtgccccaggtgaataacttcgttattttcgagggctttttcgcccaccagcatcgaccccccgcgccctccctgcgcgctaccaggcacagccgcgccgccgccgtggacccaacacccgccgcccccgcgcggaagttgcctcctaaaagagcagagggggatattaagccctattcctccagcgacagagaatttctgaaggtggctgtggaacctccctggccacttaatcgcgccccgaggcgggccaccccaccggcacatcctccgccacgctcaagttccctgggcaactcccctgagcgcggtccattgcggcccttcgtccccgagcaggagctgctgagaagcctgcggctttgccccccccatccgacagccaggctcttgcttgcagccgaccccggtggatccccagcacaacgacggaggaccaggggcacaccccccggtctggtcgctcagtcttgttgctatagccgccacggtggagttaactcttcctcgcccaatactggcaaccaggactccaagcaaggggagcaggagaccaagaaccgatctgcttctgaagagcaggccctttctcaggatggaagtggtgaaaagccaatgcataccgctcctccacaggcaccagcgcctcctgctcaatcttggaccgtgggcggagacattctcaatgcccgcttcatccggaatctgcaggagcgaagaagtacacggccgtggtag

SEQ ID NO: 29909 - DNA, 1230 bp, Artificial Sequence
  derived and/or modified sequence
atgtggctaacctggcctttttgtttccttacaatcacattacgcgaagagggcgtgtgccacctcgagtctgtcgacctgcagcagcaaatcatgaccatcatcgacgagctggggaaagctagtgctaaggcccaaaatctctcggctcccatcacctcagcctcccggatgcagtcaaacaggcatgtggtgtacatcctgaaagatagtagtgcgcgtcccgctgggaaaggcgcaataattggcttcatcaaggtgggctataagaagctgtttgtactggacgatagggaggctcacaacgaagtagagcccttatgtattctggatttttacatccatgagtctgtccaaagacacggtcacggacgggaacttttccagtacatgttgcagaaggagcgagtagaacctcatcagctggccatagaccgaccaagccagaagcttttaaagtttctgaacaaacattacaatctggagactacagtccctcaggtgaacaatttcgtgattttcgaggggttctttgcacatcagcaccggcctccagctccgagcttacgtgctacccgtcattcaagagctgcggcagtagacccgactcctgcagcacctgccaggaagctgccaccaaaacgggcagagggggatataaagccttattcatcttctgatcgggaatttctgaaggtggctgtggaaccaccgtggcctctgaatcgcgctcccaggagggccacgccgccagcgcacccacccccacgaagcagcagtctcggtaattctccggaaagagggccactgcgcccttttgtgcccgaacaggagctcctgcgttctctccgcttgtgtcctcctcatcctacggctaggttgctgctggctgctgaccctgggggttcccctgctcagaggcgacgtacccgaggaacacctccaggcctcgtagctcagtcctgctgctattcacggcacggtggtgtgaatagtagctctcctaacacagggaaccaggactcgaagcagggcgaacaagaaactaaaaaccgaagcgcgtctgaggagcaggcactgagtcaagatggatccggggaaaagccaatgcacacagcccctcctcaagcccctgctccgcctgcccagtcctggactgtgggtggcgacatcctgaacgctcggtttatccggaatctgcaagagaggcgcagcacaagaccatggtag

SEQ ID NO: 29910 - DNA, 1230 bp, Artificial Sequence
  derived and/or modified sequence
atgtggctgacgtggcccttctgcttccttacaatcactcttcgggaagaaggagtatgccacctcgaaagtgtcgacctgcagcagcagattatgacaattatcgatgaattgggcaaggcttccgcgaaagcccagaatctttccgcccctataacttccgcttctcgtatgcagtccaaccgccatgtggtgtatatcttaaaggacagttcagccagaccagccggaaaaggcgcaatcattggtttcatcaaagtgggatacaagaagctgttcgttcttgatgatcgggaggcccacaacgaagtcgaaccattgtgcattcttgatttctatatccatgagagcgtgcagcggcacgggcacgggagagagttattccagtacatgctgcaaaaggagagagtggagccgcaccagctggcaatcgacagaccttcccaaaagctgttaaaattcttgaataaacattataacctcgagacaactgtgccgcaggtgaacaattttgttatcttcgaaggttttttcgctcaccagcatcgccctcctgctccttcgctccgggcaacccggcattctagggcagcagcagtggaccccacacccgctgccccagcgagaaagctcccaccgaaacgagctgagggtgatattaaaccatactcctcgtcggaccgcgaatttctgaaggtggcagtggaaccaccctggcctcttaaccgcgcacccagaagagctacaccaccagcccaccctccccctaggtccagctcactgggtaacagcccagagcgcggtcccctcagacctttcgttccagaacaggaacttctgcgaagcttaaggctttgccccccacaccccactgctcgccttttgttagccgcagatcctggtggctctccagcgcaacgcaggagaactcggggtactccacccggactggttgcccagtcatgttgctattcacggcacggcggtgtgaactcttccagccctaacactggcaatcaggacagcaagcagggtgagcaagaaactaagaaccggagtgcttcagaggagcaagccttgagtcaagacggttctggggagaagccaatgcatacggcccctcctcaggccccagcgcctcccgctcaatcctggaccgttggcggagacatcttgaacgcccgatttattaggaatctccaggagcgaagatctacacggccatggtag

SEQ ID NO: 29911 - DNA, 1230 bp, Artificial Sequence
  derived and/or modified sequence
atgtggctgacctggccgttctgtttcttgaccattactctcagggaagaaggagtatgccacctagagtcggtcgacctgcagcaacagatcatgacaataatagacgagcttggaaaggcgagcgcaaaggctcaaaatctgtccgcccctatcacaagcgctagccggatgcaaagtaacaggcatgtcgtttacattctcaaggactctagcgccagaccggcaggaaagggggcaattattggcttcatcaaagtaggctacaagaaactgttcgtgttggacgaccgggaagctcataatgaggtggaacccctgtgtatcctcgatttttacatccacgagtctgtgcagagacatggccatgggagggagctttttcagtatatgttgcagaaggagcgggtcgagccccaccaactggctattgatcgccctagtcaaaagttgttaaagtttctgaataagcactataacctagaaacgaccgtgccccaggtgaataatttcgtcatcttcgagggtttctttgcgcatcagcatagacctccagctccttcactacgggctacaagacactctagagcggctgcagtagatcccactcctgccgcaccagcacgtaaattgccgccaaaacgggcagaaggcgatatcaaaccatactcttcatctgacagagaatttctcaaggtagcagtcgagcccccttggcctctgaacagagcccctagacgggcaactcctcccgctcacccaccaccaaggagctctagcttaggtaattctcccgaacgtggtcctctacggcctttcgtgcccgagcaggagctcttgcgttccctccgcctctgtcctccacaccctaccgcgaggctgctgcttgcggcagatcccggtgggtctccggcacagaggcgaaggacaaggggaacgccaccaggactggttgcccagagctgttgctattcacgtcacggcggagtgaattcctcctcccccaatacgggaaaccaggattcaaaacagggagaacaggagacgaaaaatcgaagcgcgtctgaagaacaggccctgtcccaggacggctctggcgagaagccgatgcacactgcgcctcctcaagccccagcaccgccagcccagagctggacagtgggcggagatatcctgaacgccaggttcataaggaatctccaggagcggcgttccactaggccttggtag

SEQ ID NO: 29912 - DNA, 1230 bp, Artificial Sequence
  derived and/or modified sequence
atgtggctgacttggcccttctgtttcctgacgataacactgcgagaggaaggcgtctgccacttggagagtgtggatcttcaacagcagattatgaccataatagacgagctggggaaagcatctgctaaagcgcagaacctgagtgccccaataactagcgccagccgaatgcagagcaatagacatgtagtctacatcctgaaggactcctcggccagaccagctgggaagggcgcaattatcggatttataaaagtgggctataagaagctgttcgttctggacgatcgggaggcacataatgaagtggaacctctttgcatcctcgatttttacatacacgagagtgttcaaagacacggccacggcagggagctcttccagtacatgctgcagaaagagcgagtggagccccaccaactcgccatcgacaggccctctcaaaagttgctgaaattcctcaacaagcactacaaccttgagaccactgtgcctcaggttaacaactttgtcatttttgagggattttttgcccatcaacatcggcctccggcaccaagtttgcgggctactcggcacagtcgcgctgccgcagtggacccaacaccggctgctccagctcggaaactccctccgaaacgggctgaaggtgacatcaagccttattccagcagcgacagggagttcttaaaggtggctgtggaacccccatggcctctgaatcgggcacctcggagggcgacaccgccagctcatcccccaccgagatcatctagtttgggcaactctcccgaaaggggtccactcagacccttcgttccagaacaggaactgcttcgatccctgcggctttgcccaccgcatcctactgcaagactcttactggcagctgacccgggaggttctcctgcccagagacggagaacccgcggaactcccccaggactcgtagcccaaagttgctgctactctagacacggcggtgtgaactcctcctctcccaacactgggaaccaggactcgaaacagggtgaacaagagacaaaaaatcggtccgcgtccgaggaacaggctcttagccaggatgggtccggagaaaaacccatgcatactgcaccaccgcaagccccagctcccccagcacagtcctggaccgtcggaggcgatatcttaaacgctagatttatcagaaacctacaggagcgtagatccacgcgaccttggtag

SEQ ID NO: 29913 - DNA, 1230 bp, Artificial Sequence
  derived and/or modified sequence
atgtggctgacatggcctttttgctttctgacgataaccttgagggaggagggggtttgccacctggaaagtgtcgatctgcaacagcagatcatgacaataatcgacgagctcgggaaagccagcgctaaggcacagaacctctcagcccctataacaagcgcttcccgaatgcagtccaatagacacgtagtatacatcctaaaggattcttccgctaggccagccggaaagggggctataatagggttcatcaaggtgggctacaaaaagctctttgtcctagacgatcgagaggcccacaacgaggtagagccactgtgcatcctggacttctatatccatgagtccgtgcagcgccatggacacggcagggaattgtttcagtatatgctccagaaagaaagggttgaacctcatcaattggctatcgaccgacccagccagaagcttctgaagttcctcaacaagcactataacctagagaccacagttccccaggtcaataatttcgttatttttgaaggcttctttgcacaccaacacagaccgcctgccccttctttacgcgcaacccggcacagtagggcggcagcagtcgaccccaccccagccgcaccagctcgcaagctcccaccgaagagggccgagggagacattaagccatactcttcatccgaccgtgagttcttgaaagtggctgtagagccaccttggcctctgaatagagcgccacgcagagcaacaccgccagctcacccgcctcctcgtagttctagcctgggcaatagtccagagcgcggaccactgcgaccttttgttcccgaacaggaattgctgcgttcactgcgcctgtgcccccctcatccgacagccagactcttgttggcggctgatcctgggggatcgccggctcaaagacgtcggactcgagggacaccaccagggctggtagcccagtcttgttgctacagcaggcacggaggagtgaattcctcttcccctaacacgggaaatcaagactcaaagcagggtgagcaggagacaaaaaacagaagcgcctcagaggagcaggccctgagccaagacggctccggtgaaaaacccatgcatacagccccaccccaggcacctgcccctcccgcacaaagctggacagtgggaggcgatattctgaacgcccgattcattagaaatttgcaagagcggcgatcgaccagaccatggtag

SEQ ID NO: 29914 - DNA, 1230 bp, Artificial Sequence
  derived and/or modified sequence
atgtggcttacatggccattctgttttctgaccatcacactaagagaggagggtgtgtgtcatctcgaatcagtcgatctccagcaacagatcatgaccatcattgacgagctgggcaaggcgagcgccaaagctcagaatctgtccgcccctatcacctcagcatcccggatgcagagcaaccgacacgttgtttacattctcaaagattcatcagccaggcctgcagggaaaggagccatcattggattcatcaaggtgggatacaagaaactcttcgtccttgatgaccgggaagcgcataacgaagttgagcccctttgtatcttggacttctacatccatgagtcagtgcagagacatgggcatggcagagagttgttccagtacatgctgcagaaagaaagagtggaaccacaccaattggctatcgataggccctcccagaagctgctaaagttcctgaacaagcattacaacttggagacaactgtaccccaggtgaacaactttgttatatttgaaggcttttttgcacaccagcacaggcccccagccccatctctccgagcaaccaggcatagcagggctgcagctgtggatccaacacctgccgcacccgctcggaaacttccccctaaacgtgctgagggtgatattaaaccctatagttccagcgatcgcgaattcctgaaggtcgcggtggagcctccctggccattgaaccgtgcaccacgacgagcaactcccccagcccatccaccaccgagaagttcttcactcggcaattccccagagcgcggacccctgagacccttcgtgcccgagcaggagttactgagatccctaagattgtgcccaccacaccccacagctcgcctgctactcgcggctgacccgggtgggagtcctgcacagcgcaggaggaccagggggacccccccaggcctggtggctcagagttgctgctattcgaggcacggcggtgtaaatagctcctcgcctaacacgggcaatcaagactcgaaacagggcgaacaggaaacaaagaaccggtccgcttctgaggagcaggccttgtcacaggatggttccggagaaaaaccaatgcatacagctccccctcaagcgccagcccctccagcccagtcctggacagtcgggggagatatccttaatgcgcgattcatcaggaatctgcaagaacgcagatctacccggccttggtag

SEQ ID NO: 29915 - DNA, 1230 bp, Artificial Sequence
  derived and/or modified sequence
atgtggctgacatggccattttgcttcctaaccatcaccctccgggaagaaggcgtgtgccatctcgaaagcgtcgatctgcagcagcagatcatgaccatcatcgacgagctggggaaagcttccgcaaaagcccagaaccttagtgcacctatcacttccgcctctcgtatgcagtctaatagacacgttgtgtacatcctgaaagattcatctgccagaccggctgggaagggcgcaataattggatttatcaaggtgggctacaagaaattgtttgtgctggacgacagagaggcccacaatgaggtcgaacccctttgcatactggatttctacatacatgagtccgttcagcggcacggccatgggagagagctgttccaatacatgctacagaaagagcgcgtcgagccccaccaattggcaatcgacagaccttcacaaaagctactgaagtttctcaataaacactacaacctggaaactacagtgccacaggtgaataattttgttatttttgaagggttcttcgcacatcagcacagaccaccagcaccttcactgcgtgcaacacgacatagtagggccgctgccgtggaccctacccccgcagccccagccaggaagcttccacccaagagggctgagggagatataaaaccgtattcaagcagtgatcgtgaatttttaaaagttgctgttgaaccaccatggccgttgaatagagctccgcgaagggcaaccccacccgctcatcccccaccaaggtccagcagcctggggaattctcctgagagaggccctctcagaccctttgtacccgagcaggaactgctccggagcctgaggctttgtccccctcatccaacagctcgcctgttgctcgcagctgatccaggaggtagtccggctcagaggagacgcacccggggaactccacccggtctggtcgcgcaaagttgctgttattctcggcatggcggagtgaacagctcttcgcctaacactggaaaccaggatagtaagcaaggcgagcaggaaaccaaaaatcgctctgcgagcgaagaacaagccctcagtcaggacggtagcggcgaaaagccaatgcacaccgccccaccccaagctcctgcaccaccggctcagagctggactgttggtggggatatccttaatgccagattcatcagaaatctgcaggaacgacgctcaacccgaccttggtag

SEQ ID NO: 29916 - protein, 619 aa, Artificial Sequence
  derived and/or modified sequence
MFVPRSLKIKRNANDDGKSCVAKIIKPDPEDLQLDKSRDVPVDAVATEAATIDRHISESCPFPSPGGQLAEVHSVSPEQGAKDSHPSEEPVKSFSKTQRWAEPGEPICVVCGRYGEYICDKTDEDVCSLECKAKHLLQVKEKEEKSKLSNPQKADSEPESPLNASYVYKEHPFILNLQEDQIENLKQQLGILVQGQEVTRPIIDFEHCSLPEVLNHNLKKSGYEVPTPIQMQMIPVGLLGRDILASADTGSGKTAAFLLPVIMRALFESKTPSALILTPTRELAIQIERQAKELMSGLPRMKTVLLVGGLPLPPQLYRLQQHVKVIIATPGRLLDIIKQSSVELCGVKIVVVDEADTMLKMGFQQQVLDILENIPNDCQTILVSATIPTSIEQLASQLLHNPVRIITGEKNLPCANVRQIILWVEDPAKKKKLFEILNDKKLFKPPVLVFVDCKLGADLLSEAVQKITGLKSISIHSEKSQIERKNILKGLLEGDYEVVVSTGVLGRGLDLISVRLVVNFDMPSSMDEYVHQIGRVGRLGQNGTAITFINNNSKRLFWDIAKRVKPTGSILPPQLLNSPYLHDQKRKEQQKDKQTQNDLVTGANLMDIIRKHDKSNSQK

SEQ ID NO: 29917 - protein, 161 aa, Artificial Sequence
  derived and/or modified sequence
MFVPRSLKIKRNANDDGKSCVAKIIKPDPEDLQLDKSRDVPVDAVATEAATIDRHISESCPFPSPGGQLAEVHSVSPEQGAKDSHPSEEPVKSFSKTQRWAEPGEPICVVCGRYGEYICDKTDEDVCSLECKAKHLLQVKEKEEKSKLSNPQKADSEPESP

SEQ ID NO: 29918 - DNA, 1860 bp, Artificial Sequence
  derived and/or modified sequence
atgttcgtgcccagaagcctgaagatcaagagaaacgccaacgacgacggcaagagctgcgtggccaagatcatcaagcccgaccccgaggacctgcagctggacaagagcagagacgtgcccgtggacgccgtggccaccgaggccgccaccatcgacagacacatcagcgagagctgccccttccccagccccggcggccagctggccgaggtgcacagcgtgagccccgagcagggcgccaaggacagccaccccagcgaggagcccgtgaagagcttcagcaagacccagagatgggccgagcccggcgagcccatctgcgtggtgtgcggcagatacggcgagtacatctgcgacaagaccgacgaggacgtgtgcagcctggagtgcaaggccaagcacctgctgcaggtgaaggagaaggaggagaagagcaagctgagcaacccccagaaggccgacagcgagcccgagagccccctgaacgccagctacgtgtacaaggagcaccccttcatcctgaacctgcaggaggaccagatcgagaacctgaagcagcagctgggcatcctggtgcagggccaggaggtgaccagacccatcatcgacttcgagcactgcagcctgcccgaggtgctgaaccacaacctgaagaagagcggctacgaggtgcccacccccatccagatgcagatgatccccgtgggcctgctgggcagagacatcctggccagcgccgacaccggcagcggcaagaccgccgccttcctgctgcccgtgatcatgagagccctgttcgagagcaagacccccagcgccctgatcctgacccccaccagagagctggccatccagatcgagagacaggccaaggagctgatgagcggcctgcccagaatgaagaccgtgctgctggtgggcggcctgcccctgcccccccagctgtacagactgcagcagcacgtgaaggtgatcatcgccacccccggcagactgctggacatcatcaagcagagcagcgtggagctgtgcggcgtgaagatcgtggtggtggacgaggccgacaccatgctgaagatgggcttccagcagcaggtgctggacatcctggagaacatccccaacgactgccagaccatcctggtgagcgccaccatccccaccagcatcgagcagctggccagccagctgctgcacaaccccgtgagaatcatcaccggcgagaagaacctgccctgcgccaacgtgagacagatcatcctgtgggtggaggaccccgccaagaagaagaagctgttcgagatcctgaacgacaagaagctgttcaagccccccgtgctggtgttcgtggactgcaagctgggcgccgacctgctgagcgaggccgtgcagaagatcaccggcctgaagagcatcagcatccacagcgagaagagccagatcgagagaaagaacatcctgaagggcctgctggagggcgactacgaggtggtggtgagcaccggcgtgctgggcagaggcctggacctgatcagcgtgagactggtggtgaacttcgacatgcccagcagcatggacgagtacgtgcaccagatcggcagagtgggcagactgggccagaacggcaccgccatcaccttcatcaacaacaacagcaagagactgttctgggacatcgccaagagagtgaagcccaccggcagcatcctgcccccccagctgctgaacagcccctacctgcacgaccagaagagaaaggagcagcagaaggacaagcagacccagaacgacctggtgaccggcgccaacctgatggacatcatcagaaagcacgacaagagcaacagccagaagtag

SEQ ID NO: 29919 - DNA, 2289 bp, Artificial Sequence
  derived and/or modified sequence
aaagcgggctgcggccccctcccaaaacccggggaagtggattctactctacgctccgctccgctccgctccgcaccaccaaccccgggccgcagtcctgacgagcgggtcagggcttgtcgggcggaagcctggcctggagcctggaagggggagacggcccgagcgggagcgggagcggacgcggcctcagtcctgcgcggaatattgaaggatgtttgttccaagatctctaaaaatcaagaggaatgctaatgatgatggcaaaagttgtgtggctaagataattaaaccagacccagaagaccttcagttggacaaaagcagagatgttcccgttgatgctgtagctacagaagcagccacaatagacaggcacatcagcgaatcatgccctttccccagcccaggtggccagttggcagaggttcattcagtaagtcccgagcagggtgcgaaggacagccatccttctgaagagcccgttaagtcattttccaaaacacagcgctgggcagaaccaggggaacccatctgtgttgtctgtggtcgttatggagagtatatctgtgataagacagatgaagatgtgtgtagtttggagtgtaaagcgaaacatcttctacaagttaaggaaaaggaagagaaatcaaaactcagcaatccacagaaggctgattctgagccagagtctccactgaatgcttcctatgtctacaaagagcacccctttattttgaaccttcaggaagaccagattgaaaatcttaaacagcagctgggaattttagttcaagggcaagaagtcaccaggcccattattgactttgaacattgtagtctccctgaggtcttaaatcacaacttgaagaaatcaggctatgaggtgccaactcccattcaaatgcagatgattcctgtgggacttctgggaagagacattctggccagtgcagatactggctcaggaaaaacagctgcttttcttcttcctgttatcatgcgagctttattcgagagcaaaactccatctgcgctcattcttacaccaaccagagagttagccattcagatagagagacaagctaaagaattgatgagtggcctgccacgcatgaaaactgtgcttcttgtagggggcttacccttacccccacagctttatcgtctgcaacaacatgttaaggttatcatagcaacccctgggcgacttctggatataataaagcagagctctgtagaactctgtggtgtaaagattgtggtagtagatgaagctgataccatgttaaagatgggttttcaacaacaagtgcttgacattttggaaaacattcctaatgattgtcagaccattttggtttcagccacaattccaactagcatagaacagctagcaagccagcttctgcataatcctgtgagaattatcactggagaaaagaacctaccttgtgccaatgtacgtcagattattttgtgggtagaagacccagccaaaaagaaaaaattatttgaaattttaaatgataagaaactctttaagcctccagtgttagtatttgtggactgcaaactaggagcagatcttttgagtgaagccgttcagaaaatcacagggctgaaaagcatatctatacattcagagaagtcgcaaatagaaaggaaaaacatattgaagggattacttgaaggagactatgaagttgtagtgagcacaggagtcttgggacgaggcctagacttgatcagtgtcaggctggttgtcaattttgatatgccttcaagtatggatgagtatgtccatcagattggaagagtaggaagattaggtcaaaatggaacagcgattactttcatcaataataattcaaaaagactcttctgggatattgcaaaacgagtaaagcccacaggatccattcttccccctcagttattaaattccccataccttcatgaccagaagagaaaggaacaacagaaagataaacagacacagaatgatctggttacaggagctaatcttatggatattatcagaaaacatgataaaagtaattctcagaaatgattttctctgccacttgaatatttttttttattgtatatagtcagcaaaaaattatggtttgcataaatggaaatgtacatgaattttaaaaattttaagatatttttaatttaataaaatttatataactatattgtatttatttcccttaattcttataaattaaaaacatcagaaaatgaattattaaataaaagacagtgttttcttttctg

SEQ ID NO: 29920 - DNA, 1860 bp, Artificial Sequence
  derived and/or modified sequence
atgtttgtgccacgtagtctgaaaatcaagcgcaatgctaatgacgatggtaagtcatgtgtcgctaagatcattaaaccagaccccgaggacctacaacttgacaaaagtcgtgatgtgccggtggatgctgtggccactgaggcagctaccatcgataggcatatttctgagagctgccctttcccctcacccggaggacagctggcggaggttcattcagtcagccccgaacagggtgcaaaggactcccacccatcggaggaaccagtgaagtcttttagtaagactcaacgttgggcagagcccggcgagccaatatgcgtagtctgtggacggtatggtgaatacatttgcgataagactgacgaagatgtctgctccttggagtgtaaagcaaagcatctgctgcaggtgaaagagaaggaggaaaagagcaaattgagcaatccccagaaggccgattcagaaccagagagccccctcaatgccagttacgtttacaaggagcatcccttcattttgaatcttcaggaagaccaaattgagaatctaaagcaacaactgggcatcctggtacagggccaggaggtgacccgcccgataattgactttgaacattgtagtctgccagaagtgctgaatcacaacttaaagaaaagtggatacgaagtgccaacgccaatacagatgcagatgatccccgtggggctgctgggcagggacatactcgctagtgcggacacaggcagcggaaaaacagccgctttccttctgccagtaattatgcgtgccctgttcgaaagcaaaaccccctccgccttgatcttgacccctacccgcgaactcgcaatccagatagagcgccaggctaaagaactgatgagcggactcccaaggatgaaaacagttctgctagtcggcggcctgccacttcctccccagttatacagactgcagcagcatgtgaaggtgatcattgctacaccgggccgtttgcttgatattataaagcagagtagcgtagagttgtgtggggtgaagatcgttgttgtagacgaggccgacacaatgcttaagatgggctttcagcagcaggtgctcgatatcctggaaaacatccccaacgactgtcagactatcctggtatcggctaccatccctacatctatagagcagctggcatctcagctgctccataatcctgtgcgcattattaccggtgaaaagaatctgccgtgtgctaatgtcagacagatcatactctgggttgaggatccggccaagaaaaaaaagctgtttgaaatcctaaatgacaagaagctcttcaagccccccgtgctggttttcgttgactgtaaactgggcgccgatcttctgtccgaggctgttcagaagatcaccggactcaagtctatcagtatccactcggagaagagtcagatagagcgcaaaaacatactcaagggactgttagagggtgactatgaggttgtcgtctccaccggcgtgctggggcgtgggctagatctaattagtgtcaggctggtcgtcaactttgatatgccatccagcatggacgaatatgttcatcaaatcggtcgggtgggacggttaggccagaacgggacggcaataacatttatcaacaataactcaaaaagactcttttgggacattgcgaagagagtgaagcctaccggatccattctgccacctcagctcctgaatagcccttatttgcacgaccaaaagagaaaagagcagcagaaagataagcagacacagaacgatctggtcacaggggcgaacctcatggatatcattagaaagcacgacaaatctaatagccagaaatag

SEQ ID NO: 29921 - DNA, 1860 bp, Artificial Sequence
  derived and/or modified sequence
atgtttgtgcccaggagcctgaagatcaagagaaatgccaatgatgatggcaagagctgtgtggccaagatcatcaagccagaccctgaggacctgcagctggacaagagcagagatgtgcctgtggatgctgtggccacagaagctgccaccatcgacagacacatcagcgagagctgccccttccccagccctgggggccagctggccgaggtgcacagcgtgtccccagagcagggcgccaaggacagccaccccagcgaggagcctgtgaagagcttcagcaagacccagcgctgggccgagcctggagagcccatctgtgtggtgtgtggccgctacggggagtacatctgtgacaagacagatgaagatgtgtgcagcctggagtgcaaggccaagcacctgctgcaggtgaaggagaaggaggagaagagcaagctgagcaacccccagaaggctgacagcgagcctgagagccccctgaatgccagctatgtgtacaaggagcaccccttcatcctgaacctgcaggaggaccagatcgagaacctgaagcagcagctgggcatcctggtgcagggccaggaggtgacccggcccatcatcgactttgagcactgcagcctgcctgaggtgctgaaccacaacctgaagaagagcggctatgaggtgcccacccccatccagatgcagatgatccctgtgggcctgctgggccgggacatcctggccagcgctgacaccggcagcggcaagacagctgccttcctgctgcccgtcatcatgagggccctgtttgagagcaagaccccatctgccctgatcctgacccccacccgggagctggccatccagatcgagcggcaggccaaggagctgatgagcggcctgcccaggatgaagacagtgctgctggtgggcggcctgcccctgcccccccagctgtaccgcctgcagcagcacgtgaaggtgatcatcgccaccccaggccgcctgctggacatcatcaagcagagctctgtggagctgtgtggggtgaagatcgtggtggtggatgaagctgacaccatgctgaagatgggcttccagcagcaggtgctggacatcctggagaacatccccaatgactgccagaccatcctggtgtctgccaccatccccaccagcattgagcagctggccagccagctgctgcacaaccctgtgcgcatcatcactggagagaagaacctgccctgtgccaacgtgcggcagatcatcctgtgggtggaggaccctgccaagaagaagaagctgtttgagatcctgaatgacaagaagctgttcaagccccctgtgctggtgtttgtggactgcaagctgggcgctgacctgctgtctgaggccgtgcagaagatcaccggcctgaagagcatcagcatccacagcgagaagagccagatcgagaggaagaacatcctgaagggcctgctggagggggactatgaggtggtggtgtccactggagtgctgggccggggcctggacctgatctctgtgcggctggtggtgaactttgacatgcccagctccatggatgaatatgtgcaccagatcggccgggtgggccgcctgggccagaatggaacagccatcaccttcatcaacaacaacagcaagaggctcttctgggacatcgccaagagggtgaagcccaccggcagcatcctgcccccccagctgctgaacagcccctacctgcatgaccagaagaggaaggagcagcagaaggacaagcagacccagaatgacctggtgactggagccaacctgatggacatcatcaggaagcatgacaagagcaacagccagaagtag

SEQ ID NO: 29922 - DNA, 1860 bp, Artificial Sequence
  derived and/or modified sequence
atgttcgtgccccggagcctgaagatcaagcggaacgccaacgacgatggtaaatcatgtgtcgctaaaatcattaaaccagatccagaggacctccagctcgataagtctagggatgttcctgtcgatgctgtcgccaccgaggcagcgaccatagatcgacacatcagtgagtcttgccccttccccagccctggcggccagctagccgaggtgcattccgtaagtccagagcagggtgcaaaagattcacacccaagtgaggaaccggtgaaaagcttttccaaaacccagcgctgggcagaaccaggggagcccatctgcgtggtgtgcggaaggtacggggagtacatctgtgataaaactgatgaagacgtctgcagtctggagtgtaaggccaagcacctgctccaggttaaggagaaagaggagaagagtaagttgtctaatcctcagaaagctgatagcgagccagagagtcccttgaatgcatcctacgtctataaagagcacccttttatcctcaacctccaggaagaccagattgagaacctcaagcagcagttggggattctcgttcagggccaggaggtcaccagacctatcatcgactttgagcactgctccctgcctgaagtgctgaatcataatctcaagaaatctggctacgaggtgcctaccccgatccaaatgcagatgatacctgttgggctcttgggacgcgacatcctcgcaagcgccgacacagggtcaggcaagactgccgccttcctgctccctgtgatcatgagagccctatttgaaagcaagactccgtctgccttgattttgacgcctaccagagagctggctatacagatagagcggcaggccaaggaactgatgtccggcctcccgcgtatgaagaccgtgctcctggtgggcggtttaccattaccacctcaactgtaccggctgcagcagcacgttaaagtcatcatcgctacacccgggcgacttctggatatcataaagcaatcatctgtcgagttgtgcggagtcaagattgtggtggttgatgaagccgatactatgctgaagatggggtttcagcagcaagtcctggatatccttgagaatattccaaatgactgtcagaccattttggtgtctgctacaatcccgacctctatagagcagctggcctcccagctcctgcataaccccgtgcgcattattactggcgaaaagaatctgccatgtgcaaatgtgaggcagatcatcctttgggtggaggacccagctaagaagaaaaaattatttgaaatcctgaacgataaaaaactgtttaagccacccgtgctggtctttgtcgattgcaaactcggcgccgacctgctgtcagaggctgtgcagaaaattactggcctgaagtcaatctccatccatagtgagaagtcacagattgaaaggaagaacatccttaaaggtttgctagaaggagattacgaggttgtggtttcaactggggtgctgggtagaggcttagatctgatttctgtgcgcttagtggtcaactttgacatgccctccagcatggacgagtatgtacaccaaatcggtagggtaggacgcctgggacagaatggcactgcaattacctttattaacaacaatagcaagaggctgttctgggacatcgccaaacgggttaaacccaccgggagcatcctgccccctcagctgctcaacagtccatacctgcatgaccagaagcgaaaggagcagcaaaaagataaacagacacagaacgatctggttaccggggctaatctcatggacattatcaggaagcacgataagtcaaactcacagaagtag

SEQ ID NO: 29923 - DNA, 1860 bp, Artificial Sequence
  derived and/or modified sequence
atgtttgtccccaggtctctgaagataaaacgaaatgccaacgacgacggaaagagctgcgtggccaagataataaaacctgatcccgaggatttgcaactggacaagagtcgggacgttcccgtcgacgccgtagctaccgaggccgcaacgattgacaggcacatatctgaatcctgccccttcccgtcaccgggtggccaactcgccgaagtgcatagcgtttcaccagagcagggcgctaaggactcacacccatctgaggagccggtgaagtcctttagcaagacccagcgctgggcagagcccggagagccgatatgcgtggtgtgcggacggtatggggagtacatctgtgacaagaccgatgaggatgtgtgctccctggaatgcaaggcaaaacatttactgcaagtgaaggagaaagaggagaagtccaagcttagtaatcctcagaaggcggattcagagcctgagagccctctgaacgcaagctatgtgtataaggagcaccctttcatcttaaatctgcaggaggaccagattgagaatttgaaacagcagctcggtatcctggtgcaagggcaggaggttacacgccctataatcgactttgaacattgtagccttccggaagtgcttaatcataatttgaaaaagtcgggatacgaggtgcccaccccgatacagatgcagatgatccctgtcggcctacttggcagagatatcctggccagcgccgatacagggtccggtaagacggctgcattcctgctaccggtaattatgagggctttattcgagagtaagactccctccgcccttatactaacgccaacgagggagctggccattcagattgagagacaggcgaaagagctgatgtctggcctccctcgcatgaaaaccgtgcttctggtcgggggtctcccactgcctccccaattgtatagactgcagcagcacgtgaaggttatcatcgccaccccagggagactcctggatattattaagcagtcatctgtggaactgtgcggcgtcaaaatcgtggtggtggatgaggccgacactatgctaaaaatgggttttcaacagcaagtgttagacatactggagaatatccccaacgattgccagacaattctcgtctcagctacaattccaacttctatcgagcagcttgctagtcagctgttacacaatcctgttagaatcatcaccggggagaaaaacttgccatgtgccaacgttcggcagattattctttgggtggaagacccagcaaagaaaaaaaagctttttgaaatcctcaacgacaaaaaactgttcaaaccccctgtgcttgtgttcgtcgactgtaaactgggcgctgacctcctgagcgaagcagtccagaaaataaccgggctcaagagcatttctatacattctgaaaagtctcagatcgagcgaaagaatatcctaaagggtttgctggaaggtgactatgaggttgtggtgtcaactggggtcctgggaaggggcctggacctcatctccgtgaggctcgtggttaacttcgatatgccttcaagcatggatgaatatgtccatcaaataggccgagtcggacgcctgggccagaatgggaccgccatcaccttcattaacaacaattcaaaaagattattctgggacatagcaaaacgagttaagccaaccgggagtatcctgccgcctcagttgttaaattctccttacctgcatgaccagaagaggaaggagcaacagaaagacaaacaaacccagaacgacttggttactggggcaaatctgatggacattataaggaagcatgacaagtccaactctcaaaaatag

SEQ ID NO: 29924 - protein, 141 aa, Artificial Sequence
  derived and/or modified sequence
MTIMVEDIMKLLCSLSGERKMKAAVKHSGKGALVTGAMAFVGGLVGGPPGLAVGGAVGGLLGAWMTSGQFKPVPQILMELPPAEQQRLFNEAAAIIRHLEWTDAVQLTALVMGSEALQQQLLAMLVNYVTKELRAEIQYDD

SEQ ID NO: 29925 - protein, 152 aa, Artificial Sequence
  derived and/or modified sequence
MERLKSHKPATMTIMVEDIMKLLCSLSGERKMKAAVKHSGKGALVTGAMAFVGGLVGGPPGLAVGGAVGGLLGAWMTSGQFKPVPQILMELPPAEQQRLFNEAAAIIRHLEWTDAVQLTALVMGSEALQQQLLAMLVNYVTKELRAEIQYDD

SEQ ID NO: 29926 - DNA, 459 bp, Artificial Sequence
  derived and/or modified sequence
atggaaagattaaaaagtcataagccagcaacaatgactatcatggttgaagacatcatgaagttactgtgttctttgtctggggaaaggaagatgaaggcagccgtgaagcattctgggaagggcgctttggtgacaggcgccatggcctttgtgggtggtcttgttgggggccctcctggactggccgtcggtggcgctgtcggtggactgctgggcgcctggatgacgtcgggtcaattcaaaccagtacctcagatactgatggagctgccacccgctgaacaacagaggctgttcaacgaagccgcagccataattcgccatttagaatggactgacgctgtccaactcactgctctcgtgatgggatcagaagcccttcaacagcagcttctcgctatgctagtcaattatgtgaccaaagaactgcgggcggagatacagtacgatgattag

SEQ ID NO: 29927 - DNA, 459 bp, Artificial Sequence
  derived and/or modified sequence
atggagcggctgaagagccacaagccagccaccatgaccatcatggtggaggacatcatgaagctgctgtgcagcctgtctggagagaggaagatgaaggctgctgtgaagcacagcgggaaaggagccctggtgactggagccatggcctttgtgggcggcctggtgggcggccccccaggcctggccgtgggcggcgctgtgggcggcctgctgggcgcctggatgaccagcggccagttcaagcctgtgccccagatcctgatggagctgcccccagctgagcagcagaggctcttcaatgaagctgctgccatcatccgccacctggagtggacagatgctgtgcagctgacagccctggtgatgggcagcgaggccctgcagcagcagctgctggccatgctggtgaactacgtgaccaaggagctgcgggcagagatccagtatgatgactag

SEQ ID NO: 29928 - DNA, 459 bp, Artificial Sequence
  derived and/or modified sequence
atggagcggctgaagagccacaagcccgccaccatgaccatcatggtcgaggacattatgaagctgctgtgttccctctccggggaacgcaaaatgaaggctgcggtcaagcacagcgggaagggggctctggtcacaggagcaatggcatttgttggaggcttggtagggggccccccggggctggccgtggggggggcagtggggggcctgttaggggcctggatgaccagcggacaattcaagccggtgccacagattctgatggaattgccaccagcggaacagcaacgcctcttcaacgaggccgcagcaatcatacggcatcttgaatggacggatgcagttcaactcacagcactggttatgggaagcgaagctcttcagcagcagctgctcgcaatgctggtcaattatgtgacaaaagagctccgcgcggaaatccagtacgatgattag

SEQ ID NO: 29929 - DNA, 459 bp, Artificial Sequence
  derived and/or modified sequence
atggagaggctcaaaagccataagcctgccaccatgacaatcatggtggaggacattatgaaattgctttgttccctttcgggcgaaagaaaaatgaaggcagctgtaaagcactctggcaagggagccctggtgacgggagccatggcttttgtgggtggcttggtcggcggacctccgggactggctgttggcggagcagtaggcggattgctaggcgcatggatgacaagtggccagttcaagcccgtgccccagatcctgatggaactaccccctgccgagcagcagcgcctgtttaacgaggcagccgcaataattcggcacctggaatggacagatgcagtccagttgaccgcactggtcatgggttcagaagctcttcaacaacaactactagccatgctcgtgaactatgtcaccaaggaactaagggctgaaattcaatacgacgactag

SEQ ID NO: 29930 - DNA, 3702 bp, Artificial Sequence
  derived and/or modified sequence
gggccgccaccaaggcctgcgcgaccctccgcggggctggggagctgggcggggagcccggggcctgccaggcccgggctgcagccgcgtctgatcgccgagcgcgccgcgtagacctccgctcccccaggcccgccacgatgactatcatggtggaggacatcatgaagctgctgtgctccctttctggggagaggaagatgaaggcggctgtcaagcactctgggaagggtgccctggtcacaggggccatggccttcgtcgggggtttggtgggcggcccaccgggactcgccgttgggggggctgtcggggggctgttaggtgcctggatgacaagtggacagtttaagccggttcctcagatcctaatggagctgccccctgccgagcaacagaggctctttaacgaagccgcagccatcatcaggcacctggagtggacggacgccgtgcagctgaccgcgctggtcatgggcagcgaggccctgcagcagcagctgctggccatgctggtgaactacgtcaccaaggagctgcgggccgagatccagtatgatgactaggccgcacctccggggaggtggggggcccctttaaatgactctgtgattctgaagaggtggcttgggagttgggagaagcccagcggatgccccctggggaatctccacatcatcagtgtattactagtaatgtcccgctggagaggccaccgctgtgcagtgtcatgttccagaaattactgatgaagcagcatgtgttggtggcatgtgcactggcctgccatgacagccctctgactggccccccagtgaagagtaaaggcctgcctgccgcaggcttcggaggcgtctgctgagtcctctcacccgcatgggtctggggaagtgatcacgctcagccgacggtctgaccacacttcatcctccccccggggccttctcatcttgggagatgactcctcttcagagcacctgctgcaggactggatcccacccccctgcaggtcctggggtctcagggccttggagcagcccatgctggaatcatgtttacctcctagtgcaaccgtcccctacccagggactgtcgaatggccccacggaggggacgggcggcctgctgagtgaagccacaaataccgagtggacttgaccccggcccccactaggctgcacacctagactcgccctgccagggcctcgctcttcccatctgaaaagtcctggtagttcttgaggtttacttctcaaatgaaatatttttagtaaaaagtacaggtatatctcggagatattgtgggttcagttccagaccacctcggtaaagccaacatcacaataaagcaaggaagcgcattgttttagtttcccagtgcatctaagtcatgtttactgcatattgcagtccactaaatgtgcaatagcattatgtctaacaaatgtacaaaccttaatttaaaaatatttactgttcaaaatgctgacacagaaacgcaaagtgagcacatgctgttggaaaatggtgccaaatagacttgcctgatgccaggctgctacaaaccttcaatttaaaaaaaaaacacagtattcacaaagcatagtagaatgaggtatgcctgtattgctctttctgaagtggtgtgatataaaccatctctaagaaatgtttctaccctaaagatttccccagtacagtcagctctccgtaactgtggtctccacatttagatccaaccagccttggataggaaatatttgaaaaaagaaattgcattggtactgaacacgtacagacctttttttcttgccattattccctaaacaatatggtgtagcatatttacatagcatttatattgtatttggtattataagaaatctagagatgatttaaattatacaggaaggtgtgcgtaggttacgtgcaaacgctatgccattgcccatcagggacttgagcatcctcagatgtcggtgtctgagggttgaggttgcagtcctggaacccatcccccatggatactgaggcatagctgtactgtgtgttttcactttgctttcagaactacgacttgaatgtgatcgattacaataaatgtttttctaaaaagccattttcccacatattatgtgtaaaatatctctaatattcaaagtcttacaaatggaacaagagggaaggtaccagatttgtggctttaaagaatgcaagagtaggtcaggtgaggtggctcatgcttgtaatgtcggcacttttggaggccaaagtgggaggatcgcttgaggccaagagtttgaaactagcctgggcaatatagtgagacctccatctctacaaaaaatgttattccttggtccccaggtcctggggcagggcagggacttggggctctcctctcaggccctggaggctcggagggaggcacttctgctgaggccctgcttataggaaagctcagtatcctggcacctccatgtgtgtaaggacgtcagggtgaattataacccatggtgattaaggaagggccgagcctttctcttgcagagcgattgctcttctgctggcctcgtctagcacaaatcaggtgccctagcacaggccacactcctggagttaatgaagccactttaatcatttatatgccacttaagttgatgggggacagggcaggggtgggaaggaggggttgtctgtctgtgaaaactgagtgtggcttttcttgttgaactgatcattcctgctcttcctgcaaataagtcctgcatacggaccctggaactaaaaatggaaaatcagagcatgccccctcccaattttgtatagctttagtgggctctaaagttgcccgtttttagtgtgaaggaaaaaacgttgatttgcagatatcgtgagaatgaaacctcaacaaagatgtttggttcagtgcttcaaagttgggggacactttttccatgttgaacaaatgccaacttctccggttgcttacagcaaatccttctggaacaatcggggctgaaattgagttgcctttgttaggcgattgggccccattcattcttactcgtgcatcaggtcctggtctgtgtcaggcccaggggacacaggtggtcccagctcagaggcccagtgtccactgcagcccctcccacagcctgcccacccctactgcagggaaaaatgcccagggaggagatggtccaactcctgatcagttttgtgtccgatggagcaggccttgctgagtgaagacactggaactagctgggtcctggggtgacttggaggctttgggcctaaaagggcagcctgaacctggagtcttatctcccccaggagccgaaagcacttttcttgatttcccccaggaaatcaagcgctgcttctcagctcctgtggttttagtatttatatatctgtatcttctttgtagaaatttatttatttttgaataagtaatacctgcctggtacaaaatttaaaaggtacgggagggcgcaagctgcaagggaaggcctgctcctatgccgaccccagaggcagccactgttaccaatttcatgtgtattcctttaactctgttttaaagtaagtctctgaaaactgttcatttccttttgtcagtatttgttgctgaaaacctagaaaaacccagaaaatataatgaaataaaaactacaaatttcacaacccagaaaa

SEQ ID NO: 29931 - DNA, 895 bp, Artificial Sequence
  derived and/or modified sequence
caagagcaggcctggagacccgggagtgccttggggagagggtccccgccctgccgggagcccggccctcccggtgccggggtggacactgttagtgtagtcattgtccctatggagaaactgaggcatggagaggctgaagtcacacaagcccgccacgatgactatcatggtggaggacatcatgaagctgctgtgctccctttctggggagaggaagatgaaggcggctgtcaagcactctgggaagggtgccctggtcacaggggccatggccttcgtcgggggtttggtgggcggcccaccgggactcgccgttgggggggctgtcggggggctgttaggtgcctggatgacaagtggacagtttaagccggttcctcagatcctaatggagctgccccctgccgagcaacagaggctctttaacgaagccgcagccatcatcaggcacctggagtggacggacgccgtgcagctgaccgcgctggtcatgggcagcgaggccctgcagcagcagctgctggccatgctggtgaactacgtcaccaaggagctgcgggccgagatccagtatgatgactaggccgcacctccggggaggtggggggcccctttaaatgactctgtgattctgaagaggtggcttgggagttgggagaagcccagcggatgccccctggggaatctccacatcatcagtgtattactagtaatgtcccgctggagaggccaccgctgtgcagtgtcatgttccagaaattactgatgaagcagcatgtgttggtggcatgtgcactggcctgccatgacagccctctgactggccccccagtgaagagtaaaggcctgcctgccgcaggcttcggaggcgtctgctgagtcctctcacccg

SEQ ID NO: 29932 - DNA, 459 bp, Artificial Sequence
  derived and/or modified sequence
atggagagactgaagagccacaagcccgccaccatgaccatcatggtggaggacatcatgaagctgctgtgcagcctgagcggcgagagaaagatgaaggccgccgtgaagcacagcggcaagggcgccctggtgaccggcgccatggccttcgtgggcggcctggtgggcggcccccccggcctggccgtgggcggcgccgtgggcggcctgctgggcgcctggatgaccagcggccagttcaagcccgtgccccagatcctgatggagctgccccccgccgagcagcagagactgttcaacgaggccgccgccatcatcagacacctggagtggaccgacgccgtgcagctgaccgccctggtgatgggcagcgaggccctgcagcagcagctgctggccatgctggtgaactacgtgaccaaggagctgagagccgagatccagtacgacgactag

SEQ ID NO: 29933 - protein, 369 aa, Artificial Sequence
  derived and/or modified sequence
MTLEAIRYSRGSLQILDQLLLPKQSRYEAVGSVHQAWEAIRAMKVRGAPAIALVGCLSLAVELQAGAGGPGLAALVAFVRDKLSFLVTARPTAVNMARAARDLADVAAREAEREGATEEAVRERVICCTEDMLEKDLRDNRSIGDLGARHLLERVAPSGGKVTVLTHCNTGALATAGYGTALGVIRSLHSLGRLEHAFCTETRPYNQGARLTAFELVYEQIPATLITDSMVAAAMAHRGVSAVVVGADRVVANGDTANKVGTYQLAIVAKHHGIPFYVAAPSSSCDLRLETGKEIIIEERPGQELTDVNGVRIAAPGIGVWNPAFDVTPHDLITGGIITELGVFAPEELRTALTTTISSRDGTLDGPQM

SEQ ID NO: 29934 - DNA, 1110 bp, Artificial Sequence
  derived and/or modified sequence
atgaccttggaggctatcagatattcaaggggatcactgcagattctggaccaactgctcctccctaagcagagtcgctacgaggcagtcggaagtgtgcatcaggcctgggaggcaatccgcgctatgaaggtgcgtggcgcccctgccatcgctttggttggatgtctctcattggccgtcgaattgcaggccggagccggcggccccgggcttgccgccctcgttgcttttgttagggacaaattatctttcctggttacggcccggccaacagccgtcaacatggcgagagcggcgcgcgacttggctgacgtcgctgcaagggaggcggaacgtgagggcgcaaccgaggaggcagttcgggaaagagttatttgttgtactgaagatatgcttgagaaagatctccgcgataatcgttcaattggagacctgggtgctcggcatctgcttgagcgggtcgcgccctcagggggtaaggtgactgtcctcacccactgtaataccggtgcattagctaccgcaggctacggtacggctctgggcgtgatcaggtccctgcacagcttaggtcggcttgaacacgcattctgtaccgaaacgagaccttataaccaaggtgccaggttgacggctttcgaattagtctatgagcagatccccgccacattgatcacggactctatggtcgccgccgccatggcccataggggcgtgtctgccgtggttgtcggtgctgatcgcgtcgtggcaaatggagatacagctaacaaggtggggacctatcagttagccatcgtggccaagcaccatggcattccgttctacgtggctgccccgtcttcctcctgcgacctgcgcttggagactggtaaagaaatcatcatcgaagaaagacccggtcaggaactcacagacgtgaatggggttcgaatcgccgccccagggatcggcgtgtggaaccccgcctttgatgtgacgccgcacgacctgatcactgggggcatcattacagaacttggcgtgttcgccccagaggaactgcggacagccctgaccactactattagcagccgcgacggaacattggacggtcctcaaatgtag

SEQ ID NO: 29935 - DNA, 3177 bp, Artificial Sequence
  derived and/or modified sequence
ccccgctcccaagtgcgcgcggacccctagctccctctgagttgcgctgggcttggctgctgcaccatgaccctggaggcgatccgctactcgcggggctccctgcagatcctagaccagctgctgctgcccaagcagagccgctacgaggcggtgggctcggtgcaccaggcctgggaggccatccgcgccatgaaggtgcggggcgccccggccatagccctggtgggctgtctcagcctcgccgtggagctgcaggcgggcgccgggggaccgggactcgccgcgctcgtggccttcgtgcgcgacaagctgagcttcctcgtcaccgcccggcccaccgctgtcaacatggcccgcgccgcccgcgacctggctgatgttgcagcccgggaggccgaacgggagggcgctacggaagaggcggtccgggagagagtgatctgctgcaccgaggacatgctggagaaagacctcagagacaaccgaagcattggggacctaggagcccgccacctcctggagcgggtggcccccagcggtggcaaggtgactgtgctgacccactgtaacactggtgctctggccaccgctggctatggtacagccctaggtgtgattcgctcactgcacagcctgggccgcctggagcatgccttctgcacagagacccggccctacaaccagggagcccggctgacggcctttgagctggtctatgagcagatccccgccacccttatcaccgacagcatggtggctgctgccatggcccataggggcgtgtcagctgtggtcgtgggagctgaccgcgtggttgccaacggcgacacagccaacaaggtgggcacctaccagctggccattgtcgccaagcaccatggcattcccttctacgtggctgcccccagctcttcatgtgacctccgtctggagaccggcaaggagatcattattgaagagcgaccgggccaggagctgaccgatgttaatggggtccggattgcagcacctgggattggagtttggaatcctgccttcgatgtcaccccccacgacctcatcactggtggcatcatcacagaactgggggtctttgcccctgaggagctccggacagccctaaccaccaccatctcttccagggatggaaccctagatggaccccagatgtaaccaactcagctctccctagcctgcctctctaggtttttcaatacatttcttgaatggctacccaaaagctgaccgtccagcccctgaccacacttgttcctagtgcagggagctcagacagggccttccatctagagcccagcacctagagccaggctgcccagattcaaatcctgactccgccacttttcccactgtatgatcttgggcaagtcacttcacctctctgtgccttggtttcctcatttataaaatgtggataacaggccgggcgcagtggctcacacctgtaatcccagcactttgggaggccgaggcaggtggatcacaagatcaggagattgagaccatcctggctaacatggtgaaaccccatctctactaaaaatacaaaaaattagccgggtgtggtggtgggcacctgcagtcccagctacttgggaggctgaggcaggagaatggcgtgaaactgggaggcagagcttgcagtgagccgagatagcgccactgcactccagcctgggcaacagagcgagactccgtctcaaaaataaatataattaattaattatttaattaaaaaaataaaaaataaatgtggataatactagtacctccctcttaaggtcagggctggagctagggtgacatctccagggcagaattttaagaggacaccaaaaaagctcagcaaccaagataaaaaatattttaaagcaatattttgttttgggttttttttttttgagatcaagtatcactcgttacccaggctggaatgtagaggcgagatctcagctcactgaaacctgtgcctccccggttcaagcgattctcctgccacagcctcctgagtagctgggattacaggcatgcgccaccatgcccagctaatttttctatttttagtagagacatgatttcaccatgttggccaggctggtctcgaactcctgactcaaatgatccccctgcctcagcctcccaaagtgctgggactacaggcatgagccactgtgcctgaccttacagcagtattttttaaaaatcaaaattaatgcaaaaatccatgatgaggccaggcttggtggctcatgcctgtaattccagcactttgggaggatcccttgagcccaggtgtttgagaccagtttgggtaacataggaagagcttgtctctacaaacaaaaatttaaaaacaatgagctgggcatggaactcacacctctagccccagctactcaggctgaagtgggaggatggcttgagcccaggagttcaaggatgcagtgtgctttgattgcactactgcacttcaccctaagcaacagagtgagaccccatctctttaaaaaaaaaaaaaaatccatgatgaacaaaacaagtatttgtttgagacggggtctcgctctgtcgcccaggctggagtacagtggtgccatctcagctcactgcaacctccgccttctgggttcaagcgactctcctgcctcagcctcccgagtagctgggattacaggagcctggcactatgcctggctaatttttgtatttttattggagacaccatgttagtcgtggctggtctccaactcctgacctcgggtgatccgcgccccgcggcctccgaaagtgctgggattacaagcgtgagccaccgtgcccggcctaaataaaattttgaagaggctagaaccccgcacttgtgccttgagcttactgacctcaacaccctggttccactaaaactttatttacaaaattatgctgccggtctgcaggatgtagtttaacaatttgattattttggatattaaaatattttttaagtcttgaaaatattgtttactattaccaaagtttttgaaccttcttaaattctgtaccagaggtgagtgccacaccctaacctagtctgagtttttatgtgtaaagatcataaaacgttgtaagttttctaaaacacataagctctcaataaacgttagcttatcattgtca

SEQ ID NO: 29936 - DNA, 1110 bp, Artificial Sequence
  derived and/or modified sequence
atgaccctggaggccatccgctacagccggggcagcctgcagatcctggaccagctgctgctgcccaagcagagccgctatgaagctgtgggctctgtgcaccaggcctgggaggccatccgggccatgaaggtgcggggggccccagccatcgccctggtgggctgcctgagcctggccgtggagctgcaggccggggccggcggccctggcctggccgccctggtggcctttgtgcgggacaagctgtccttcctggtgacagcccggcccacagctgtgaacatggcccgggccgcccgggacctggctgatgtggccgcccgggaggccgagcgggagggcgccacagaggaggccgtgcgggagagggtcatctgctgcacagaggacatgctggagaaggacctgcgggacaacagaagcattggagacctgggcgcccggcacctgctggagcgggtggcccccagcggcggcaaggtgacagtgctgacccactgcaacacaggagccctggccacagctggctacggcacagccctgggcgtcatccgcagcctgcacagcctgggccgcctggagcacgccttctgcacagagacccggccctacaaccagggcgcccggctgacagcctttgagctggtgtatgagcagatcccagccaccctcatcacagacagcatggtggccgccgccatggcccacagaggagtgtctgctgtggtggtgggcgctgacagagtggtggccaatggagacacagccaacaaggtgggcacctaccagctggccatcgtggccaagcaccacggcatccccttctacgtggccgcccccagcagcagctgtgacctgcggctggagaccgggaaggagatcatcatcgaggagaggcctggccaggagctgacagatgtgaatggagtgagaattgctgcccctggcatcggcgtgtggaacccagcctttgatgtgacccctcatgacctgatcaccggcggcatcatcacagagctgggcgtgtttgcccctgaggagctgaggacagccctgaccaccaccatcagcagcagagatggcaccctggatggcccccagatgtag

SEQ ID NO: 29937 - DNA, 1110 bp, Artificial Sequence
  derived and/or modified sequence
atgaccctggaggccatccggtacagccggggcagcctgcagatcttggatcagcttctgctaccgaaacaatctcggtacgaggctgtggggtctgtgcaccaggcatgggaggcaattcgcgcgatgaaagtgcggggggcccccgccattgcactggtgggatgtctgtcactcgccgttgagctccaggccggagctggcggccccggcctggctgccctggtggctttcgttcgcgataaactgagcttcttggtgacagctagacccacagcagtcaacatggcccgagcagccagagacctggctgatgtggccgctcgtgaagcggagcgcgagggcgcaactgaggaagccgtgcgcgagagggtgatttgctgcacagaagacatgttggagaaagaccttcgggacaaccgatctatcggtgatctgggcgcgagacacctccttgaacgggtggcccccagcggggggaaggtgactgtgcttacgcactgcaataccggggctcttgctacggccgggtatgggaccgctctgggggttattaggtcgctccattctctcgggagattggaacacgccttctgtactgagacccgcccctataatcagggggccagactgactgcctttgagttggtttacgaacaaataccagcaacgctgatcaccgacagtatggttgccgccgccatggcccataggggagtgagtgcggtagttgtaggcgccgatagagtggtcgccaacggcgacaccgcaaataaagtaggaacgtatcaactcgccattgtggccaagcatcacgggatcccattctacgtggccgctccctctagcagctgtgatctacggttagaaacaggaaaggagatcattatagaggagcgccccggccaggaactgactgatgtaaacggggtgaggatcgccgcaccagggatcggcgtttggaaccccgcgtttgatgtgacgccccacgacctgataacaggcggaatcattacggagttaggggtgttcgctccagaagagctgcgaaccgcactgacaactactatcagttcccgagatggcaccctggacggtccccagatgtag

SEQ ID NO: 29938 - DNA, 1110 bp, Artificial Sequence
  derived and/or modified sequence
atgactctggaagctattcgttacagccgagggtcactgcagattcttgatcagctgcttcttcccaagcagtcgagatacgaggctgtcgggtctgtccatcaagcttgggaggctatccgcgcaatgaaggtgcggggagccccagccattgcactcgtgggatgcctgtcattggcggtcgagctacaggcgggtgccggagggcctggtctggctgcactggtggccttcgtgagagacaagctcagcttcctggtgactgctcgtccaacagctgtaaatatggcccgagcggctcgggacctggcggatgtcgccgctcgcgaagccgagcgggaaggggctacagaggaagcagtccgcgaacgagtgatctgctgtacggaggacatgcttgaaaaagacctgagggataataggtccataggcgacctcggcgctaggcacttgctcgagcgagttgccccaagcggaggcaaagtcacagtgctcactcactgcaatactggggctctggctacagccggatacgggacagccctgggggttatacgttcactgcattcactcggcagactggagcacgctttctgtacagaaaccagaccctataaccaaggggctaggctaacagcattcgaacttgtgtatgagcagatcccagcaacgttgatcaccgactcgatggttgcagccgctatggcccatagaggagtgtcggccgtcgtggtgggtgcggaccgtgttgtagcaaatggggacaccgccaacaaggtcggcacttatcaactagccattgtggcgaaacatcatggaattcccttctacgttgctgctccaagtagctcctgcgatcttagacttgagaccggcaaagaaatcatcatagaggagcgacctggtcaggagctgaccgatgtgaatggggtgcggatcgctgcccctgggatcggagtttggaaccccgctttcgatgtcaccccgcacgatctcatcaccggaggtatcatcaccgaattaggggtcttcgccccagaagagctgaggactgctcttaccactacaatcagcagcagagacggcacactcgatggccctcagatgtag

SEQ ID NO: 29939 - DNA, 1110 bp, Artificial Sequence
  derived and/or modified sequence
atgaccttggaagcaatccgatacagtcgcggaagccttcaaatcctcgatcagttattactacctaagcaatcaagatatgaagcagtggggagtgtgcatcaggcctgggaggccattagggcaatgaaggtgaggggagcacctgccatagcactcgtcggatgtctttcactcgccgtggagctgcaggccggggcaggcggaccggggctggctgcgcttgtagctttcgtgagagataagctctctttcctagtgacagcccgacctacagctgtaaatatggcgagagctgctcgggacctggctgatgtagccgccagagaagcggagagggagggggccaccgaggaggctgttagggagcgggtgatatgctgcacggaagacatgttggaaaaggacttgagggacaatcggagtatcggagacttgggcgctaggcatctgctagaacgagtggcaccatccggcgggaaagtgacagtgctgacacactgtaacacaggggcactggccaccgcgggatatgggacggcactgggagtgatcaggagcctccattccctgggacggctcgagcacgctttttgcaccgaaactcgtccatataatcagggagcaagactaactgccttcgaacttgtatatgagcaaatcccagctaccctgatcacggattccatggtcgcagctgctatggcacatcggggggtgtcagctgttgtggtgggagcggacagagtggtggctaacggtgacaccgccaacaaagtcggcacttatcagctggccatcgtagccaaacaccacggcattccattttacgtggccgccccttccagctcttgtgacctgcgcctagaaactggcaaggagatcataatcgaagaacggcccgggcaggagttaacagacgtgaacggtgtgcgcatcgccgcccccggaatcggagtctggaacccagcctttgacgtgactcctcatgatcttatcactggcgggatcatcactgagctgggcgtctttgctccagaggaacttcgcaccgcactgacaaccactatctctagtagagacgggactctcgacggtcctcaaatgtag

SEQ ID NO: 29940 - DNA, 1110 bp, Artificial Sequence
  derived and/or modified sequence
atgacgctggaggcaataagatactcacggggcagtcttcagattttagaccaactgctcctacccaagcaaagccggtacgaagcagtcgggagcgtccaccaggcctgggaggcaatcagagctatgaaagtgcgtggtgcacctgccattgccttggtcggatgtctgtctttagcggtcgagttacaagccggcgcaggaggacctggcctagccgccctagtagccttcgtgcgtgacaaactgagcttcctcgtaactgcccgccccacggcagtgaatatggcaagggctgccagggacctcgccgacgtggcggccagagaggcagaaagagaaggtgcaactgaagaggctgtaagggaaagggtcatctgctgtacagaggacatgctggaaaaggatttacgggataacagaagcattggtgacctgggtgcacgtcacttgttggaacgcgtcgcaccatccggaggtaaggtgaccgtgctgacacattgcaacacaggcgcgttggctacggccggatacggaacagctctcggcgtgataaggagcctgcactcgctgggcagattggagcacgccttctgcacagagactagaccctacaaccaaggagcaagacttacagcattcgagcttgtgtacgaacaaataccagcgacactgataacagattccatggtggccgcagccatggctcacaggggagtttccgcggtggtggttggagcagacagagttgtggcgaacggggacaccgctaacaaagtcggtacttaccagctggcaatcgttgcaaaacatcacggcattcctttttacgtcgcggcaccatcaagcagctgtgatcttcggctcgagacaggcaaggagatcatcattgaggagaggccaggccaggaattaaccgacgttaacggtgtccgcatcgccgctccagggattggggtgtggaatccagcttttgatgttactcctcatgatttaattaccggaggtattataacagagcttggggtcttcgcccccgaggaacttagaacagcgctcaccacaacgatatccagtcgcgatggaactctcgatggtccccagatgtag

SEQ ID NO: 29941 - DNA, 1110 bp, Artificial Sequence
  derived and/or modified sequence
atgaccctggaggccatcagatacagcagaggcagcctgcagatcctggaccagctgctgctgcccaagcagagcagatacgaggccgtgggcagcgtgcaccaggcctgggaggccatcagagccatgaaggtgagaggcgcccccgccatcgccctggtgggctgcctgagcctggccgtggagctgcaggccggcgccggcggccccggcctggccgccctggtggccttcgtgagagacaagctgagcttcctggtgaccgccagacccaccgccgtgaacatggccagagccgccagagacctggccgacgtggccgccagagaggccgagagagagggcgccaccgaggaggccgtgagagagagagtgatctgctgcaccgaggacatgctggagaaggacctgagagacaacagaagcatcggcgacctgggcgccagacacctgctggagagagtggcccccagcggcggcaaggtgaccgtgctgacccactgcaacaccggcgccctggccaccgccggctacggcaccgccctgggcgtgatcagaagcctgcacagcctgggcagactggagcacgccttctgcaccgagaccagaccctacaaccagggcgccagactgaccgccttcgagctggtgtacgagcagatccccgccaccctgatcaccgacagcatggtggccgccgccatggcccacagaggcgtgagcgccgtggtggtgggcgccgacagagtggtggccaacggcgacaccgccaacaaggtgggcacctaccagctggccatcgtggccaagcaccacggcatccccttctacgtggccgcccccagcagcagctgcgacctgagactggagaccggcaaggagatcatcatcgaggagagacccggccaggagctgaccgacgtgaacggcgtgagaatcgccgcccccggcatcggcgtgtggaaccccgccttcgacgtgaccccccacgacctgatcaccggcggcatcatcaccgagctgggcgtgttcgcccccgaggagctgagaaccgccctgaccaccaccatcagcagcagagacggcaccctggacggcccccagatgtag

SEQ ID NO: 29942 - RNA, 1110 nt, Artificial Sequence
  derived and/or modified sequence
augaccuuggaagcaauccgauacagucgcggaagccuucaaauccucgaucaguuauuacuaccuaagcaaucaagauaugaagcaguggggagugugcaucaggccugggaggccauuagggcaaugaaggugaggggagcaccugccauagcacucgucggaugucuuucacucgccguggagcugcaggccggggcaggcggaccggggcuggcugcgcuuguagcuuucgugagagauaagcucucuuuccuagugacagcccgaccuacagcuguaaauauggcgagagcugcucgggaccuggcugauguagccgccagagaagcggagagggagggggccaccgaggaggcuguuagggagcgggugauaugcugcacggaagacauguuggaaaaggacuugagggacaaucggaguaucggagacuugggcgcuaggcaucugcuagaacgaguggcaccauccggcgggaaagugacagugcugacacacuguaacacaggggcacuggccaccgcgggauaugggacggcacugggagugaucaggagccuccauucccugggacggcucgagcacgcuuuuugcaccgaaacucguccauauaaucagggagcaagacuaacugccuucgaacuuguauaugagcaaaucccagcuacccugaucacggauuccauggucgcagcugcuauggcacaucggggggugucagcuguuguggugggagcggacagagugguggcuaacggugacaccgccaacaaagucggcacuuaucagcuggccaucguagccaaacaccacggcauuccauuuuacguggccgccccuuccagcucuugugaccugcgccuagaaacuggcaaggagaucauaaucgaagaacggcccgggcaggaguuaacagacgugaacggugugcgcaucgccgcccccggaaucggagucuggaacccagccuuugacgugacuccucaugaucuuaucacuggcgggaucaucacugagcugggcgucuuugcuccagaggaacuucgcaccgcacugacaaccacuaucucuaguagagacgggacucucgacgguccucaaauguag

SEQ ID NO: 29943 - RNA, 1110 nt, Artificial Sequence
  derived and/or modified sequence
augacgcuggaggcaauaagauacucacggggcagucuucagauuuuagaccaacugcuccuacccaagcaaagccgguacgaagcagucgggagcguccaccaggccugggaggcaaucagagcuaugaaagugcguggugcaccugccauugccuuggucggaugucugucuuuagcggucgaguuacaagccggcgcaggaggaccuggccuagccgcccuaguagccuucgugcgugacaaacugagcuuccucguaacugcccgccccacggcagugaauauggcaagggcugccagggaccucgccgacguggcggccagagaggcagaaagagaaggugcaacugaagaggcuguaagggaaagggucaucugcuguacagaggacaugcuggaaaaggauuuacgggauaacagaagcauuggugaccugggugcacgucacuuguuggaacgcgucgcaccauccggagguaaggugaccgugcugacacauugcaacacaggcgcguuggcuacggccggauacggaacagcucucggcgugauaaggagccugcacucgcugggcagauuggagcacgccuucugcacagagacuagacccuacaaccaaggagcaagacuuacagcauucgagcuuguguacgaacaaauaccagcgacacugauaacagauuccaugguggccgcagccauggcucacaggggaguuuccgcgguggugguuggagcagacagaguuguggcgaacggggacaccgcuaacaaagucgguacuuaccagcuggcaaucguugcaaaacaucacggcauuccuuuuuacgucgcggcaccaucaagcagcugugaucuucggcucgagacaggcaaggagaucaucauugaggagaggccaggccaggaauuaaccgacguuaacgguguccgcaucgccgcuccagggauugggguguggaauccagcuuuugauguuacuccucaugauuuaauuaccggagguauuauaacagagcuuggggucuucgcccccgaggaacuuagaacagcgcucaccacaacgauauccagucgcgauggaacucucgaugguccccagauguag

SEQ ID NO: 29944 - protein, 727 aa, Artificial Sequence
  derived and/or modified sequence
MAADSREEKDGELNVLDDILTEVPEQDDELYNPESEQDKNEKKGSKRKSDRMESTDTKRQKPSVHSRQLVSKPLSSSVSNNKRIVSTKGKSATEYKNEEYQRSERNKRLDADRKIRLSSSASREPYKNQPEKTCVRKRDPERRAKSPTPDGSERIGLEVDRRASRSSQSSKEEVNSEEYGSDHETGSSGSSDEQGNNTENEEEGVEEDVEEDEEVEEDAEEDEEVDEDGEEEEEEEEEEEEEEEEEEEEYEQDERDQKEEGNDYDTRSEASDSGSESVSFTDGSVRSGSGTDGSDEKKKERKRARGISPIVFDRSGSSASESYAGSEKKHEKLSSSVRAVRKDQTSKLKYVLQDARFFLIKSNNHENVSLAKAKGVWSTLPVNEKKLNLAFRSARSVILIFSVRESGKFQGFARLSSESHHGGSPIHWVLPAGMSAKMLGGVFKIDWICRRELPFTKSAHLTNPWNEHKPVKIGRDGQEIELECGTQLCLLFPPDESIDLYQVIHKMRHKRRMHSQPRSRGRPSRREPVRDVGRRRPEDYDIHNSRKKPRIDYPPEFHQRPGYLKDPRYQEVDRRFSGVRRDVFLNGSYNDYVREFHNMGPPPPWQGMPPYPGMEQPPHHPYYQHHAPPPQAHPPYSGHHPVPHEARYRDKRVHDYDMRVDDFLRRTQAVVSGRRSRPRERDRERERDRPRDNRRDRERDRGRDRERERERLCDRDRDRGERGRYRR

SEQ ID NO: 29945 - DNA, 2184 bp, Artificial Sequence
  derived and/or modified sequence
atggccgccgacagcagagaggagaaggacggcgagctgaacgtgctggacgacatcctgaccgaggtgcccgagcaggacgacgagctgtacaaccccgagagcgagcaggacaagaacgagaagaagggcagcaagagaaagagcgacagaatggagagcaccgacaccaagagacagaagcccagcgtgcacagcagacagctggtgagcaagcccctgagcagcagcgtgagcaacaacaagagaatcgtgagcaccaagggcaagagcgccaccgagtacaagaacgaggagtaccagagaagcgagagaaacaagagactggacgccgacagaaagatcagactgagcagcagcgccagcagagagccctacaagaaccagcccgagaagacctgcgtgagaaagagagaccccgagagaagagccaagagccccacccccgacggcagcgagagaatcggcctggaggtggacagaagagccagcagaagcagccagagcagcaaggaggaggtgaacagcgaggagtacggcagcgaccacgagaccggcagcagcggcagcagcgacgagcagggcaacaacaccgagaacgaggaggagggcgtggaggaggacgtggaggaggacgaggaggtggaggaggacgccgaggaggacgaggaggtggacgaggacggcgaggaggaggaggaggaggaggaggaggaggaggaggaggaggaggaggaggaggaggagtacgagcaggacgagagagaccagaaggaggagggcaacgactacgacaccagaagcgaggccagcgacagcggcagcgagagcgtgagcttcaccgacggcagcgtgagaagcggcagcggcaccgacggcagcgacgagaagaagaaggagagaaagagagccagaggcatcagccccatcgtgttcgacagaagcggcagcagcgccagcgagagctacgccggcagcgagaagaagcacgagaagctgagcagcagcgtgagagccgtgagaaaggaccagaccagcaagctgaagtacgtgctgcaggacgccagattcttcctgatcaagagcaacaaccacgagaacgtgagcctggccaaggccaagggcgtgtggagcaccctgcccgtgaacgagaagaagctgaacctggccttcagaagcgccagaagcgtgatcctgatcttcagcgtgagagagagcggcaagttccagggcttcgccagactgagcagcgagagccaccacggcggcagccccatccactgggtgctgcccgccggcatgagcgccaagatgctgggcggcgtgttcaagatcgactggatctgcagaagagagctgcccttcaccaagagcgcccacctgaccaacccctggaacgagcacaagcccgtgaagatcggcagagacggccaggagatcgagctggagtgcggcacccagctgtgcctgctgttcccccccgacgagagcatcgacctgtaccaggtgatccacaagatgagacacaagagaagaatgcacagccagcccagaagcagaggcagacccagcagaagagagcccgtgagagacgtgggcagaagaagacccgaggactacgacatccacaacagcagaaagaagcccagaatcgactacccccccgagttccaccagagacccggctacctgaaggaccccagataccaggaggtggacagaagattcagcggcgtgagaagagacgtgttcctgaacggcagctacaacgactacgtgagagagttccacaacatgggccccccccccccctggcagggcatgcccccctaccccggcatggagcagcccccccaccacccctactaccagcaccacgccccccccccccaggcccaccccccctacagcggccaccaccccgtgccccacgaggccagatacagagacaagagagtgcacgactacgacatgagagtggacgacttcctgagaagaacccaggccgtggtgagcggcagaagaagcagacccagagagagagacagagagagagagagagacagacccagagacaacagaagagacagagagagagacagaggcagagacagagagagagagagagagagactgtgcgacagagacagagacagaggcgagagaggcagatacagaagatag

SEQ ID NO: 29946 - DNA, 2184 bp, Artificial Sequence
  derived and/or modified sequence
atggccgcggacagtcgggaggaaaaggacggtgaactcaacgtgctcgatgatatccttacggaggtcccagagcaggacgacgagctctataacccagagagcgaacaagacaagaacgagaagaagggcagtaagaggaagtcagaccggatggaatctacagatactaaaaggcagaagccgtcagtccactctcggcaattggtatcaaaaccccttagtagttcagtgtcaaataacaagcgcatcgtctccactaaaggaaagtctgcaaccgaatacaagaatgaggaataccagaggtcagagagaaataagcggctggacgccgatcgcaaaatcaggctcagcagctctgcgtctcgggagccatacaaaaatcagcccgagaagacttgcgtccggaaacgtgatcctgagcggcgcgccaagtcacccacccccgacggctccgagcggataggactggaagtcgacagaagagcttcacggtcaagccagagcagcaaagaagaagtcaattctgaggaatatgggagcgaccacgagacaggatcctcaggttcatccgacgagcaggggaacaacaccgagaatgaagaggaaggcgtcgaggaagacgtggaagaggatgaggaggtggaggaggatgccgaagaagacgaagaagtcgacgaggacggcgaggaagaggaggaggaggaagaagaggaggaggaggaggaggaagaggaggaggaagaatacgagcaagacgaaagggatcagaaggaagagggcaacgactacgataccagaagcgaagccagcgactccggatccgagagcgtgtccttcaccgatgggagcgtgaggtcgggttccgggacagacggttctgacgagaagaagaaggaacggaaacgcgccaggggcatctcccctatagtctttgataggtccggtagctcggccagcgagtcttatgccggaagcgagaaaaagcatgagaagttgtcatcttcagtcagggccgtgcgcaaggatcagacaagtaagctgaagtacgtgctgcaggacgcgcgattcttcttgattaaatcaaacaatcatgaaaacgtgagcctagctaaggcaaagggtgtctggtccactctacccgtcaatgagaagaagctgaatttggccttccgctcagctaggagcgtgatcctgatcttctctgtccgggagagtggcaagttccagggcttcgctcgactttcttccgagtctcaccacggcggaagcccaattcactgggtcctccccgcaggaatgtccgccaagatgctggggggcgtttttaagatcgactggatttgccgcagggagctgcccttcaccaaaagcgcacatttgaccaatccctggaatgagcacaagccggttaagattggaagagatggtcaggagattgagctcgaatgcggaacccaactgtgtctgctcttcccccccgatgaatctatcgacctgtatcaggtgatacacaaaatgagacataaacggcgcatgcattctcagccccgtagtagaggccgcccaagccgtagggagccagttagggatgtggggcggcggagaccagaagattacgacatacacaactctcggaaaaaaccaaggatcgactacccgcctgaatttcatcagcggcctggatacctgaaagatccacggtatcaggaggtggatcggaggttctccggtgtgcggagagacgttttcctgaatggttcctataatgactacgtgcgggaattccataacatgggaccacctcccccctggcagggcatgcctccctaccctggaatggagcaaccaccacatcatccgtactaccaacatcacgcacctcctcctcaagctcatcctccatattcaggacaccatcccgtcccccacgaagcaaggtacagagacaagcgagtgcatgattacgacatgagagtcgatgacttcctcagaagaacacaagccgtcgtctcggggaggcggtcccgcccgagagaacgggacagagagagagagagggaccggccccgcgataatcgccgggaccgcgaaagggatcgcgggcgggaccgcgaaagagaaagggaacggctgtgtgaccgagatcgggatcgtggtgagcgcggacggtacagacgttag

SEQ ID NO: 29947 - DNA, 2184 bp, Artificial Sequence
  derived and/or modified sequence
atggccgccgattctcgagaagaaaaggacggcgaactgaacgtactggatgacatcctgacggaggtccctgagcaggacgatgaactttacaaccccgaatcagagcaggataagaacgagaaaaagggttcaaagaggaaatctgatagaatggaatcgacagatacaaagcgtcagaagccgtctgttcacagcagacagttggtgtccaaaccactctcgtcttcagtatccaataacaagcgcatcgtatccacaaaagggaagtccgccacagaatataagaatgaggagtatcagcggagtgagaggaacaaacggcttgacgcagatcggaagataaggctctcctcctccgctagccgagagccttataagaaccagccggagaagacgtgtgtgaggaagcgggaccctgagaggagagccaagtccccgacacctgatggcagcgaaagaatagggctggaagtggaccgccgtgcctccaggtcctcgcaaagctctaaggaagaagttaactccgaggagtacgggtccgaccacgaaaccggatcctcgggctcgtctgatgaacagggtaacaatacggagaacgaggaagagggcgtggaggaggacgtcgaggaagacgaggaggtagaggaggacgctgaggaggatgaggaggtggacgaggatggcgaagaagaggaggaggaagaagaagaagaggaggaggaggaagaggaagaagaggaggagtacgagcaagacgaacgcgatcagaaggaggagggaaatgactatgatacacgctccgaagcatcagatagcggttccgagtctgtaagcttcaccgacggaagcgtgaggagtggctcaggcactgatggctccgatgaaaaaaagaaagagcggaagcgagcacgaggaatcagtcctatagtatttgataggtcgggaagttcggccagtgaatcctacgcaggctctgagaagaaacatgagaaactgagcagctctgtcagggcagttcggaaggaccaaacgagcaaacttaagtatgtcctgcaggacgcacgttttttccttatcaagtcaaacaatcacgagaacgtctctctggctaaggctaagggcgtttggtcgactctgccggtgaatgaaaaaaaacttaaccttgcgtttagatcagctagaagtgtaatattgatcttctcagtgcgtgaatcagggaaattccagggattcgcccggctgtcttctgagagtcaccatggcggctcacccatccactgggtgctgccggcaggaatgtctgccaaaatgctggggggggtattcaagattgactggatctgccgcagggagttgccattcaccaagtccgctcacctcacaaacccatggaacgaacacaaacctgtgaagattggccgggacggccaagagatcgagttggagtgcgggactcagctttgcttgctctttccccctgacgaatccatcgatctgtaccaggtgatccataagatgcggcacaaaagaagaatgcattctcagccaaggtcgcgggggcggcctagtaggcgggaaccagtacgggacgttggtcgacgacgacctgaagattacgatatccacaactcaaggaaaaaaccccgtattgactatccgcctgagttccaccagcggcctggttatctgaaggatccccggtaccaggaagttgaccgccgcttcagcggagtccgccgcgatgtgtttctcaacggctcctacaatgattatgtgagggagtttcataacatgggtcccccacccccatggcaaggcatgcctccttatcctggcatggagcagcctccccaccatccttactaccagcatcatgccccaccccctcaggcacacccgccgtacagcggacaccacccggttccccacgaggccaggtaccgggataagagggtgcatgactatgacatgagggttgacgacttcctgagacgcacccaggccgtggtgtctgggcggaggtcccgcccccgggaaagggaccgtgaaagagaaagagatcggccccgagacaaccggagagacagagaaagagaccgggggcgggaccgggaaagggaaagagagagactgtgcgaccgggaccgggataggggcgagcgcggtaggtataggcggtag

SEQ ID NO: 29948 - DNA, 2184 bp, Artificial Sequence
  derived and/or modified sequence
atggctgctgacagccgggaggagaaggatggagagctgaatgtgctggatgacatcctgacagaggtgcctgagcaggatgatgagctgtacaaccctgagagcgagcaggacaagaatgagaagaagggcagcaagaggaagagtgacaggatggagagcacagacaccaagaggcagaagcccagcgtgcacagccggcagctggtgtccaagcccctgagcagctctgtgagcaacaacaagagaattgtgtccaccaagggcaagagcgccacagagtacaagaatgaggagtaccagaggagtgaaagaaacaagaggctggatgctgacaggaagatccggctgagcagcagcgccagccgggagccctacaagaaccagcctgagaagacctgtgtgaggaagagggaccctgagcggcgggccaagagccccaccccagatggcagcgagagaattggcctggaggtggacagaagagccagccgcagcagccagagcagcaaggaggaggtgaacagcgaggagtatggcagtgaccatgaaacaggcagcagcggcagcagtgatgagcagggcaacaacacagaaaatgaggaggagggcgtggaggaggatgtggaggaggatgaggaggtggaggaggatgctgaagaagatgaggaggtggatgaagatggagaggaggaggaggaggaggaggaggaggaggaggaggaggaggaggaggaggaggaggagtatgagcaggatgagcgggaccagaaggaggagggcaatgactatgacaccaggtctgaggccagtgacagcggcagcgagagcgtgtccttcacagatggctctgtgcgcagcggcagcggcacagatggcagtgatgagaagaagaaggagaggaagagggcccggggcatcagccccatcgtgtttgacagaagtggcagcagcgccagcgagagctatgccggcagcgagaagaagcatgagaagctgagcagctctgtgcgggctgtgaggaaggaccagaccagcaagctgaagtatgtgctgcaggatgcccgcttcttcctgatcaagagcaacaaccatgaaaatgtgtccctggccaaggccaagggcgtgtggagcaccctgcctgtgaatgagaagaagctgaacctggccttccgcagcgcccggagcgtcatcctgatcttctctgtgcgggagagcggcaagttccagggctttgcccggctgagcagcgagagccaccacggcggcagccccatccactgggtgctgcctgctggcatgtctgccaagatgctgggcggcgtcttcaagattgactggatctgccggcgggagctgcccttcaccaagagcgcccacctgaccaacccctggaatgagcacaagcctgtgaagattggaagagatggccaggagattgagctggagtgtggcacccagctgtgcctgctcttccccccagatgagagcattgacctgtaccaggtgatccacaagatgaggcacaagaggaggatgcacagccagcccaggagccggggccggcccagcagaagagagcctgtgagagatgtgggcagaagaagacctgaggactatgacatccacaacagcaggaagaagcccagaattgactacccacctgagttccaccagaggcctggctacctgaaggacccccgctaccaggaggtggaccggcgcttctctggagtgagaagagatgtgttcctgaatggcagctacaatgactatgtgcgggagttccacaacatgggccccccaccaccctggcagggcatgccaccctacccaggcatggagcagcccccccaccacccctactaccagcaccacgcccccccaccccaggcccaccccccctacagcggccaccaccctgtgccccatgaggcccgctacagagacaagagggtgcatgactatgacatgagggtggatgacttcctgcggaggacccaggccgtggtgtctggccgccgcagccggccccgggagcgggaccgggagcgggagcgggaccggccccgggacaacagaagagaccgggagcgggaccggggccgggaccgggagcgggagcgggagcggctgtgtgaccgggaccgggacagaggagagcggggccgctacagaagatag

SEQ ID NO: 29949 - DNA, 2184 bp, Artificial Sequence
  derived and/or modified sequence
atggccgccgacagccgggaggagaaggacggcgagctgaacgtgctggacgacattctgacggaggtgcccgaacaagatgacgaactatacaaccctgagagcgaacaggataagaatgagaagaaaggatcgaaacgcaagtctgatcgcatggaatcaaccgacaccaagcgccaaaagccctcagtccatagtaggcagctagtatccaagcctcttagctcctccgtttctaataataaacgaatcgtgtcgacaaagggtaagagtgccacagaatataagaacgaggagtaccagcgaagtgagcggaacaaaaggttggatgcagatcgcaagatccgactgtcctctagcgcgtccagagaaccctacaagaaccagcccgaaaagacttgtgtgaggaagagggaccccgaacgaagggcaaaaagcccgacccctgacggtagtgagagaatcggcctagaagtggatcggcgagccagcaggtcctctcagagttcaaaagaagaggtgaacagtgaggaatatggctctgaccacgagacaggctctagtggctcctccgatgagcaggggaataatacggagaacgaagaggagggtgtggaggaagatgttgaagaagatgaagaagtggaggaagacgctgaggaagatgaggaggtagatgaagacggggaggaggaagaagaagaggaagaggaggaagaggaggaggaggaggaagaggaggaagaatacgagcaggatgaacgggatcagaaggaagagggcaatgactatgacacccgttctgaggcatcagactccggtagcgagtcagtctcgtttacagatggttctgtcaggtctggcagcggcaccgatggtagcgacgaaaagaaaaaagagcgcaaacgggctaggggcatctcaccaatcgtgtttgataggagcggttccagtgcgtccgagtcctacgccggtagcgaaaagaaacacgaaaagctgagctcaagcgttcgagctgtgcgcaaagatcagacaagcaagctgaagtacgtccttcaggacgcccgcttttttttgataaagtccaacaatcatgagaacgtcagcttggcaaaggccaaaggtgtttggagcaccctccccgtcaatgaaaagaaactgaacctggcattcaggtccgccaggtccgtaattttaattttctccgtccgcgaaagtgggaagtttcaaggctttgcccggctgtctagcgagagtcaccatggcgggagtccaattcactgggttttgcccgctgggatgtcggccaaaatgcttggaggggtattcaagatcgattggatttgtcgacgagaactcccttttacaaagagcgctcacctcaccaacccatggaacgaacataagcctgtaaagatagggcgggacggacaagagattgaattggagtgcggtacacaactgtgcctgcttttccctcccgacgaatcaattgatctgtaccaggttatacacaagatgagacacaaacgacgcatgcatagtcagccaagaagccggggacgccctagccgccgagaaccggtgcgcgacgtcgggaggcggcgccctgaggactatgacattcacaattcgagaaaaaagccacgcatcgactaccccccagagttccaccagcggcccggctacttgaaggaccctcgataccaagaggtcgaccgaagattcagcggggtccgacgtgacgtgttcctcaacgggtcttacaacgattatgtcagagagttccacaatatgggtccgccaccaccctggcaaggcatgcccccatacccgggaatggaacaaccaccccatcacccatattaccaacaccacgcaccaccgccgcaggcgcatcccccttactccggccaccatcccgtcccacacgaggcgcggtacagagacaagcgcgtacacgattacgatatgcgcgtcgacgatttccttcgccgcacgcaagccgtggtctctgggagacgcagcaggcctcgggaacgagaccgggaacgggaaagggataggcccagagataacagacgcgatcgggaaagagatagaggacgtgaccgggaacgagagagagaacggctttgcgaccgggatcgggaccgcggcgagaggggaagatacagaaggtag

SEQ ID NO: 29950 - DNA, 2184 bp, Artificial Sequence
  derived and/or modified sequence
atggccgccgacagccgggaggagaaggacggcgagctgaacgtgctcgatgatatcctgacggaagtgcctgagcaagacgacgagctgtacaacccagaaagtgaacaggataaaaacgagaaaaaaggatctaagcggaagagtgatcgcatggaatccaccgataccaagcgacagaaacctagcgtgcactcaagacagttagtctccaaacctctgagctcaagtgtaagcaataataagcgcattgtgtcaaccaagggcaagtctgcaacagagtacaagaacgaagaataccagcgcagcgagcggaataaacggctcgatgcagatcgtaaaatccgtctgtcatcctctgccagccgcgagccctataagaaccagcccgaaaagacctgtgtcaggaaaagggaccccgagcgcagagctaagtcccctacccccgatgggtcagagaggattggtcttgaagtggatagacgggccagtcggagcagtcagtcttctaaagaggaggttaacagcgaggagtatggatcagatcatgaaaccggctcctccggaagttccgacgagcaggggaacaatacagagaacgaggaagagggcgttgaggaagatgtggaagaggacgaagaggtagaggaggatgctgaggaggatgaggaagtcgacgaggacggggaggaggaagaggaggaggaggaggaggaagaagaggaagaagaagaggaagaagaagagtatgaacaagacgaacgagatcagaaggaagagggcaatgattatgatacacgaagcgaagcaagcgatagcggctctgagtctgttagcttcaccgacggatccgtgcgcagcggctcaggcacagacgggtctgacgaaaagaaaaaggagcgcaagcgcgcccgtgggatctctcctattgtgttcgaccggtccggaagctccgcttctgaaagctatgcaggttctgagaagaaacatgagaagttatcttcatctgtgagagcagtgcggaaggaccagactagcaagttaaaatatgtgcttcaggatgcaaggttcttcttgattaaatctaataatcacgagaatgttagcctggccaaagcaaagggcgtctggagcaccctgcccgtgaatgagaagaagttgaacctcgccttccgaagtgctcgcagcgtgattcttatcttttccgtgcgggagtcaggcaagttccaggggttcgctcgcctttcttccgaaagccatcatggtggatctcccatccattgggtgctgcccgccggcatgagtgccaagatgctgggtggcgtgttcaaaatcgactggatctgccgtcgagaactcccatttacaaagtctgcccacttgactaacccttggaacgaacacaagcctgtaaagataggccgggacggacaagagattgaacttgagtgtggcacgcagttgtgtctcctgtttccccctgatgaaagtatcgacctttaccaggtgattcacaaaatgaggcacaagcgccggatgcatagccagccccggtccaggggtcggccttcccggagagagccagtccgggacgtagggcgccgcaggcctgaggactacgacatacacaattcaagaaaaaaaccaagaatcgattacccacccgagttccatcagcgccctggctacctgaaagatccacgctatcaggaagtcgatcggcgcttcagcggggtgaggcgcgacgtctttctgaacggctcctataatgattacgtgcgggagttccacaatatggggccgcctccaccctggcaggggatgccgccataccccggaatggagcagcccccacatcacccatattatcagcaccacgctcccccaccccaagcccatccgccctattcaggtcaccaccccgtgccccatgaggcgcggtatcgagataaacgagtccatgattacgatatgcgcgtagacgatttcctgcgccgcacacaggctgtggtgagcggtcgaaggtcaagaccacgggagcgcgaccgggagcgagagcgagaccggccacgggataatagaagagatagggaaagagatcggggcagagatagagaaagggagagggagcgcttatgcgaccgggatcgggacaggggagaacgcggccggtataggcgttag

SEQ ID NO: 29951 - DNA, 2184 bp, Artificial Sequence
  derived and/or modified sequence
atggcggcagatagccgggaagaaaaagatggcgaattgaatgttctggacgatattctcacagaggtccccgaacaggacgacgaactgtataaccccgaaagcgaacaagataagaacgagaagaagggctctaagcggaaatctgatcggatggagagcaccgacaccaaaagacagaaacccagcgtccatagcagacagctcgtcagtaaacccctgtcttcaagcgtgtcaaacaacaaacggattgtgagtaccaaggggaagtccgccactgagtacaagaacgaggagtatcagagatcggagagaaacaagagactggatgctgataggaaaatcaggctgagttcctccgcatcacgggaaccctataaaaaccaacctgagaagacctgtgtcagaaaacgggaccccgagcgaagagccaaaagccccacacctgatggctctgagcgcatcggtctggaagtggaccgtcgcgctagtcggagctcccaaagtagcaaggaagaagtgaactccgaggagtatgggagcgaccatgaaactggctcatccggcagtagcgacgaacagggcaacaacaccgaaaatgaagaagagggcgttgaagaggatgtggaggaagatgaagaggtggaggaagacgctgaagaggacgaggaggttgacgaagacggagaggaggaagaggaggaggaagaggaggaggaagaagaggaggaggaagaggaagaggaatacgagcaagacgagagagaccagaaagaggagggcaacgattatgacactcggagtgaagcaagtgactccggaagtgaaagtgtctcttttactgatggaagtgtccggagcggatcggggactgacgggagcgatgagaaaaaaaaagaacgaaaacgagctcggggtatctctccaatagtcttcgacagaagcggatctagtgccagtgaatcttacgctggcagcgaaaaaaagcacgaaaagttgtcttcttctgtaagagctgtccgaaaagaccagaccagcaagctgaaatacgtacttcaagatgcccgattttttctcatcaagagtaacaaccatgagaacgtttcccttgctaaggccaaaggggtgtggagtacgctgcccgtgaatgaaaaaaaactgaatttggcctttcgctcagcccgttccgttattttaattttttcggttagagagtccgggaagtttcagggattcgcgaggctctcttctgagtcacaccacggcggatcaccaattcactgggtcctccccgctggcatgtcggctaaaatgctcggcggagtgtttaagatcgactggatttgtagacgtgaattaccattcaccaagagtgcccacctgacaaacccctggaatgagcacaagcctgtcaagataggcagagacgggcaagagatagagctcgaatgtggtacccagttgtgtctcctgttcccacctgatgaaagcatcgacctgtaccaggtgatccacaagatgcgacacaaacggaggatgcacagtcagccacgctcccgcggacgcccaagcaggagggagcctgtgcgcgacgtgggtaggcgcagaccagaagactacgatattcacaatagcagaaagaaacctagaatcgactatccccctgagttccaccagcggccaggatatcttaaagacccgaggtatcaggaggtcgacaggaggttcagtggagtgcgacgcgatgtgttcctgaacggctcttataacgattacgtccgtgaatttcacaatatgggtccgcctcctccctggcaggggatgcccccatacccaggaatggaacagcctcctcatcacccctactatcagcaccatgccccacctccacaggctcatcctccatattccgggcatcatcctgtcccacacgaagctagatatagagataagagggtgcatgactacgacatgcgcgtggacgattttttgcgccgaacacaggcagtggtctctggtaggaggagtcggcctagagagagggatcgcgaaagagaacgagataggcctagggataatcgcagagatcgggaaagagatcggggacgggacagggaacgggaaagagagcgactctgtgatcgagacagagacagaggagaaagagggcgatatcgccgttag

SEQ ID NO: 29952 - DNA, 2184 bp, Artificial Sequence
  derived and/or modified sequence
atggctgccgacagccgggaggaaaaagacggagagctgaatgtgctggatgatattcttaccgaggtacccgaacaggacgacgaattgtacaacccagaaagtgagcaagataagaacgagaagaagggcagtaaaagaaaaagcgacaggatggaatcgaccgacactaagaggcagaaaccatccgtgcactctcggcaacttgtgagcaaaccattgtcatcatcagtctccaataacaaacgcattgtgtccactaaaggtaagagcgccacggaatacaagaacgaggaatatcagagatctgaacgcaataaacggctggacgctgatcgaaagatcagactgagctcgtctgccagtcgagagccatataagaatcaacccgagaagacgtgcgtgcgaaaaagggaccccgagcgaagggcaaaatcgccaacacctgacggctctgaacggatcggtctggaggttgataggagagccagccgctctagccagagctctaaagaggaagttaattcggaagagtacggtagcgatcacgaaaccggctctagtgggtcttccgacgaacaaggcaacaataccgaaaacgaagaggaaggcgtggaagaagatgtcgaagaggatgaggaggttgaggaagatgctgaggaagacgaggaagtggatgaagacggcgaggaggaggaagaagaagaggaggaggaggaagaggaagaagaggaggaagaggaggagtatgagcaggacgagcgagaccagaaagaagagggcaacgactatgatactaggtctgaggctagcgattccggctccgagtctgtgtcgtttaccgatggctccgtcagatcggggagcggcaccgacgggagtgacgagaagaagaaggagaggaagagagcccgagggatcagccccattgtgttcgacaggtcgggtagctcagcctcagagtcctatgctggcagtgagaaaaagcatgaaaaactgtccagctctgtgcgtgcagtacgaaaagaccagacgagtaaacttaagtacgttttgcaagatgcaaggttcttcctgattaaatccaacaatcacgagaatgtgtctctggcaaaggccaagggggtgtggtcgacgttgcccgtgaacgaaaagaaactcaatctagcctttcgctcggctcggagtgttatcctgatcttttccgtgcgagaatctggtaagtttcagggttttgccagactgagttccgagtcacaccacgggggttcaccaatccattgggtgttgcctgccggaatgagcgcaaaaatgctgggaggagtattcaagatcgactggatttgccggcgagagctcccgttcacaaaaagtgcacacctgacaaacccctggaacgagcacaagccggtaaagatcggtcgcgatggacaagagatagaactggaatgcggcacacaattgtgtctcctgtttcctcctgacgagagtatagacctatatcaggtgatacacaaaatgcggcacaaacggaggatgcactctcagcctcgcagtaggggccgaccctcccgtcgagaacctgtgagagatgtcggcagaagacgcccagaagactatgatatccataattccaggaaaaagcctcgaatagactaccccccagaatttcaccagcgcccagggtatttaaaggatcctcggtaccaggaggtcgaccggcgtttttctggggttcgacgtgacgtgtttctgaatggctcgtataatgattacgtcagggaatttcataatatgggaccaccccctccctggcagggcatgcctccgtacccaggtatggaacaaccaccgcatcacccatattatcaacatcacgcacccccaccgcaggcacatcctccatactcagggcatcatcccgtgcctcacgaagcccgttatcgtgacaaacgtgttcacgactacgatatgagagtcgatgattttctccgacggactcaggctgttgttagtggacgcaggtccagacccagagaaagagatagggagcgcgaacgagacagacccagggataaccggagagatagagaacgtgatcggggaagagatagggaaagagaaagggaacgcctctgcgatagagacagggatcgaggggagagaggacggtacaggagatag

SEQ ID NO: 29953 - DNA, 6232 bp, Artificial Sequence
  derived and/or modified sequence
tttcgggagcgggattgtttcgcgcaggaagcaggctccattttagcgccgcccgccgtcgccatctgtttcccttccctcccccatacctagcccgagtctgagccctaacgagaaggctgggcctaggccgctggatgctggagtgaaaggaagggagaaagggaaaaagcgggaagagtcgagaaggctgagtgttaagaggccaagtgcgacgcgcgtatccgggcagacggactgacggacgggcccgtgcttctgccgcggctgcggcgcccgcgcgagtcgcgtctaagcggcggcggcggtggcagcggcggaaaccgaaggggagccatggcggctgacagtcgggaggagaaagatggagaacttaatgttctggatgatattttaactgaagtaccagaacaagatgatgaactgtataatccagagagtgaacaagataaaaatgagaaaaagggatcaaaaagaaaaagtgatcgaatggaatctactgataccaaacgacaaaagccttctgtccattctagacaactggtttctaagccactgagctcatctgttagcaataacaaaagaatagttagtacaaaaggaaagtcagccacagagtataaaaatgaggaatatcaaagatctgaaagaaacaagcgtctagatgctgatcggaaaattcgtctatcaagtagtgcctccagagaaccttataagaatcaacctgaaaaaacctgtgtccggaaaagggatcctgaaaggagggccaaatctcctacgccagatggttctgagagaattgggcttgaagtggatagacgtgcaagcagatccagccagtcttctaaggaagaagtgaactctgaagaatatggctctgaccatgagactggcagcagtggttcttctgatgagcaagggaacaacactgagaatgaggaggaaggagtggaagaagatgtggaggaagatgaagaagtagaagaagatgcagaagaagatgaagaggtggatgaagatggagaggaggaggaggaagaggaggaggaggaagaggaggaggaggaggaggaagaagaagaatatgaacaggatgagagagaccagaaagaggagggaaatgattatgacactcgaagtgaggccagtgactctggttctgaatctgtttccttcacagatgggtctgtcagatctggttcaggcacagatggatcagatgagaaaaagaaggaaaggaagagagctagaggcatatctccaattgtttttgatagaagtggaagctctgcatcagagtcatatgcaggttcagaaaagaagcatgagaaattatcatcttccgttcgtgctgtccgaaaagatcaaaccagtaaactcaaatatgtgcttcaagatgcaagatttttcctcataaagagtaacaaccatgagaatgtgtctcttgccaaagcgaagggtgtatggtccacgctccctgtaaatgagaagaaattaaatcttgcatttagatctgcaaggagtgttatcttaatattttctgtcagagagagtggaaaatttcaagggtttgcaagactttcttcagaatcacatcacggaggatctcctatacactgggtgcttccagcaggaatgagtgctaaaatgctgggaggtgtctttaaaattgactggatttgcaggcgtgaattacccttcactaagtcggctcatctcaccaatccttggaatgaacataaaccagtaaagatcggacgtgatggacaggaaattgaacttgaatgtggaacccagctttgtcttctgtttccccccgatgaaagtattgacttgtatcaggtcattcataaaatgcgtcacaagagaagaatgcattctcagccccgatcacgaggacgtccatcccgtcgagaaccagtccgggatgtgggaaggcgtcgaccagaagattatgatattcataacagcagaaagaaaccaaggattgactatccccctgagtttcaccagagaccagggtatttaaaggatccacgataccaggaagtggacagacgattttcaggagttcgccgagatgtgtttttaaatgggtcctacaatgattatgtgagggaatttcataacatgggaccaccaccaccttggcaaggaatgcccccttacccaggaatggaacaacctccacaccatccttactatcagcaccatgctccacctcctcaagctcatcccccttactcaggacatcatccagtaccacatgaagcaagatacagagataaacgagtacatgattatgatatgagggtggatgatttccttcgtcgcacacaagctgttgtcagtggccggagaagtagaccccgtgaaagagaccgggaacgagagcgagaccgccctagagataacagacgagacagagagcgagatagaggacgtgatagagaaagagaaagagagcgattatgtgatcgagacagagaccgaggggagagaggtcgatatagaagataatgggcttttggaagcactgattgtttaaagatacaaaaaatcttgtattttttttttgtgtgtgtttacaagtagtaaatttattttcagctgtctgcctatgaagttcattgtgtagaaggatttattatgaccccctttgttccaagcatgcagtatcataagaactggaaaaactcaaatccgccaaaaatccacagctgacagttgaattgacacttttattggggcagaatggaacagtccaagaatgtagatactgattctttctccataaatgttcttatagtgtgttcatcctagagttatttttttgtttgtttttttcctttttggatcttgattgataactgccatgatattttgctttgatgtgtttctacatgtagttgcacacggttcagtaaaaataatgctgctatcgagtatgcaaatattgaagtatgatggtttgactgtatggcagtgttgtagcagcctcttgtttttttccccattgcctctttttttaaaaaacttataaagtcactttttatttttcctcagtcttcaatgacgagagcaatattaagaagacattgctatctaatttttaatctttttaaatgaaaaattcctatgttcagtagcgtggttgatgctattgtttagccttcccctccaaattgtatacattggcttggaatgttcacaacttgcgtgcgtggcagcggaagacgattcccatattctacattgctactgttttgtataaaataaattggtaaagattgacggttatcttttgtatctttttcttatccaattgcaggtttgttttattatgcaataatggacataaaagcatgctttttgttcaggaattttaggaaccccatttgctttttttgaggcacactttagcagaaatgattgacctaggcctgttgcattaaaagcttacttctatttctaacataagatacacagagttatgttaataatttggttaagtatttatacacctgataacattttgagtctactctgatcacagaatcgtttatttaggttttctatttgttgttttagtcttctgtaagtgaacgactttgtacatgctttctactttacttcataaatggacttttaaccctcttgtattagttctgtattttaagttaactgtccagttctcccagtggtaaccaactataacatagaaatagagccgctcaagaaaacagtttatgaaataatttttttgaattttttcttgagttacacctggagttttggcctttggaatttggcctttataaacattaggaatatttgaatgtttgatttttttatagtatcaacagttgtactgtgtaccagatcacatagtacagttttacatttaatctatattggcctgaaaagaacaacacaggcactttactcttaaaggatataataaactatagttatactgcattcatattcataccagcatgtagtatctttccctgcattcacagaagttttatttacaatgacaaaactaaagcctgaggatttgttttaaatctgcattgtggtagagaggaaaaagtacttttaaggaaacctgggttctagttttgtcattgtctttaattaaaccggttagtgatacatggtaagtcacttcattggcattttgtgtattcatcagtaagctagacaagatgatagctacagtttaagaatttctgtaaccattatacaaaactggtaggtaatattaaaggtattttcctgaaataataggaataaatactgagcactttgtatgcaatagagactttgtgcttttatatacagactcatttaaatgggctcagagaggctagtaaacttgcccaagattagaaaggtagtaattgatgggccaagattttacccatgtttttatttggtgtttctaaaccacctcatcacttttgaaaaaacagtatataaattaataaatgttttggagatggagtctgtcgcccaggtggagggcagtggcatgatcttggctcactgcaacctcctgcctcagcctcccgaatggctgggactacaggcacccaccaccacaccccgctaatttttgtaattttagtagagatggggttccaacatgttggccaggctggtctcaaactcgacctcaagtgacctcacctgcctcagcctcctaaagtgttgggattacaggcgtgagccactgcacctggcctgagatttttaaacattaacatttccttcaggcttaagcagaggatttttctaaagtgccatccaattagatgttaagttatgctttgtatgttgagcttagtattgagtcgatctattttaaaaagccaacattaagtttttaccaagtatctggcactattctaaacaattctgttggctcacataatcatcactgttttctcctttcctaatttttaaaataaacttaccggaacattgtataaaaaatgcaagatttttttctgtacagaagagtcagtatataaaaatcagtatgttttatttaatattcgtacacatgacagcttttgtcactgtgagaagacatggtttctttcgtgtactccactgtgctgtgattctaacaatctacattagtatgatgtgttcagatgaaaaacagaaaattcagtcattccgagtttagaaatccggtcagggattttattggctggagtaatagttcaaaggagtgaaaattcaagcatgtaatttttggatttgatttcctccataatgatttcctccataatggctttttttcaagcatggtctaatttttcagaaaatggccattatctccaagcttccattgtccatgtagtttcagtggcaggagagagactattttcctcccagtgtccatgtcagttccccaaaaggactgaatagccatgttggttttggagccagccgtaatccaatctgtatttccaaggaaatggggttctttgtctcccagcattgggaagcaagagaggcacatgttatggtcacctctgtgaggattacatcaggaaggacagtctccaaaagacatggacagaggaaatttagcagatgtccattaaatcaggatctcatacaagttataacacctgaatgtttgacttttcagagtattttgccatcacaggtgtggcatcttgcccttggatatatctacattctgctgtagaatgtcgtggtctttctgagggtcacatacatcctgtcttgtcataatgttaaccattaagagtcctcaggggcatggaattgaagaaggaactgttgccagcagttaactgaccaagctagagttccctgacccaacgtaagggtgactgtgacacacatggataattttagcttcatgtttaagattttgttatttgggtaggaaacattccaaatgcagtttgaaacacatattaaaattgaggcacacaggaaagaactggctcaagtttagtccccaagttccttatagtaggaataggaatccttagagtataagcaatccatgcatagtattctgttatctatcatgtagatcatttaatctctaattttttggggtggggattctcttgtttctaaatcttacactttcagtttcttctgtgtcttaaatatagattattgactattgtcttaaatactaataaatacattaaatgtatcttaaatacta

SEQ ID NO: 29954 - DNA, 6249 bp, Artificial Sequence
  derived and/or modified sequence
gtaaacagcgcagggcatttcgggagcgggattgtttcgcgcaggaagcaggctccattttagcgccgcccgccgtcgccatctgtttcccttccctcccccatacctagcccgagtctgagccctaacgagaaggctgggcctaggccgctggatgctggagtgaaaggaagggagaaagggaaaaagcgggaagagtcgagaaggctgagtgttaagaggccaagtgcgacgcgcgtatccgggcagacggactgacggacgggcccgtgcttctgccgcggctgcggcgcccgcgcgagtcgcgtctaagcggcggcggcggtggcagcggcggaaaccgaaggggagccatggcggctgacagtcgggaggagaaagatggagaacttaatgttctggatgatattttaactgaagtaccagaacaagatgatgaactgtataatccagagagtgaacaagataaaaatgagaaaaagggatcaaaaagaaaaagtgatcgaatggaatctactgataccaaacgacaaaagccttctgtccattctagacaactggtttctaagccactgagctcatctgttagcaataacaaaagaatagttagtacaaaaggaaagtcagccacagagtataaaaatgaggaatatcaaagatctgaaagaaacaagcgtctagatgctgatcggaaaattcgtctatcaagtagtgcctccagagaaccttataagaatcaacctgaaaaaacctgtgtccggaaaagggatcctgaaaggagggccaaatctcctacgccagatggttctgagagaattgggcttgaagtggatagacgtgcaagcagatccagccagtcttctaaggaagaagtgaactctgaagaatatggctctgaccatgagactggcagcagtggttcttctgatgagcaagggaacaacactgagaatgaggaggaaggagtggaagaagatgtggaggaagatgaagaagtagaagaagatgcagaagaagatgaagaggtggatgaagatggagaggaggaggaggaagaggaggaggaggaagaggaggaggaggaggaggaagaagaagaatatgaacaggatgagagagaccagaaagaggagggaaatgattatgacactcgaagtgaggccagtgactctggttctgaatctgtttccttcacagatgggtctgtcagatctggttcaggcacagatggatcagatgagaaaaagaaggaaaggaagagagctagaggcatatctccaattgtttttgatagaagtggaagctctgcatcagagtcatatgcaggttcagaaaagaagcatgagaaattatcatcttccgttcgtgctgtccgaaaagatcaaaccagtaaactcaaatatgtgcttcaagatgcaagatttttcctcataaagagtaacaaccatgagaatgtgtctcttgccaaagcgaagggtgtatggtccacgctccctgtaaatgagaagaaattaaatcttgcatttagatctgcaaggagtgttatcttaatattttctgtcagagagagtggaaaatttcaagggtttgcaagactttcttcagaatcacatcacggaggatctcctatacactgggtgcttccagcaggaatgagtgctaaaatgctgggaggtgtctttaaaattgactggatttgcaggcgtgaattacccttcactaagtcggctcatctcaccaatccttggaatgaacataaaccagtaaagatcggacgtgatggacaggaaattgaacttgaatgtggaacccagctttgtcttctgtttccccccgatgaaagtattgacttgtatcaggtcattcataaaatgcgtcacaagagaagaatgcattctcagccccgatcacgaggacgtccatcccgtcgagaaccagtccgggatgtgggaaggcgtcgaccagaagattatgatattcataacagcagaaagaaaccaaggattgactatccccctgagtttcaccagagaccagggtatttaaaggatccacgataccaggaagtggacagacgattttcaggagttcgccgagatgtgtttttaaatgggtcctacaatgattatgtgagggaatttcataacatgggaccaccaccaccttggcaaggaatgcccccttacccaggaatggaacaacctccacaccatccttactatcagcaccatgctccacctcctcaagctcatcccccttactcaggacatcatccagtaccacatgaagcaagatacagagataaacgagtacatgattatgatatgagggtggatgatttccttcgtcgcacacaagctgttgtcagtggccggagaagtagaccccgtgaaagagaccgggaacgagagcgagaccgccctagagataacagacgagacagagagcgagatagaggacgtgatagagaaagagaaagagagcgattatgtgatcgagacagagaccgaggggagagaggtcgatatagaagataatgggcttttggaagcactgattgtttaaagatacaaaaaatcttgtattttttttttgtgtgtgtttacaagtagtaaatttattttcagctgtctgcctatgaagttcattgtgtagaaggatttattatgaccccctttgttccaagcatgcagtatcataagaactggaaaaactcaaatccgccaaaaatccacagctgacagttgaattgacacttttattggggcagaatggaacagtccaagaatgtagatactgattctttctccataaatgttcttatagtgtgttcatcctagagttatttttttgtttgtttttttcctttttggatcttgattgataactgccatgatattttgctttgatgtgtttctacatgtagttgcacacggttcagtaaaaataatgctgctatcgagtatgcaaatattgaagtatgatggtttgactgtatggcagtgttgtagcagcctcttgtttttttccccattgcctctttttttaaaaaacttataaagtcactttttatttttcctcagtcttcaatgacgagagcaatattaagaagacattgctatctaatttttaatctttttaaatgaaaaattcctatgttcagtagcgtggttgatgctattgtttagccttcccctccaaattgtatacattggcttggaatgttcacaacttgcgtgcgtggcagcggaagacgattcccatattctacattgctactgttttgtataaaataaattggtaaagattgacggttatcttttgtatctttttcttatccaattgcaggtttgttttattatgcaataatggacataaaagcatgctttttgttcaggaattttaggaaccccatttgctttttttgaggcacactttagcagaaatgattgacctaggcctgttgcattaaaagcttacttctatttctaacataagatacacagagttatgttaataatttggttaagtatttatacacctgataacattttgagtctactctgatcacagaatcgtttatttaggttttctatttgttgttttagtcttctgtaagtgaacgactttgtacatgctttctactttacttcataaatggacttttaaccctcttgtattagttctgtattttaagttaactgtccagttctcccagtggtaaccaactataacatagaaatagagccgctcaagaaaacagtttatgaaataatttttttgaattttttcttgagttacacctggagttttggcctttggaatttggcctttataaacattaggaatatttgaatgtttgatttttttatagtatcaacagttgtactgtgtaccagatcacatagtacagttttacatttaatctatattggcctgaaaagaacaacacaggcactttactcttaaaggatataataaactatagttatactgcattcatattcataccagcatgtagtatctttccctgcattcacagaagttttatttacaatgacaaaactaaagcctgaggatttgttttaaatctgcattgtggtagagaggaaaaagtacttttaaggaaacctgggttctagttttgtcattgtctttaattaaaccggttagtgatacatggtaagtcacttcattggcattttgtgtattcatcagtaagctagacaagatgatagctacagtttaagaatttctgtaaccattatacaaaactggtaggtaatattaaaggtattttcctgaaataataggaataaatactgagcactttgtatgcaatagagactttgtgcttttatatacagactcatttaaatgggctcagagaggctagtaaacttgcccaagattagaaaggtagtaattgatgggccaagattttacccatgtttttatttggtgtttctaaaccacctcatcacttttgaaaaaacagtatataaattaataaatgttttggagatggagtctgtcgcccaggtggagggcagtggcatgatcttggctcactgcaacctcctgcctcagcctcccgaatggctgggactacaggcacccaccaccacaccccgctaatttttgtaattttagtagagatggggttccaacatgttggccaggctggtctcaaactcgacctcaagtgacctcacctgcctcagcctcctaaagtgttgggattacaggcgtgagccactgcacctggcctgagatttttaaacattaacatttccttcaggcttaagcagaggatttttctaaagtgccatccaattagatgttaagttatgctttgtatgttgagcttagtattgagtcgatctattttaaaaagccaacattaagtttttaccaagtatctggcactattctaaacaattctgttggctcacataatcatcactgttttctcctttcctaatttttaaaataaacttaccggaacattgtataaaaaatgcaagatttttttctgtacagaagagtcagtatataaaaatcagtatgttttatttaatattcgtacacatgacagcttttgtcactgtgagaagacatggtttctttcgtgtactccactgtgctgtgattctaacaatctacattagtatgatgtgttcagatgaaaaacagaaaattcagtcattccgagtttagaaatccggtcagggattttattggctggagtaatagttcaaaggagtgaaaattcaagcatgtaatttttggatttgatttcctccataatgatttcctccataatggctttttttcaagcatggtctaatttttcagaaaatggccattatctccaagcttccattgtccatgtagtttcagtggcaggagagagactattttcctcccagtgtccatgtcagttccccaaaaggactgaatagccatgttggttttggagccagccgtaatccaatctgtatttccaaggaaatggggttctttgtctcccagcattgggaagcaagagaggcacatgttatggtcacctctgtgaggattacatcaggaaggacagtctccaaaagacatggacagaggaaatttagcagatgtccattaaatcaggatctcatacaagttataacacctgaatgtttgacttttcagagtattttgccatcacaggtgtggcatcttgcccttggatatatctacattctgctgtagaatgtcgtggtctttctgagggtcacatacatcctgtcttgtcataatgttaaccattaagagtcctcaggggcatggaattgaagaaggaactgttgccagcagttaactgaccaagctagagttccctgacccaacgtaagggtgactgtgacacacatggataattttagcttcatgtttaagattttgttatttgggtaggaaacattccaaatgcagtttgaaacacatattaaaattgaggcacacaggaaagaactggctcaagtttagtccccaagttccttatagtaggaataggaatccttagagtataagcaatccatgcatagtattctgttatctatcatgtagatcatttaatctctaattttttggggtggggattctcttgtttctaaatcttacactttcagtttcttctgtgtcttaaatatagattattgactattgtcttaaatactaataaatacattaaatgtatcttaaatacta

SEQ ID NO: 29955 - protein, 183 aa, Artificial Sequence
  derived and/or modified sequence
MAASMARGGVSARVLLQAARGTWWNRPGGTSGSGEGVALGTTRKFQATGSRPAGEEDAGGPERPGDVVNVVFVDRSGQRIPVSGRVGDNVLHLAQRHGVDLEGACEASLACSTCHVYVSEDHLDLLPPPEEREDDMLDMAPLLQENSRLGCQIVLTPELEGAEFTLPKITRNFYVDGHVPKPH

SEQ ID NO: 29956 - protein, 145 aa, Artificial Sequence
  derived and/or modified sequence
MHVMAASMARGGVSARVLLQAARGTWWNRPGGTSGSGEGVALGTTRKFQATGSRPAGEEDAGGPERPGDVVNVVFVDRSGQRIPVSGRVGDNVLHLAQRHGVDLEGACEASLACSTCHVYVSEDHLDLLPPPEERRTRGWAARLC

SEQ ID NO: 29957 - DNA, 552 bp, Artificial Sequence
  derived and/or modified sequence
atggccgccagcatggccagaggcggcgtgagcgccagagtgctgctgcaggccgccagaggcacctggtggaacagacccggcggcaccagcggcagcggcgagggcgtggccctgggcaccaccagaaagttccaggccaccggcagcagacccgccggcgaggaggacgccggcggccccgagagacccggcgacgtggtgaacgtggtgttcgtggacagaagcggccagagaatccccgtgagcggcagagtgggcgacaacgtgctgcacctggcccagagacacggcgtggacctggagggcgcctgcgaggccagcctggcctgcagcacctgccacgtgtacgtgagcgaggaccacctggacctgctgcccccccccgaggagagagaggacgacatgctggacatggcccccctgctgcaggagaacagcagactgggctgccagatcgtgctgacccccgagctggagggcgccgagttcaccctgcccaagatcaccagaaacttctacgtggacggccacgtgcccaagccccactag

SEQ ID NO: 29958 - DNA, 438 bp, Artificial Sequence
  derived and/or modified sequence
atgcacgtgatggccgccagcatggccagaggcggcgtgagcgccagagtgctgctgcaggccgccagaggcacctggtggaacagacccggcggcaccagcggcagcggcgagggcgtggccctgggcaccaccagaaagttccaggccaccggcagcagacccgccggcgaggaggacgccggcggccccgagagacccggcgacgtggtgaacgtggtgttcgtggacagaagcggccagagaatccccgtgagcggcagagtgggcgacaacgtgctgcacctggcccagagacacggcgtggacctggagggcgcctgcgaggccagcctggcctgcagcacctgccacgtgtacgtgagcgaggaccacctggacctgctgcccccccccgaggagagaagaaccagaggctgggccgccagactgtgctag

SEQ ID NO: 29959 - DNA, 1012 bp, Artificial Sequence
  derived and/or modified sequence
gagtcacgtgatgcatgtcatggccgcctccatggcccggggaggcgtgagtgccagggttctactgcaggctgccaggggcacctggtggaacagacctgggggcacttccgggtcgggggagggggtggcgctggggacaaccagaaagtttcaagcgacaggctcgcgcccggctggagaggaggacgcgggcggcccggagcggcccggggacgtggtgaacgtggtgttcgtagaccgctcaggccagcggatcccagtgagtggcagagtcggggacaatgttcttcacctggcccagcgccacggggtggacctggaaggggcctgtgaagcctccctggcctgctccacctgccatgtgtatgtgagtgaagaccacctggatctcctgcctcctcccgaggagagggaagacgacatgctagacatggcccccctcctccaggagaactcgcggctgggctgccagattgtgctgacaccggagctggaaggagcggaattcaccctgcccaagatcaccaggaacttctacgtggatggccatgtccccaagccccactgacatgaacacctggaccattccacattgccatggccccagggcccagattgagggaatagccaggtgccagccctgcccagagtgcggacaggcccgggagagacgtggaagcccctgtgaaggacaacacccctgcttgggagagagtcccatgtccaggctctggtggggacagggcccctagtggggtggccttccccaggcccctgagaatcagggtttgagtaggagtggactcatattggagctgcaataaatcgataacacaggccccagcatgttgagtgtccttgggggacagatctggggtctacaggtggctcacacctgtaatcctagcactttgggaagccaagatgggaggatcacttgaggccaggagcttaagaccatcctgggcaacatggcgagacctcgtctctataaaaacagtaaaaatta

SEQ ID NO: 29960 - DNA, 1956 bp, Artificial Sequence
  derived and/or modified sequence
cgtgatgcatgtcatggccgcctccatggcccggggaggcgtgagtgccagggttctactgcaggctgccaggggcacctggtggaacagacctgggggcacttccgggtcgggggagggggtggcgctggggacaaccagaaagtttcaagcgacaggctcgcgcccggctggagaggaggacgcgggcggcccggagcggcccggggacgtggtgaacgtggtgttcgtagaccgctcaggccagcggatcccagtgagtggcagagtcggggacaatgttcttcacctggcccagcgccacggggtggacctggaaggggcctgtgaagcctccctggcctgctccacctgccatgtgtatgtgagtgaagaccacctggatctcctgcctcctcccgaggagaggagaactcgcggctgggctgccagattgtgctgacaccggagctggaaggagcggaattcaccctgcccaagatcaccaggaacttctacgtggatggccatgtccccaagccccactgacatgaacacctggaccattccacattgccatggccccagggcccagattgagggaatagccaggtgccagccctgcccagagtgcggacaggcccgggagagacgtggaagcccctgtgaaggacaacacccctgcttgggagagagtcccatgtccaggcccctgagaatcagggtttgagtaggagtggactcatattggagctgcaataaatcgataacacaggccccagcatgttgagtgtccttgggggacagatctggggtctacaggtggctcacacctgtaatcctagcactttgggaagccaagatgggaggatcacttgaggccaggagcttaagaccatcctgggcaacatggcgagacctcgtctctataaaaacagtaaaaattagcgtggagtggtggtaagtgcctgtagtcccagctactcgggagactgaggtgggaggatcacttgagcccaggggatttaggctgcagtggagcggtgatcaggccattccactccagcctgggtgacagagtgaggccctgtctcaaaaaaaaaaaaaacaaaaacaaaaacaaaccacacctgcatctgctgtgctgggcccccggttctcttttccctctgggatctaagatgccgctggggatccaaggcagaggcctgggagcccccatttccgagggggagggctagcgtggaaggccccgccccggcagctgcggagggatttggtggggtccaggccgcccttgccacgcaggggtgcgcggatgacctgaaaaaagccagaaagaggaaaggtgccgccgaggctggtcgctctcagctggggctcatcgcatcctctaccaagagcgctcccaccacacaggtcccgcccctcccagcaaagcttctggcgccgccctgtctgaacctggagcggctgggaggatccccctcccaggagaagccgaggaccccaggatgctgcagaatcagtgagaggtccctctggcctgcatgccaggagtcggtcaccgccctgtgcttcctccaagagacagtggagaggctggggattccaaggacacacagaccaggatcagccaaaagggccgccgtctgcagcccccggggactccctcggccccaccccagagaaggccccggaaacagctgaacccctgccggggcaccgagagagtggaccctgggttcgagggggtgactctgaagtttcagataaagccggactccagcctgcagatcatccccacgtacagcctgccctgcagtagccgttctcaggaatcccctgcagatgctgttgggggccctgcagcccacccaggaggcaccgaggcccactcagcaggcagcgaggccctggagccccggcgctgtgcttcctgtcggacccagaggaccccgctctggagagacgctg

SEQ ID NO: 29961 - DNA, 552 bp, Artificial Sequence
  derived and/or modified sequence
atggcagcctctatggctcgggggggtgtatcagccagagtgctgcttcaggcggctagaggcacatggtggaataggcctggcggaacaagtggtagcggtgagggcgttgcactggggacaactaggaagttccaggccacaggctcacggcccgcaggcgaggaggatgctggcgggccagaacggccaggcgatgtcgtgaacgtggtgtttgtagatagatcaggtcagcgtatccctgtaagcggacgcgtgggcgataacgttctccaccttgcccagcgccacggcgtggacctggaaggggcatgcgaggcaagcctagcatgtagcacatgtcacgtgtatgttagtgaagaccacctagatcttttgccgcccccggaggagcgcgaggatgacatgctggatatggcaccacttttgcaggaaaatagccggctgggctgccaaatagtgctgactcccgaactggaaggcgcggaatttactctgcctaagataacacggaacttctacgtggacgggcatgtcccaaaaccccattag

SEQ ID NO: 29962 - DNA, 438 bp, Artificial Sequence
  derived and/or modified sequence
atgcacgtcatggccgcctcgatggcgaggggcggagtttcagcacgcgtgttgcttcaggcagcccggggtacttggtggaatcggccagggggaactagtggatcaggggaaggcgtcgcactaggaactaccaggaagtttcaggcgacaggaagcagaccggcaggcgaggaggacgccggcggccccgagcggcctggggacgtggtcaacgttgtgttcgtagatcgatccgggcagagaattcctgtgtctggcagagtgggcgataatgttctccatctagcacaacggcacggagtggatttagaaggggcatgtgaagcaagtttagcatgctcaacatgtcatgtctatgtatcagaagaccaccttgaccttctaccaccacctgaggagcggcggaccaggggatgggcagccaggctgtgttag

SEQ ID NO: 29963 - DNA, 552 bp, Artificial Sequence
  derived and/or modified sequence
atggccgcctccatggcccggggcggcgtgtctgcccgggtgctgctgcaggccgcccggggcacctggtggaacagacctgggggcaccagcggcagcggggagggcgtggccctgggcaccaccaggaagttccaggccaccggcagcaggcctgctggggaggaggatgctgggggccctgagaggcctggagatgtggtgaatgtggtgtttgtggacaggagcggccagagaattcctgtgtctggccgggtgggggacaacgtgctgcacctggcccagagacatggagtggacctggagggcgcctgtgaggccagcctggcctgcagcacctgccacgtgtatgtgtctgaggaccacctggacctgctgcccccacctgaggagagagaagatgacatgctggacatggcccccctgctgcaggagaacagccggctgggctgccagatcgtgctgaccccagagctggagggcgctgagttcaccctgcccaagatcaccaggaacttctacgtggatggccacgtgcccaagccccactag

SEQ ID NO: 29964 - DNA, 438 bp, Artificial Sequence
  derived and/or modified sequence
atgcacgtgatggccgcctccatggcccggggcggcgtgtctgcccgggtgctgctgcaggccgcccggggcacctggtggaacagacctgggggcaccagcggcagcggggagggcgtggccctgggcaccaccaggaagttccaggccaccggcagcaggcctgctggggaggaggatgctgggggccctgagaggcctggagatgtggtgaatgtggtgtttgtggacagaagtggccagagaattcctgtgtctggccgggtgggggacaacgtgctgcacctggcccagagacatggagtggacctggagggcgcctgtgaggccagcctggcctgcagcacctgccacgtgtatgtgtctgaggaccacctggacctgctgcccccacctgaggagaggaggacccggggctgggccgcccggctgtgctag

SEQ ID NO: 29965 - DNA, 552 bp, Artificial Sequence
  derived and/or modified sequence
atggccgccagcatggcccggggcggcgtgagcgcccgggtgctgcttcaggccgctcgaggaacatggtggaaccggccaggcggcaccagcggctccggcgagggcgtcgctctgggcactacccgaaagtttcaagcgacaggctctcggccagctggcgaggaagatgccggagggcctgagcgtcctggggacgttgtcaacgtagtatttgtcgaccggagtggccagcggatccccgtgtctgggcgtgtgggtgataacgtcctacacctcgcacagcgtcacggagttgatttagagggcgcttgcgaggcatctctggcgtgttcaacttgccacgtctacgtgagcgaggatcacctggacctcctgcctccacccgaggaacgggaagatgacatgctggacatggcccccttactgcaggagaattctcgtctcggctgtcaaatcgttctgacaccagaactggagggagccgaatttaccttgcccaaaatcactagaaatttttatgtggacggtcacgttcctaaaccgcattag

SEQ ID NO: 29966 - DNA, 438 bp, Artificial Sequence
  derived and/or modified sequence
atgcacgtgatggccgccagcatggcccggggcggcgtgagcgccagagtgctgctccaggccgcccgaggcacgtggtggaaccgccccgggggtacctcaggttccggggaaggagtggcactcggaactactcggaagtttcaagcgacggggtctcgacccgcgggagaggaggacgctggtgggcctgagcgaccaggggatgtggtgaatgtggttttcgtagacaggtctggccagagaatacccgtgtctgggagagtgggcgacaacgttctgcatctagcacaacgccatggcgtggacctcgaaggagcctgcgaagccagcctcgcctgttcgacttgccacgtgtacgtctctgaggatcatttggatttgctgcccccgccagaggaacgcaggacacggggctgggcggcccggctgtgctag

SEQ ID NO: 29967 - DNA, 552 bp, Artificial Sequence
  derived and/or modified sequence
atggcagcctcaatggcccgaggaggtgtatctgccagggttcttcttcaggctgccagaggcacttggtggaatagaccaggcggtacatctggctctggcgagggtgtcgcccttgggaccactagaaagttccaagcaacgggttcccgacctgccggtgaggaggacgctggcggtcccgaaaggccaggtgatgtggtcaatgtggtcttcgtggacaggagtggccagagaattccagtgagcggaagggtgggtgacaatgttctgcatcttgctcagcgtcacggcgtcgatctggaaggcgcttgtgaggctagtctagcttgtagtacttgccatgtgtacgtgtcagaagaccacctggatctgttgccccctcctgaggagcgcgaagatgacatgttggacatggcaccgctgctccaggagaactcacggctgggttgccagattgttttgacacccgaactggaaggcgcagagtttaccctgccaaagataactcgcaatttctacgtcgatggtcacgttcctaaacctcactag

SEQ ID NO: 29968 - DNA, 438 bp, Artificial Sequence
  derived and/or modified sequence
atgcatgtaatggccgcaagcatggccagagggggagtcagtgcacgcgtgcttctccaagccgctcgtggtacctggtggaaccgaccgggtggaacttcaggtagcggcgagggtgtggctctggggacgactcgtaaatttcaggccactggaagtcggccagccggtgaggaggacgcagggggacccgaaagaccaggggacgtcgtgaatgtcgtcttcgtcgaccgatcaggccagcgaatccccgtgagcggacgcgtgggagacaatgtgctgcaccttgctcagcggcatggagtagatctcgaaggagcctgcgaagccagcttggcgtgtagcacttgccatgtgtatgtaagcgaggaccatctggacttgctgcctcccccagaggaaagaaggacccgaggttgggctgccaggctctgctag

SEQ ID NO: 29969 - protein, 438 aa, Artificial Sequence
  derived and/or modified sequence
MEHAATTGPRPGPPSRRVENVVLRAKDWLPGAPGGTAVWATSLEAEVPPDLALNKEQQLQISKELVDIQITTHHLHEQHEAEIFQLKSEILRLESRVLELELRGDGTSQGCAVPVESDPRHPRAAAQELRHKAQVPGHSDDHRFQVQPKNTMNPENEQHRLGSGLQGEVKWALEHQEARQQALVTRVATLGRQLQGAREEARAAGQRLATQAVVLCSCQGQLRQAEAENARLQLQLKKLKDEYVLRLQHCAWQAVEHADGAGQAPATTALRTFLEATLEDIRAAHRSREQQLARAARSYHKRLVDLSRRHEELLVAYRAPGNPQAIFDIASLDLEPLPVPLVTDFSHREDQHGGPGALLSSPKKRPGGASQGGTSEPQGLDAASWAQIHQKLRDFSRSTQSWNGSGHSCWSGPRWLKSNFLSYRSTWTSTWAGTSTKS

SEQ ID NO: 29970 - DNA, 1317 bp, Artificial Sequence
  derived and/or modified sequence
atggagcacgccgccaccaccggccccagacccggcccccccagcagaagagtggagaacgtggtgctgagagccaaggactggctgcccggcgcccccggcggcaccgccgtgtgggccaccagcctggaggccgaggtgccccccgacctggccctgaacaaggagcagcagctgcagatcagcaaggagctggtggacatccagatcaccacccaccacctgcacgagcagcacgaggccgagatcttccagctgaagagcgagatcctgagactggagagcagagtgctggagctggagctgagaggcgacggcaccagccagggctgcgccgtgcccgtggagagcgaccccagacaccccagagccgccgcccaggagctgagacacaaggcccaggtgcccggccacagcgacgaccacagattccaggtgcagcccaagaacaccatgaaccccgagaacgagcagcacagactgggcagcggcctgcagggcgaggtgaagtgggccctggagcaccaggaggccagacagcaggccctggtgaccagagtggccaccctgggcagacagctgcagggcgccagagaggaggccagagccgccggccagagactggccacccaggccgtggtgctgtgcagctgccagggccagctgagacaggccgaggccgagaacgccagactgcagctgcagctgaagaagctgaaggacgagtacgtgctgagactgcagcactgcgcctggcaggccgtggagcacgccgacggcgccggccaggcccccgccaccaccgccctgagaaccttcctggaggccaccctggaggacatcagagccgcccacagaagcagagagcagcagctggccagagccgccagaagctaccacaagagactggtggacctgagcagaagacacgaggagctgctggtggcctacagagcccccggcaacccccaggccatcttcgacatcgccagcctggacctggagcccctgcccgtgcccctggtgaccgacttcagccacagagaggaccagcacggcggccccggcgccctgctgagcagccccaagaagagacccggcggcgccagccagggcggcaccagcgagccccagggcctggacgccgccagctgggcccagatccaccagaagctgagagacttcagcagaagcacccagagctggaacggcagcggccacagctgctggagcggccccagatggctgaagagcaacttcctgagctacagaagcacctggaccagcacctgggccggcaccagcaccaagagctag

SEQ ID NO: 29971 - DNA, 1611 bp, Artificial Sequence
  derived and/or modified sequence
agaggccttggcaacgcacttagcagtgccagtggcagcagcagccatggggaagccgggcgtggaggcagcaccgggctcggagctggccagggttccctagcctatggagcacgcagccaccacaggccccaggcctggacctccctctcggcgggtggagaatgttgtgctacgagccaaggactggctgccaggagctcctgggggcaccgcagtgtgggccaccagcttggaagcagaggtcccaccagatctagcgctcaataaggagcagcagctgcagatctccaaggagctggtcgacattcagatcacaacccaccacctacatgagcagcatgaggctgaaatcttccagctgaagagtgagatccttcggctggagagccgggtactggagctggagctgcgaggagatggcaccagccagggctgtgcagtcccagtggagtctgaccccaggcatccccgggcagcagcccaagagctcagacacaaagcccaggtgcctggacactctgatgaccacagattccaggtgcagcccaagaacaccatgaaccccgagaatgagcagcacaggctggggagcggcctgcagggggaagtgaagtgggcgctggagcatcaggaggcccggcagcaggcactggtgacgcgtgtggcaaccctgggccggcagctgcagggagcccgagaggaggccagggcagccgggcagcgactggccacacaggctgtggtgctgtgcagctgccaaggccagctccgtcaggcagaggctgaaaatgcccggctgcagctgcagctcaagaaactgaaggatgagtacgtcctacggctgcaacactgcgcctggcaggcagtggagcacgcagatggtgcaggccaagcgccagccaccacggccctccggacattcctggaggcgactctggaggacatccgggcagcgcaccgcagccgtgagcagcagctggcccgggctgcccgcagctaccacaagaggctggtggatctgagccgcaggcatgaagagctactggttgcctacagggcacctgggaacccccaagctatttttgacatagccagcttggacctggaaccattgcccgtgcccctggtcactgacttcagccatcgggaggaccagcacggcgggcctggggcactgctctcatccccaaaaaagagacccggtggagcctcccaggggggaacatcagagccacagggcctggacgctgcatcctgggcccagatccaccagaagctccgggacttctcccgcagcacccagagctggaacgggagcgggcacagctgctggtccgggccacgatggctgaagagcaactttctgagctacaggagtacgtggaccagcacctgggcaggtacaagcacgaaatcctgaggctgaggaagctggcaggtgcaggggacccctggaaagtgggggctgtgcctccagccaagccccagcatccaaggaccggcagccactaggccgtctcccaaggagcagagcagagcagagctcctcagccagcacagaaccctcccacccagccccccataaaacatgagtcaggatagaaccca

SEQ ID NO: 29972 - DNA, 1317 bp, Artificial Sequence
  derived and/or modified sequence
atggagcatgctgcaactaccggtccacgcccaggccccccctcaagaagggtggagaacgtggttcttcgggctaaggactggttaccaggagcgccggggggcacagcagtgtgggccacctcactggaggcggaggtgccaccagacctcgccctaaataaggagcaacagctgcagatctcaaaggagctcgtggatatacaaatcactactcatcatctacacgaacagcacgaggcagagattttccagctgaagtccgaaatcctcaggctagagagccgagtcctggagctggaactgcgaggagatggaaccagtcaaggctgcgccgttcccgttgaatccgaccctaggcatcctcgagctgctgcgcaagagctgcgacataaagcccaagttcccgggcactcggacgaccaccggtttcaagtgcagccaaaaaatacgatgaaccccgagaacgagcagcatcggctgggatccgggttgcagggcgaggtgaagtgggcactggaacaccaggaggcccgtcagcaggccctggtgacaagagtggccacactcggccgccaactgcagggagccagagaggaggcacgcgcggccggacaacggcttgccacccaggccgtcgtgctctgctcgtgtcaaggccagctgagacaggcagaggcagagaacgcccgcttgcaattgcaactgaagaagctgaaagatgagtacgtgctcaggctccagcattgtgcatggcaagccgtagagcacgccgatggagccggtcaagctccggccactaccgcgctgcgaacatttttggaagccacattagaagacatcagagcagctcaccgtagccgggaacagcagctcgctcgcgccgcaaggtcctatcataaaagactggtggacctcagtagacgtcacgaggaactgttagttgcttacagggcaccaggtaacccccaagctatcttcgatatcgctagcctagatttggaaccactcccagtgccgctcgtcaccgatttttcacacagggaggaccagcatgggggacctggtgcgctgctctcctccccgaaaaagcgccccggcggggcatcccaaggaggcactagcgagccccaggggttggacgcagcctcctgggcccagattcatcagaagttgagagatttttcccggagcacccaatcatggaacgggtcaggccacagttgttggtcagggcctagatggttgaaaagtaactttttgtcatatagatcaacctggacgtcgacgtgggctggaacaagtaccaaatcatag

SEQ ID NO: 29973 - DNA, 1317 bp, Artificial Sequence
  derived and/or modified sequence
atggagcacgccgccaccaccggccccaggcctggcccccccagccggcgggtggagaatgtggtgctgcgggccaaggactggctgcccggggcccctgggggcacagctgtgtgggccaccagcctggaggccgaggtgcccccagacctggccctgaacaaggagcagcagctgcagatcagcaaggagctggtggacatccagatcaccacccaccacctgcacgagcagcatgaagctgagatcttccagctgaagtctgagatcctgcggctggagagccgggtgctggagctggagctgcggggagatggcaccagccagggctgtgctgtgcctgtggagagtgaccccaggcaccccagggctgctgcccaggagctgcggcacaaggcccaggtgcccggccacagtgatgaccaccgcttccaggtgcagcccaagaacaccatgaacccagaaaatgagcagcaccggctgggcagcggcctgcagggcgaggtgaagtgggccctggagcaccaggaggcccggcagcaggccctggtgaccagggtggccaccctgggccggcagctgcagggcgcccgggaggaggcccgggccgccggccagaggctggccacccaggccgtggtgctgtgcagctgccagggccagctgcggcaggccgaggccgagaatgcccggctgcagctgcagctgaagaagctgaaggatgaatatgtgctgcggctgcagcactgtgcctggcaggccgtggagcacgcagatggagctggccaggccccagccaccacagccctgcggaccttcctggaggccaccctggaggacatccgggccgcccacaggagccgggagcagcagctggcccgggccgcccggagctaccacaagaggctggtggacctgagcagaagacatgaggagctgctggtggcctaccgggcccctggcaacccccaggccatctttgatattgccagcctggacctggagcccctgcctgtgcccctggtgacagacttcagccaccgggaggaccagcacggcggccctggggccctgctgagcagccccaagaagaggcctgggggcgccagccagggcggcaccagcgagccccagggcctggatgctgcctcctgggcccagatccaccagaagctgcgggacttcagccgcagcacccagagctggaatggaagtggccacagctgctggagcggcccccgctggctgaagagcaacttcctgagctaccgcagcacctggaccagcacctgggccggcaccagcaccaagagctag

SEQ ID NO: 29974 - DNA, 1317 bp, Artificial Sequence
  derived and/or modified sequence
atggagcacgccgccaccaccggcccccggcccggcccccccagccgacgcgtggagaatgtcgtactgcgcgccaaagattggctgccgggtgcccccgggggcactgctgtatgggccacatctttagaggccgaagtaccccccgacctggcgctgaataaagagcaacaacttcagatctcaaaagagttagttgacatacagatcactacccatcatttacacgagcagcacgaagcagaaatttttcagctaaagagcgagattctgcgcctcgaatctcgggttctggagctcgagctacgcggagacgggacgtcccagggatgtgctgtgcccgtggagagtgaccctcggcatcctagagctgctgcccaagagctgagacacaaggcacaggtgcccggccactcggacgaccaccggttccaggtccagccgaaaaacactatgaacccagagaacgagcagcaccgcctgggtagtggactgcaaggagaagtcaagtgggctcttgagcaccaggaagcccggcagcaggctctggtgacaagagtggccacacttggccggcagctgcagggggcccgggaagaggccagagctgctgggcagcgcctcgctacccaggcagtggtcctctgctcttgtcagggacagcttaggcaggccgaggccgaaaatgcccgcctgcagctccagctcaagaagctgaaagatgaatacgtcctgcgcctgcagcactgtgcctggcaagcggtcgagcacgccgacggggctggtcaagcgccagcaactactgccttacggacatttcttgaggctacactggaagacattagggctgcgcatcgcagcagagagcaacagttggccagggccgcacgctcttatcataagcggctggtggacctctcccggagacatgaagagctgttggttgcttaccgcgccccgggaaacccacaggctatttttgacatcgcctccctagacctcgaacctctcccagtgcccctcgtcaccgattttagccacagggaggaccagcatgggggccctggcgccctgctgagcagcccgaagaaaagaccgggtggcgcttcccaggggggtacctctgagccccaggggttggacgctgccagttgggctcagatacaccaaaagctgcgggatttttccaggagtacacagagctggaatgggagtggtcactcctgctggtccggcccgcggtggttgaagtcaaacttcctgagctaccgcagtacctggacgagcacatgggccggaacttccactaagagttag

SEQ ID NO: 29975 - DNA, 1317 bp, Artificial Sequence
  derived and/or modified sequence
atggagcatgccgcaaccactggaccacggcctggccctccgtcacgccgtgtggaaaatgtggtgctccgagcgaaggattggctgccgggagcccctggcggtaccgcggtctgggctacaagccttgaagccgaggtccctcctgacttggcactgaataaggagcagcagctgcagatttcaaaggagctggttgacattcagattactacacatcatttacacgaacagcacgaagccgagatattccagcttaagtctgagatactgagactagagtccagagtactggaactggaactgcgaggagacggaaccagtcagggctgcgccgtaccagttgagagtgaccctaggcacccccgtgctgccgctcaggaactgcggcataaagcccaagttcccggtcactccgacgatcaccggtttcaggtgcagcctaagaataccatgaatcctgagaatgaacaacaccggcttggatcgggtctgcaaggcgaggttaagtgggcactagaacaccaagaggccaggcagcaagccctagtcaccagagtcgccactctcggtcggcagttgcagggggcaagggaagaagcacgagctgctggccagcgcttagcaacacaggcagtagtgttgtgtagctgtcagggacagcttagacaagcagaagcagagaatgctcggcttcaactgcagttgaaaaagttgaaggacgaatacgtgcttagattacagcattgtgcctggcaggccgtcgagcatgctgacggagccggtcaggcccctgccaccactgctttaaggacgttcctagaggccacactggaagatattcgtgccgcacaccgatcacgcgaacagcagttggccagggccgcacgatcctatcataagaggctggtggacctaagcagaagacacgaggagctcctggtggcgtatagggctccgggtaatcctcaggcaatatttgacattgcatcactcgacctcgaacccctccccgtccccctggttaccgatttcagccacagggaggatcagcacggcggtccaggcgcactgctgagcagtcccaagaaaaggcccggtggcgcttcacagggcggtacatctgaaccccaaggcctcgacgcagcttcatgggcccagatacaccagaagctgcgggatttctctagatcaacccagtcttggaacggctctggccacagttgctggtcagggcctcgttggcttaagtcaaacttcctaagctatcgcagtacatggacttcaacttgggccggtacttccaccaaaagctag

SEQ ID NO: 29976 - protein, 474 aa, Artificial Sequence
  derived and/or modified sequence
MVPVQPAEPPEVLKSEPYGEKADVWAVGCILYQMATLSPPFYSTNMLSLATKIVEAVYEPVPEGIYSEKVTDTISRCLTPDAEARPDIVEVSSMISDVMMKYLDNLSTSQLSLEKKLERERRRTQRYFMEANRNTVTCHHELAVLSHETFEKASLSSSSSGAASLKSELSESADLPPEGFQASYGKDEDRACDEILSDDNFNLENAEKDTYSEVDDELDISDNSSSSSSSPLKESTFNILKRSFSASGGERQSQTRDFTGGTGSRPRPALLPLDLLLKVPPHMLRAHIKEIEAELVTGWQSHSLPAVILRNLKDHASAGIAVSQRKVRQISDPIQQILIQLHKIIYITQLPPALHHNLKRRVIERFKKSLFSQQSNPCNLKSEIKKLSQGSPEPIEPNFFTADYHLLHRSSGGNSLSPNDPTGLPTSIELEEGITYEQMQTVIEEVLEESGYYNFTSNRYHSYPWGTKNHPTKR

SEQ ID NO: 29977 - DNA, 1284 bp, Artificial Sequence
  derived and/or modified sequence
atggtgcccgtgcagcccgccgagccccccgaggtgctgaagagcgagccctacggcgagaaggccgacgtgtgggccgtgggctgcatcctgtaccagatggccaccctgagcccccccttctacagcaccaacatgctgagcctggccaccaagatcgtggaggccgtgtacgagcccgtgcccgagggcatctacagcgagaaggtgaccgacaccatcagcagatgcctgacccccgacgccgaggccagacccgacatcgtggaggtgagcagcatgatcagcgacgtgatgatgaagtacctggacaacctgagcaccagccagctgagcctggagaagaagctggagagagagagaagaagaacccagagatacttcatggaggccaacagaaacaccgtgacctgccaccacgagctggccgtgctgagccacgagaccttcgagaaggccagcctgagcagcagcagcagcggcgccgccagcctgaagagcgagctgagcgagagcgccgacctgccccccgagggcttccaggccagctacggcaaggacgaggacagagcctgcgacgagatcctgagcgacgacaacttcaacctggagaacgccgagaaggacacctacagcgaggtggacgacgagctggacatcagcgacaacagcagcagcagcagcagcagccccctgaaggagagcaccttcaacatcctgaagagaagcttcagcgccagcggcggcgagagacagagccagaccagagacttcaccggcggcaccggcagcagacccagacccgccagcgccggcatcgccgtgagccagagaaaggtgagacagatcagcgaccccatccagcagatcctgatccagctgcacaagatcatctacatcacccagctgccccccgccctgcaccacaacctgaagagaagagtgatcgagagattcaagaagagcctgttcagccagcagagcaacccctgcaacctgaagagcgagatcaagaagctgagccagggcagccccgagcccatcgagcccaacttcttcaccgccgactaccacctgctgcacagaagcagcggcggcaacagcctgagccccaacgaccccaccggcctgcccaccagcatcgagctggaggagggcatcacctacgagcagatgcagaccgtgatcgaggaggtgctggaggagagcggctactacaacttcaccagcaacagataccacagctacccctggggcaccaagaaccaccccaccaagagatag

SEQ ID NO: 29978 - DNA, 1425 bp, Artificial Sequence
  derived and/or modified sequence
atggtgcccgtgcagcccgccgagccccccgaggtgctgaagagcgagccctacggcgagaaggccgacgtgtgggccgtgggctgcatcctgtaccagatggccaccctgagcccccccttctacagcaccaacatgctgagcctggccaccaagatcgtggaggccgtgtacgagcccgtgcccgagggcatctacagcgagaaggtgaccgacaccatcagcagatgcctgacccccgacgccgaggccagacccgacatcgtggaggtgagcagcatgatcagcgacgtgatgatgaagtacctggacaacctgagcaccagccagctgagcctggagaagaagctggagagagagagaagaagaacccagagatacttcatggaggccaacagaaacaccgtgacctgccaccacgagctggccgtgctgagccacgagaccttcgagaaggccagcctgagcagcagcagcagcggcgccgccagcctgaagagcgagctgagcgagagcgccgacctgccccccgagggcttccaggccagctacggcaaggacgaggacagagcctgcgacgagatcctgagcgacgacaacttcaacctggagaacgccgagaaggacacctacagcgaggtggacgacgagctggacatcagcgacaacagcagcagcagcagcagcagccccctgaaggagagcaccttcaacatcctgaagagaagcttcagcgccagcggcggcgagagacagagccagaccagagacttcaccggcggcaccggcagcagacccagacccgccctgctgcccctggacctgctgctgaaggtgcccccccacatgctgagagcccacatcaaggagatcgaggccgagctggtgaccggctggcagagccacagcctgcccgccgtgatcctgagaaacctgaaggaccacgccagcgccggcatcgccgtgagccagagaaaggtgagacagatcagcgaccccatccagcagatcctgatccagctgcacaagatcatctacatcacccagctgccccccgccctgcaccacaacctgaagagaagagtgatcgagagattcaagaagagcctgttcagccagcagagcaacccctgcaacctgaagagcgagatcaagaagctgagccagggcagccccgagcccatcgagcccaacttcttcaccgccgactaccacctgctgcacagaagcagcggcggcaacagcctgagccccaacgaccccaccggcctgcccaccagcatcgagctggaggagggcatcacctacgagcagatgcagaccgtgatcgaggaggtgctggaggagagcggctactacaacttcaccagcaacagataccacagctacccctggggcaccaagaaccaccccaccaagagatag

SEQ ID NO: 29979 - DNA, 1284 bp, Artificial Sequence
  derived and/or modified sequence
atggtgcctgtgcagccagccgagcctccagaggtcctgaaatcagagccgtatggtgagaaggctgacgtctgggcggtgggttgcatcctctaccagatggctacccttagcccacctttttatagcacaaatatgctgtctctggctaccaaaatagtcgaagccgtgtatgaaccagtacccgagggcatctactcggagaaggtcaccgacaccatttcacgttgtttaactcctgacgccgaggctagacccgatatcgtcgaggtgagctccatgatttctgatgttatgatgaagtacctggacaatctgagtacaagtcaactgtcgctggagaaaaagctggaacgggagaggcgccggactcagagatactttatggaggcaaaccggaatacagtaacctgccaccacgagctggccgttttgtctcacgagaccttcgaaaaggcatccctgtcaagctcctctagcggcgctgcctcactgaagtcagaactcagcgaaagcgccgacctgccacccgaaggttttcaagcctcctatggtaaagacgaagacagggcatgcgacgagatattgtcagatgacaatttcaaccttgaaaatgctgaaaaagacacctattccgaagtcgacgatgagctggacatcagcgataacagctcatcatcaagttctagcccccttaaagagagcaccttcaacatacttaaacgttccttctctgcctccggtggagagagacaaagccaaacccgcgactttaccggaggtacagggagtcgcccaaggcccgcctccgctggcattgccgtcagccagagaaaggtgcgccaaatttccgatcccattcagcagatcctgatccagcttcataagattatttacattacccagctacccccagccttgcaccacaatctgaaacgacgtgtaattgaacgtttcaaaaaatccttgttttcccagcaaagtaatccttgtaacctgaagagtgaaatcaaaaagctgagtcagggatcccctgagccaattgagcctaacttcttcacagccgactaccacttacttcatagatcttcaggagggaactccctgtctcccaatgaccccacgggcttgccaacctcaattgagctcgaagaggggattacatatgagcagatgcaaaccgtgattgaagaggtgctggaagaatccggatactacaatttcacatctaataggtatcattcttatccctggggaaccaaaaaccatccaacaaaaaggtag

SEQ ID NO: 29980 - DNA, 1425 bp, Artificial Sequence
  derived and/or modified sequence
atggtccccgtccaacccgccgagccccctgaggtgctgaagagcgagccatacggagagaaggctgatgtgtgggccgtcggctgcattctgtatcaaatggccactctgagtccccccttctattctaccaatatgctgagcctggcgaccaaaattgtcgaggcagtatacgagccagtccccgaaggaatctactccgagaaggtgactgacacaattagccggtgcctgactcctgacgcagaggcccggcccgacattgtggaagtcagctccatgatatcagacgttatgatgaagtatctggacaatctgtctaccagccagcttagcctcgaaaagaaactggagcgtgaacgacgaaggacccagcggtattttatggaggccaatcggaatactgtgacgtgtcaccacgagctggcggtgctgtcccatgaaacgttcgagaaggctagcctgagtagtagcagttccggagcagcatcattgaaaagcgagctgagcgagagcgcggacctgccccctgagggctttcaggcctcctacggcaaggacgaggacagggcctgtgatgaaatcttaagcgacgataactttaatctggagaatgcggaaaaagacacttactctgaagtggatgatgaattggatatcagcgacaactcctcgtcgtccagctcttctccactcaaagagtccacatttaatattttaaagagatcattctcagccagtggaggggagaggcagagccagacgagagacttcaccggaggtaccggctctcgacctaggcctgcactactgcctctggacctactcctaaaagtccctccacacatgttaagagctcacattaaggaaatagaagccgaacttgtgaccgggtggcagagccacagtctgcccgctgtgatcctgcggaatctaaaagaccacgcaagtgccgggatcgccgtttcccaacgaaaagtcagacaaatcagcgacccaattcagcagatcttaattcagctgcacaaaatcatctacatcacacagctgccccctgccctgcatcacaatctgaagcgtcgcgtgatagagaggtttaagaaatctcttttctcccagcaatccaatccgtgtaatctcaaatctgagatcaaaaagctgagtcagggaagtccagagccgatcgaacccaattttttcacagccgactaccacttgctacatcggagtagcggaggtaactccctgtcacctaacgaccccacagggctgcccacatctatcgagctcgaggaaggcattacttatgagcagatgcagactgtgatagaagaggtgttagaggagagcggttactacaattttacatccaacaggtaccatagctacccgtggggcaccaaaaatcaccctactaagaggtag

SEQ ID NO: 29981 - DNA, 1284 bp, Artificial Sequence
  derived and/or modified sequence
atggtgcctgtgcagcctgctgagcccccagaggtgctgaagtctgagccctacggggagaaggcagatgtgtgggccgtgggctgcatcctgtaccagatggccaccctgagcccccccttctacagcaccaacatgctgagcctggccaccaagatcgtggaggccgtgtatgagcctgtgcctgagggcatctacagcgagaaggtgacagacaccatcagccgctgcctgaccccagatgctgaggcccggccagacatcgtggaggtgtcctccatgatcagtgatgtgatgatgaagtacctggacaacctgagcaccagccagctgagcctggagaagaagctggagcgggagaggaggaggacccagcgctacttcatggaggccaacagaaacacagtgacctgccaccacgagctggccgtgctgagccatgagacctttgagaaggccagcctgagcagcagcagcagcggggccgccagcctgaagtctgagctgtctgagagcgctgacctgcccccagagggcttccaggccagctatggcaaggatgaggaccgggcctgtgatgagatcctgagtgatgacaacttcaacctggagaatgctgagaaggacacctacagcgaggtggatgatgagctggacatcagtgacaacagcagcagcagcagcagcagccccctgaaggagagcaccttcaacatcctgaagaggagcttcagcgccagcggcggggagcggcagagccagacccgggacttcaccggcggcaccggcagccggcccaggcctgccagcgctggcattgctgtgtcccagaggaaggtgcggcagatcagtgaccccatccagcagatcctgatccagctgcacaagatcatctacatcacccagctgcccccagccctgcaccacaacctgaagagaagagtcatcgagcgcttcaagaagagcctcttcagccagcagagcaacccctgcaacctgaagtctgagatcaagaagctgagccagggcagccctgagcccatcgagcccaacttcttcaccgctgactaccacctgctgcacaggagcagcggcggcaacagcctgagccccaatgaccccaccggcctgcccaccagcattgagctggaggagggcatcacctatgagcagatgcagaccgtcatcgaggaggtgctggaggagagcggctactacaacttcaccagcaaccgctaccacagctacccctggggcaccaagaaccaccccaccaagaggtag

SEQ ID NO: 29982 - DNA, 1425 bp, Artificial Sequence
  derived and/or modified sequence
atggtgcctgtgcagcctgctgagcccccagaggtgctgaagtctgagccctacggggagaaggcagatgtgtgggccgtgggctgcatcctgtaccagatggccaccctgagcccccccttctacagcaccaacatgctgagcctggccaccaagatcgtggaggccgtgtatgagcctgtgcctgagggcatctacagcgagaaggtgacagacaccatcagccgctgcctgaccccagatgctgaggcccggccagacatcgtggaggtgtcctccatgatcagtgatgtgatgatgaagtacctggacaacctgagcaccagccagctgagcctggagaagaagctggagcgggagaggaggaggacccagcgctacttcatggaggccaacagaaacacagtgacctgccaccacgagctggccgtgctgagccatgagacctttgagaaggccagcctgagcagcagcagcagcggggccgccagcctgaagtctgagctgtctgagagcgctgacctgcccccagagggcttccaggccagctatggcaaggatgaggaccgggcctgtgatgagatcctgagtgatgacaacttcaacctggagaatgctgagaaggacacctacagcgaggtggatgatgagctggacatcagtgacaacagcagcagcagcagcagcagccccctgaaggagagcaccttcaacatcctgaagaggagcttcagcgccagcggcggggagcggcagagccagacccgggacttcaccggcggcaccggcagccggcccaggcctgccctgctgcccctggacctgctgctgaaggtgcccccccacatgctgcgggcccacatcaaggagattgaagctgagctggtgacaggctggcagagccacagcctgcctgctgtgatcctgaggaacctgaaggaccacgccagcgctggcattgctgtgtcccagaggaaggtgcggcagatcagtgaccccatccagcagatcctgatccagctgcacaagatcatctacatcacccagctgcccccagccctgcaccacaacctgaagagaagagtgattgagcgcttcaagaagagcctcttcagccagcagagcaacccctgcaacctgaagtctgagatcaagaagctgagccagggcagccctgagcccatcgagcccaacttcttcaccgctgactaccacctgctgcacaggagcagcggcggcaacagcctgagccccaatgaccccaccggcctgcccaccagcattgagctggaggagggcatcacctatgagcagatgcagacagtgattgaggaggtgctggaggagagcggctactacaacttcaccagcaaccgctaccacagctacccctggggcaccaagaaccaccccaccaagaggtag

SEQ ID NO: 29983 - DNA, 1284 bp, Artificial Sequence
  derived and/or modified sequence
atggtgcccgtgcagcccgccgagccccccgaggtgctgaagagcgaaccatacggagaaaaggccgatgtgtgggcggtgggttgcattctataccagatggcaactctgtcgccgcctttttattctacaaatatgctcagtctcgccaccaagattgtcgaggcagtctacgagcctgtgccagaggggatttattccgaaaaagtgactgacaccatctcgcggtgtttaacccctgacgccgaagcacgccccgacattgtggaagtttcatcgatgatcagtgacgttatgatgaaatatctggacaatctatcaacttcacagctgagcctggaaaaaaaacttgaacgtgagcgccggagaacgcagcgctattttatggaagccaacagaaataccgtgacttgtcaccacgagctggcggtactgagtcacgaaacatttgaaaaagcctcgttgagttcttcttcatcaggtgccgccagtcttaagagtgaactttccgagagcgcggaccttccacccgaggggttccaggcatcttatgggaaggacgaggatagggcttgcgacgaaatcttgtctgacgacaacttcaatctcgaaaacgcggagaaggatacttactccgaggtcgacgacgaactggatatttcagataactccagctcatccagtagttccccgctgaaggagagtacgttcaacatactgaaaaggagcttctccgcgtctggaggcgagaggcaatctcaaacgagagactttactggcggtacaggctccaggccccggccagctagcgccggcattgctgtctctcaacgtaaggtgaggcagatatctgatcctatccagcagatactcatacagctgcataaaattatctacattacccaactgccgccagccctgcaccacaacttgaagcggcgagtgattgagcgctttaaaaaaagtcttttcagtcaacaaagcaacccctgcaacctgaaaagtgagattaagaagctaagtcagggatccccagagcccattgaacctaacttctttactgcagattatcacctcctccacaggtcctctggaggtaattcactctcgcccaacgacccaaccggacttcccacttcaattgaactggaagaaggtattacatacgaacagatgcaaactgtgatcgaagaggtgctggaggaatcagggtattataacttcacctccaaccgctaccacagttatccctggggcaccaaaaatcatccaacaaagcgttag

SEQ ID NO: 29984 - DNA, 1425 bp, Artificial Sequence
  derived and/or modified sequence
atggtgcccgtgcagcccgccgagccccccgaggtgctgaagagcgagccatacggggaaaaggctgacgtatgggcagttgggtgtattctctaccagatggccacattgagtccccctttctactctacaaacatgctttcgctggccacgaaaatcgtggaggctgtatacgagcccgtgccagagggcatctacagcgagaaagtcaccgacacgatatccaggtgtctgacaccagacgctgaggcccgccccgatattgtggaggtgtcctccatgatatccgatgtgatgatgaagtatcttgacaacctgagcacttcccagctatcactggagaagaagctcgagagagagcggagacgaacacaacgctattttatggaggctaatcgaaacaccgtgacctgccatcacgaactagcggtcctctctcacgagactttcgagaaggcttctctctcctccagttcttcgggtgcagccagccttaaaagcgagctctcggagagcgcagacctccctccggaaggctttcaagctagttacggcaaagacgaggatagggcctgcgacgagatcctttccgacgataatttcaacctcgaaaatgcagaaaaagacacctacagtgaggtcgatgatgagttggacatatctgataactcatcgagctcaagctccagcccacttaaagaaagtacatttaacattctgaaaaggtctttctcagcatccggaggggagagacaaagccagactcgcgatttcacgggagggacggggagtcgccctcgacctgcactgctgcccctggacctactcttaaaagtgccaccacacatgctcagggcccatatcaaagagatcgaggccgagttggttacaggatggcaaagtcacagccttcctgctgtgattctcagaaacttaaaagaccatgccagtgcgggcatcgccgtgtcccagcggaaggttcgtcagatctctgatcccatccagcagatcctgatccagcttcacaaaatcatttacataacccagctgcccccagccctgcaccacaatcttaaacgacgggtgatagaacgctttaagaaatctctttttagtcaacagagcaacccctgcaaccttaaatccgaaattaagaagctgtctcaggggtctccagaacctatcgagcccaactttttcaccgcagattaccatcttctccacagatcaagcggcgggaactccctgtctccaaacgacccaactggacttccaacttccattgagcttgaggaaggaattacctacgaacagatgcagaccgttatcgaagaggtgctcgaggagagcggctactacaacttcacaagcaacaggtatcattcctatccctggggaacaaagaatcatcccacaaagcgctag

SEQ ID NO: 29985 - DNA, 1872 bp, Artificial Sequence
  derived and/or modified sequence
agaaataatgtatggagggactatacaagggcatatatactagtaaaagtgttttctcaatagatcaccaaagaatttgccacacctgatatatagaaaagtttattgtgcagcacctctaccttcgctctcctgctcctgctctggccacataaaacgtgctggctcctcctttgccttctgctatcattggaagcttcctgatgcctcccaagaagcaaatgccatcatggttcctgtacagcctgcagaaccccccgaggtactgaagagtgagccgtatggggagaaggctgatgtctgggcagtaggctgcatcctttatcagatggcgactttgagtccccccttctacagcactaacatgctgtccttggctacaaaaatagtggaggcggtatatgaaccagtcccagaaggtatctactctgaaaaagtaacagacaccatcagcaggtgcctcactcctgatgcggaagctcgtccagatattgtagaagtcagttcgatgatatcagatgtcatgatgaaatatttagacaacttatctacatcccagttgtccttggaaaagaagctagaacgggaacgaagacgcacacaaaggtattttatggaagccaaccggaacaccgtcacatgtcaccatgagctggctgttctatctcacgagacctttgagaaggcaagtttgagtagcagcagcagtggagcagccagcctgaaaagtgaactttcagaaagcgcagacctgccccctgaaggcttccaggcctcctatggtaaagacgaagacagggcctgtgacgaaatcctgtcagatgataacttcaacctggaaaatgctgagaaagatacatattcagaggtagatgatgaattggacatttcggataactccagcagctccagttcaagccctctgaaagaatctacattcaacattttaaagagaagttttagtgcttcaggaggagaaagacaatcccaaacaagggacttcactggaggaacaggatcaagaccaagaccagcatcagcaggaattgctgtgtcccagaggaaagtgcgtcagatcagtgatcctattcagcagatattaattcagctgcacaaaataatctatatcacacagcttcctccagctttgcaccacaatttgaaaagaagggttatagagagattcaagaaatccctcttcagccagcagagtaacccttgtaatttgaaatctgaaattaaaaagttatctcagggatctccagaaccgattgagcccaactttttcacagcagattaccatttattacatcgttcatccggtggaaacagcctgtccccaaatgaccctacaggtttaccaaccagcattgaattggaggaaggaataacatatgaacagatgcagactgtgattgaagaagtccttgaggaaagtggctattacaattttacatctaacaggtatcattcctatccatgggggaccaagaatcacccaaccaaaagatgaaaatgctgcattttgagtggacttgattttctcagtgaagttcaagttctggacttcagccgctattgcaagatgcccaaggattgggtgctgctagagggtgtggaaaagaccaagatgccatggggcctgcaggacttctttctgggggtcctgtgctggagtatatgacagctgcggtacttgagggcttcattgccagaacacattatatacaggatgtcagagctaccagtgtgctgctgggagaaaatgctgcaaaattcatcttttggagggtggggggaaaacccaaaaacaacaacaaaaaaactctcttacagaattttccttaacattaaaaaaaacttgtcatattt

SEQ ID NO: 29986 - DNA, 2023 bp, Artificial Sequence
  derived and/or modified sequence
agaaataatgtatggagggactatacaagggcatatatactagtaaaagtgttttctcaatagatcaccaaagaatttgccacacctgatatatagaaaagtttattgtgcagcacctctaccttcgctctcctgctcctgctctggccacataaaacgtgctggctcctcctttgccttctgctatcattggaagcttcctgatgcctcccaagaagcaaatgccatcatggttcctgtacagcctgcagaaccccccgaggtactgaagagtgagccgtatggggagaaggctgatgtctgggcagtaggctgcatcctttatcagatggcgactttgagtccccccttctacagcactaacatgctgtccttggctacaaaaatagtggaggcggtatatgaaccagtcccagaaggtatctactctgaaaaagtaacagacaccatcagcaggtgcctcactcctgatgcggaagctcgtccagatattgtagaagtcagttcgatgatatcagatgtcatgatgaaatatttagacaacttatctacatcccagttgtccttggaaaagaagctagaacgggaacgaagacgcacacaaaggtattttatggaagccaaccggaacaccgtcacatgtcaccatgagctggctgttctatctcacgagacctttgagaaggcaagtttgagtagcagcagcagtggagcagccagcctgaaaagtgaactttcagaaagcgcagacctgccccctgaaggcttccaggcctcctatggtaaagacgaagacagggcctgtgacgaaatcctgtcagatgataacttcaacctggaaaatgctgagaaagatacatattcagaggtagatgatgaattggacatttcggataactccagcagctccagttcaagccctctgaaagaatctacattcaacattttaaagagaagttttagtgcttcaggaggagaaagacaatcccaaacaagggacttcactggaggaacaggatcaagaccaagaccagctttgctgcctcttgacctgcttctgaaagtgccaccccacatgctcagggcccacattaaggaaatagaggctgagttagtgacagggtggcagtcccatagccttcctgctgtgattcttcgaaatctcaaagatcatgcatcagcaggaattgctgtgtcccagaggaaagtgcgtcagatcagtgatcctattcagcagatattaattcagctgcacaaaataatctatatcacacagcttcctccagctttgcaccacaatttgaaaagaagggttatagagagattcaagaaatccctcttcagccagcagagtaacccttgtaatttgaaatctgaaattaaaaagttatctcagggatctccagaaccgattgagcccaactttttcacagcagattaccatttattacatcgttcatccggtggaaacagcctgtccccaaatgaccctacaggtttaccaaccagcattgaattggaggaaggaataacatatgaacagatgcagactgtgattgaagaagtccttgaggaaagtggctattacaattttacatctaacaggtatcattcctatccatgggggaccaagaatcacccaaccaaaagatgaaaatgctgcattttgagtggacttgattttctcagtgaagttcaagttctggacttcagccgctattgcaagatgcccaaggattgggtgctgctagagggtgtggaaaagaccaagatgccatggggcctgcaggacttctttctgggggtcctgtgctggagtatatgacagctgcggtacttgagggcttcattgccagaacacattatatacaggatgtcagagctaccagtgtgctgctgggagaaaatgctgcaaaattcatcttttggagggtggggggaaaacccaaaaacaacaacaaaaaaactctcttacagaattttccttaacattaaaaaaaacttgtcatatttttcaaaggca

SEQ ID NO: 29987 - DNA, 1284 bp, Artificial Sequence
  derived and/or modified sequence
atggtgccagtgcagcctgcagaacccccagaggtcctcaaatctgagccttatggcgagaaggccgatgtatgggctgtcggatgcatcctgtaccagatggccaccctgtcaccccctttttatagcaccaatatgctgtctctggcgaccaaaatcgtcgaagccgtttatgagcctgttccggaaggtatttacagcgagaaagtgacggatacaataagccggtgcttgacaccagacgccgaggctcgcccagacatcgttgaagtcagtagcatgattagtgatgtgatgatgaaatatttggataatctcagtacctcacagctgtctcttgagaagaagctggaaagggagcggaggaggacccagaggtacttcatggaagccaataggaatactgtcacctgtcaccatgaacttgcagtgctgagccatgaaacgttcgagaaggcttctctgtctagtagttcctccggggctgcatctctgaaaagcgagctgagcgagtctgccgacctacctcccgaaggattccaggccagctatggtaaagacgaggatcgcgcttgcgatgagattctcagcgacgataattttaatcttgaaaatgctgaaaaggatacgtattcggaggtggatgacgagctcgatatttctgataattcaagttcatccagttcctctcccctcaaagagtcaacattcaatatcttgaaacgctctttctctgcctccggcggagagcgccagagtcagaccagagattttactggtggcaccgggagtagaccaaggccagcttccgccggtattgccgtaagtcaaaggaaggtgagacaaatctctgaccctatccagcagatcctgattcaacttcacaagatcatttatatcacgcagctgccacccgcactacatcataatcttaagcggagggtgatcgaaagattcaagaagagcctgtttagccagcagtccaacccatgtaacctgaagagtgagattaagaaactctcccaaggctctcccgaacccatcgagccgaacttttttactgctgattaccatcttctgcatcgatctagcgggggtaattccttgtcacccaacgatccgacgggcctccccacatctatcgaacttgaggagggaatcacttacgagcagatgcagaccgtgattgaagaggtactcgaagagtctggttactataacttcacatccaatcgttaccactcttacccttggggcacgaagaaccatcccaccaagagatag

SEQ ID NO: 29988 - DNA, 1425 bp, Artificial Sequence
  derived and/or modified sequence
atggtgccagtgcagcccgctgaaccaccagaggtgcttaagtcagaaccttatggcgaaaaagccgatgtgtgggctgtcgggtgtattttataccaaatggctactctgtcccctcccttctacagtaccaatatgctcagcttagcaaccaaaattgtcgaggcagtgtatgaaccagtgcccgaaggcatttactccgaaaaggtgactgacaccatctcccgttgtctcactcctgacgctgaggccagaccggacattgtggaggtgtctagcatgatttccgacgttatgatgaaatacttagataacttgtccacatcccagctctctttggaaaaaaagttggagcgggagcggcgtaggacccagcgttattttatggaggctaatcggaacacagtcacgtgccatcacgaactcgccgtgctcagccacgagacctttgagaaagcttctttatcctcatcatctagcggcgctgcttcactgaagagcgagctgtccgaaagtgccgacttacctccagagggattccaagcgtcatacgggaaagatgaagaccgtgcgtgcgacgaaatcctgagcgacgataatttcaacctcgaaaacgccgaaaaagacacatattcagaggttgacgatgaacttgacatcagcgacaacagttcttcctcctcttctagcccactgaaggaaagcacttttaatattctgaagagatcgtttagcgcttctggcggtgagagacagagtcaaacgcgcgatttcaccggcggtaccggttccagaccacgcccagccctcttaccactggacctcttactgaaggtgccgccacatatgctgagagctcatataaaggaaatcgaagccgagctagttaccggatggcagagccattccctaccagctgtgatcctccgaaacctaaaagaccacgcgtccgccggtattgcagtctctcagcgaaaggtcagacagatctctgatccgatccagcagatcctgattcagctgcataagatcatctatatcacgcaattgcctcctgccctgcatcacaatctgaaaagaagagtgatcgagcggtttaagaagagtctatttagccagcagagtaacccttgtaatctaaagtccgagataaagaaactgtcgcaaggctcacctgaacctattgagcctaactttttcacggccgattatcacttgctgcatcgcagttctggcggaaacagtttgagccctaacgatccaactggcctcccaacctcgatagaacttgaggagggcattacatacgaacaaatgcagaccgtcatcgaggaagtgctggaagaatcgggatactacaacttcacatcgaatagataccactcttatccctggggtactaaaaatcaccccacgaagcgatag

SEQ ID NO: 29989 - protein, 251 aa, Artificial Sequence
  derived and/or modified sequence
MAMGVPRVILLCLFGAALCLTGSQALQCYSFEHTYFGPFDLRAMKLPSISCPHECFEAILSLDTGYRAPVTLVRKGCWTGPPAGQTQSNADALPPDYSVVRGCTTDKCNAHLMTHDALPNLSQAPDPPTLSGAECYACIGVHQDDCAIGRSRRVQCHQDQTACFQGNGRMTVGNFSVPVYIRTCHRPSCTTEGTTSPWTAIDLQGSCCEGYLCNRKSMTQPFTSASATTPPRALQVLALLLPVLLLVGLSA

SEQ ID NO: 29990 - protein, 208 aa, Artificial Sequence
  derived and/or modified sequence
MKLPSISCPHECFEAILSLDTGYRAPVTLVRKGCWTGPPAGQTQSNADALPPDYSVVRGCTTDKCNAHLMTHDALPNLSQAPDPPTLSGAECYACIGVHQDDCAIGRSRRVQCHQDQTACFQGNGRMTVGNFSVPVYIRTCHRPSCTTEGTTSPWTAIDLQGSCCEGYLCNRKSMTQPFTSASATTPPRALQVLALLLPVLLLVGLSA

SEQ ID NO: 29991 - DNA, 756 bp, Artificial Sequence
  derived and/or modified sequence
atggccatgggcgtgcccagagtgatcctgctgtgcctgttcggcgccgccctgtgcctgaccggcagccaggccctgcagtgctacagcttcgagcacacctacttcggccccttcgacctgagagccatgaagctgcccagcatcagctgcccccacgagtgcttcgaggccatcctgagcctggacaccggctacagagcccccgtgaccctggtgagaaagggctgctggaccggcccccccgccggccagacccagagcaacgccgacgccctgccccccgactacagcgtggtgagaggctgcaccaccgacaagtgcaacgcccacctgatgacccacgacgccctgcccaacctgagccaggcccccgacccccccaccctgagcggcgccgagtgctacgcctgcatcggcgtgcaccaggacgactgcgccatcggcagaagcagaagagtgcagtgccaccaggaccagaccgcctgcttccagggcaacggcagaatgaccgtgggcaacttcagcgtgcccgtgtacatcagaacctgccacagacccagctgcaccaccgagggcaccaccagcccctggaccgccatcgacctgcagggcagctgctgcgagggctacctgtgcaacagaaagagcatgacccagcccttcaccagcgccagcgccaccaccccccccagagccctgcaggtgctggccctgctgctgcccgtgctgctgctggtgggcctgagcgcctag

SEQ ID NO: 29992 - DNA, 756 bp, Artificial Sequence
  derived and/or modified sequence
atggctatgggtgttcctcgcgtgattcttttatgcttgttcggcgcggctctttgtctgacggggtcccaggccctacagtgctacagtttcgagcacacatattttgggccttttgacctccgggccatgaagctcccaagtatatcatgtccgcatgagtgctttgaagccatattatctctggacactgggtaccgtgctcccgtcacactagtgagaaaaggctgctggaccggacctccggctggacagacccagtctaatgctgatgcgctaccgccggattacagcgttgtacggggttgcaccaccgataagtgtaacgcccacttaatgactcacgatgcccttccaaacctgtctcaggcaccagaccctccaacattatccggtgcagagtgttacgcgtgcataggcgtccatcaggacgattgtgccattgggcgctcccgccgcgtgcaatgccatcaagatcagactgcatgtttccagggaaacggacggatgacagtgggcaacttttctgtgccggtgtacatccgtacttgtcatcggccgtcttgcaccaccgaaggcaccacctctccatggactgcaatcgacctgcagggaagctgctgcgaagggtatttgtgtaatagaaaaagcatgacccaaccttttacctccgcaagtgctaccacccctccacgagctctccaggtactcgctctgctccttccagttttgcttcttgtggggctaagcgcatag

SEQ ID NO: 29993 - DNA, 2500 bp, Artificial Sequence
  derived and/or modified sequence
gatgcttaggactcagtaaggagaaccagccaggcagcacatcacagcgggaggagctgtcccaggtggcccagctcagcaatggcaatgggggtccccagagtcattctgctctgcctctttggggctgcgctctgcctgacagggtcccaagccctgcagtgctacagctttgagcacacctactttggcccctttgacctcagggccatgaagctgcccagcatctcctgtcctcatgagtgctttgaggctatcctgtctctggacaccgggtatcgcgcgccggtgaccctggtgcggaagggctgctggaccgggcctcctgcgggccagacgcaatcgaacgcggacgcgctgccgccagactactcggtggtgcgcggctgcacaactgacaaatgcaacgcccacctcatgactcatgacgccctccccaacctgagccaagcacccgacccgccgacgctcagcggcgccgagtgctacgcctgtatcggggtccaccaggatgactgcgctatcggcaggtcccgacgagtccagtgtcaccaggaccagaccgcctgcttccagggcaatggcagaatgacagttggcaatttctcagtccctgtgtacatcagaacctgccaccggccctcctgcaccaccgagggcaccaccagcccctggacagccatcgacctccagggctcctgctgtgaggggtacctctgcaacaggaaatccatgacccagcccttcaccagtgcttcagccaccacccctccccgagcactacaggtcctggccctgctcctcccagtcctcctgctggtggggctctcagcatagaccgcccctccaggatgctggggacagggctcacacacctcattcttgctgcttcagcccctatcacatagctcactggaaaatgatgttaaagtaagaattgcactcctgtccctctggccttccatctctcccgcccttgtgccccacaacctggccaacagtactggaagaaactggacacagtcaccagcatccccggggagggcaaaacagccatgtcgtgccccgatgaagagcaattctgatcacagctgttactcactgagcaccagccaggcaccaggcaccccataacacggcttcctgtgctctccctccagagcctgtcgcagctctaggagggagctatacaatgatgtctttattagtgtcatcatgagaagcccaataagcagtatgccctaacagttagtaggccaggctctggagctaagctgcatgggttcaaatcccagctccaccattcagcctgcagagaccatgagcgagttacttaagccaggctctggagctaagctgcatgggttcaaatcccagctccagcattcagcctacagagaccatgggtgagttacttaagccaggctctggagctaagctgcatgggttcaaatcccagctccaccattcagcctgcagagactgtgggtgagttacttgagctctctgtgccaatattttctcacctataaggtggaggtgaaaataaactctataacatgacaagaactacttcacagtagttgcagtgaggattcaacgagatgaacatttagtacttgggacacagcagtggcccagtgtaaatgggctacttgtcataagccctaagtcacaggtcaacaaactgagaggcaaaagcacttggttgagcttgtgtatctagtgagtatggattcagggaccagattcccagccccacgaactgctaagcaaccccacctcctaaacacatgagtgccgattaacttcacagaaaaacacacaaggcaaagttcagcgaggtgaaattctccaagctataaagatcagggaagacttcctggaggaattcacccttgagcaaaatcctaaaggatcaatagtagctggcaaaaagaagcaggaggaagcgcattctaggtagaggagacagcctggacaaaggtctgagggaggaaggagcacaaggagtgcaggacactttcatgagtgcaggacactttcataactgcatgaacttcatagagatgggatcctttagcatgttctctgtgcacatgcttgaccatgttctttcacatgctttttgccacttgatctttccagcaactcagtgagagaagcaaaaaagtaagttgcatcctgctattgtctgaatgtttgtgtctccccaaaattcatcttttgaaacctaattaccaaagtgatattactgggaggtggggcctttgggaggtggtgagatcatgagggtggagcccccatgaataggattagtgcccttataaaagaggccctggagagctgccttgccccttccaccacatgagaacacagccagcaggtgcctataagcaagaaagtgggttctcaccagccatcgaatctgctggtgcattgattgcagacttcccagactccagagctatgagacataaatttctgttgtgtataagcc

SEQ ID NO: 29994 - DNA, 2472 bp, Artificial Sequence
  derived and/or modified sequence
gatccgctttgcgcatcccagtgattcttgggttccgcgtgtagtttcggaaggagacatcgaagcagggcgaggcgcagagggcgttgcggactcatgccccagtcggcagtgcggggtcccaagccctgcagtgctacagctttgagcacacctactttggcccctttgacctcagggccatgaagctgcccagcatctcctgtcctcatgagtgctttgaggctatcctgtctctggacaccgggtatcgcgcgccggtgaccctggtgcggaagggctgctggaccgggcctcctgcgggccagacgcaatcgaacgcggacgcgctgccgccagactactcggtggtgcgcggctgcacaactgacaaatgcaacgcccacctcatgactcatgacgccctccccaacctgagccaagcacccgacccgccgacgctcagcggcgccgagtgctacgcctgtatcggggtccaccaggatgactgcgctatcggcaggtcccgacgagtccagtgtcaccaggaccagaccgcctgcttccagggcaatggcagaatgacagttggcaatttctcagtccctgtgtacatcagaacctgccaccggccctcctgcaccaccgagggcaccaccagcccctggacagccatcgacctccagggctcctgctgtgaggggtacctctgcaacaggaaatccatgacccagcccttcaccagtgcttcagccaccacccctccccgagcactacaggtcctggccctgctcctcccagtcctcctgctggtggggctctcagcatagaccgcccctccaggatgctggggacagggctcacacacctcattcttgctgcttcagcccctatcacatagctcactggaaaatgatgttaaagtaagaattgcactcctgtccctctggccttccatctctcccgcccttgtgccccacaacctggccaacagtactggaagaaactggacacagtcaccagcatccccggggagggcaaaacagccatgtcgtgccccgatgaagagcaattctgatcacagctgttactcactgagcaccagccaggcaccaggcaccccataacacggcttcctgtgctctccctccagagcctgtcgcagctctaggagggagctatacaatgatgtctttattagtgtcatcatgagaagcccaataagcagtatgccctaacagttagtaggccaggctctggagctaagctgcatgggttcaaatcccagctccaccattcagcctgcagagaccatgagcgagttacttaagccaggctctggagctaagctgcatgggttcaaatcccagctccagcattcagcctacagagaccatgggtgagttacttaagccaggctctggagctaagctgcatgggttcaaatcccagctccaccattcagcctgcagagactgtgggtgagttacttgagctctctgtgccaatattttctcacctataaggtggaggtgaaaataaactctataacatgacaagaactacttcacagtagttgcagtgaggattcaacgagatgaacatttagtacttgggacacagcagtggcccagtgtaaatgggctacttgtcataagccctaagtcacaggtcaacaaactgagaggcaaaagcacttggttgagcttgtgtatctagtgagtatggattcagggaccagattcccagccccacgaactgctaagcaaccccacctcctaaacacatgagtgccgattaacttcacagaaaaacacacaaggcaaagttcagcgaggtgaaattctccaagctataaagatcagggaagacttcctggaggaattcacccttgagcaaaatcctaaaggatcaatagtagctggcaaaaagaagcaggaggaagcgcattctaggtagaggagacagcctggacaaaggtctgagggaggaaggagcacaaggagtgcaggacactttcatgagtgcaggacactttcataactgcatgaacttcatagagatgggatcctttagcatgttctctgtgcacatgcttgaccatgttctttcacatgctttttgccacttgatctttccagcaactcagtgagagaagcaaaaaagtaagttgcatcctgctattgtctgaatgtttgtgtctccccaaaattcatcttttgaaacctaattaccaaagtgatattactgggaggtggggcctttgggaggtggtgagatcatgagggtggagcccccatgaataggattagtgcccttataaaagaggccctggagagctgccttgccccttccaccacatgagaacacagccagcaggtgcctataagcaagaaagtgggttctcaccagccatcgaatctgctggtgcattgattgcagacttcccagactccagagctatgagacataaatttctgttgtgtataagcc

SEQ ID NO: 29995 - DNA, 756 bp, Artificial Sequence
  derived and/or modified sequence
atggccatgggcgtgcccagggtcatcctgctgtgcctgtttggagctgccctgtgcctgaccggcagccaggccctgcagtgctacagctttgagcacacctacttcggcccctttgacctgcgggccatgaagctgcccagcatcagctgcccccatgagtgctttgaggccatcctgagcctggacaccggctaccgggcccctgtgaccctggtgaggaagggctgctggacaggccccccagctggccagacccagagcaatgctgatgccctgcccccagactacagcgtggtgcggggctgcaccacagacaagtgcaatgcccacctgatgacccatgatgccctgcccaacctgagccaggccccagacccccccaccctgtctggagctgagtgctacgcctgcattggagtgcaccaggatgactgtgccatcggccgcagccggcgggtgcagtgccaccaggaccagacagcctgcttccagggcaatggaaggatgacagtgggcaacttctctgtgcctgtgtacatccgcacctgccaccggcccagctgcaccacagagggcaccaccagcccctggacagccatcgacctgcagggcagctgctgtgagggctacctgtgcaacaggaagtccatgacccagcccttcaccagcgccagcgccaccaccccaccccgggccctgcaggtgctggccctgctgctgcctgtgctgctgctggtgggcctgagcgcctag

SEQ ID NO: 29996 - DNA, 756 bp, Artificial Sequence
  derived and/or modified sequence
atggccatgggcgtgccccgggtgatcctgctgtgcctgttcggcgcagctctgtgtctgaccggctctcaggctcttcagtgctactctttcgagcatacttactttgggcctttcgacctgcgggctatgaaacttccatcaatctcgtgccctcacgagtgcttcgaggctattctctctctcgacaccggctacagggcccctgtcaccctggtgcggaaggggtgttggacaggccctcccgccggccagactcaatcaaatgcagatgctctcccacctgactacagcgtggttagaggatgtaccaccgacaagtgtaacgcacatctaatgactcacgatgctctgccaaatctgagccaggcccccgatcccccgactctttccggggcagaatgttatgcttgcattggtgtgcatcaagatgattgcgccatcggacgaagtagacgtgtacagtgtcaccaggaccagactgcctgcttccagggaaacggccggatgacagttggaaacttctccgttccagtttacatcaggacctgtcatagaccttcttgcactactgagggtaccacaagcccctggacagcgattgacctgcaaggttcctgttgtgagggttacctgtgtaatagaaagtctatgactcaaccatttaccagcgcctccgccactactcccccccgggccctgcaagttctggccctcctactccccgtcctcctgctcgtgggactgagcgcatag

SEQ ID NO: 29997 - DNA, 756 bp, Artificial Sequence
  derived and/or modified sequence
atggccatgggggtgcctagggtgatactactgtgtctgttcggcgcagccttgtgcctcactggcagccaggccttacagtgctacagctttgagcacacttacttcggaccttttgacttgcgcgctatgaagctgccctcaatcagttgcccacacgaatgctttgaagcaatcctgtccttggacaccggctaccgcgcaccggtcaccttagtaagaaaaggctgttggactggccctcctgcaggccaaacccagtccaacgctgatgctttaccaccagattactctgttgtccgaggttgcacaaccgataaatgcaatgctcacctgatgactcatgacgcccttcccaatttgtctcaagcacccgacccccctacattgtctggggctgagtgctatgcatgtattggagttcaccaggatgactgcgcgatcggaaggtctcgccgtgtgcagtgccatcaggaccaaactgcctgttttcagggaaatgggaggatgacggtggggaacttctcagtcccagtctatattcggacctgccaccggcctagttgcactactgaaggtactacttctccgtggacagctatagacctgcaaggcagttgctgcgaaggctatctgtgcaaccggaagtccatgacccagccgtttaccagtgcctctgccaccactcctcccagagcgttacaggtattagccctcctacttcccgtccttttattggttgggctgagcgcatag

SEQ ID NO: 29998 - protein, 178 aa, Artificial Sequence
  derived and/or modified sequence
MMIHGFQSSHRDFCFGPWKLTASKTHIMKSADVEKLADELHMPSLPEMMFGDNVLRIQHGSGFGIEFNATDALRCVNNYQGMLKVACAEEWQESRTEGEHSKEVIKPYDWTYTTDYKGTLLGESLKLKVVPTTDHIDTEKLKAREQIKFFEEVLLFEDELHDHGVSSLSVKIPGGGHL

SEQ ID NO: 29999 - DNA, 537 bp, Artificial Sequence
  derived and/or modified sequence
atgatgatccacggcttccagagcagccacagagacttctgcttcggcccctggaagctgaccgccagcaagacccacatcatgaagagcgccgacgtggagaagctggccgacgagctgcacatgcccagcctgcccgagatgatgttcggcgacaacgtgctgagaatccagcacggcagcggcttcggcatcgagttcaacgccaccgacgccctgagatgcgtgaacaactaccagggcatgctgaaggtggcctgcgccgaggagtggcaggagagcagaaccgagggcgagcacagcaaggaggtgatcaagccctacgactggacctacaccaccgactacaagggcaccctgctgggcgagagcctgaagctgaaggtggtgcccaccaccgaccacatcgacaccgagaagctgaaggccagagagcagatcaagttcttcgaggaggtgctgctgttcgaggacgagctgcacgaccacggcgtgagcagcctgagcgtgaagatccccggcggcggccacctgtag

SEQ ID NO: 30000 - DNA, 537 bp, Artificial Sequence
  derived and/or modified sequence
atgatgatccacggcttccagtcctcacatcgcgacttctgttttggtccctggaaacttaccgcgtcaaagacccatattatgaagtctgcagacgtagaaaaactggcagacgagctgcacatgccgtccctacctgagatgatgttcggggataacgttctgcgtattcagcatggctctgggttcgggattgagttcaacgctactgacgctttacggtgcgtcaacaattaccagggaatgttaaaagttgcctgcgccgaagagtggcaggagtctaggacagaaggagagcattcaaaggaggttattaagccttatgattggacatatacgaccgattacaaaggcaccctgctgggggaatctctgaagttaaaagtggtcccaacaacagaccatatcgacactgaaaagcttaaagctcgcgagcaaattaaattttttgaggaggttctgttattcgaagatgaactgcacgatcacggcgtgagctccttgagtgtcaaaatccccggggggggtcacttgtag

SEQ ID NO: 30001 - DNA, 537 bp, Artificial Sequence
  derived and/or modified sequence
atgatgatccacggcttccagagcagccaccgggacttctgcttcggcccctggaagctgacagccagcaagacccacatcatgaagtctgcagatgtggagaagctggctgatgagctgcacatgcccagcctgcctgagatgatgtttggagacaacgtgctgcgcatccagcacggcagcggctttggaattgagttcaatgccacagatgccctgcgctgtgtgaacaactaccagggcatgctgaaggtggcctgtgccgaggagtggcaggagagcaggacagaaggagagcacagcaaggaggtgatcaagccctatgactggacctacaccacagactacaagggcaccctgctgggggagagcctgaagctgaaggtggtgcccaccacagaccacatcgacacagagaagctgaaggcccgggagcagatcaagttctttgaggaggtgctgctgtttgaagatgagctgcatgaccatggagtgagcagcctgtctgtgaagatccctgggggcggccacctgtag

SEQ ID NO: 30002 - DNA, 537 bp, Artificial Sequence
  derived and/or modified sequence
atgatgatccacggcttccagagcagccaccgggacttctgcttcggaccctggaaactgaccgcctccaagacacacattatgaagtctgcagatgtggagaaactcgcggatgaactacacatgccctccctgcctgaaatgatgtttggtgataatgtgctgcggatccaacacggctccggctttgggatagagttcaacgccactgacgctttacggtgcgtgaacaattatcagggaatgctcaaggtggcctgcgccgaggaatggcaggagagcaggaccgagggcgagcattccaaggaggtgatcaagccctacgattggacttacactacagactacaagggcaccttactgggtgaatcactaaaactcaaagtggttcctaccaccgatcacatcgacaccgaaaagctaaaagccagagagcagatcaagttttttgaggaggtcctgctgttcgaggacgaattacacgatcacggcgtaagctcactgtccgttaaaatccctggagggggccacttgtag

SEQ ID NO: 30003 - DNA, 537 bp, Artificial Sequence
  derived and/or modified sequence
atgatgatccacgggttccagagttctcatcgggacttctgctttggtccgtggaaacttactgccagtaaaacacatatcatgaaaagcgctgatgtcgaaaagctggcagacgagttgcatatgccatccttgcctgaaatgatgttcggagacaacgttttacgtattcagcacgggagtggttttggcatcgagtttaacgcaacggatgctcttaggtgtgtcaacaactatcagggaatgctgaaagttgcttgcgcagaggagtggcaagagagccggacagagggggaacactcgaaagaggtgattaagccttacgattggacctacactacagactataaaggcaccctcctcggggagtcactaaaactgaaagttgttcctacaacggaccacattgacaccgagaaactcaaagccagagaacagattaagttcttcgaagaggtgctgcttttcgaagatgagttgcatgaccacggtgttagctctctttctgtcaagatccctgggggaggccatctgtag

SEQ ID NO: 30004 - DNA, 727 bp, Artificial Sequence
  derived and/or modified sequence
cctctgcgggtcctgcctcagccatgatgatccacggcttccagagcagccaccgggatttctgcttcgggccctggaagctgacggcgtccaagacccacatcatgaagtcggcggatgtggagaaattagccgatgaattacatatgccatctctccctgaaatgatgtttggagacaacgttttaagaatccagcatgggtctggctttggaattgagttcaatgctacagatgcgttaagatgtgtaaacaactaccaaggaatgcttaaagtggcctgtgctgaagagtggcaagaaagcaggacggagggtgaacactccaaagaggttattaaaccatatgattggacctatacaacagattataagggaaccttacttggagaatctcttaagttaaaggttgtacctacaacagatcatatagatacagaaaaattgaaagccagagaacagattaagttttttgaagaagttctcctttttgaggatgaacttcatgatcatggagtttcaagcctgagtgtgaagattcctggtggcgggcacctgtagtcccagctactcgggaggctgaggcaggagaagcgtgaacccgggaggcggagcttgcagtgagctgagatcgcaccactgcactccagccctccagcctgggcgacagagcaagactccgtctcaaaaaaaaaaaataaaataaaataaaagaagtagaaaacaca

SEQ ID NO: 30005 - protein, 686 aa, Artificial Sequence
  derived and/or modified sequence
MGSYLSVPAYFTSRDLFRCSECQDSLTNWYYEKDGKLYCPKDYWGKFGEFCHGCSLLMTGPFMVAGEFKYHPECFACMSCKVIIEDGDAYALVQHATLYCGKCHNEVVLAPMFERLSTESVQEQLPYSVTLISMPATTEGRRGFSVSVESACSNYATTVQVKEVNRMHISPNNRNAIHPGDRILEINGTPVRTLRVEEVEDAISQTSQTLQLLIEHDPVSQRLDQLRLEARLAPHMQNAGHPHALSTLDTKENLEGTLRRRSLRRSNSISKSPGPSSPKEPLLFSRDISRSESLRCSSSYSQQIFRPCDLIHGEVLGKGFFGQAIKVTHKATGKVMVMKELIRCDEETQKTFLTEVKVMRSLDHPNVLKFIGVLYKDKKLNLLTEYIEGGTLKDFLRSMDPFPWQQKVRFAKGIASGMAYLHSMCIIHRDLNSHNCLIKLDKTVVVADFGLSRLIVEERKRAPMEKATTKKRTLRKNDRKKRYTVVGNPYWMAPEMLNGKSYDETVDIFSFGIVLCEIIGQVYADPDCLPRTLDFGLNVKLFWEKFVPTDCPPAFFPLAAICCRLEPESRAPPGAAGEGPGCADDEGPVRRQGKVTIKYDPKELRKHLNLEEWILEQLTRLYDCQEEEISELEIDVDELLDMESDDAWASRVKELLVDCYKPTEAFISGLLDKIRAMQKLSTPQKK

SEQ ID NO: 30006 - DNA, 2061 bp, Artificial Sequence
  derived and/or modified sequence
atgggcagctacctgagcgtgcccgcctacttcaccagcagagacctgttcagatgcagcgagtgccaggacagcctgaccaactggtactacgagaaggacggcaagctgtactgccccaaggactactggggcaagttcggcgagttctgccacggctgcagcctgctgatgaccggccccttcatggtggccggcgagttcaagtaccaccccgagtgcttcgcctgcatgagctgcaaggtgatcatcgaggacggcgacgcctacgccctggtgcagcacgccaccctgtactgcggcaagtgccacaacgaggtggtgctggcccccatgttcgagagactgagcaccgagagcgtgcaggagcagctgccctacagcgtgaccctgatcagcatgcccgccaccaccgagggcagaagaggcttcagcgtgagcgtggagagcgcctgcagcaactacgccaccaccgtgcaggtgaaggaggtgaacagaatgcacatcagccccaacaacagaaacgccatccaccccggcgacagaatcctggagatcaacggcacccccgtgagaaccctgagagtggaggaggtggaggacgccatcagccagaccagccagaccctgcagctgctgatcgagcacgaccccgtgagccagagactggaccagctgagactggaggccagactggccccccacatgcagaacgccggccacccccacgccctgagcaccctggacaccaaggagaacctggagggcaccctgagaagaagaagcctgagaagaagcaacagcatcagcaagagccccggccccagcagccccaaggagcccctgctgttcagcagagacatcagcagaagcgagagcctgagatgcagcagcagctacagccagcagatcttcagaccctgcgacctgatccacggcgaggtgctgggcaagggcttcttcggccaggccatcaaggtgacccacaaggccaccggcaaggtgatggtgatgaaggagctgatcagatgcgacgaggagacccagaagaccttcctgaccgaggtgaaggtgatgagaagcctggaccaccccaacgtgctgaagttcatcggcgtgctgtacaaggacaagaagctgaacctgctgaccgagtacatcgagggcggcaccctgaaggacttcctgagaagcatggaccccttcccctggcagcagaaggtgagattcgccaagggcatcgccagcggcatggcctacctgcacagcatgtgcatcatccacagagacctgaacagccacaactgcctgatcaagctggacaagaccgtggtggtggccgacttcggcctgagcagactgatcgtggaggagagaaagagagcccccatggagaaggccaccaccaagaagagaaccctgagaaagaacgacagaaagaagagatacaccgtggtgggcaacccctactggatggcccccgagatgctgaacggcaagagctacgacgagaccgtggacatcttcagcttcggcatcgtgctgtgcgagatcatcggccaggtgtacgccgaccccgactgcctgcccagaaccctggacttcggcctgaacgtgaagctgttctgggagaagttcgtgcccaccgactgcccccccgccttcttccccctggccgccatctgctgcagactggagcccgagagcagagccccccccggcgccgccggcgagggccccggctgcgccgacgacgagggccccgtgagaagacagggcaaggtgaccatcaagtacgaccccaaggagctgagaaagcacctgaacctggaggagtggatcctggagcagctgaccagactgtacgactgccaggaggaggagatcagcgagctggagatcgacgtggacgagctgctggacatggagagcgacgacgcctgggccagcagagtgaaggagctgctggtggactgctacaagcccaccgaggccttcatcagcggcctgctggacaagatcagagccatgcagaagctgagcaccccccagaagaagtag

SEQ ID NO: 30007 - DNA, 2789 bp, Artificial Sequence
  derived and/or modified sequence
gggaggagccatcccagccatgagcccctgtgggaatctgctgggggccaagtggcctggagtcctcaggctcccgcagctgctccggagggagaggtgagctcagggcagcctgcctgcagccagaggtgccgggagccccgggcctgtcatggtggccatctacagccggcctgaggcagtcacagacggatttgcagctgagcctgtctatctggtgtgggaagaagatggggagttacttgtcagtcccggcttacttcacctccagagacctgtttcggtgttcagaatgccaggattccctcaccaactggtactatgagaaggatgggaagctctactgccccaaggactactgggggaagtttggggagttctgtcatgggtgctccctgctgatgacagggccttttatggtggctggggagttcaagtaccacccagagtgctttgcctgtatgagctgcaaggtgatcattgaggatggggatgcatatgcactggtgcagcatgccaccctctactgtgggaagtgccacaatgaggtggtgctggcacccatgtttgagagactctccacagagtctgttcaggagcagctgccctactctgtcacgctcatctccatgccggccaccactgaaggcaggcggggcttctccgtgtccgtggagagtgcctgctccaactacgccaccactgtgcaagtgaaagaggtcaaccggatgcacatcagtcccaacaatcgaaacgccatccaccctggggaccgcatcctggagatcaatgggacccccgtccgcacacttcgagtggaggaggtggaggatgcaattagccagacgagccagacacttcagctgttgattgaacatgaccccgtctcccaacgcctggaccagctgcggctggaggcccggctcgctcctcacatgcagaatgccggacacccccacgccctcagcaccctggacaccaaggagaatctggaggggacactgaggagacgttccctaaggcgcagtaacagtatctccaagtcccctggccccagctccccaaaggagcccctgctgttcagccgtgacatcagccgctcagaatcccttcgttgttccagcagctattcacagcagatcttccggccctgtgacctaatccatggggaggtcctggggaagggcttctttgggcaggctatcaaggtgacacacaaagccacgggcaaagtgatggtcatgaaagagttaattcgatgtgatgaggagacccagaaaacttttctgactgaggtgaaagtgatgcgcagcctggaccaccccaatgtgctcaagttcattggtgtgctgtacaaggataagaagctgaacctcctgacagagtacattgaggggggcacactgaaggactttctgcgcagtatggatccgttcccctggcagcagaaggtcaggtttgccaaaggaatcgcctccggaatggcctatttgcactctatgtgcatcatccaccgggatctgaactcgcacaactgcctcatcaagttggacaagactgtggtggtggcagactttgggctgtcacggctcatagtggaagagaggaaaagggcccccatggagaaggccaccaccaagaaacgcaccttgcgcaagaacgaccgcaagaagcgctacacggtggtgggaaacccctactggatggcccctgagatgctgaacggaaagagctatgatgagacggtggatatcttctcctttgggatcgttctctgtgagatcattgggcaggtgtatgcagatcctgactgccttccccgaacactggactttggcctcaacgtgaagcttttctgggagaagtttgttcccacagattgtcccccggccttcttcccgctggccgccatctgctgcagactggagcctgagagcagagccccccccggggccgcaggagagggcccgggctgcgcggatgatgagggcccagtgaggcgccaagggaaggtcaccatcaagtatgaccccaaggagctacggaagcacctcaacctagaggagtggatcctggagcagctcacgcgcctctacgactgccaggaagaggagatctcagaactagagattgacgtggatgagctcctggacatggagagtgacgatgcctgggcttccagggtcaaggagctgctggttgactgttacaaacccacagaggccttcatctctggcctgctggacaagatccgggccatgcagaagctgagcacaccccagaagaagtgagggtccccgacccaggcgaacggtggctcccataggacaatcgctaccccccgacctcgtagcaacagcaataccgggggaccctgcggccaggcctggttccatgagcagggctcctcgtgcccctggcccaggggtctcttcccctgccccctcagttttccacttttggatttttttattgttattaaactgatgggactttgtgtttttatattgactctgcggcacgggccctttaataaagcgaggtagggtacgcctttggtgcagctcaaaaaaaaaaaaaaaaatgatttccagcggtccacattagagttgaaattttctggtgggagaatctataccttgttcctttataggccaaggaccgcagtccttcagtaacaccagtgtaaaagcttgaggagaaattgtgaagctacacagtatttgttttctaatacctcttgtcattctaaatatctttaatttattaaaaaatatatatatacagta

SEQ ID NO: 30008 - DNA, 2061 bp, Artificial Sequence
  derived and/or modified sequence
atgggcagttaccttagcgtgccagcctacttcactagtagggacctgttccggtgctctgaatgccaggactctttgaccaactggtactatgagaaagatggaaaactctattgtccaaaggattattgggggaaattcggggagttctgtcatggctgcagcctcctcatgacaggacctttcatggttgcaggcgagttcaagtatcatccagaatgctttgcctgcatgagctgtaaggtgattattgaagatggcgatgcatatgctctggtgcaacacgctacgctgtattgtggtaagtgtcacaatgaagtggtgctagcacctatgtttgaaaggctgtccacggagtcagtgcaggaacaactgccgtattctgtgaccctaattagcatgccggctaccaccgagggtcgtagggggttctcggtgtcagtggagtcagcatgttctaactatgccaccactgttcaagtgaaggaggtgaacagaatgcatatcagtccaaacaaccgcaatgcgatacaccctggagataggattttggagatcaatggcactccggttagaaccctgagggtggaggaggtggaggacgcaatctctcaaacctcgcaaacgctgcaactgctgatcgaacacgaccccgtttctcaaaggctcgatcaactgagacttgaggcccgtcttgcaccgcacatgcaaaatgcagggcacccccacgccctctctactctggacacaaaggagaatctggagggcaccctgcggcgtcgcagcctgcgccggtccaacagtatctccaagtctcctgggcccagctctcccaaggagcccttgctgttttctagagatatttcgcgatccgaatcactacgctgctccagttcatactcacagcagatatttaggccttgtgatctcatacacggggaggtacttgggaaaggcttctttggtcaggccatcaaggttacacataaggctaccggtaaggttatggtgatgaaagagctaataagatgcgatgaagagacccagaagacatttctcaccgaggtgaaggtgatgaggagtctcgaccatccgaatgtgttaaagtttataggggttctctacaaggataagaagctgaatctcctcaccgaatatattgagggtggtacattgaaagacttcctcaggagcatggatcccttcccttggcagcaaaaagttcgctttgccaagggaatcgcctctggaatggcctatctgcacagcatgtgtatcatacaccgtgatttgaacagtcacaactgcctgattaaattggacaagacagtggtcgtggcagacttcggcctgagtcgactgatcgtggaggagagaaagcgcgcccccatggagaaggcaacgacaaagaaacgcaccctccgtaaaaatgatagaaaaaagagatatacagtcgttgggaacccctattggatggctcccgagatgttaaacgggaaatcttatgatgaaaccgttgatatctttagcttcggaattgtgctctgcgagattatcggtcaggtgtatgccgacccagactgtctgccacgaacacttgattttggcctgaatgtgaaactcttttgggaaaagtttgtgcctacggattgcccccccgccttcttcccgctagccgccatctgctgtaggctggaacctgagagtcgggcccccccaggagccgcaggggaagggcccggatgcgcggatgacgagggtcccgtccgccggcagggcaaagtgactataaagtacgaccctaaggaacttaggaaacacctgaacctcgaggaatggatactggagcagcttacccgactgtacgactgccaggaagaggaaatcagcgaactggaaattgacgtcgatgagctcctggatatggaatccgacgacgcttgggcatcaagggtcaaagaattgctggtggactgttacaaacctacggaggccttcatttccggcctgctagacaaaatacgggccatgcagaagcttagcaccccacaaaaaaaatag

SEQ ID NO: 30009 - DNA, 2061 bp, Artificial Sequence
  derived and/or modified sequence
atgggcagctacctgtctgtgcctgcctacttcaccagccgggacctcttccgctgcagcgagtgccaggacagcctgaccaactggtactatgagaaggatggcaagctgtactgccccaaggactactggggcaagtttggagagttctgccacggctgcagcctgctgatgacaggccccttcatggtggccggggagttcaagtaccacccagaatgttttgcctgcatgagctgcaaggtgatcattgaagatggagatgcctatgccctggtgcagcacgccaccctgtactgtgggaagtgccacaatgaggtggtgctggcccccatgtttgagcggctgagcacagagagcgtgcaggagcagctgccctacagcgtgaccctcatctccatgcctgccaccacagagggcagaagaggcttctctgtgtctgtggagagcgcctgcagcaactatgccaccaccgtgcaggtgaaggaggtgaacaggatgcacatcagccccaacaacagaaatgccatccaccctggggaccgcatcctggagatcaatggcacccctgtgaggaccctgcgggtggaggaggtggaggatgccatcagccagaccagccagaccctgcagctgctgattgaacatgaccctgtgtcccagaggctggaccagctgcggctggaggcccggctggccccccacatgcagaatgccggccacccccacgccctgagcaccctggacaccaaggagaacctggagggcaccctgcggcggcgcagcctgcggcgcagcaacagcatcagcaagagccctggccccagcagccccaaggagcccctgctcttcagccgggacatcagccgctctgagagcctgcgctgcagcagcagctacagccagcagatcttccggccctgtgacctgatccacggggaggtgctgggcaagggcttcttcggccaggccatcaaggtgacccacaaggccaccgggaaggtgatggtgatgaaggagctgatccgctgtgatgaggagacccagaagaccttcctgacagaggtgaaggtgatgaggagcctggaccaccccaacgtgctgaagttcatcggcgtgctgtacaaggacaagaagctgaacctgctgacagagtacattgaaggaggcaccctgaaggacttcctgcgctccatggaccccttcccctggcagcagaaggtgcgctttgccaagggcatcgccagcggcatggcctacctgcacagcatgtgcatcatccaccgggacctgaacagccacaactgcctgatcaagctggacaagacagtggtggtggccgactttggcctgagccggctgattgtggaggagaggaagagggcccccatggagaaggccaccaccaagaagaggaccctgaggaagaatgacaggaagaagcgctacacagtggtgggcaacccctactggatggcccctgagatgctgaatggcaagagctatgatgaaacagtggacatcttctcctttggaattgtgctgtgtgagatcatcggccaggtgtatgctgaccctgactgcctgcccaggaccctggactttggcctgaatgtgaagctgttctgggagaagtttgtgcccacagactgccccccagccttcttccccctggccgccatctgctgccgcctggagcctgagagccgggcccctcctggagctgctggggagggccctggctgtgctgatgatgagggccctgtgcggcggcagggcaaggtgaccatcaagtatgaccccaaggagctgaggaagcacctgaacctggaggagtggatcctggagcagctgacccggctgtatgactgccaggaggaggagatcagcgagctggagattgatgtggatgagctgctggacatggagagtgatgatgcctgggccagccgggtgaaggagctgctggtggactgctacaagcccacagaggccttcatcagcggcctgctggacaagatccgggccatgcagaagctgagcaccccccagaagaagtag

SEQ ID NO: 30010 - DNA, 2061 bp, Artificial Sequence
  derived and/or modified sequence
atgggcagctacctgagcgtgcccgcctacttcaccagccgggacctattccggtgcagcgaatgtcaggatagtttgacgaattggtactacgagaaggatggaaagttgtattgccccaaggattattggggaaagttcggggaattttgtcacggctgttctctgttaatgactggtccatttatggtggctggcgagttcaaatatcacccggagtgcttcgcatgtatgagttgcaaagtaataatagaggacggtgatgcctacgctcttgtgcagcacgccacactgtactgtgggaagtgtcacaatgaggtggtgctagctcccatgttcgaacgcttaagcacagaatcagtgcaggaacaattgccctactcagtcactctgatttcaatgcctgccacgaccgagggccgacgaggcttctcggttagtgtggaaagcgcatgttcgaactatgccaccaccgttcaggtgaaggaggtgaacagaatgcatatcagccccaacaaccggaatgctatccatccaggcgataggatcctggagatcaacggcacccctgtgaggaccctccgcgtcgaagaggtggaggacgctatcagccaaacgtctcagacccttcagctgttaattgagcacgaccccgtatcccagaggctggaccagctacggctggaggcacgactggcccctcacatgcagaatgcggggcatccacacgccctgagtacccttgacacgaaggagaatttggaagggacgctgaggagacgtagccttaggcgatccaatagcatctcaaaatctccgggccctagctctccaaaggaacctctgctgttcagcagagacatcagcagaagcgagagtctgcgttgtagttcctcttactcacagcaaatctttcggccttgcgacctgatccatggagaggtgctaggaaaagggtttttcggccaggcaatcaaggtcactcacaaggctacaggcaaggtcatggtgatgaaggagctgattaggtgcgatgaggaaacacagaaaacctttctgaccgaagttaaagtcatgcgcagtctcgatcacccaaacgttctcaagtttataggggtcctctataaggataagaagctgaacttgctgaccgagtacatcgaggggggcaccttaaaggattttttgagaagcatggatcctttcccctggcagcagaaggtgcgcttcgccaagggaattgcctcgggcatggcttatttacactcaatgtgcattatccacagagatctcaactcgcataattgcctcattaagttagacaagaccgtggttgtagccgattttggactatcacgcctcatcgtcgaagagcgtaagagagcacccatggaaaaggccacaaccaaaaagcgcactctcagaaagaatgacaggaagaagcggtatacagtggtcggcaacccttattggatggccccagagatgctgaacgggaagagctacgacgaaacagtggacatcttttcattcgggattgtgctgtgcgaaatcatcggacaggtgtacgctgacccggactgcctgccacgaactctagactttgggctgaatgtaaaactgttctgggagaaatttgtcccgacagactgcccaccagcattcttcccactcgctgcgatatgctgccgtctcgaaccagaaagcagagcccccccgggggctgctggtgagggtcccggctgtgctgacgacgaaggtccagtgcggcgccagggaaaagtcaccattaagtacgaccccaaggagctccgcaaacacctgaatctcgaagaatggattttggaacaactgacacgcctgtatgattgtcaagaggaggaaatctctgagctagagattgatgtcgatgagctcctcgatatggagtctgacgatgcttgggcctctagggtcaaggagctattggtcgattgctataaaccgacagaggcctttatcagcggactgcttgacaaaatcagggccatgcagaagctgagtactccacagaaaaaatag

SEQ ID NO: 30011 - DNA, 2061 bp, Artificial Sequence
  derived and/or modified sequence
atgggatcctacttatccgtgcctgcttactttacaagccgagatttgtttaggtgcagcgagtgccaggacagccttacaaactggtactatgaaaaagatggcaagctttactgccctaaggactattggggaaagttcggggagttctgccatggatgttccctgctgatgaccggcccttttatggtcgccggagaattcaaataccacccggagtgttttgcctgcatgtcctgtaaggtaatcattgaagatggtgatgcctacgcactggtgcagcacgctactttgtactgcggcaagtgccacaatgaagttgtgctggccccaatgttcgagcgcttgtcaactgaaagtgtgcaagagcagctaccatacagcgtgactctaatctccatgcctgctacaacagagggcaggcgtgggttcagcgtgtccgtcgagtccgcctgtagtaactatgcaacgactgtgcaagttaaagaggtcaaccggatgcacattagtccaaataataggaatgcaatccaccctggagataggatactcgagatcaacgggaccccagtgcgtacccttagggtggaggaggttgaggacgccataagccagacatcacaaacacttcagcttttaattgagcacgatcccgtgagtcagcgactggatcaacttcgactggaagcaaggctggctcctcacatgcagaacgctggtcatccgcacgccctttctacactcgatacaaaggaaaatctagaagggaccctgaggcggaggtctctgcgtcgttctaatagcattagtaagtcaccgggtccctcgtctccaaaggagcctctcctctttagcagggacatcagccggtcagaaagcctgaggtgttcgtcgtcttattcgcagcagatcttccggccatgtgacctcattcacggagaggtgctagggaaggggttttttgggcaggcaattaaagtgacccataaggccactgggaaagtaatggtgatgaaggagcttattaggtgtgatgaggaaacgcagaagacatttctcaccgaggtaaaggtgatgcgctccctagatcacccaaacgtcctgaagtttatcggggtcttgtacaaggataaaaaactgaatttactcaccgaatatattgagggcggtactctgaaggattttttgagaagcatggaccccttcccatggcagcagaaggtgcggttcgccaaagggattgccagtgggatggcctacctccactctatgtgcattattcatagagatctaaactctcacaattgcctgattaaactggacaagaccgttgtagtcgccgactttgggcttagtcgcctgatcgtggaggagcgaaagcgggcacccatggagaaggcaactactaaaaagaggacactgcggaaaaacgaccggaagaagagatatacagtcgtgggaaatccctattggatggctcccgaaatgctcaacggtaaatcatatgacgagaccgtggatattttttcctttggaattgttctctgcgaaatcattgggcaggtgtacgcagaccctgattgtctgcctaggactcttgatttcggcctgaatgtcaaactgttctgggagaagttcgtgcctacagattgccctcccgctttcttccccctggccgctatttgttgtagactcgaacctgaaagtcgcgcacccccaggagctgccggagaagggcctggctgcgctgacgatgaagggccagttagacggcaggggaaggtcacaataaaatatgatcccaaggagctgcgcaagcatcttaacctggaagagtggatactggagcaactaacaaggttatacgactgtcaagaggaagagatttctgagcttgagatagatgtcgacgaattgttggacatggaatcggacgatgcctgggcgtcgcgcgtcaaagagctgttagtagactgctataaacccacagaagcattcatctcagggctactcgacaagatacgagctatgcagaagctctcgactccgcagaagaaatag

SEQ ID NO: 30012 - protein, 1020 aa, Artificial Sequence
  derived and/or modified sequence
MRRFLRPGHDPVRERLKRDLFQFNKTVEHGFPHQPSALGYSPSLRILAIGTRSGAIKLYGAPGVEFMGLHQENNAVTQIHLLPGQCQLVTLLDDNSLHLWSLKVKGGASELQEDESFTLRGPPGAAPSATQITVVLPHSSCELLYLGTESGNVFVVQLPAFRALEDRTISSDAVLQRLPEEARHRRVFEMVEALQEHPRDPNQILIGYSRGLVVIWDLQGSRVLYHFLSSQQLENIWWQRDGRLLVSCHSDGSYCQWPVSSEAQQPEPLRSLVPYGPFPCKAITRILWLTTRQGLPFTIFQGGMPRASYGDRHCISVIHDGQQTAFDFTSRVIGFTVLTEADPAATFDDPYALVVLAEEELVVIDLQTAGWPPVQLPYLASLHCSAITCSHHVSNIPLKLWERIIAAGSRQNAHFSTMEWPIDGGTSLTPAPPQRDLLLTGHEDGTVRFWDASGVCLRLLYKLSTVRVFLTDTDPNENFSAQGEDEWPPLRKVGSFDPYSDDPRLGIQKIFLCKYSGYLAVAGTAGQVLVLELNDEAAEQAVEQVEADLLQDQEGYRWKGHERLAARSGPVRFEPGFQPFVLVQCQPPAVVTSLALHSEWRLVAFGTSHGFGLFDHQQRRQVFVKCTLHPSDQLALEGPLSRVKSLKKSLRQSFRRMRRSRVSSRKRHPAGPPGEAQEGSAKAERPGLQNMELAPVQRKIEARSAEDSFTGFVRTLYFADTYLKDSSRHCPSLWAGTNGGTIYAFSLRVPPAERRMDEPVRAEQAKEIQLMHRAPVVGILVLDGHSVPLPEPLEVAHDLSKSPDMQGSHQLLVVSEEQFKVFTLPKVSAKLKLKLTALEGSRVRRVSVAHFGSRRAEDYGEHHLAVLTNLGDIQVVSLPLLKPQVRYSCIRREDVSGIASCVFTKYGQGFYLISPSEFERFSLSTKWLVEPRCLVDSAETKNHRPGNGAGPKKAPSRARNSGTQSDGEEKQPGLVMERALLSDERVLKEIQSTLEGDRGSGNWRSHRAAVGCSLSNGGAE

SEQ ID NO: 30013 - DNA, 3063 bp, Artificial Sequence
  derived and/or modified sequence
atgagaagattcctgagacccggccacgaccccgtgagagagagactgaagagagacctgttccagttcaacaagaccgtggagcacggcttcccccaccagcccagcgccctgggctacagccccagcctgagaatcctggccatcggcaccagaagcggcgccatcaagctgtacggcgcccccggcgtggagttcatgggcctgcaccaggagaacaacgccgtgacccagatccacctgctgcccggccagtgccagctggtgaccctgctggacgacaacagcctgcacctgtggagcctgaaggtgaagggcggcgccagcgagctgcaggaggacgagagcttcaccctgagaggcccccccggcgccgcccccagcgccacccagatcaccgtggtgctgccccacagcagctgcgagctgctgtacctgggcaccgagagcggcaacgtgttcgtggtgcagctgcccgccttcagagccctggaggacagaaccatcagcagcgacgccgtgctgcagagactgcccgaggaggccagacacagaagagtgttcgagatggtggaggccctgcaggagcaccccagagaccccaaccagatcctgatcggctacagcagaggcctggtggtgatctgggacctgcagggcagcagagtgctgtaccacttcctgagcagccagcagctggagaacatctggtggcagagagacggcagactgctggtgagctgccacagcgacggcagctactgccagtggcccgtgagcagcgaggcccagcagcccgagcccctgagaagcctggtgccctacggccccttcccctgcaaggccatcaccagaatcctgtggctgaccaccagacagggcctgcccttcaccatcttccagggcggcatgcccagagccagctacggcgacagacactgcatcagcgtgatccacgacggccagcagaccgccttcgacttcaccagcagagtgatcggcttcaccgtgctgaccgaggccgaccccgccgccaccttcgacgacccctacgccctggtggtgctggccgaggaggagctggtggtgatcgacctgcagaccgccggctggccccccgtgcagctgccctacctggccagcctgcactgcagcgccatcacctgcagccaccacgtgagcaacatccccctgaagctgtgggagagaatcatcgccgccggcagcagacagaacgcccacttcagcaccatggagtggcccatcgacggcggcaccagcctgacccccgcccccccccagagagacctgctgctgaccggccacgaggacggcaccgtgagattctgggacgccagcggcgtgtgcctgagactgctgtacaagctgagcaccgtgagagtgttcctgaccgacaccgaccccaacgagaacttcagcgcccagggcgaggacgagtggccccccctgagaaaggtgggcagcttcgacccctacagcgacgaccccagactgggcatccagaagatcttcctgtgcaagtacagcggctacctggccgtggccggcaccgccggccaggtgctggtgctggagctgaacgacgaggccgccgagcaggccgtggagcaggtggaggccgacctgctgcaggaccaggagggctacagatggaagggccacgagagactggccgccagaagcggccccgtgagattcgagcccggcttccagcccttcgtgctggtgcagtgccagccccccgccgtggtgaccagcctggccctgcacagcgagtggagactggtggccttcggcaccagccacggcttcggcctgttcgaccaccagcagagaagacaggtgttcgtgaagtgcaccctgcaccccagcgaccagctggccctggagggccccctgagcagagtgaagagcctgaagaagagcctgagacagagcttcagaagaatgagaagaagcagagtgagcagcagaaagagacaccccgccggcccccccggcgaggcccaggagggcagcgccaaggccgagagacccggcctgcagaacatggagctggcccccgtgcagagaaagatcgaggccagaagcgccgaggacagcttcaccggcttcgtgagaaccctgtacttcgccgacacctacctgaaggacagcagcagacactgccccagcctgtgggccggcaccaacggcggcaccatctacgccttcagcctgagagtgccccccgccgagagaagaatggacgagcccgtgagagccgagcaggccaaggagatccagctgatgcacagagcccccgtggtgggcatcctggtgctggacggccacagcgtgcccctgcccgagcccctggaggtggcccacgacctgagcaagagccccgacatgcagggcagccaccagctgctggtggtgagcgaggagcagttcaaggtgttcaccctgcccaaggtgagcgccaagctgaagctgaagctgaccgccctggagggcagcagagtgagaagagtgagcgtggcccacttcggcagcagaagagccgaggactacggcgagcaccacctggccgtgctgaccaacctgggcgacatccaggtggtgagcctgcccctgctgaagccccaggtgagatacagctgcatcagaagagaggacgtgagcggcatcgccagctgcgtgttcaccaagtacggccagggcttctacctgatcagccccagcgagttcgagagattcagcctgagcaccaagtggctggtggagcccagatgcctggtggacagcgccgagaccaagaaccacagacccggcaacggcgccggccccaagaaggcccccagcagagccagaaacagcggcacccagagcgacggcgaggagaagcagcccggcctggtgatggagagagccctgctgagcgacgagagagtgctgaaggagatccagagcaccctggagggcgacagaggcagcggcaactggagaagccacagagccgccgtgggctgcagcctgagcaacggcggcgccgagtag

SEQ ID NO: 30014 - DNA, 3063 bp, Artificial Sequence
  derived and/or modified sequence
atgaggagatttctgaggccaggtcatgaccctgttagagaaaggttaaaaagagacctgtttcaatttaataaaacggtcgaacatggcttcccgcatcagccgtcagcactgggatattcgcccagcttacgcatactggccataggcacacgcagtggggctatcaagttgtacggcgcaccaggggttgaatttatggggttgcaccaggagaacaatgcagtgactcagatacacttgctgcccggtcagtgtcagctggtgactctcctggatgacaactctctccacctgtggtcattgaaagttaagggcggcgcctctgaactgcaggaagacgagtcattcaccttgcgcggaccgccaggagccgcaccctctgcgacccagatcacagtggtgctgccccattcctcctgtgaactgctgtatctcggaaccgagtccggcaacgtgtttgtggtacagctgcccgctttcagagctctcgaggatcgcacaataagttctgacgctgtgctgcaaaggctgcccgaggaagcccgccacagacgagtctttgaaatggtggaagccttgcaagaacatccgcgcgaccccaaccaaatcctcattggttactcacggggtctcgtggtcatctgggatttgcagggcagtagagtgttgtaccacttcctttcctctcaacagctggaaaacatctggtggcagcgcgacggtaggctgttggtgagctgtcactcagatgggtcatattgccagtggcctgtctctagcgaagctcagcagccggagccactccgcagcttggtcccttatggcccctttccctgcaaagcaatcactagaatcttatggcttaccacccggcaagggctccctttcaccatatttcagggcggcatgccccgcgcctcatatggcgatcgccactgtatttcagtgattcatgatggccagcagacagccttcgactttaccagccgggtaatcgggtttacagtcctgacagaagctgatcctgcggcaacatttgatgacccttatgcactcgtcgtcttagctgaagaagagttggtggtcattgatctccagactgccggatggcctcccgtgcagttgccgtacctggcttccctccattgctctgccattacatgctcacaccatgtttccaacataccacttaagctctgggagaggatcattgcagcagggtcccggcagaatgcacattttagcacaatggagtggccgatcgacgggggaactagtctcacaccagccccgccccagcgtgatctgctgcttactggacatgaagacggtacagtcaggttctgggatgcctccggggtgtgtctgaggctgttgtataagctctctacagtgcgagtttttctgacagatacagacccaaacgagaactttagcgcccagggcgaagacgagtggccgccattgcgcaaggtcgggagcttcgatccttactctgatgacccgaggctcggaattcagaagattttcctatgtaagtattcgggctatctagcagtcgcgggaactgctggtcaggttttagtacttgaactcaacgatgaagcagcggagcaggctgtggagcaggtggaggctgacttgctgcaagaccaggagggttaccggtggaaaggacatgagcggctggccgcgcggtccggccctgtccgctttgaacccgggttccagccgtttgtcctggtgcagtgtcaacctccggcagtcgtgacgagtctggcactgcatagtgagtggcggctggtggcatttgggacatcccacggattcgggctttttgaccaccagcagcggaggcaagtattcgtcaaatgcactctgcatccatctgatcagcttgccctagagggccccctgtcccgggtgaagtcactcaaaaagtccctaaggcagtcctttcgccggatgaggaggagtcgggtgagctcacgcaaacgacacccagcaggacctcctggagaggcccaggaggggtcagccaaagccgagcgaccagggctgcagaatatggaactggcaccggttcagagaaaaattgaggcccgcagcgctgaggacagctttacgggttttgtgagaacactctattttgccgacacgtacctaaaggatagctcccggcactgtcctagtttgtgggctggaaccaacggcggcaccatttacgccttttctctgagagtaccccccgctgaacggcgaatggatgagccggtgcgggctgagcaggccaaggagattcaactcatgcaccgggcccccgttgtgggcatcctggtgcttgacgggcatagtgtgccgctgcccgagcctttggaagtggcccatgatctctccaaatcccctgatatgcagggatctcaccaactcctagtcgtatctgaggagcaatttaaggtgtttactcttcccaaggtatcagccaaactgaagttgaagctgacggcgttagagggctctcgcgttcggcgtgttagcgtggcacactttggctccagacgggctgaggactatggcgaacaccacctggctgtgctgaccaacctcggagacattcaggttgtgagtcttcccctcttgaagcctcaggtcagatacagctgcatccgccgggaggacgtatccgggatcgcgagttgtgtctttacaaagtatggccagggattttacctcatttcaccctctgaatttgagaggttttctctgagcacaaaatggctagtagagcctagatgcctagtggattccgcggaaactaagaatcacagaccgggcaacggagccgggcccaagaaggccccatccagggcacggaacagtggtactcaatctgacggggaggagaaacaacctggtctggttatggagcgcgcactgctcagtgacgaacgcgttctgaaggagatccaaagcacactcgaaggagaccgaggctctggaaactggcggagccacagagccgcagtcggctgttccctatccaacgggggagcagaatag

SEQ ID NO: 30015 - DNA, 3063 bp, Artificial Sequence
  derived and/or modified sequence
atgaggcgcttcctgcggcccggccatgaccctgtgcgggagcggctgaagagggacctcttccagttcaacaagacagtggagcacggcttcccccaccagcccagcgccctgggctacagccccagcctgcgcatcctggccatcggcaccaggtctggggccatcaagctgtatggagcccctggggtggagttcatgggcctgcaccaggagaacaatgctgtgacccagatccacctgctgcccggccagtgccagctggtgaccctgctggatgacaacagcctgcacctgtggagcctgaaggtgaagggcggggccagcgagctgcaggaggatgagagcttcaccctgcggggccccccaggagctgcccccagcgccacccagatcaccgtggtgctgccccacagcagctgtgagctgctgtacctgggcacagagagcggaaatgtgtttgtggtgcagctgcctgccttccgggccctggaggacaggaccatcagcagtgatgctgtgctgcagaggctgcctgaggaggcccggcacagaagagtgtttgagatggtggaggccctgcaggagcacccccgggaccccaaccagatcctgattggctacagccggggcctggtggtgatctgggacctgcagggcagccgggtgctgtaccacttcctgagcagccagcagctggagaacatctggtggcagagagatggccgcctgctggtgtcctgccacagtgatggcagctactgccagtggcctgtgtcctctgaggcccagcagcctgagcccctgcggagcctggtgccctacggccccttcccctgcaaggccatcacccgcatcctgtggctgaccacccggcagggcctgcccttcaccatcttccagggcggcatgccccgggccagctatggagacagacactgcatcagcgtcatccatgatggccagcagacagcctttgacttcaccagccgggtgattggcttcaccgtgctgacagaagctgaccctgctgccacctttgatgacccctatgccctggtggtgctggccgaggaggagctggtggtgattgacctgcagacagctggctggccccctgtgcagctgccctacctggccagcctgcactgcagcgccatcacctgcagccaccacgtgagcaacatccccctgaagctgtgggagcgcatcatcgctgctggcagccggcagaatgcccacttcagcaccatggagtggcccattgatggcggcaccagcctgaccccagccccaccccagagggacctgctgctgaccggccatgaagatggcaccgtgcgcttctgggatgccagcggcgtgtgcctgcggctgctgtacaagctgagcacagtgcgggtcttcctgacagacacagaccccaatgaaaacttcagcgcccagggagaagatgagtggccacccctgaggaaggtgggcagctttgacccctacagtgatgacccccggctgggcatccagaagatcttcctgtgcaagtacagcggctacctggccgtggccggcacagctggccaggtgctggtgctggagctgaatgatgaagctgctgagcaggccgtggagcaggtggaggccgacctgctgcaggaccaggagggctaccgctggaagggccacgagcggctggccgcccggagcggccctgtgcgctttgagcccggcttccagccctttgtgctggtgcagtgccagcccccagctgtggtgaccagcctggccctgcacagcgagtggaggctggtggccttcggcaccagccacggcttcggcctgtttgaccaccagcagaggcggcaggtgtttgtgaagtgcaccctgcaccccagcgaccagctggccctggagggccccctgagccgggtgaagagcctgaagaagagcctgcggcagagcttccggaggatgaggaggagccgggtgagcagcaggaagaggcaccctgctggccccccaggagaggcccaggagggcagcgccaaggccgagcggcccggcctgcagaacatggagctggcccctgtgcagaggaagattgaggcccggtctgctgaggacagcttcaccggctttgtgaggaccctgtactttgctgacacctacctgaaggacagcagccgccactgccccagcctgtgggccggcaccaacggcggcaccatctatgccttcagcctgcgggtgcccccagctgagaggaggatggatgagcctgtgcgggcagagcaggccaaggagatccagctgatgcaccgggcccctgtggtgggcatcctggtgctggatggccacagcgtgcccctgcctgagcccctggaggtggcccatgacctgagcaagagcccagacatgcagggcagccaccagctgctggtggtgtctgaggagcagttcaaggtgttcaccctgcccaaggtgtctgccaagctgaagctgaagctgacagccctggagggcagccgggtgcggcgggtgtctgtggcccacttcggcagccggcgggcagaagattatggagagcaccacctggccgtgctgaccaacctgggggacatccaggtggtgtccctgcccctgctgaagccccaggtgcgctacagctgcatcagaagagaagatgtgtctggcatcgccagctgtgtgttcaccaagtatggccagggcttctacctgatcagccccagcgagtttgagcgcttcagcctgagcaccaagtggctggtggagccccgctgcctggtggacagcgctgagaccaagaaccacaggcctggaaatggagctggccccaagaaggcccccagccgggccagaaattctggcacccagagtgatggagaggagaagcagcccggcctggtgatggagcgggccctgctgagtgatgagcgggtgctgaaggagatccagagcaccctggagggggaccggggcagcggcaactggaggagccacagagctgctgtgggctgcagcctgagcaatggaggagctgagtag

SEQ ID NO: 30016 - DNA, 3547 bp, Artificial Sequence
  derived and/or modified sequence
ggaggtgagcaggaaggagacggccgcccagcagcccgtgggcaggcgcggcggagcgagcggggccggcggcgggcgccgagggacgccgaggcctcgggcgggggctggcccggggttccaggtctccagtgggggctgcagactaagcaaaatgaggcggttcctgaggccagggcatgaccctgtgcgggagaggctcaagcgggacctgttccagtttaacaagacggtggagcatggcttcccgcaccagcccagcgccctcggctacagcccgtccctgcgcatcctggccatcggcacccgttctggagccatcaagctctacggagccccaggcgtggagttcatggggctgcaccaggagaacaacgctgtgacgcagatccacctcctgcccggccagtgccagctggtcaccctgctggatgacaacagcctgcacctttggagcctgaaggtcaagggcggggcatcggagctgcaggaggatgagagcttcacactgcgtggacccccaggggctgcccccagtgccacacagatcaccgtggtcctgccacattcctcctgcgagctgctctacctgggcaccgagagtggcaacgtgtttgtggtgcagctgccagcttttcgtgcgctggaggaccggaccatcagctcggacgcggtgctgcagcggttgccagaggaggcccgccaccggcgtgtgttcgagatggtggaggcactgcaggagcaccctcgagaccccaaccagatcctgatcggctacagccgaggcctcgttgtcatctgggacctacagggcagccgcgtgctctaccacttcctcagcagccagcaactggagaacatctggtggcagcgggacggccgcctgctcgtcagctgtcactctgacggcagctactgccagtggcccgtgtccagcgaagcccagcaaccagagcccctccgcagcctcgtgccttacggtccctttccttgcaaagcgattaccagaatcctctggctgaccactaggcaggggttgcccttcaccatcttccagggtggcatgccacgggccagctacggggaccgccactgcatctcagtgatccacgatggccagcagacggccttcgacttcacctcccgtgtcatcggcttcactgtcctcacagaggcagaccctgcagccacctttgacgacccctatgccctggtggtgctggctgaggaggagctggtggtgattgacctgcagacagcaggctggccaccggtccagctgccctacctggcttctctgcactgttccgccatcacctgctctcaccacgtctccaacatcccgctgaagctgtgggagcggatcattgccgccggcagccggcagaacgcacacttctccaccatggagtggccaattgatggtggcaccagcctgaccccagccccaccccagagggacctgctgctcacagggcacgaggacggcacggtgcggttctgggatgcctcgggtgtctgcctgcggctgctctacaaactcagcactgtgcgcgtgttcctcaccgacacggaccccaacgagaacttcagtgcccagggcgaggacgagtggcccccactccgcaaggtgggctcctttgacccctacagtgatgacccccggctgggcatccagaagatcttcctctgcaagtacagcggctacctggctgtggcaggcacggcagggcaggtgctggtactggaactgaatgacgaggcagcggagcaggctgtggagcaggtggaggccgacctgctgcaggaccaagagggctaccgctggaaggggcacgagcgcctggcagcccgctcagggcccgtgcgctttgagcctggctttcagcccttcgtgttggtgcagtgtcagcccccggctgtggtcacctccttggccctgcactctgagtggcggctcgtggccttcggcaccagccatggctttggcctctttgaccaccagcagcggcggcaggtctttgttaagtgcacactgcaccccagtgaccagctggccttggagggcccactctcccgcgtcaagtccctcaagaagtccttgcgtcagtcattccgccggatgcgtcggagccgggtgtccagccggaagcggcacccggctggccccccaggagaggcacaggaggggagtgccaaggctgagcggccaggcctccagaacatggagctggcgcctgtgcagcgcaagatcgaggctcgctcggcagaggactccttcacaggcttcgtccggaccctgtactttgctgacacctacctgaaggacagctcccggcactgcccctcgctgtgggctggcaccaatgggggcaccatctatgccttctccctgcgtgtgcctcccgccgagcggagaatggatgagcctgtgcgggcagagcaggccaaggagatccagctgatgcaccgggcgccggtggtgggcatcctggtgctcgacggacacagcgtaccccttcccgagcccctcgaagtggcccatgatctgtcgaagagccctgacatgcagggaagccaccagctgctcgtcgtatcagaggagcagttcaaggtgttcacgctgcccaaggtgagtgccaagctgaagttgaagctgacggccctggagggctcaagagtgcggcgggtcagcgtggcccacttcggcagtcgtcgagccgaggactacggggagcaccacctggcagtccttaccaacctgggcgacatccaggtggtctcgctgcccctgctcaagccccaggtgcgctacagctgcatccgccgggaggacgtcagtggcatcgcctcctgcgtcttcaccaaatatggccaaggcttctacctgatctcaccctcggagtttgagcgcttctctctctccaccaagtggctggtggagccccggtgtctggtggattcagcagaaaccaagaaccaccgccctggtaacggtgcgggccccaagaaggccccgagccgagccaggaactcagggactcagagtgatggcgaggagaagcagcccggcctggtgatggagcgcgctctgctcagtgatgagagagtcctgaaggaaatccagagcacactggagggagaccgcgggagcggcaactggcgttcacatcgagccgccgtggggtgcagcctcagcaatggcggagcagagtgagtggctgagcgtccaggctgcgcgatgagcacacactactactgatggcctttcgggggtccctgccccaaccggagaggccggtgcacagggccccgccaggggctgggggcatcccggcttccacaatgcagctgctctgggcctcgggagaggagagaccccagtcccctgggctgcccttcccgggcctcgtctgtctgggtcctttggtcaatgttgcacagtttttattgctcccatccctttttgtagtgggctgggttttaagttataaatgttaactgcctctgggtgaaaaagtttttaataaacacctattacctcttg

SEQ ID NO: 30017 - DNA, 3063 bp, Artificial Sequence
  derived and/or modified sequence
atgcggcggttcctgcggcccggccacgaccccgtgcgggagcggctgaaaagagatcttttccagtttaataaaaccgtcgagcatggtttcccgcaccaaccaagtgccttggggtactcgccttcgctgcgcatactcgccatcggaacgcgctccggggccatcaagctgtatggagccccaggtgtagagtttatggggctccaccaggaaaataatgccgtgactcaaattcatctcttgccggggcagtgtcagctggtaacgctcttggatgacaactccctccacttatggagtctgaaggtgaaaggtggcgctagcgagctgcaagaggacgagtcttttactctgcgtggaccaccgggcgctgcccccagtgctacacagatcacagtggttcttccccatagtagttgtgagctcctctatctggggactgagtcaggtaacgtgttcgtagtccaactgcccgcattccgcgccctcgaagaccgcaccatctcgagcgatgccgtcctgcagcgccttcctgaggaagcaagacaccgccgtgtcttcgagatggtggaggcattgcaggagcatcctagggatccaaatcagatcctaattggatattctagaggcctggtggtgatctgggaccttcagggctcccgtgtcctctatcacttcctgagttcccaacaactcgagaatatctggtggcagagagacgggcgcttgctcgtgagctgtcactcagatggctcttactgtcagtggcctgtatcttccgaggctcagcagcccgaaccactccgatctctcgtgccatacggacctttcccctgcaaagccataacgcgcattctctggctgaccacaaggcaaggccttcctttcaccattttccagggaggcatgcctagggcatcctatggggatcgacattgtatctcagtgatccacgatggtcagcagactgctttcgacttcacatcacgagtgatagggttcaccgtactgactgaagctgacccggccgccacttttgatgatccctacgccttagtagtcctggccgaggaagaactggtggtcattgatcttcagacagcaggctggccacccgtgcagctgccctacctggcctccctccactgctctgccattacctgtagccatcatgtttcaaatattccgctgaagctttgggaacggattatagcagctggttcccgtcagaatgcccattttagcactatggaatggcccatcgacggtggaacctctctgacacctgctccgcctcagcgtgacctactgctcaccggccatgaggacgggaccgtgcggttttgggacgcaagtggcgtttgccttcggctgctctataagctatccacagtgcgcgtgtttctgacagatactgaccctaacgaaaattttagtgcccagggcgaagatgagtggcctccgctgcggaaagtcggtagctttgatccgtattccgatgacccaaggcttggaattcagaaaatttttctttgcaaatacagcggctatctggctgttgccggtactgcgggacaggttctcgtcctggaattgaatgatgaagctgccgaacaggcagtagaacaggtagaggctgacctgctgcaagaccaggaagggtacaggtggaaagggcacgagaggctggccgccaggtccggcccggtgcgatttgaacctggatttcagccattcgtcctagtgcagtgtcagcccccagccgtagttacatcactcgccctgcactctgagtggcggctagtggcctttggcacatctcatggttttgggctgtttgatcatcagcaaagaagacaggtgttcgttaagtgcacattgcatcctagcgaccagcttgccttggagggacctctcagtcgtgtgaaaagcctgaagaagtccttacgccagtcgttcagacgaatgagaagaagtcgcgtttcaagtcggaagcgacatccagccgggcctcccggagaggcacaagaaggatcagccaaagccgaacgtccaggactgcagaacatggagctggcacccgttcagcgtaagattgaagcccgcagtgcggaagatagtttcacagggtttgtacgaactctgtattttgccgatacctacttaaaggattctagtagacattgtccaagcctgtgggcgggcacaaacggagggacgatatatgccttctccttgagggtaccccctgcggaaagaaggatggacgaacctgttagggccgaacaggccaaagagatccagttgatgcatagagcacccgtggtgggtatcctagtgctcgatggccactcagtgccactgcctgaacctttggaagtcgcccacgatcttagcaagtcgccagacatgcagggaagtcaccagttgctggttgtgagtgaggaacagttcaaggtgttcacacttcccaaggttagcgccaaacttaagctgaaactgactgctctcgaggggagccgcgtacggcgagtcagcgtggcgcactttggcagtcgccgcgcagaagattacggcgaacaccacctcgccgtgctcaccaatcttggcgatattcaggtggtaagcttgcctttgctgaaaccccaagttcggtactcatgtattagaagagaagacgtgagtggaatagcctcctgtgtatttaccaagtatggacagggattctatctcattagcccttccgaattcgaacggtttagccttagtacgaagtggctcgtggagccccgctgccttgtggactctgcggagaccaagaatcacaggcccggtaatggcgccggccccaaaaaggcaccctcacgcgcgcgcaactctggcacccagtcagatggcgaggagaaacagcccggcctcgtgatggaacgagctcttctttccgatgaaagggtcctaaaagagattcaaagcaccttagaaggagacagagggtctggtaactggcgatctcaccgcgcagcagtgggttgctctctaagtaatggcggagccgaatag

SEQ ID NO: 30018 - DNA, 3063 bp, Artificial Sequence
  derived and/or modified sequence
atgcgtcggttcttgcgcccaggacacgatcctgtgcgggagcggctcaaaagagacttattccagttcaataagactgtggagcatggcttcccccaccaaccatcagccttgggatacagccccagcctcagaattcttgcaatcggtacaagatccggagccatcaaactttatggcgcacccggagtggagttcatgggcctccaccaggagaataacgccgtgacccagatccacctccttccaggtcagtgtcagcttgtgactttgctagatgacaattctttacatttgtggagtctaaaagtgaagggaggcgctagcgaactgcaggaggatgaatccttcaccctgcgcggaccaccgggagcagctcccagcgccacccaaataacggtggtcctgccacattcatcttgcgaattgctgtacctgggtacagagagcggcaatgtctttgtggtgcaactgcccgcattccgggcactcgaggaccggaccataagtagcgatgctgtattgcaacgactccctgaagaagcaagacaccgacgagtgtttgaaatggtcgaagccctgcaagagcacccccgagaccctaaccaaatcttaatcgggtattctcgaggcttagttgtaatctgggaccttcaggggagccgcgtgctgtaccactttctctccagtcagcaactggaaaatatctggtggcaaagagacggtagactgttggtttcttgtcattctgatgggagttactgccaatggcccgtgtcttcggaagcccaacagcctgaaccacttaggtcattagtgccctacggccctttcccttgtaaggcaataacaagaattctctggctcaccacgaggcaggggctccccttcaccatttttcaagggggtatgcccagagcgagctatggggatcgtcactgtatctccgttattcacgatggacaacaaacagccttcgacttcacctctcgagttattggttttacggtcttgactgaggctgatccagctgctacgttcgacgatccatacgcactcgttgtgctggcagaggaggagctcgtcgtgatagacctccaaactgcgggatggcccccagtgcagctgccatatctagctagccttcactgttcagccatcacatgctcacatcacgtgtctaatatcccactgaagctctgggaaagaattattgccgcagggagccgacagaacgctcatttttcaactatggagtggcctatcgacggtgggacttcactgacccctgcaccgccacagagggacctcctgcttaccgggcacgaggacgggacagtgaggttttgggacgcctctggagtatgcctgcgcttactctacaaactgtctacggtgcgggtgtttctcacagacacagatcctaacgaaaacttctcggcacagggagaggacgagtggccacctctgagaaaagttgggagcttcgatccctatagcgacgatccaagattgggtattcaaaaaatctttctgtgcaaatattctggatatctcgcggtcgctggtactgcgggtcaggtacttgtgctagaactgaatgacgaggctgccgagcaagccgtggaacaggtcgaagccgatttgcttcaggaccaggagggctatagatggaaaggtcatgaacggctcgccgctcggagtgggccagtaaggttcgaaccgggatttcagcctttcgtgctggtgcagtgccagcctcccgctgtggtcacgtcacttgctctgcatagtgaatggcgcctcgtcgcctttggtaccagccacggcttcggcctgttcgatcatcaacagcgcagacaagtatttgttaagtgcaccctgcatccctccgaccaactcgctctggaaggccctctctctcgagttaagtccttaaaaaagtctctccggcagtcgtttcgccgaatgaggcggtcacgggtgagctcgcgcaaacgccatccggcaggtccacccggtgaagcgcaagaggggtccgccaaggcagagcgcccaggcctgcagaatatggaactggcccctgtgcagagaaaaatcgaagcacgctccgccgaagattcattcacgggatttgtcaggacactgtattttgctgatacctatctcaaagactctagtcgccactgtcctagcctgtgggcagggacgaatggcggtacaatctacgccttcagcctacgcgtcccacctgccgaacgcagaatggatgaacctgttcgggcagaacaggccaaagagatccaactcatgcatagggctccggtggtcggtatcctcgtcctggatggtcattcggttccactccccgaaccattggaggtggctcatgacctttcaaaatccccggacatgcagggcagccaccaactgttggtggttagtgaagaacagttcaaggtgtttactctgcctaaggtgagtgccaagctgaagctaaaactcaccgccctggaaggtagtagagtgagacgggtatctgtcgcccacttcggaagccgcagagctgaagattacggagaacaccatctagctgtgcttacaaatttgggggacatccaagtggtcagtctgccactgcttaagcctcaagtgcggtatagctgcattcgacgcgaggacgtgtccgggatcgctagctgcgtgttcacaaagtatgggcagggtttttatctcatctctccatcagaatttgagcgcttttctctatccacaaagtggttggttgagcccagatgcctggttgactcagctgagactaaaaatcacaggcccggaaatggagcgggacctaaaaaggccccaagccgcgcacgaaactcaggcactcaatccgacggggaggaaaagcaaccagggcttgtgatggagagagcattgctatcggacgagcgcgtcctgaaggagattcagtctaccctggaaggggaccgaggcagcgggaattggcggtcccacagagctgctgtggggtgcagcctgagcaacggtggagccgagtag

SEQ ID NO: 30019 - DNA, 1122 bp, Artificial Sequence
  derived and/or modified sequence
atggccagcgagctggccatgagcaacagcgacctgcccaccagccccctggccatggagtacgtgaacgacttcgacctgatgaagttcgaggtgaagaaggagcccgtggagaccgacagaatcatcagccagtgcggcagactgatcgccggcggcagcctgagcagcacccccatgagcaccccctgcagcagcgtgccccccagccccagcttcagcgcccccagccccggcagcggcagcgagcagaaggcccacctggaggactactactggatgaccggctacccccagcagctgaaccccgaggccctgggcttcagccccgaggacgccgtggaggccctgatcagcaacagccaccagctgcagggcggcttcgacggctacgccagaggcgcccagcagctggccgccgccgccggcgccggcgccggcgccagcctgggcggcagcggcgaggagatgggccccgccgccgccgtggtgagcgccgtgatcgccgccgccgccgcccagagcggcgccggcccccactaccaccaccaccaccaccacgccgccggccaccaccaccaccccaccgccggcgcccccggcgccgccggcagcgccgccgccagcgccggcggcgccggcggcgccggcggcggcggccccgccagcgccggcggcggcggcggcggcggcggcggcggcggcggcggcggcgccgccggcgccggcggcgccctgcacccccaccacgccgccggcggcctgcacttcgacgacagattcagcgacgagcagctggtgaccatgagcgtgagagagctgaacagacagctgagaggcgtgagcaaggaggaggtgatcagactgaagcagaagagaagaaccctgaagaacagaggctacgcccagagctgcagattcaagagagtgcagcagagacacgtgctggagagcgagaagaaccagctgctgcagcaggtggaccacctgaagcaggagatcagcagactggtgagagagagagacgcctacaaggagaagtacgagaagctggtgagcagcggcttcagagagaacggcagcagcagcgacaaccccagcagccccgagttcttcatgtag

SEQ ID NO: 30020 - DNA, 1122 bp, Artificial Sequence
  derived and/or modified sequence
atggcttctgaactggccatgagtaattccgacttacccacctcacctttagctatggaatacgttaacgactttgatctgatgaaattcgaagttaagaaagagccggtagaaaccgatcgcattatttctcagtgtggtaggcttatagcaggtggcagtctatcaagcacaccgatgtctactccatgttcctcggttcccccaagccccagcttcagtgctccctccccaggctctggatccgaacaaaaggcccacctcgaggattactattggatgaccggctatcctcagcagttgaaccctgaggccctgggattttccccggaggatgccgtggaggcgcttatctctaacagtcatcaactgcaggggggatttgatggatatgcacgaggagcacaacaacttgccgctgctgccggagcaggcgccggggcatccctagggggcagcggggaagaaatggggcctgccgccgccgttgtgtccgcggtcatcgctgccgccgcagcccagtccggcgccggtccgcattatcaccaccatcatcaccatgccgctggccaccatcaccatcctaccgccggagcccctggggcagctggctcagcagcagcatcagccggaggcgctggcggtgccggtgggggggggcccgcatctgctggagggggagggggcgggggagggggaggaggaggcggaggtgcagctggcgcggggggagctcttcacccacaccacgccgcgggcggcctccattttgacgaccgtttttcagatgagcagctggtgacaatgagtgtcagagagctgaataggcagttgaggggggtgagcaaggaggaggtcattagactaaagcaaaagagacgaactctgaaaaaccgaggctatgcacagtcctgccggtttaagcgggtgcagcagaggcacgtgctggagtctgaaaagaaccagctgctgcagcaggtagaccacttgaaacaggagatttctcggcttgtaagggagagggatgcttacaaagagaagtacgaaaaactcgtcagcagcgggtttagagaaaatgggtccagttccgacaacccatccagcccagagttcttcatgtag

SEQ ID NO: 30021 - DNA, 1122 bp, Artificial Sequence
  derived and/or modified sequence
atggccagcgagctggccatgagcaacagcgacctgcccaccagccccctggccatggagtatgtgaatgactttgacctgatgaagtttgaggtgaagaaggagcctgtggagacagaccgcatcatcagccagtgtggccgcctgattgctgggggcagcctgagcagcacccccatgagcaccccctgcagctctgtgccccccagccccagcttcagcgcccccagccctggcagcggcagcgagcagaaggcccacctggaggactactactggatgacaggctacccccagcagctgaaccctgaggccctgggcttctccccagaagatgctgtggaggccctgatcagcaacagccaccagctgcagggcggctttgatggctacgcccggggggcccagcagctggccgctgctgctggggccggggccggggccagcctgggcggcagcggggaggagatgggccctgctgctgctgtggtgtctgctgtgattgctgctgctgctgcccagagcggggccggcccccactaccaccaccaccaccaccacgccgccggccaccaccaccaccccacagctggggcccctggagctgctggcagcgctgctgccagcgctgggggcgccggcggggccggcggcggcggccctgccagcgctgggggcggcggcggcggcggcggcggcggcggcggcggcggggccgccggggccggcggggccctgcacccccaccacgccgccggcggcctgcactttgatgaccgcttcagtgatgagcagctggtgaccatgtctgtgcgggagctgaaccggcagctgcggggcgtgtccaaggaggaggtgatccggctgaagcagaagaggaggaccctgaagaacagaggctacgcccagagctgccgcttcaagagggtgcagcagagacatgtgctggagagcgagaagaaccagctgctgcagcaggtggaccacctgaagcaggagatcagccggctggtgcgggagagagatgcctacaaggagaagtatgagaagctggtgagcagcggcttccgggagaatggcagcagcagtgacaaccccagcagccctgagttcttcatgtag

SEQ ID NO: 30022 - DNA, 1122 bp, Artificial Sequence
  derived and/or modified sequence
atggccagcgagctggccatgagcaacagcgacctgcccaccagcccgctcgccatggagtatgtaaacgacttcgatctgatgaagttcgaagtgaagaaggagcctgtggagacagaccgcatcatcagccagtgcggtcgtctgatcgccggcgggagcttaagttcaacccccatgagcacaccttgtagttcagtgccccctagtccatccttctctgctccatctccagggtccgggagcgagcaaaaagctcatctggaggattattactggatgacgggttatccacagcagctcaacccagaagctctaggattttcacccgaagatgcagtggaggccttgattagcaactctcatcagttgcaagggggctttgacgggtacgcaaggggggcacaacagttggctgccgccgccggcgctggggccggagcatccctgggaggcagcggtgaagagatgggtccagctgccgcagtggtttctgcggtgattgctgcagccgcggcccagagcggcgccgggccacattaccatcaccatcatcaccacgccgccgggcaccaccatcatccgaccgcgggggcacccggtgccgcagggtcagctgctgcaagcgctggaggagccggcggcgccggaggagggggccccgctagcgccgggggaggagggggcggcgggggcgggggcggtggcgggggcgcagctggggccggaggcgcactgcatccacatcatgctgccggcggactgcactttgatgaccgattctcggatgaacagcttgttactatgagcgtgcgggaactcaatagacagctgaggggggtatctaaagaggaggttatcaggctgaagcaaaaacgcagaacactgaaaaacagaggatatgcccaatcctgccggttcaaacgggtccagcagcgtcatgtgttggagtcagagaagaatcagctgctccaacaggtagatcacttaaaacaggaaatcagcagactggtgcgggaaagggacgcttacaaggaaaagtacgaaaaactagtgagtagtgggtttcgcgaaaacgggtctagcagcgacaacccttctagtccagagtttttcatgtag

SEQ ID NO: 30023 - DNA, 1122 bp, Artificial Sequence
  derived and/or modified sequence
atggcctccgaactggctatgagcaattctgacctccccaccagccctctggctatggagtatgtcaatgacttcgacctgatgaaattcgaagtgaagaaggaaccagtcgaaacagaccgcattatcagtcagtgcggtagattgatcgcaggtgggtccctcagctcaacacctatgtccactccttgttcttcagtgcctccctccccttcttttagcgctccaagcccgggttctgggagtgagcaaaaggcacacctcgaggactactattggatgactgggtacccacagcagcttaaccctgaggctttggggttcagcccggaggacgccgtggaagcgctcatttcaaattcacatcaactgcaaggtggatttgatgggtatgccaggggcgcacagcagctcgcagctgccgcaggagcgggtgctggagcatctctcggcggtagtggcgaggagatggggccagctgcagccgtagtcagtgcagttatagctgcggctgcagcccaatctggcgctgggccacattaccaccatcaccaccatcacgcagcgggtcaccatcaccaccctactgccggagccccaggcgcagccggatcagctgccgcttctgccggtggtgcagggggtgccggagggggaggacccgcaagcgcaggaggcggaggaggcggaggcggtgggggtggcggaggaggcgctgccggtgcagggggtgccttgcacccacatcatgccgcaggcggacttcacttcgatgatcgcttttccgatgaacaactcgtaaccatgtccgtgagagaactcaatcggcagctgagaggagtctccaaggaggaagtgatccggctcaagcagaagcgacgtaccctgaagaatcggggttacgcccagagctgtcgctttaaaagagtgcagcagaggcatgtactggagtcagagaaaaatcaacttctgcagcaggtggaccacctgaagcaggaaatctcccggttggtacgtgaacgcgacgcatataaggagaagtacgagaaactcgtgtcgtcaggcttccgtgaaaatggatctagttccgataacccatcgtcaccagagttttttatgtag

SEQ ID NO: 30024 - DNA, 6384 bp, Artificial Sequence
  derived and/or modified sequence
atcttttttcatcttctagctgtagctcgggctgcttgtcggcttggcctccccctcccccctttgctctctgcctcgtctttccccaggacttcgctattttgcttttttaaaaaaaggcaagaaagaactaaactcccccctccctctcctccagtcgggctgcacctctgccttgcactttgcacagaggtagagagcgcgcgagggagagagaggaaagaaaaaaaataataaagagagccaagcagaagaggaggcgagaagcatgaagtgttaactcccccgtgccaaggcccgcgccgcccggacagacgcccgccgcgcctccagccccgagcggacgccgcgcgcgccctgcctgcagcccgggccggcgaggcgagcccttccttatgcaaagcgcgcagcggagcggcgagcgggggacgccgcgcaccgggccgggctcctccagcttcgccgccgcagccaccaccgccgccaccgcagctcgcggaggatcttcccgagcctgaagccgccggctcggcgcgcaaggaggcgagcgagcaaggaggggccggggcgagcgagggagcacattggcgtgagcaggggggagggagggcgggcgcggggggcgcgggcagggcgggggggtgtgtgtgtgagcgcgctcggaggtttcgggccagccaccgccgcgcaagctagaagcgccccagcccggcaagctggctcacccgctggccacccagcacagcccgctggcccctctcctgcagcccatctggcggagcggcggcggcggcggcggcggcggcaggagaatggcatcagaactggcaatgagcaactccgacctgcccaccagtcccctggccatggaatatgttaatgacttcgatctgatgaagtttgaagtgaaaaaggaaccggtggagaccgaccgcatcatcagccagtgcggccgtctcatcgccgggggctcgctgtcctccacccccatgagcacgccgtgcagctcggtgcccccttcccccagcttctcggcgcccagcccgggctcgggcagcgagcagaaggcgcacctggaagactactactggatgaccggctacccgcagcagctgaaccccgaggcgctgggcttcagccccgaggacgcggtcgaggcgctcatcagcaacagccaccagctccagggcggcttcgatggctacgcgcgcggggcgcagcagctggccgcggcggccggggccggtgccggcgcctccttgggcggcagcggcgaggagatgggccccgccgccgccgtggtgtccgccgtgatcgccgcggccgccgcgcagagcggcgcgggcccgcactaccaccaccaccaccaccacgccgccggccaccaccaccacccgacggccggcgcgcccggcgccgcgggcagcgcggccgcctcggccggtggcgctgggggcgcgggcggcggtggcccggccagcgctgggggcggcggcggcggcggcggcggcggaggcggcgggggcgcggcgggggcggggggcgccctgcacccgcaccacgccgccggcggcctgcacttcgacgaccgcttctccgacgagcagctggtgaccatgtctgtgcgcgagctgaaccggcagctgcgcggggtcagcaaggaggaggtgatccggctgaagcagaagaggcggaccctgaaaaaccgcggctatgcccagtcctgccgcttcaagagggtgcagcagagacacgtcctggagtcggagaagaaccagctgctgcagcaagtcgaccacctcaagcaggagatctccaggctggtgcgcgagagggacgcgtacaaggagaaatacgagaagttggtgagcagcggcttccgagaaaacggctcgagcagcgacaacccgtcctctcccgagtttttcatgtgagtctgacacgcgattccagctagccaccctgataagtgctccgcgggggtccggctcgggtgtgggcttgctagttctagagccatgctcgccaccacctcaccacccccacccccaccgagtttggcccccttggccccctacacacacacaaacccgcacgcacacaccacacacacacacacacacacacacacaccccacaccctgctcgagtttgtggtggtggtggctgttttaaactggggagggaatgggtgtctggctcatggattgccaatctgaaattctccataacttgctagcttgttttttttttttttttacacccccccgccccacccccggacttgcacaatgttcaatgatctcagcagagttcttcatgtgaaacgttgatcacctttgaagcctgcatcattcacatattttttcttcttcttccccttcagttcatgaactggtgttcattttctgtgtgtgtgtgtgttttattttgtttggatttttttttttaattttacttttagagcttgctgtgttgcccaccttttttccaacctccaccctcactccttctcaacccatctcttccgagatgaaagaaaaaaaaaagcaaagtttttttttcttctcctgagttcttcatgtgagattgagcttgcaaaggaaaaaaaaatgtgaaatgttatagacttgcagcgtgccgagttccatcgggttttttttttagcattgttatgctaaaatagagaaaaaaatcctcatgaaccttccacaatcaagcctgcatcaaccttctgggtgtgacttgtgagttttggccttgtgatgccaaatctgagagtttagtctgccattaaaaaaactcattctcatctcatgcattattatgcttgctactttgtcttagcaacaatgaactataactgtttcaaagactttatggaaaagagacattatattaataaaaaaaaaaagcctgcatgctggacatgtatggtataattattttttcctttttttttccttttggcttggaaatggacgttcgaagacttatagcatggcattcatacttttgttttattgcctcatgacttttttgagtttagaacaaaacagtgcaaccgtagagccttcttcccatgaaattttgcatctgctccaaaactgctttgagttactcagaacttcaacctcccaatgcactgaaggcattccttgtcaaagataccagaatgggttacacatttaacctggcaaacattgaagaactcttaatgttttctttttaataagaatgacgccccactttggggactaaaattgtgctattgccgagaagcagtctaaaatttattttttaaaaagagaaactgccccattatttttggtttgttttatttttattttatattttttggcttttggtcattgtcaaatgtggaatgctctgggtttctagtatataatttaattctagtttttataatctgttagcccagttaaaatgtatgctacagataaaggaatgttatagataaatttgaaagagttaggtctgtttagctgtagattttttaaacgattgatgcactaaattgtttactattgtgatgttaaggggggtagagtttgcaaggggactgtttaaaaaaagtagcttatacagcatgtgcttgcaacttaaatataagttgggtatgtgtagtctttgctataccactgactgtattgaaaaccaaagtattaagaggggaaacgcccctgtttatatctgtaggggtattttacattcaaaaatgtatgtttttttttcttttcaaaattaaagtatttgggactgaattgcactaagatataacctgcaagcatataatacaaaaaaaaattgcaaaactgtttagaacgctaataaaatttatgcagttataaaaatggcattactgcacagttttaagatgatgcagatttttttacagttgtattgtggtgcagaactggattttctgtaacttaaaaaaaaatccacagttttaaaggcaataatcagtaaatgttattttcagggactgacatcctgtctttaaaaagaaatgaaaagtaaatcttaccacaataaatataaaaaaatcttgtcagttacttttcttttacatattttgctgtgcaaaattgttttatatcttgagttactaactaaccacgcgtgttgttcctatgtgcttttctttcattttcaattctggttatatcaagaaaagaataatctacaataataaacggcatttttttttgattctgtactcagtttcttagtgtacagtttaactgggcccaacaacctcgttaaaagtgtaaaatgcatccttttctccagtggaaggattcctggaggaatagggagacagtaattcagggtgaaattataggctgttttttgaagtgaggaggctggccccatatactgattagcaatatttaatatagatgtaaattatgacctcatttttttctccccaaagttttcagttttcaaatgagttgagccataattgcccttggtaggaaaaacaaaacaaaacagtggaactaggcttcctgagcatggccctacacttctgatcaggagcaaagccatccatagacagaggagccggacaaatatggcgcatcagaggtggcttgcgcacatatgcattgaacggtaaagagaaacagcgcttgccttttcactaaagttgactatttttccttcttctcttacacaccgagattttcttgttagcaaggcctgacaagatttaacataaacatgacaaatcatagttgtttgttttgttttgcttttctctttaacactgaagatcatttgtcttaaataggaaaaagaaaatccactccttacttccatatttccaagtacatatctggtttaaactatgttatcaaatcatatttcaccgtgaatattcagtggagaacttctctacctggatgagctagtaatgatttcagatcatgctatccccagaaataaaagcaaaaaataatacctgtgtggaatataggctgtgctttgatttactggtatttaccccaaaataggctgtgtatgggggctgacttaaagatcccttggaaagactcaaaactaccttcactagtaggactcctaagcgctgacctatttttaaatgacacaaattcatgaaactaatgttacaaattcatgcagtttgcactcttagtcatcttcccctagcacaccaatagaatgttagacaaagccagcactgttttgaaaatacagccaaacacgatgacttttgttttgttttctgccgttcttaaaagaaaaaaagataatattgcaactctgactgaaagacttatttttaagaaaacaggttgtgtttggtgctgctaagttctggccagtttatcatctggccttcctgcctattttttacaaaacacgaagacagtgtgtaacctcgacattttgaccttcctttatgtgctagtttagacaggctcctgaatccacacttaattttgcttaacaaaagtcttaatagtaaacctcccctcatgagcttgaagtcaagtgttcttgacttcagatatttctttcctttttttttttttttcctcatcacaactaagagatacacaaactctgaagaagcagaaatggagagaatgcttttaacaaaaaagcatctgatgaaagattttaggcaaacattctcaaaataagagtgatattctggatgtagttattgcagttatctcatgacaaatgaggcctggattggaaggaaaatatagttgtgtagaattaagcattttgataggaatctacaaggtagttgaatataataagcaggtttgggcccccaaactttagaaaatcaaatgcaaaggtgctggcaaaaatgaggtttgagtggctggctgtaagagaaggttaactcctagtaaaaggcatttttagaaataacaattactgaaaactttgaagtatagtgggagtagcaaacaaatacatgttttttttttcttacaaagaactcctaaatcctgagtaagtgccattcattacaataagtctctaaatttaaaaaaaaaaaaatcatatgaggaaatctagctttcccctttacgctgcgtttgatctttgtctaaatagtgttaaaattcctttcattccaattacagaactgagcccactcgcaagttggagccatcagtgggatacgccacattttggaagccccagcatcgtgtacttaccagtgtgttcacaaaatgaaatttgtgtgagagctgtacattaaaaaaaatcatcattattattattatttgcagtcatggagaaccacctacccctgacttctgtttagtctcctttttaaataaaaattactgtgttagagaagaa

SEQ ID NO: 30025 - protein, 508 aa, Artificial Sequence
  derived and/or modified sequence
MELEVRRVRQAFLSGRSRPLRFRLQQLEALRRMVQEREKDILTAIAADLCKSEFNVYSQEVITVLGEIDFMLENLPEWVTAKPVKKNVLTMLDEAYIQPQPLGVVLIIGAWNYPFVLTIQPLIGAIAAGNAVIIKPSELSENTAKILAKLLPQYLDQDLYIVINGGVEETTELLKQRFDHIFYTGNTAVGKIVMEAAAKHLTPVTLELGGKSPCYIDKDCDLDIVCRRITWGKYMNCGQTCIAPDYILCEASLQNQIVWKIKETVKEFYGENIKESPDYERIINLRHFKRILSLLEGQKIAFGGETDEATRYIAPTVLTDVDPKTKVMQEEIFGPILPIVPVKNVDEAINFINEREKPLALYVFSHNHKLIKRMIDETSSGGVTGNDVIMHFTLNSFPFGGVGSSGMGAYHGKHSFDTFSHQRPCLLKSLKREGANKLRYPPNSQSKVDWGKFFLLKRFNKEKLGLLLLTFLGIVAAVLVKKYQAVLRRKALLIFLVVHRLRWSSKQR

SEQ ID NO: 30026 - protein, 166 aa, Artificial Sequence
  derived and/or modified sequence
MELEVRRVRQAFLSGRSRPLRFRLQQLEALRRMVQEREKDILTAIAADLCKSEFNVYSQEVITVLGEIDFMLENLPEWVTAKPVKKNVLTMLDEAYIQPQPLGVVLIIGAWNYPFVLTIQPLIGAIAAGNAVIIKPSELSENTAKILAKLLPQYLDQDLYIVINGG

SEQ ID NO: 30027 - DNA, 1527 bp, Artificial Sequence
  derived and/or modified sequence
atggaacttgaagtccgacgagttcggcaagccttcctgtccggcagatctagaccccttaggttccgcttacagcaactggaggccctgcgcagaatggttcaggagcgggagaaagacattctcacggcgattgccgccgacctgtgcaaatcggagtttaacgtgtactctcaggaggtgattactgtcttaggcgagattgacttcatgcttgagaacttgccagaatgggttacagccaagcccgttaaaaagaatgtgctcacaatgctcgatgaagcctatattcaaccccagcccctcggagtggtgctgatcataggggcttggaactaccccttcgttctgacgattcagccactcatcggcgccatcgctgctggcaatgccgtgataattaagcctagtgaactcagtgagaatactgccaagatcttggccaagctgctcccccagtacctggatcaggacctctatatcgtgatcaacggtggagtggaggaaacaaccgagcttctcaagcagcgctttgaccacattttttacacaggaaatacggctgtagggaagatagtcatggaggctgctgctaagcatttgacaccagtcacactggaattgggaggcaaatcaccttgctacattgacaaagattgcgacctcgacattgtctgccgaagaattacatggggaaagtacatgaactgtggtcaaacctgcatcgcccccgattacatcctgtgcgaggcctccctgcagaaccagattgtgtggaagattaaagagaccgtgaaagagttttatggggaaaatatcaaagagagccctgattacgagagaataatcaacctgaggcacttcaagcggatcctctcactgctggagggacagaagatcgccttcgggggggaaacagatgaagcaacacgctacatagcacccactgttctaacggatgtggacccaaagactaaggtcatgcaggaggagatatttggcccgatactgcctatagttccagttaagaacgtggacgaggctattaatttcatcaacgagcgcgaaaagcccctcgctctatatgtgttttcgcataaccataaactcattaaaagaatgattgacgaaaccagctctggaggagtgactgggaacgatgtcattatgcatttcactctcaatagcttccctttcgggggagtcgggtcttctggcatgggcgcatatcacgggaagcattcattcgacactttctcccaccagcgtccttgtctgctgaagagcttgaaacgtgaaggagccaacaaactgcgatatccccctaatagccagagtaaagtagattgggggaagttttttctcctgaagagattcaacaaggaaaaacttggtctgctcctgttaactttcctgggcatagtggctgccgtgttagtgaagaaatatcaagcagtgctcaggagaaaagctctgctgatcttcctcgtggtgcaccgtctccgctggtcaagtaaacaaagatag

SEQ ID NO: 30028 - DNA, 1527 bp, Artificial Sequence
  derived and/or modified sequence
atggagctggaggtgcggcgggtgcggcaggccttcctgagcggccgcagccggcccctgcgcttccggctgcagcagctggaggccctgcggaggatggtgcaggagcgggagaaggacatcctgacagccatcgctgctgacctgtgcaagtctgagttcaacgtgtacagccaggaggtgatcaccgtgctgggggagattgacttcatgctggagaacctgcctgagtgggtgacagccaagcctgtgaagaagaatgtgctgaccatgctggatgaggcctacatccagccccagcccctgggcgtggtgctgatcatcggggcctggaactacccctttgtgctgaccatccagcccctgattggagccatcgctgctggaaatgctgtgatcatcaagcccagcgagctgtctgaaaatacagccaagatcctggccaagctgctgccccagtacctggaccaggacctgtacatcgtcatcaatggaggagtggaggagaccacagagctgctgaagcagagatttgaccacatcttctacacaggcaacacagctgtgggcaagatcgtgatggaggccgccgccaagcacctgacccctgtgaccctggagctgggcggcaagagcccctgctacatcgacaaggactgtgacctggacatcgtgtgccgccgcatcacctggggcaagtacatgaactgtggccagacctgcatcgccccagactacatcctgtgtgaggccagcctgcagaaccagatcgtgtggaagatcaaggagaccgtgaaggagttctatggagagaacatcaaggagagcccagactatgagcgcatcatcaacctgcggcacttcaagaggatcctgagcctgctggagggccagaagatcgccttcggcggggagacagatgaggccacccgctacatcgcccccaccgtgctgacagatgtggaccccaagaccaaggtgatgcaggaggagatcttcggccccatcctgcccatcgtgcctgtgaagaatgtggatgaggccatcaacttcatcaatgaaagagagaagcccctggccctgtatgtgttcagccacaaccacaagctgatcaagaggatgattgatgagaccagcagcggcggcgtgactggaaatgatgtgatcatgcacttcaccctgaacagcttcccctttggaggagtgggcagcagcggcatgggcgcctaccacggcaagcacagctttgacaccttcagccaccagaggccctgcctgctgaagagcctgaagcgggagggcgccaacaagctgcgctacccacccaacagccagagcaaggtggactggggcaagttcttcctgctgaagcgcttcaacaaggagaagctgggcctgctgctgctgaccttcctgggcatcgtggccgctgtgctggtgaagaagtaccaggccgtgctgcggaggaaggccctgctgatcttcctggtggtgcaccggctgcgctggagcagcaagcagaggtag

SEQ ID NO: 30029 - DNA, 3828 bp, Artificial Sequence
  derived and/or modified sequence
agtcctcccccggcgcctccgactggcagtgggactcagcgggcgtggaggtcgcggctgagcgagcgagccctgggcgagtgaattgtggctgtgggttgacggtggagacaccccccggagggaggcggagggaagggaggcgaggcctgcacctgcatgcttcccgcctcccactccccagcgcccccggaccgtgcagttctctgcaggaccaggccatggagctcgaagtccggcgggtccgacaggcgttcctgtccggccggtcgcgacctctgcggtttcggctgcagcagctggaggccctgcggaggatggtgcaggagcgcgagaaggatatcctgacggccatcgccgccgacctgtgcaagagtgaattcaatgtgtacagtcaggaagtcattactgtccttggggaaattgattttatgcttgagaatcttcctgaatgggttactgctaaaccagttaagaagaacgtgctcaccatgctggatgaggcctatattcagccacagcctctgggagtggtgctgataatcggagcttggaattaccccttcgttctcaccattcagccactgataggagccatcgctgcaggaaatgctgtgattataaagccttctgaactgagtgaaaatacagccaagatcttggcaaagcttctccctcagtatttagaccaggatctctatattgttattaatggtggtgttgaggaaaccacggagctcctgaagcagcgatttgaccacattttctatacgggaaacactgcggttggcaaaattgtcatggaagctgctgccaagcatctgacccctgtgactcttgaactgggagggaaaagtccatgttatattgataaagattgtgacctggacattgtttgcagacgcataacctggggaaaatacatgaattgtggccaaacctgcattgcacccgactatattctctgtgaagcatccctccaaaatcaaattgtatggaagattaaggaaacagtgaaggaattttatggagaaaatataaaagagtctcctgattatgaaaggatcatcaatcttcgtcattttaagaggatactaagtttgcttgaaggacaaaagatagcttttggtggggagactgatgaggccacacgctacatagccccaacagtacttaccgatgttgatcctaaaaccaaggtgatgcaagaagaaatttttggaccaattcttccaatagtgcctgtgaaaaatgtagatgaggccataaatttcataaatgaacgtgaaaagcctctggctctttatgtattttcgcataaccataagctcatcaaacggatgattgatgagacatccagtggaggtgtcacaggcaatgacgtcattatgcacttcacgctcaactctttcccatttggaggagtgggttccagtgggatgggagcttatcacggaaaacatagttttgatactttttctcatcagcgtccctgtttattaaaaagtttaaagagagaaggtgctaacaaactcagatatcctcccaacagccagtcaaaggtggattggggaaaattttttctcttgaaacggttcaacaaagaaaaactcggtctcctgttgctcactttcctgggtattgtagccgctgtgcttgtcaagaaataccaagctgtgctgaggagaaaggccctgttgatttttctggtagttcacagactgcgttggtccagtaagcagagatgaacaccagatttcaaaacccagccctgtctgttaagagtgaggcagaatattactgaagaatgatcctgttcaacctcctagtgcctctactgaattattcctcttttaaatggttaatgaaccaataatttttaaatcataccaaaaatagtaagaaaatatgcaaacactctgtgatcaaacttaaaagtcattgccattcatcattaataaaagttgccatttcaactacgtcccaacattccctaatagggtattcagggaacctgtcttaaattgtgcttatctaaatcttggaactttgagctaggggaggagaatgtattagactaaatacaaactgcggggttgtaagggagtctcagaacctcactgaatccttcactccagttaatggcactgctcacttcctgcctctgctgccaccatcactgtgtgaagctttcaagagcttggtacttcccagggctaccggcagtcctctgtagtccagagaggtgagattagatcttcttggttccctgtgaggtttcaggcactaaaactctatgtggggaagggaggggttactcctcctccaatgggactcaaggacttgacctccaggagtaggcccctggtcagaagtgccatctcaccagtggtcttcattcttcctcattcattctttatcatcctgtgttctgtttagttgcaacaatctcttgtgactaatgtcactcaaagcatcttgtaaatcctagggcttcctggaagttagttgccaaagtcatgcaagcatcacctgtcattcttgtgttggagttatagaattctacatcttataaaacctaactggcatttaaaaaatactgtggccgggcgtggtggctcatgcctgtaatcccagcactttgggaggccgaggtgggaggattgcttgagtccaggaatttgagaccagcctggacaacacagtgagacctcatctctatcaaaaaataaaaattagctagatgtggtggcatgagcctgtgttcccagctgcttaggaggctgaagcaggaggattgattgagcctgcgaggccaaggctgcagcaggctgtgattgcaccactgcacttcagcttgggcaacagagcaagaccctgtctccgaaacaaataaaaaatactgtaataaaagtacttataaacatactaatcctctttcaggaccctaaagttgcaggttagtaggtcttcaaggacaaatctgtaagtttcttatttctgtagtgcaagtaaaatttcactttttgaaactatagagagatccctttctgattagcctacagaacttaaagtgagggaaccatttcctctcacagacaaagaggcctgggatattaggactttggggtttgagagcatcatggggcagacagatggtggatggtctggacaagaagcgagtaagccactgcggttggtcatactgaagggaattgatggcaagaggatcccctgagcaagtcagaagttactctcatcagtcgttcatggtcacaacctgaggtactctgctgagtgggcaaggctgaagaagaggcctgtggaatgcagcattacctgctggacagagcagggcaggcagttctatgccttggagctcctgactgcagggactctgtccccacactcaaaaagactcagctcactcaatgagagaatgtgatttactttatagaacgtataatcaactttgttgaataatttgttctattaaggctgtctaaagtatgtgatgtcttcatcatagtatgaagtgttgaaaattaataacgagcctagtttaggaaaaagctgcttaaaactgtggctctaagagagtaatcataaaataccttagataaaattgcactatggaattttcattgagtatgtttaaattattggcttgtctactaatacacatctgcttcaaaatgaacatatttcataaaattggcatcaattttaatgacgctcctggtatggaacctcagatataccctattggagacaatcctttgatcataaattctccccaactataaatcattttatgtctttatcata

SEQ ID NO: 30030 - DNA, 1527 bp, Artificial Sequence
  derived and/or modified sequence
atggagctggaggtgcggcgggtgcggcaggccttcctgagcggccggagtcgccctttgcgtttccgtctacagcagctggaagcgctgcgacggatggtgcaagagcgagaaaaggacattctgaccgccattgccgctgacctgtgcaagagcgagttcaatgtgtattcacaggaggtcataaccgtcctgggcgagattgattttatgctagagaaccttcctgagtgggtaacagccaagcccgttaagaagaacgttcttacgatgctggatgaggcgtatatccagccacagcctctcggtgtggtgctgatcatcggcgcttggaactatccattcgtgctgaccatacagcctctgatcggtgctatcgccgccggcaatgccgtaatcattaaacccagcgagctgtctgagaacactgcgaagatcttggccaaactcctaccccaatatctggaccaagacctgtatatcgtgatcaacggcggagtcgaagagacaaccgagttgctcaagcagagatttgatcacatcttctacaccgggaacaccgcagtgggcaagattgtcatggaggccgccgcaaagcacctcacaccagtcacattagagttggggggaaagagcccttgctacatcgacaaggattgtgacctggatatcgtgtgtcggaggataacatggggcaaatacatgaattgtggccagacctgcatagcccctgattacatcctctgtgaagcaagcttacaaaaccagattgtgtggaagataaaggaaacggtgaaagagttttacggcgagaacattaaagagtccccggactacgagcggatcatcaatctccggcactttaagagaatcctctctcttcttgaagggcagaagattgccttcggtggtgaaactgacgaggctactagatatatcgcacccacggtgctgacagacgtagacccaaaaaccaaggtgatgcaggaggagatattcggaccaattttaccgatcgttcccgtgaagaatgtggatgaagccatcaacttcatcaatgaacgtgagaagcctctggcgctgtatgtattctcccataatcacaagcttatcaagagaatgattgacgaaacttcttcaggtggcgtgacagggaatgacgtgatcatgcattttaccctgaactccttcccttttgggggggtgggctcatccgggatgggagcgtatcacggcaagcattcattcgacactttcagccaccagcgtccatgccttctgaagtcacttaaacgtgagggggccaataagctccgctatcctcctaatagccagtctaaggtggactggggtaagttttttttgcttaagcgcttcaacaaagagaaactcggcctgctgttactgacgttcttaggcatcgttgctgcagtgctggtgaagaaataccaagcagtgctcagaaggaaagccttgcttattttccttgtggtgcaccgccttcggtggtcatcaaagcaaagatag

SEQ ID NO: 30031 - DNA, 1527 bp, Artificial Sequence
  derived and/or modified sequence
atggaacttgaagttcgtagggtcaggcaggcctttctgagtggcaggagtagacctcttagattccgactgcagcaactggaggcattgcgacgcatggtgcaagagagggaaaaggacatcctgacagccattgccgctgatttgtgtaagagtgaattcaacgtctactcccaggaagtgattacagtgctgggtgaaattgatttcatgcttgaaaatctgccagaatgggtgactgccaagcccgttaaaaaaaatgtactgaccatgctggatgaggcctacatccagcctcagcctctgggtgttgtccttattatcggagcctggaattatccatttgttttgacaatccaacctttgattggagcgatagccgctggcaatgctgtgatcatcaagccctccgagctgtccgagaacactgcaaagatcctggctaagctcctgcctcagtatctggaccaggatctgtacatcgttatcaacggaggggtcgaggaaacaaccgagctgctcaaacagaggttcgaccacatattctacaccggcaacaccgccgtgggtaagatcgttatggaggccgctgcaaagcacctcacaccagtgacgctcgagctgggtggcaagtctccctgttatatagataaggattgcgacctagatattgtgtgccgtagaataacctgggggaaatacatgaattgcggccagacctgtatagcccctgattacatcctgtgtgaagcttccttacagaatcaaatagtgtggaagatcaaggagaccgtgaaggaattttatggcgagaacatcaaagaaagccccgactacgaaagaatcattaatctgcgccactttaagcggatcctgagcctgctcgaagggcagaaaatcgccttcggaggagaaactgacgaagctaccagatatattgctccaaccgtactcaccgacgtggacccaaagaccaaagtcatgcaagaagaaatttttggtcccattctgcctatcgtccctgtcaaaaatgtcgacgaagcgataaattttataaatgaaagagaaaaacctttagcactctatgtgttttcccacaaccacaagctaatcaagcgcatgatcgacgagacaagctccggaggggtgaccggaaatgacgtgatcatgcatttcactctcaacagctttccattcggaggcgtggggtcctccggtatgggcgcttaccacggtaagcattcctttgacaccttctcccatcagaggccctgtctgctcaagtctctgaaaagggagggagctaacaaactccggtaccccccaaactcccagagcaaggtggattggggcaagttctttttgttgaaacgctttaacaaggaaaagttgggcctgttgctcttgactttcctcggaatcgtggcagctgtgttggtgaaaaagtatcaggccgtcctgagaagaaaggcccttctgatatttttggttgtgcatcgcctgaggtggtcaagtaagcagcgatag

SEQ ID NO: 30032 - DNA, 1527 bp, Artificial Sequence
  derived and/or modified sequence
atggagctggaggtgagaagagtgagacaggccttcctgagcggcagaagcagacccctgagattcagactgcagcagctggaggccctgagaagaatggtgcaggagagagagaaggacatcctgaccgccatcgccgccgacctgtgcaagagcgagttcaacgtgtacagccaggaggtgatcaccgtgctgggcgagatcgacttcatgctggagaacctgcccgagtgggtgaccgccaagcccgtgaagaagaacgtgctgaccatgctggacgaggcctacatccagccccagcccctgggcgtggtgctgatcatcggcgcctggaactaccccttcgtgctgaccatccagcccctgatcggcgccatcgccgccggcaacgccgtgatcatcaagcccagcgagctgagcgagaacaccgccaagatcctggccaagctgctgccccagtacctggaccaggacctgtacatcgtgatcaacggcggcgtggaggagaccaccgagctgctgaagcagagattcgaccacatcttctacaccggcaacaccgccgtgggcaagatcgtgatggaggccgccgccaagcacctgacccccgtgaccctggagctgggcggcaagagcccctgctacatcgacaaggactgcgacctggacatcgtgtgcagaagaatcacctggggcaagtacatgaactgcggccagacctgcatcgcccccgactacatcctgtgcgaggccagcctgcagaaccagatcgtgtggaagatcaaggagaccgtgaaggagttctacggcgagaacatcaaggagagccccgactacgagagaatcatcaacctgagacacttcaagagaatcctgagcctgctggagggccagaagatcgccttcggcggcgagaccgacgaggccaccagatacatcgcccccaccgtgctgaccgacgtggaccccaagaccaaggtgatgcaggaggagatcttcggccccatcctgcccatcgtgcccgtgaagaacgtggacgaggccatcaacttcatcaacgagagagagaagcccctggccctgtacgtgttcagccacaaccacaagctgatcaagagaatgatcgacgagaccagcagcggcggcgtgaccggcaacgacgtgatcatgcacttcaccctgaacagcttccccttcggcggcgtgggcagcagcggcatgggcgcctaccacggcaagcacagcttcgacaccttcagccaccagagaccctgcctgctgaagagcctgaagagagagggcgccaacaagctgagatacccccccaacagccagagcaaggtggactggggcaagttcttcctgctgaagagattcaacaaggagaagctgggcctgctgctgctgaccttcctgggcatcgtggccgccgtgctggtgaagaagtaccaggccgtgctgagaagaaaggccctgctgatcttcctggtggtgcacagactgagatggagcagcaagcagagatag

SEQ ID NO: 30033 - protein, 168 aa, Artificial Sequence
  derived and/or modified sequence
MASHEVDNAELGSASAHGTPGSEAGPEELNTSVYQPIDGSPDYQKAKLQVLGFCSSGTLSVVAGIKPTRTWIQNSFGMNIASATIALVGTAFLSLNIAVNIQSLRSCHSSSESPDLCNYMGSISNGMVSLLLILTLLELCVTISTIAMWCNANCCNSREEISSPPNSV

SEQ ID NO: 30034 - DNA, 507 bp, Artificial Sequence
  derived and/or modified sequence
atggcatcccatgaggtcgataatgcagagcttgggagcgcgtctgctcatggaacgccggggtctgaggcgggccccgaggaactgaatacctcagtctaccagcccattgacggctcaccagactatcaaaaggcgaaattacaagttctgggtttttgctctagtggaacactcagcgtcgtcgctggcatcaagccaacacgcacctggatccaaaattctttcggaatgaacattgcgagtgccaccatcgcgttagtggggactgctttcctatccctgaatattgccgtgaatatccaatcactacgtagctgccactcgtcctcggaaagccctgacctgtgcaactatatgggatcgatttccaatggaatggtttccctcctgctcattctgacactgttggagctgtgcgtcacaattagcaccatcgccatgtggtgtaatgccaattgctgtaattcgcgagaagaaattagtagtccacctaattctgtatag

SEQ ID NO: 30035 - DNA, 507 bp, Artificial Sequence
  derived and/or modified sequence
atggcttctcacgaagtagataacgccgaactagggtctgcaagcgctcacggaactcccggaagtgaggccggacctgaggagttgaacacctccgtgtaccaacccatagatgggagcccagattatcagaaggcaaagctgcaggtgctcggtttttgctctagcggtactttaagtgtcgtggcaggtatcaaacctacaagaacatggattcagaattcttttggcatgaacattgcttccgcaacaatcgccctcgtagggaccgccttcctgagtcttaatatcgcagttaatatccagtctctgaggtcatgccactcctcgtcggagtctcccgatctgtgtaactacatggggtccataagtaacggcatggtgagcctgttgctgatattgaccctcctcgagctgtgcgtgactatcagtactatcgcaatgtggtgtaacgctaattgctgtaactccagggaggagatatcttcccccccaaatagtgtgtag

SEQ ID NO: 30036 - DNA, 507 bp, Artificial Sequence
  derived and/or modified sequence
atggccagccatgaggtggacaatgctgagctgggcagcgccagcgcccacggcaccccaggcagcgaggccggccctgaggagctgaacacctctgtgtaccagcccattgatggcagcccagactaccagaaggccaagctgcaggtgctgggcttctgcagcagcggcaccctgtctgtggtggccggcatcaagcccaccaggacctggatccagaacagctttggcatgaacatcgccagcgccaccatcgccctggtgggcacagccttcctgagcctgaacattgctgtgaacatccagagcctgcggagctgccacagcagcagcgagagcccagacctgtgcaactacatgggcagcatcagcaatggcatggtgtccctgctgctgatcctgaccctgctggagctgtgtgtgaccatcagcaccatcgccatgtggtgcaatgccaactgctgcaacagccgggaggagatcagcagcccccccaacagcgtgtag

SEQ ID NO: 30037 - DNA, 1516 bp, Artificial Sequence
  derived and/or modified sequence
ggaggcttccgttatcgggaaaagatgctgtagtgatcttttctgagtgtctcctacttgcgacaaggtggacttgggaggaaagccgtctgccaaagcctgaagcctccaagccataaacaaccccaatggcctcccacgaagttgataatgcagagctggggtcagcctctgcccatggtaccccaggcagtgaggcgggaccagaagagctgaatacttctgtctaccagcccatagatggatcaccagattatcagaaagcaaaattacaagttcttgggttctgtagttcaggaaccttgtctgttgtagcagggataaaacccacaagaacatggatacagaacagttttggaatgaacattgccagtgctacaattgcactagtggggactgcttttctctcactaaatatagcagttaatatccagtcattaaggagttgtcactcttcatcagagtcaccggacctatgcaattacatgggctccatatcaaatggcatggtgtctctactgctgattctcaccttgctggaattatgcgtaaccatctctaccatagccatgtggtgcaatgcaaactgctgtaattcaagagaggaaatttcctcacctcccaattctgtgtaatcaagaatacctccttaattctgagagcatgaatatttgaccttaaatctccagtgactcagagcttcacccacaaactcaggagaacataagcctgctcgtaaagctcaatccttctatcatggcaccaatcacaagaaccttggacgtttgactgactctatcctttctctcctaactataaatcctatttgtgtgtcgtgggtatggaaggacagatatatttctttaggcattcttggatatctgtaacttctatgatcattactccaaagttgtttccagaaattggttctatttcttcttatccacctactccattgctttatgaggtttaaggaaggaaggcggtataatccctattcaatatattttttctaaaatccaacttctgaccgcccagtaggaagaaaaatgagacattttttccattacagagaaatgcttcttgactttaacatcagcattataaaaagtgtcaaataaaaaattaccatcattatcattaaaataaattttcactgtatttgagatgggagggttaaggctcagggattttatttcagtgaactgctggaactcacacatgccctgatatgtaaatgatgatttatgttggcgagtctgagagcaagcccaaatgtgttcttcaaaggacaatgggaaactgtaaagtagagaactaaagaataaggcctttagaatctgacacatctgggttcaaattctgaaactgtcacttattacctgtatgaacatgggcaaattatctaatctctctgatctatttttcctcatctgtaaaataggtgtaataataacaactactttgtcggttgctctgagggttaaatgaaaataaaaagaaaatgtgaaacagc

SEQ ID NO: 30038 - DNA, 507 bp, Artificial Sequence
  derived and/or modified sequence
atggcctcccacgaagttgataatgcagagctggggtcagcctctgcccatggtaccccaggcagtgaggcgggaccagaagagctgaatacttctgtctaccagcccatagatggatcaccagattatcagaaagcaaaattacaagttcttgggttctgtagttcaggaaccttgtctgttgtagcagggataaaacccacaagaacatggatacagaacagttttggaatgaacattgccagtgctacaattgcactagtggggactgcttttctctcactaaatatagcagttaatatccagtcattaaggagttgtcactcttcatcagagtcaccggacctatgcaattacatgggctccatatcaaatggcatggtgtctctactgctgattctcaccttgctggaattatgcgtaaccatctctaccatagccatgtggtgcaatgcaaactgctgtaattcaagagaggaaatttcctcacctcccaattctgtgtaa

SEQ ID NO: 30039 - DNA, 507 bp, Artificial Sequence
  derived and/or modified sequence
atggccagccacgaggtggacaacgccgagctgggcagcgccagcgcccatggcaccccgggcagtgaagccggcccagaagagcttaatacatcagtgtaccagcctatcgatggtagtccagactatcagaaagcaaaactacaggttctgggcttctgttcaagcggcactctctccgttgtagccggaattaagccaacccggacctggatccaaaatagtttcggcatgaacatcgccagtgccacaatcgcactggtgggtaccgcatttctcagcctgaacatagcagtcaatatacagtctctgcgttcttgccacagtagctccgaaagccctgacctgtgcaattatatgggcagtatttctaatgggatggtgagcctgctgcttatcctgacgctcttggagctgtgcgtaaccatctcgaccattgccatgtggtgtaacgctaattgctgcaattcccgggaggagattagctcaccaccgaactcagtctag

SEQ ID NO: 30040 - DNA, 507 bp, Artificial Sequence
  derived and/or modified sequence
atggccagccacgaggtggacaacgccgagctgggcagcgccagcgcccatgggacccccggttccgaggctgggcctgaggagcttaatactagcgtctatcagcccattgacggatcgcctgactaccagaaggccaagttacaggtgcttggcttctgctcctctgggactctgtccgtggttgcaggcattaagcccacccgaacatggattcagaattcctttggaatgaatattgcgtcagctactatcgccctagtgggaaccgccttcctctctctgaatatagcagtgaatatccaatccctgcgatcctgccacagttctagcgagagcccagatctctgtaactacatggggagcattagtaacgggatggtctctcttctcttaatcctaacactgctagaactttgtgttaccattagtacgattgcaatgtggtgtaatgctaattgctgcaattctcgagaggaaataagtagcccacctaattctgtctag

SEQ ID NO: 30041 - DNA, 507 bp, Artificial Sequence
  derived and/or modified sequence
atggcatcacacgaggtcgataacgccgagctgggctcagcctcagctcatggaacccctggttctgaggccggaccagaggaattgaacacgtctgtgtatcaacctattgacggatccccagattatcaaaaggctaagttgcaggtgctgggattttgtagtagcggaaccttaagcgtggtcgcgggtatcaaaccaacaaggacctggattcagaattcctttgggatgaatatcgcttccgccaccatcgccctggtgggcacagcctttctcagcctgaacattgccgtgaatatccagtctctcaggagttgccacagttctagtgaatctcctgatctctgcaattatatggggagcatctccaatggcatggtatctctattgctgattctaaccctgctggaactttgcgtaactatcagtaccatagccatgtggtgcaacgcaaattgctgcaacagccgggaggaaatttccagcccaccgaacagcgtctag

SEQ ID NO: 30042 - DNA, 507 bp, Artificial Sequence
  derived and/or modified sequence
atggcaagtcacgaggtggataacgccgaattgggctctgcttcagctcacggaactcccggatcggaggcaggccctgaggagctcaacacctctgtgtaccagcctatagacgggtcaccggactatcagaaggcaaagcttcaggtgctgggcttttgctcctccggaaccctgtcagtggtggcagggataaaacctaccaggacctggattcaaaacagttttggtatgaatatcgcatccgctacaattgctctcgttgggaccgcgttcctttccttgaacatcgctgtcaacattcaaagtctgaggagctgccacagctcgagtgaaagtccagatctatgcaactacatgggctcgatctccaatggcatggtctcgctcctgctgatcttgaccttgttggaactgtgcgttacaattagcactatcgctatgtggtgcaacgctaactgctgcaacagccgagaagaaatttcatcacctccaaattctgtgtag

SEQ ID NO: 30043 - DNA, 507 bp, Artificial Sequence
  derived and/or modified sequence
atggccagccacgaggtggacaacgccgagctgggcagcgccagcgcccacggcacccccggcagcgaggccggccccgaggagctgaacaccagcgtgtaccagcccatcgacggcagccccgactaccagaaggccaagctgcaggtgctgggcttctgcagcagcggcaccctgagcgtggtggccggcatcaagcccaccagaacctggatccagaacagcttcggcatgaacatcgccagcgccaccatcgccctggtgggcaccgccttcctgagcctgaacatcgccgtgaacatccagagcctgagaagctgccacagcagcagcgagagccccgacctgtgcaactacatgggcagcatcagcaacggcatggtgagcctgctgctgatcctgaccctgctggagctgtgcgtgaccatcagcaccatcgccatgtggtgcaacgccaactgctgcaacagcagagaggagatcagcagcccccccaacagcgtgtag

SEQ ID NO: 30044 - protein, 423 aa, Artificial Sequence
  derived and/or modified sequence
MENKKKDKDKSDDRMARPSGRSGHNTRGTGSSSSGVLMVGPNFRVGKKIGCGNFGELRLGKNLYTNEYVAIKLEPMKSRAPQLHLEYRFYKQLGSGDGIPQVYYFGPCGKYNAMVLELLGPSLEDLFDLCDRTFSLKTVLMIAIQLISRMEYVHSKNLIYRDVKPENFLIGRPGNKTQQVIHIIDFGLAKEYIDPETKKHIPYREHKSLTGTARYMSINTHLGKEQSRRDDLEALGHMFMYFLRGSLPWQGLKADTLKERYQKIGDTKRATPIEVLCENFPEMATYLRYVRRLDFFEKPDYDYLRKLFTDLFDRKGYMFDYEYDWIGKQLPTPVGAVQQDPALSSNREAHQHRDKMQQSKNQVVSSTNGELNTDDPTAGRSNAPITAPTEVEVMDETNCQKVLNMWCCCFFKRRKRKTIQRHK

SEQ ID NO: 30045 - DNA, 1272 bp, Artificial Sequence
  derived and/or modified sequence
atggaaaataagaagaaagacaaggataagtcagatgataggatggcacgcccaagcggccgaagcgggcacaatacccgcgggactggatctagctcctcaggcgtgctaatggtcgggccgaactttagggtcggaaaaaagataggttgcggcaatttcggggaactccggctgggcaaaaatctgtatacaaatgagtatgtggctatcaaactcgaacccatgaagtcacgcgcgccacagctgcacctggaatacaggttctataagcagctgggcagtggagatggaattcctcaggtctactacttcgggccctgtgggaaatacaacgcaatggtcttagaattactcggtccctctctggaggatctgttcgatctttgcgaccgaaccttttctctgaagacagtcctgatgatagcaatacagctgatatcaagaatggagtacgtccatagcaaaaacctgatttatagggacgtcaaaccagagaactttctaattggccgccccggcaataaaacccagcaggtcatccacatcatagactttggactggcaaaggagtatatcgaccctgaaacaaaaaaacacatcccatacagggaacacaagtcactcactggaaccgcccgctatatgagtattaatacccacctaggcaaagaacagtccagaagagatgatctggaggccttaggacacatgttcatgtatttcttaagaggctccttgccatggcaaggcctgaaagcagatacactgaaggagagataccagaagatcggtgataccaagcgcgccacaccaatagaggtactgtgcgagaatttcccagaaatggccacctacctccggtacgtcaggcggcttgatttctttgagaaacccgattatgattatctgagaaaactgttcactgacttgtttgacaggaagggatacatgttcgactatgaatacgactggattggaaagcagcttcctacccctgttggggccgtgcagcaagatcctgccctgtcctcgaatagggaagcccaccagcatagagacaaaatgcagcagagcaaaaaccaagtcgtcagttccactaatggcgaactgaataccgacgaccctaccgccggccggagcaacgctccaataacagcaccgactgaagtggaggtgatggacgaaacaaattgccagaaagtgctcaacatgtggtgttgttgtttcttcaagagacgcaaaagaaaaactatacaacgacataaatag

SEQ ID NO: 30046 - DNA, 1272 bp, Artificial Sequence
  derived and/or modified sequence
atggaaaataagaaaaaagataaagacaaaagcgacgatcgcatggcacggccatcaggccgcagcggccacaatacccgcggcactggaagcagtagcagtggcgtgctaatggtgggaccgaactttcgcgtaggaaagaaaatcggctgtggaaattttggcgagttacgattgggaaaaaacctgtacacaaacgaatacgtggctatcaaattagaacccatgaaaagtcgggcgccacagctgcacctagagtaccggttctataaacagctgggatctggcgacggaatcccccaagtttattactttggtccctgcggcaaatacaatgccatggtgctggagctgctcgggccctcgctggaagatttgtttgacttgtgtgatcgaacttttagcctcaaaactgttctaatgatagctatccagttgatcagccgaatggagtatgtgcatagcaagaatctgatctaccgggatgtgaaacctgaaaactttctgatcggcagacctggtaacaagacacaacaggtgattcatataattgattttggcctggctaaagaatacatcgatccggagaccaagaagcacatcccctatcgcgaacacaagtctcttaccgggaccgctcgatacatgagtattaacacccacttggggaaagagcagtcccggcgtgacgatctcgaagcgctgggccacatgtttatgtacttcctgagagggtccctgccctggcaaggcctcaaggccgacacactgaaggagaggtaccagaaaatcggggataccaagagggccacgcctatagaggttctttgcgaaaattttcccgagatggccacctacctgaggtacgtgaggcggcttgatttctttgaaaaacctgactacgactacctccgaaaactatttaccgatctgttcgataggaagggttatatgtttgattacgaatacgactggataggtaagcaactcccaacacctgtgggagccgtgcagcaggaccctgctctctcttctaaccgagaggctcaccaacatagagacaaaatgcagcaatcaaagaatcaggttgtgagcagcactaatggcgagttgaatactgatgatcccactgcaggcagatctaatgcgccgattactgctccaactgaggtggaggtgatggacgagaccaactgtcaaaaagtcctcaatatgtggtgctgctgtttctttaagcgcaggaagcgaaagaccattcagcggcataagtag

SEQ ID NO: 30047 - DNA, 1272 bp, Artificial Sequence
  derived and/or modified sequence
atggagaacaagaagaaggacaaggacaagagtgatgacaggatggcccggcccagcggccgcagcggccacaacacccggggcaccggcagcagcagcagcggcgtgctgatggtgggccccaacttccgggtgggcaagaagattggctgcggcaactttggagagctgcggctgggcaagaacctgtacaccaatgaatatgtggccatcaagctggagcccatgaagagccgggccccccagctgcacctggagtaccgcttctacaagcagctgggcagcggagatggcatcccccaggtgtactacttcggcccctgtgggaagtacaatgccatggtgctggagctgctgggccccagcctggaggacctgtttgacctgtgtgacaggaccttcagcctgaagacagtgctgatgattgccatccagctgatcagcaggatggagtatgtgcacagcaagaacctgatctacagagatgtgaagccagagaacttcctgattggccggcccggcaacaagacccagcaggtgatccacatcatcgactttggcctggccaaggagtacattgatcctgagaccaagaagcacatcccctaccgggagcacaagagcctgaccggcacagcccgctacatgagcatcaacacccacctgggcaaggagcagagcagaagagatgacctggaggccctgggccacatgttcatgtacttcctgcggggcagcctgccctggcagggcctgaaggctgacaccctgaaggagcgctaccagaagatcggggacaccaagagggccacccccatcgaggtgctgtgtgagaacttccctgagatggccacctacctgcgctacgtgcggcggctggacttctttgagaagccagactatgactacctgaggaagctgttcacagacctgtttgacaggaagggctacatgtttgattatgaatatgactggattggcaagcagctgcccacccctgtgggcgctgtgcagcaggaccctgccctgagcagcaaccgggaggcccaccagcaccgggacaagatgcagcagagcaagaaccaggtggtgagcagcaccaacggggagctgaacacagatgaccccacagctggccgcagcaatgcccccatcacagcccccacagaggtggaggtgatggatgagaccaactgccagaaggtgctgaacatgtggtgctgctgcttcttcaagaggaggaagaggaagaccatccagaggcacaagtag

SEQ ID NO: 30048 - DNA, 1272 bp, Artificial Sequence
  derived and/or modified sequence
atggagaacaagaagaaggacaaggacaagagcgacgaccggatggcccgtccctctggcagatctggccacaatactcgggggaccggctctagttctagtggcgtcctcatggtaggacccaatttccgggttggtaaaaagatcggctgcggcaactttggggaattgaggttgggaaagaacctgtatactaacgagtacgttgctatcaagctagaacccatgaaatccagggcaccccagttgcacctggaatataggttttacaagcagctggggagcggcgatggtattccacaggtctattacttcggtccatgtgggaagtacaacgcaatggtcctggagttgttgggaccatcccttgaagatctgtttgacctttgtgaccggactttctccctcaagacagtgttgatgatagctatccagctgatcagccgaatggaatacgtacattccaaaaatcttatttaccgcgatgtcaaacccgaaaacttcctgatcggtcgcccgggaaataagactcaacaggtgatccacatcatagactttggcttggcgaaagagtatatcgaccctgagactaaaaaacacataccatacagagagcataagagcctaaccggcaccgccaggtacatgagcattaacacccacctcggtaaggagcagtccagacgcgacgatctggaagctctcggtcacatgtttatgtactttctgaggggctctctgccctggcagggcctgaaagccgataccctaaaagaaaggtatcagaagataggggacaccaaacgggctacacctatcgaggtcctgtgcgagaacttccccgagatggccacatacctgcgctacgtccgaaggctcgacttcttcgaaaaaccagattacgactacctgcgaaagctgtttacagatctctttgatcggaaaggatatatgtttgactatgaatatgactggatcggcaagcagctgcccaccccagtaggcgccgtacaacaagacccagctctctcatctaatagggaagcacatcagcacagggataagatgcagcagtccaagaatcaggtggtatcctccaccaatggcgagctgaacacagacgatcctactgctggccgaagcaatgctcctataaccgccccgacagaggttgaagtgatggacgagaccaactgtcagaaggtccttaacatgtggtgttgctgcttcttcaagcgcagaaaacgcaaaaccatccagagacacaagtag

SEQ ID NO: 30049 - DNA, 1272 bp, Artificial Sequence
  derived and/or modified sequence
atggagaacaagaagaaggacaaggacaagagcgacgaccggatggctcggcccagtggccgttcaggtcacaatacccgaggcaccggtagctcgtcatccggggtgctgatggtaggtcccaatttcagagtaggtaagaagataggatgcggtaatttcggcgagctgagactgggcaaaaatctctatactaatgagtacgtggctataaaactggagcccatgaagagtagagccccacaactgcatctcgaatatcgattctacaagcagcttggttccggtgatggcataccgcaggtatattatttcggcccttgtgggaaatataacgctatggtgttagagctgctggggccttctctggaagatctcttcgatctttgcgacagaacattcagcctgaagactgtactaatgattgctatccagttgatttcacgtatggagtatgtgcacagcaaaaacctgatttaccgcgacgtaaagccagagaacttccttattggccgcccgggtaacaagacccagcaggttatccatataattgacttcgggctggccaaagagtacattgaccccgaaacaaaaaagcacatcccgtatcgcgagcataagagcttaactgggacggccagatacatgtcaatcaacactcatctgggcaaggagcagtctcgccgggatgacctagaggcactgggacacatgtttatgtacttcctgcgtggcagtcttccctggcagggcctgaaagctgatacactgaaggaaagatatcagaaaataggggatactaagcgggctactccgattgaggtcctctgcgaaaattttccagagatggcgacatatctccggtacgttcggaggctggacttctttgagaaacccgattatgactacctgagaaagctgttcacagacttgtttgacagaaaaggctatatgtttgattacgagtacgactggattgggaaacaactgccgaccccggttggggcagtgcaacaagaccctgcactgagctcaaatcgagaagcccatcagcacagggacaagatgcagcagtccaaaaatcaagtcgtttctagtacaaacggcgaactgaataccgacgaccccacagccggacggtccaatgcccctattaccgctcccacagaagtagaagtaatggacgaaactaattgtcagaaggtgctcaacatgtggtgctgttgcttttttaaaaggaggaagagaaagaccattcagcgccacaaatag

SEQ ID NO: 30050 - DNA, 1272 bp, Artificial Sequence
  derived and/or modified sequence
atggagaataaaaagaaggataaggataagagcgacgacaggatggctcgaccgtcaggaaggagcggccataacactcgcggtactggctcttcatcgtctggcgtgctgatggtgggccctaactttagggtcgggaaaaaaattgggtgtgggaattttggcgaattgaggcttgggaagaacctgtacacaaacgaatacgtggcaatcaaactggagcccatgaagagccgcgcaccccagctccacctagaatatagattttacaaacagctgggaagtggggatgggataccacaggtctactattttggcccttgtggaaaatataacgccatggtactggagcttctgggaccttctctcgaagacctgtttgatctgtgtgatcggaccttcagtctgaagactgttcttatgattgccattcagctcatttcgcggatggaatatgtgcacagcaagaatctgatttacagagatgtgaaaccagaaaactttttaattggcaggcccggaaataagacgcagcaggtgatccatattatcgactttggactcgctaaggagtacattgaccctgaaacgaaaaagcacataccctaccgggagcacaaaagccttactggcactgccagatacatgtctatcaatacacacttgggaaaggaacaaagcaggagggacgatcttgaggccctcggacatatgttcatgtactttctccgtggtagtttgccctggcagggtttgaaagctgacacactgaaggagcggtatcaaaaaattggagatactaagcgggctacacccatcgaggtcctttgtgaaaatttccctgagatggccacttatctgcggtacgtgcgtaggctggattttttcgaaaagccggactacgattacctaagaaaattgtttacagatctgttcgatcggaagggatatatgtttgactatgagtatgattggattgggaagcagctgcccacccccgtgggcgctgtgcagcaagatccagctctctcatctaaccgcgaggcacatcagcatcgcgacaaaatgcagcagagcaagaaccaggtggttagtagtactaacggcgaacttaatacagatgaccccacagccggacgtagtaatgctcccataacagcgcctactgaggtggaggttatggatgaaacaaattgccagaaagttctgaacatgtggtgctgttgctttttcaagaggcgtaagcggaaaacaattcagcggcataagtag

SEQ ID NO: 30051 - DNA, 1272 bp, Artificial Sequence
  derived and/or modified sequence
atggaaaataagaagaaagataaggataaatcggacgaccgtatggctcgtccgagcgggcgttccgggcacaataccagggggacaggtagttccagtagcggagtcttgatggtgggcccaaattttcgggtgggtaagaagatcgggtgcgggaatttcggggagcttcgccttggtaagaacctgtataccaatgagtacgtggctattaagctggaacccatgaaatcccgggcacctcagttacatctggaatatcgcttctataaacagctgggcagtggcgatggaatcccacaggtgtactactttggaccatgcggcaaatacaacgccatggtacttgaactcttagggccatcactcgaagacctgttcgatttatgcgacagaaccttttccctgaaaacagttcttatgattgctatccaactgatttcccggatggagtacgtgcacagcaaaaacctaatctaccgcgacgtgaagcctgagaattttttaataggacgaccgggaaataaaacgcagcaggtcatacatatcatcgatttcggcctagccaaggagtacattgatccagaaacaaaaaaacacatcccttacagagaacataaaagcctcaccgggactgccaggtatatgagcattaatacccatctgggcaaggaacagtctagacgcgacgatttggaggccttgggacacatgttcatgtattttcttagaggttctctcccgtggcaggggctgaaagccgacactctgaaggagaggtaccagaaaattggggatactaagagggctacaccaatcgaggtgttgtgtgagaatttcccagagatggctacttaccttaggtatgtgcggcgactggatttcttcgaaaagccggattacgattatctgcgcaaattatttacagatctctttgatcgcaaagggtacatgtttgattatgaatatgattggatcggaaagcaactcccaacaccagtaggtgcagtacaacaagacccagctctctccagtaatagggaagcccatcaacatagagacaagatgcagcagagcaaaaatcaagttgtaagttctaccaatggggaattgaacacggacgacccaaccgcaggaagatcgaacgcgccaatcacggcccctacggaggtagaggtgatggatgagaccaattgccaaaaggtgctgaacatgtggtgctgttgcttttttaagaggaggaagcggaagaccatccagcgacataagtag

SEQ ID NO: 30052 - DNA, 4366 bp, Artificial Sequence
  derived and/or modified sequence
actcggctgttttcgctgatgcgggcagcttgggggccgccgccgctaaacagacgctttcctttttaattttttttccatgtgttcacttccgggtccggcgtcgatccggatgcccgaggcagaaggatgtttgacctccggataagcgaggcgctgctgtgcattcattccgggctgcatcggtggcgacagcagaggctcgggcggcgactctccggccagcggcggcggtaggaggcaccagcggcagtgcagggaccgaatccgagcagcgctgcgttacctctctctctcgctccttcccccctacctcgctcgctcgctcgctcgctccctgcgtggctcgctttcctcctccggccgccggcgggtgtgatgtgccgccgccgctgcccccgccggcgctgacggactgggggcgccgcccgcgcccgggaccgacccctctgctcgcggccgcgcctttgagctctctatcaatatcagctcacatcattgaaaagataattttgaagacatgttttgctgaaaagacactaagaaaaattttacgaatgggatgaacatgctccagttaattgactacctactgcaatttgaatgttaacattacccatctggtacagttacctagtgatgtacctattttcacaataccctgtttcagtgtgcttgtcttgattaaagaattcaaagtggagtaccgcaaacttgatatggaaaataaaaagaaagacaaggacaaatcagatgatagaatggcacgacctagtggtcgatcgggacacaacactcgaggaactgggtcttcatcgtctggagttttaatggttggacctaactttagagttggaaaaaaaattggatgtggcaattttggagaattacgattagggaaaaatttatacacaaatgaatatgtggcaattaagttggagcccatgaaatcaagagcaccacagctacatttggaatacagattctataagcagttaggatctggagatggtatacctcaagtttactatttcggcccttgtggtaaatacaatgctatggtgctggaactgctgggacctagtttggaagacttgtttgacttgtgtgacagaacattttctcttaaaacagttctcatgatagctatacaactgatttctcgcatggaatatgtccattcaaagaacttgatatacagagatgtaaaacctgagaacttcttaataggacgaccaggaaacaaaacccagcaagttattcacattatagattttggtttggcaaaggaatatattgatccggagacaaagaaacacataccatacagagaacacaagagccttacaggaacagctagatatatgagcataaacacacatttaggaaaagaacaaagtagaagagacgatttagaagctttaggtcatatgttcatgtattttctgagaggcagtcttccttggcaaggcttaaaggctgacacattaaaggagaggtatcagaaaattggagatacaaaacgggctacaccaatagaagtgttatgtgaaaattttccagaaatggcaacatatcttcgttatgtaagaaggctagatttttttgaaaaaccagactatgactacttaagaaagctttttactgacttgtttgatcgaaaaggatatatgtttgattatgaatatgactggattggtaaacagttgcctactccagtgggtgcagttcagcaagatcctgctctgtcatcaaacagagaagcacatcaacacagagataagatgcaacaatccaaaaaccaggttgtaagttctacaaatggagagttaaacacagatgaccccaccgcaggacgttcaaatgcacccatcacagcccctactgaagtagaagtgatggatgaaaccaactgccagaaagtgttgaacatgtggtgctgctgttttttcaaacgaaggaaaaggaaaaccatacagcgccacaaatgactctggacacagacagatcctggggagttacttacatgttcatctgctgtcttgtgattaaaatcatctctgtagtgaccacgtatattttcaaggactcactcttagaaacaaaaatgtcatactttcatacttcattttgtggttgtcttacattctttttctttttttttttttctctaatttaacctttatggaagctttaaagttttgtcaaaacatgagtgctttgcccatcagtgaatggaatggaccaatgaggtggtatcaatgaatatagttccatagaacattttccagaagttcttctgttgtagaaagcagtacagtatcttaagtgtcaaccagttatatacctaatctggttttttataacttctgtaagagcataatcaaacaggaattttcttttctcagtggataatacaacagagaaaacagagttgcccaaatatttaaaagaagttattccttgagaagttcatattttgtgacatctgcattgatttcagtattactgatggtactgttattcataagtcatattaacattctctccgtgaaatcatggtacagtcactgcccagaggtactgaggaaaaagcaatatgggttcggcagatggtggtggtaaaatgaatcttaaggagtgtggtaaatatgtgctccgcttttgttgcatcactatgtgaagtactgtgttgcagaagtggcaaaagcgcttatttttaaaaatgcaaaatatttgtacaatgtaactttatgcttccaaataataatgtatgttagacagcaagaaatgaatactttaaaaagtgatgtatgttggagttataaagaaatacactaaggagaggtagtaaatgtgaaccttgttgcagtgtataaggtggaagcctaaagaaatctcaccgaaacttactgctgaatgattacattctcccttaagcagaaaactttggatgtgccatgcaatggtgtctgtgtaattattttgctctttgattaaaaaaaagacccccagcaataaaaagtgggtcactctatgccctctgtgcacattagtctcttgtattcaactttgctgattctctggaattttcctactctttagcataattttgatgattgaaaaatattttggaaaggatgggtcaggtgctttgcctccatagtcttttgaagtgcctgcatatgaacaacaacaacaacaacaaaaaattctgtaaaaaaggaagcccattccacttttcaagtatgctttgttttaagccataaagacacacatgtagttttgtcacattctactagccaaaattttcaagaagggttaaaacaaagactggctagaaagataattattttgaataaatctcatattcatctttcatttatataattgttacttattcctcccatgcagtctcttcgttgtctttaagtgtgtgcctccaggcatgcttatttatttttattgtctcaaggtaacatttaagatgtatattaaagtaaagctacatttttttacttcattattgcatttacagggatttaattgtactttgtaatttatttttcttattagccaaaagtttaatgcatttttttttgatgaattaggcacccacatgaacaccacaaatcaggacattgtttatcattgttgctatgaatcctatgaatgatcttttttttattttaaagacctacacttaacctacaaaacatttgctgtataatttggtcaacagtttctatctatctgtatactgtcatgatgtcttaaactgcaggagttacatactgagtttatatttttatttgctttgagcaaggtagataaacattttggccattataatgtgaaaccacttcttctttctttacagtatttgaccaaacttgtgtgtctatgatatttgtaaatacatgcgaatatctgtatttcttatcataagcctatttagttttattctcagtagggttttttggattgtacagtgtttatatgatctgaactccttatacataagaaggtgtgtatattaatccaattatggacttaaaatattttaaaagtataaatacccttatttgctgcaaagaccagtgtgtaggcatttgctttttagcaatatttttaagtgctccattttaatgccgaggaataagtcttttggcaacacaaactggtcaataataggtaatgcaggtatgttcaggttaagccaacaatgttttgcatttttatgcttattttctgtcaacactaatgaagtcaacattgcctgaatgtctgaataatgaaacacatccctgtttaaaagtatgtaactgaaaaagaaataaaaaaaaataaaagtagtttttttaaa

SEQ ID NO: 30053 - DNA, 2580 bp, Artificial Sequence
  derived and/or modified sequence
agctctctatcaatatcagctcacatcattgaaaagataattttgaagacatgttttgctgaaaagacactaagaaaaattttacgaatgggatgaacatgctccagttaattgactacctactgcaatttgaatgttaacattacccatctggtacagttacctagtgatgtacctattttcacaataccctgtttcagtgtgcttgtcttgattaaagaattcaaagtggagtaccgcaaacttgatatggaaaataaaaagaaagacaaggacaaatcagatgatagaatggcacgacctagtggtcgatcgggacacaacactcgaggaactgggtcttcatcgtctggagttttaatggttggacctaactttagagttggaaaaaaaattggatgtggcaattttggagaattacgattagggaaaaatttatacacaaatgaatatgtggcaattaagttggagcccatgaaatcaagagcaccacagctacatttggaatacagattctataagcagttaggatctggagatggtatacctcaagtttactatttcggcccttgtggtaaatacaatgctatggtgctggaactgctgggacctagtttggaagacttgtttgacttgtgtgacagaacattttctcttaaaacagttctcatgatagctatacaactgatttctcgcatggaatatgtccattcaaagaacttgatatacagagatgtaaaacctgagaacttcttaataggacgaccaggaaacaaaacccagcaagttattcacattatagattttggtttggcaaaggaatatattgatccggagacaaagaaacacataccatacagagaacacaagagccttacaggaacagctagatatatgagcataaacacacatttaggaaaagaacaaagtagaagagacgatttagaagctttaggtcatatgttcatgtattttctgagaggcagtcttccttggcaaggcttaaaggctgacacattaaaggagaggtatcagaaaattggagatacaaaacgggctacaccaatagaagtgttatgtgaaaattttccagaaatggcaacatatcttcgttatgtaagaaggctagatttttttgaaaaaccagactatgactacttaagaaagctttttactgacttgtttgatcgaaaaggatatatgtttgattatgaatatgactggattggtaaacagttgcctactccagtgggtgcagttcagcaagatcctgctctgtcatcaaacagagaagcacatcaacacagagataagatgcaacaatccaaaaaccaggttgtaagttctacaaatggagagttaaacacagatgaccccaccgcaggacgttcaaatgcacccatcacagcccctactgaagtagaagtgatggatgaaaccaactgccagaaagtgttgaacatgtggtgctgctgttttttcaaacgaaggaaaaggaaaaccatacagcgccacaaatgactctggacacagacagatcctggggagttacttacatgttcatctgctgtcttgtgattaaaatcatctctgtagtgaccacgtatattttcaaggactcactcttagaaacaaaaatgtcatactttcatacttcattttgtggttgtcttacattctttttctttttttttttttctctaatttaacctttatggaagctttaaagttttgtcaaaacatgagtgctttgcccatcagtgaatggaatggaccaatgaggtggtatcaatgaatatagttccatagaacattttccagaagttcttctgttgtagaaagcagtacagtatcttaagtgtcaaccagttatatacctaatctggttttttataacttctgtaagagcataatcaaacaggaattttcttttctcagtggataatacaacagagaaaacagagttgcccaaatatttaaaagaagttattccttgagaagttcatattttgtgacatctgcattgatttcagtattactgatggtactgttattcataagtcatattaacattctctccgtgaaatcatggtacagtcactgcccagaggtactgaggaaaaagcaatatgggttcggcagatggtggtggtaaaatgaatcttaaggagtgtggtaaatatgtgctccgcttttgttgcatcactatgtgaagtactgtgttgcagaagtggcaaaagcgcttatttttaaaaatgcaaaatatttgtacaatgtaactttatgcttccaaataataatgtatgttagacagcaagaaatgaatactttaaaaagtgatgtatgttggagttataaagaaatacactaaggagaggtagtaaatgtgaaccttgttgcagtgtataaggtggaagcctaaagaaatctcaccgaaacttactgctgaatgattacattctcccttaagcagaaaactttggatgtgccatgcaatggtgtctgtgtaattattttgctctttgattaaaaaaaagacccccagcaataaaaagtgggtcactctatgccctctgtgca

SEQ ID NO: 30054 - DNA, 1272 bp, Artificial Sequence
  derived and/or modified sequence
atggagaacaagaagaaggacaaggacaagagcgacgacagaatggccagacccagcggcagaagcggccacaacaccagaggcaccggcagcagcagcagcggcgtgctgatggtgggccccaacttcagagtgggcaagaagatcggctgcggcaacttcggcgagctgagactgggcaagaacctgtacaccaacgagtacgtggccatcaagctggagcccatgaagagcagagccccccagctgcacctggagtacagattctacaagcagctgggcagcggcgacggcatcccccaggtgtactacttcggcccctgcggcaagtacaacgccatggtgctggagctgctgggccccagcctggaggacctgttcgacctgtgcgacagaaccttcagcctgaagaccgtgctgatgatcgccatccagctgatcagcagaatggagtacgtgcacagcaagaacctgatctacagagacgtgaagcccgagaacttcctgatcggcagacccggcaacaagacccagcaggtgatccacatcatcgacttcggcctggccaaggagtacatcgaccccgagaccaagaagcacatcccctacagagagcacaagagcctgaccggcaccgccagatacatgagcatcaacacccacctgggcaaggagcagagcagaagagacgacctggaggccctgggccacatgttcatgtacttcctgagaggcagcctgccctggcagggcctgaaggccgacaccctgaaggagagataccagaagatcggcgacaccaagagagccacccccatcgaggtgctgtgcgagaacttccccgagatggccacctacctgagatacgtgagaagactggacttcttcgagaagcccgactacgactacctgagaaagctgttcaccgacctgttcgacagaaagggctacatgttcgactacgagtacgactggatcggcaagcagctgcccacccccgtgggcgccgtgcagcaggaccccgccctgagcagcaacagagaggcccaccagcacagagacaagatgcagcagagcaagaaccaggtggtgagcagcaccaacggcgagctgaacaccgacgaccccaccgccggcagaagcaacgcccccatcaccgcccccaccgaggtggaggtgatggacgagaccaactgccagaaggtgctgaacatgtggtgctgctgcttcttcaagagaagaaagagaaagaccatccagagacacaagtag

SEQ ID NO: 30055 - protein, 278 aa, Artificial Sequence
  derived and/or modified sequence
MSAPGSPDQAYDFLLKFLLVGDRDVGKSEILESLQDGTAESPYSHLGGIDYKTTTILLDGQRVKLKLWDTSGQGRFCTIFRSYSRGAQGVILVYDIANRWSFEGMDRWIKKIEEHAPGVPKILVGNRLHLAFKRQVPREQAQAYAERLGVTFFEVSPLCNFNIIESFTELARIVLLRHRLNWLGRPSKVLSLQDLCCRTIVSCTPVHLVDKLPLPIALRSHLKSFSMAKGLNARMMRGLSYSLTTSSTHKRSSLCKVKIVCPPQSPPKNCTRNSCKIS

SEQ ID NO: 30056 - DNA, 837 bp, Artificial Sequence
  derived and/or modified sequence
atgtccgcacccggatccccggatcaagcatatgacttcctgctgaaattcctgctggtcggggacagggacgtgggcaaaagcgagatcttagaatctctgcaggatggcacagccgagtctccttattcccacctcggtggcatagactataaaacaactacaatactactcgatgggcagagggtgaaactgaagctgtgggatacctccgggcagggccgcttttgtacaatctttaggtcctactctcggggtgcacagggggttattctcgtatacgatatcgccaacagatggtcattcgagggaatggatagatggataaaaaaaatagaagagcacgctccaggagtgcctaagatcctagttggcaaccgactgcacctcgcctttaagcggcaggtgcctcgagaacaagcccaagcatacgctgagcgcctgggtgtgacattcttcgaggtcagcccactgtgcaacttcaatatcatcgagtcatttactgaattggcccgcattgtgctcctgcgacaccgtctaaactggctgggtcggccctctaaggtcctgtcattgcaggacctatgttgccgcactatcgtctcttgtacccctgtgcatcttgtcgacaagctgcctcttcctatcgcactgaggagccacctcaagagcttttccatggccaagggacttaatgctaggatgatgcgcggactgtcctacagcttaaccacttcaagcacgcacaaaaggagctccctttgcaaggtgaaaatcgtgtgtccgccacagtcacctcctaagaattgcaccaggaacagttgcaagatctcgtag

SEQ ID NO: 30057 - DNA, 837 bp, Artificial Sequence
  derived and/or modified sequence
atgtctgcccctggcagcccagaccaggcctatgacttcctgctgaagttcctgctggtgggggacagagatgtgggcaagtctgagatcctggagagcctgcaggacggcacagctgagagcccctacagccacctgggcggcatcgactacaagaccaccaccatcctgctggatggccagagggtgaagctgaagctgtgggacaccagcggccagggccgcttctgcaccatcttccgcagctacagcagaggagcccagggcgtcatcctggtgtatgacatcgccaaccgctggagctttgagggcatggaccgctggatcaagaagattgaggagcacgcccctggggtgcccaagatcctggtgggcaaccggctgcacctggccttcaagaggcaggtgccccgggagcaggcccaggcctatgcagagcggctgggcgtgaccttctttgaggtgagccccctgtgcaacttcaacatcatcgagagcttcacagagctggccagaattgtgctgctgcggcaccggctgaactggctgggccggcccagcaaggtgctgagcctgcaggacctgtgctgcaggaccatcgtgtcctgcacccctgtgcacctggtggacaagctgcccctgcccatcgccctgcggagccacctgaagagcttctccatggccaagggcctgaatgccaggatgatgaggggcctgagctacagcctgaccaccagcagcacccacaagaggagcagcctgtgcaaggtgaagatcgtgtgccccccccagagcccccccaagaactgcaccaggaacagctgcaagatctcctag

SEQ ID NO: 30058 - DNA, 837 bp, Artificial Sequence
  derived and/or modified sequence
atgagcgcccccggcagccccgaccaggcctacgacttcctgctgaagtttctgttggtcggggatcgggacgtgggcaagtccgagattctggagtctctccaggatgggacagcagagtccccctactcccatctggggggtatagattacaagacaacaaccatactgttggacggacagagggtgaagctgaagctgtgggacaccagcggacaaggacgtttctgtactatcttccgctcctattcgaggggagcccagggcgtgattttggtgtacgatattgctaacaggtggagcttcgaagggatggaccggtggatcaaaaaaattgaagaacacgcccccggggtgccgaagattttggtaggaaatcgtttacatcttgcatttaaaagacaggttcccagagagcaggcccaggcatatgctgagaggcttggagtgacatttttcgaggtctcgcccctgtgtaatttcaatataattgagagctttactgaattagcccgtatcgtgctgctccgccatcgcctaaactggttgggccgcccgagtaaagtattgagtctccaggatttgtgctgtcgaactattgtttcctgtaccccagtgcacctggtggacaagctgccgctgcccatagcactgaggtcgcatctaaagagtttctccatggcaaaaggcttgaacgcaagaatgatgaggggactgtcttatagccttactacttcttctacgcataagcggagtagcctctgtaaggtaaagattgtatgtcctccacagtccccgccaaaaaactgtaccaggaactcctgcaagatttcatag

SEQ ID NO: 30059 - DNA, 837 bp, Artificial Sequence
  derived and/or modified sequence
atgtctgcaccaggctctccagatcaggcttacgattttctcctgaagttcctgctggttggcgaccgcgacgtgggcaaatcagagatcctggaatcattgcaggatggcacagccgagtctccctattcccacctgggagggattgactataaaaccaccactattctcctggatggccagagagtgaaactcaagctgtgggacacctccggccaaggaaggttttgtactatctttcggtcctattcccggggagcccagggagttatattagtctacgacattgccaatagatggtcctttgaaggcatggatcggtggattaagaagattgaagagcacgctccaggagttccaaaaatactcgtcggtaataggctccatctggcattcaagcggcaagtgccgagggagcaggcgcaggcctatgccgaaaggctgggagttactttttttgaggtttcacctttgtgtaattttaatattatagaatcattcaccgagttagccagaatcgttctgttacgccatagactcaactggttaggacgccctagtaaagtcctgtctcttcaagacctgtgttgtcggacaattgtctcttgtacgccagtgcacttagtggacaagctaccactccccatcgcgctgcgcagccatttgaaatcattcagcatggccaagggcctgaacgccaggatgatgcgcggtctgagctattccctcacgacttcaagcacacacaagaggtcaagcctgtgtaaagtgaaaatcgtttgcccaccacagtcaccacctaagaactgtacccgaaattcatgcaagatcagctag

SEQ ID NO: 30060 - DNA, 1029 bp, Artificial Sequence
  derived and/or modified sequence
cgcacaaccttgctggtctggcccaggcggggggcggggccagcacgatgagcgccccgggcagccccgaccaggcctacgacttcctgctcaagttcctgctggtgggcgacagggacgtaggcaagagtgagatcctggagagcctgcaggacggcacggccgagtccccgtacagtcacctggggggaatcgactacaagacgaccaccatcctgctggacggccagcgggtgaagctgaagctctgggatacgtcggggcagggaagattttgtaccatattccgctcctactctcgtggtgcacaaggagtgatcctggtctacgacattgcaaaccgctggtctttcgagggtatggatcgatggattaagaagattgaggaacatgcccctggtgtccctaaaatcctggtggggaatcgcctacatctggcattcaagaggcaggtgcccagggagcaggcccaggcctacgccgagcgcctgggcgtgaccttctttgaggtcagccctctgtgcaatttcaacatcatagagtctttcacggagctggccaggatagtgctgctgcggcacaggttgaactggctcgggaggccgagcaaggtactgagcttgcaagacctctgctgccgcaccatcgtgtcctgcacacctgtgcatctggtggacaagctcccgctccccattgccttaagaagccacctcaagtccttctccatggctaagggcctgaatgccaggatgatgcgaggcctctcctactccctcaccaccagctccactcacaaaaggagcagcctctgcaaagtgaagatcgtctgcccaccccagagcccacccaaaaactgcaccagaaacagctgcaaaatttcttaaggaaggcaccaaaaggaaacaagctggaatcgctccaggaaaaactctgaatggttacacctggaagagggaagatgcattctagattcaaagaaatacgttttcagtttctcatgggaacaatgctgcttgggaatgtgtgtga

SEQ ID NO: 30061 - DNA, 837 bp, Artificial Sequence
  derived and/or modified sequence
atgagcgcccccggcagccccgaccaggcctacgacttcctgctgaagttcctgctggtgggcgacagagacgtgggcaagagcgagatcctggagagcctgcaggacggcaccgccgagagcccctacagccacctgggcggcatcgactacaagaccaccaccatcctgctggacggccagagagtgaagctgaagctgtgggacaccagcggccagggcagattctgcaccatcttcagaagctacagcagaggcgcccagggcgtgatcctggtgtacgacatcgccaacagatggagcttcgagggcatggacagatggatcaagaagatcgaggagcacgcccccggcgtgcccaagatcctggtgggcaacagactgcacctggccttcaagagacaggtgcccagagagcaggcccaggcctacgccgagagactgggcgtgaccttcttcgaggtgagccccctgtgcaacttcaacatcatcgagagcttcaccgagctggccagaatcgtgctgctgagacacagactgaactggctgggcagacccagcaaggtgctgagcctgcaggacctgtgctgcagaaccatcgtgagctgcacccccgtgcacctggtggacaagctgcccctgcccatcgccctgagaagccacctgaagagcttcagcatggccaagggcctgaacgccagaatgatgagaggcctgagctacagcctgaccaccagcagcacccacaagagaagcagcctgtgcaaggtgaagatcgtgtgccccccccagagcccccccaagaactgcaccagaaacagctgcaagatcagctag

SEQ ID NO: 30062 - protein, 1149 aa, Artificial Sequence
  derived and/or modified sequence
MFQTKLRNETWEDLPKMSCTTEIQAAFILSSFVTFFSGLIILLIFRLIWRSVKKWQIIKGTGIILELFTSGTIARSHVRSLHFQGQFRDHIEMLLSAQTFVGQVLVILVFVLSIGSLIIYFINSADPVGSCSSYEDKTIPIDLVFNAFFSFYFGLRFMAADDKIKFWLEMNSIVDIFTIPPTFISYYLKSNWLGLRFLRALRLLELPQILQILRAIKTSNSVKFSKLLSIILSTWFTAAGFIHLVENSGDPWLKGRNSQNISYFESIYLVMATTSTVGFGDVVAKTSLGRTFIMFFTLGSLILFANYIPEMVELFANKRKYTSSYEALKGKKFIVVCGNITVDSVTAFLRNFLRDKSGEINTEIVFLGETPPSLELETIFKCYLAYTTFISGSAMKWEDLRRVAVESAEACLIIANPLCSDSHAEDISNIMRVLSIKNYDSTTRIIIQILQSHNKVYLPKIPSWNWDTGDNIICFAELKLGFIAQGCLVPGLCTFLTSLFVEQNKKVMPKQTWKKHFLNSMKNKILTQRLSDDFAGMSFPEVARLCFLKMHLLLIAIEYKSLFTDGFCGLILNPPPQVRIRKNTLGFFIAETPKDVRRALFYCSVCHDDVFIPELITNCGCKSRSRQHITVPSVKRMKKCLKGISSRISGQDSPPRVSASTSSISNFTTRTLQHDVEQDSDQLDSSGMFHWCKPTSLDKVTLKRTGKSKYKFRNHIVACVFGDAHSAPMGLRNFVMPLRASNYTRKELKDIVFIGSLDYLQREWRFLWNFPQIYILPGCALYSGDLHAANIEQCSMCAVLSPPPQPSSNQTLVDTEAIMATLTIGSLQIDSSSDPSPSVSEETPGYTNGHNEKSNCRKVPILTELKNPSNIHFIEQLGGLEGSLQETNLHLSTAFSTGTVFSGSFLDSLLATAFYNYHVLELLQMLVTGGVSSQLEQHLDKDKVYGVADSCTSLLSGRNRCKLGLLSLHETILSDVNPRNTFGQLFCGSLDLFGILCVGLYRIIDEEELNPENKRFVITRPANEFKLLPSDLVFCAIPFSTACYKRNEEFSLQKSYEIVNKASQTTETHSDTNCPPTIDSVTETLYSPVYSYQPRTNSLSFPKQIAWNQSRTNSIISSQIPLGDNAKENERKTSDEVYDEDPFAYSEPL

SEQ ID NO: 30063 - DNA, 3450 bp, Artificial Sequence
  derived and/or modified sequence
atgttccagaccaagctgagaaacgagacctgggaggacctgcccaagatgagctgcaccaccgagatccaggccgccttcatcctgagcagcttcgtgaccttcttcagcggcctgatcatcctgctgatcttcagactgatctggagaagcgtgaagaagtggcagatcatcaagggcaccggcatcatcctggagctgttcaccagcggcaccatcgccagaagccacgtgagaagcctgcacttccagggccagttcagagaccacatcgagatgctgctgagcgcccagaccttcgtgggccaggtgctggtgatcctggtgttcgtgctgagcatcggcagcctgatcatctacttcatcaacagcgccgaccccgtgggcagctgcagcagctacgaggacaagaccatccccatcgacctggtgttcaacgccttcttcagcttctacttcggcctgagattcatggccgccgacgacaagatcaagttctggctggagatgaacagcatcgtggacatcttcaccatcccccccaccttcatcagctactacctgaagagcaactggctgggcctgagattcctgagagccctgagactgctggagctgccccagatcctgcagatcctgagagccatcaagaccagcaacagcgtgaagttcagcaagctgctgagcatcatcctgagcacctggttcaccgccgccggcttcatccacctggtggagaacagcggcgacccctggctgaagggcagaaacagccagaacatcagctacttcgagagcatctacctggtgatggccaccaccagcaccgtgggcttcggcgacgtggtggccaagaccagcctgggcagaaccttcatcatgttcttcaccctgggcagcctgatcctgttcgccaactacatccccgagatggtggagctgttcgccaacaagagaaagtacaccagcagctacgaggccctgaagggcaagaagttcatcgtggtgtgcggcaacatcaccgtggacagcgtgaccgccttcctgagaaacttcctgagagacaagagcggcgagatcaacaccgagatcgtgttcctgggcgagaccccccccagcctggagctggagaccatcttcaagtgctacctggcctacaccaccttcatcagcggcagcgccatgaagtgggaggacctgagaagagtggccgtggagagcgccgaggcctgcctgatcatcgccaaccccctgtgcagcgacagccacgccgaggacatcagcaacatcatgagagtgctgagcatcaagaactacgacagcaccaccagaatcatcatccagatcctgcagagccacaacaaggtgtacctgcccaagatccccagctggaactgggacaccggcgacaacatcatctgcttcgccgagctgaagctgggcttcatcgcccagggctgcctggtgcccggcctgtgcaccttcctgaccagcctgttcgtggagcagaacaagaaggtgatgcccaagcagacctggaagaagcacttcctgaacagcatgaagaacaagatcctgacccagagactgagcgacgacttcgccggcatgagcttccccgaggtggccagactgtgcttcctgaagatgcacctgctgctgatcgccatcgagtacaagagcctgttcaccgacggcttctgcggcctgatcctgaacccccccccccaggtgagaatcagaaagaacaccctgggcttcttcatcgccgagacccccaaggacgtgagaagagccctgttctactgcagcgtgtgccacgacgacgtgttcatccccgagctgatcaccaactgcggctgcaagagcagaagcagacagcacatcaccgtgcccagcgtgaagagaatgaagaagtgcctgaagggcatcagcagcagaatcagcggccaggacagcccccccagagtgagcgccagcaccagcagcatcagcaacttcaccaccagaaccctgcagcacgacgtggagcaggacagcgaccagctggacagcagcggcatgttccactggtgcaagcccaccagcctggacaaggtgaccctgaagagaaccggcaagagcaagtacaagttcagaaaccacatcgtggcctgcgtgttcggcgacgcccacagcgcccccatgggcctgagaaacttcgtgatgcccctgagagccagcaactacaccagaaaggagctgaaggacatcgtgttcatcggcagcctggactacctgcagagagagtggagattcctgtggaacttcccccagatctacatcctgcccggctgcgccctgtacagcggcgacctgcacgccgccaacatcgagcagtgcagcatgtgcgccgtgctgagcccccccccccagcccagcagcaaccagaccctggtggacaccgaggccatcatggccaccctgaccatcggcagcctgcagatcgacagcagcagcgaccccagccccagcgtgagcgaggagacccccggctacaccaacggccacaacgagaagagcaactgcagaaaggtgcccatcctgaccgagctgaagaaccccagcaacatccacttcatcgagcagctgggcggcctggagggcagcctgcaggagaccaacctgcacctgagcaccgccttcagcaccggcaccgtgttcagcggcagcttcctggacagcctgctggccaccgccttctacaactaccacgtgctggagctgctgcagatgctggtgaccggcggcgtgagcagccagctggagcagcacctggacaaggacaaggtgtacggcgtggccgacagctgcaccagcctgctgagcggcagaaacagatgcaagctgggcctgctgagcctgcacgagaccatcctgagcgacgtgaaccccagaaacaccttcggccagctgttctgcggcagcctggacctgttcggcatcctgtgcgtgggcctgtacagaatcatcgacgaggaggagctgaaccccgagaacaagagattcgtgatcaccagacccgccaacgagttcaagctgctgcccagcgacctggtgttctgcgccatccccttcagcaccgcctgctacaagagaaacgaggagttcagcctgcagaagagctacgagatcgtgaacaaggccagccagaccaccgagacccacagcgacaccaactgcccccccaccatcgacagcgtgaccgagaccctgtacagccccgtgtacagctaccagcccagaaccaacagcctgagcttccccaagcagatcgcctggaaccagagcagaaccaacagcatcatcagcagccagatccccctgggcgacaacgccaaggagaacgagagaaagaccagcgacgaggtgtacgacgaggaccccttcgcctacagcgagcccctgtag

SEQ ID NO: 30064 - DNA, 3450 bp, Artificial Sequence
  derived and/or modified sequence
atgttccaaaccaaactacggaacgagacatgggaagatctgccaaaaatgagttgtaccacagaaattcaagccgcttttatactgtcgagttttgtaacttttttcagcggactcattattctgctgatctttaggctgatatggcgcagtgtgaagaaatggcagattatcaagggaaccggcatcatcctcgaactgtttaccagcggcaccatcgcacgttcccatgttagaagtcttcattttcagggccaatttcgagatcatattgagatgttgctttcagcacagacgttcgtcgggcaggtcttggtcatcctggtgttcgtgctcagtatcggaagtctcatcatctacttcatcaactccgccgatcctgtaggtagctgttcaagttacgaggataagaccatacccattgaccttgtgttcaatgcgtttttttcgttctacttcggccttcggttcatggccgctgacgacaaaattaagttctggcttgagatgaattccatcgtggatattttcaccatccctccaactttcattagttactacctaaaatctaactggctcggattgcggttcttaagagccctgcggttactggagttgccgcaaattctgcagatcctgcgggcgatcaaaacgtcaaatagcgtgaaattctcaaaactgctgtccatcatcctctcaacatggttcaccgcagcgggttttattcaccttgtggaaaattcaggggacccatggctgaaagggcgaaattctcagaatatcagttacttcgagtctatctatcttgttatggccaccacaagcaccgtagggtttggcgatgtggtcgccaagacctccctcggaagaacattcatcatgttcttcactttaggatccctaattctgtttgccaattatatacccgagatggtggagctgttcgccaataaaaggaaatacacctccagctatgaggcccttaaaggaaagaaattcatcgttgtgtgcggcaacatcacagtggattccgtcaccgctttcctgaggaacttccttcgtgacaagagcggggagataaacacagagatcgtttttttgggagagacgccgccttccttggaactggaaactatattcaagtgttatttggcatacacgacctttatatccgggtcagcaatgaagtgggaggatctgcgccgggttgccgtcgagtccgcagaggcttgcctgatcatagcaaatccattgtgctccgattctcatgccgaggatatctctaacattatgagggtcctgtctattaagaactatgactccactactcgaatcataattcagatcctgcagtcacataataaggtttatctcccaaaaatcccttcttggaattgggacactggtgacaatattatttgcttcgccgaactgaagttggggtttatcgcccagggctgtcttgtgcctggcctgtgtacctttctgacttcattgttcgtggaacagaacaagaaggtgatgcctaaacagacctggaaaaaacacttcttgaattctatgaaaaataaaattcttacacaacgcctgtcagacgacttcgccgggatgagctttcccgaagtggccagactttgctttctcaagatgcatctgctgctcatagccatcgagtacaaatcactgtttaccgatggtttttgtggcttaatcctcaacccgccaccacaggtgagaattagaaaaaacacactcggcttttttatcgccgagacacctaaagacgtgagaagggctctgttttattgttcagtgtgccacgacgacgtcttcattcctgaactgatcacaaactgtggctgtaaatctcgatcccgccaacacataactgtgccctcggtgaagcgaatgaagaaatgcctgaaaggtataagcagtagaatctctggtcaggactcccctccccgagtgtcagccagcactagcagtatctccaatttcactactagaaccctgcaacacgatgtcgaacaggactcagatcaactggacagcagcggaatgtttcactggtgtaagcccacttctctcgacaaagtgactctgaagagaaccggaaagtcaaaatacaagttcaggaatcatatcgttgcatgtgtgtttggggacgcccatagcgctcctatgggacttcgcaattttgtcatgcctctgcgagcttcgaattacacgcgtaaggaactcaaggatatagtttttattggctcacttgattaccttcagagagagtggcgatttctttggaactttccgcagatctatatacttcctgggtgtgctctatacagcggagatcttcacgccgcgaacatcgagcaatgtagcatgtgcgcagtgctctccccaccacctcaaccatccagcaatcagaccctggttgatactgaagccattatggctaccctgacaataggaagcctgcagattgactcctcgagcgatccatccccgtcagtcagtgaggaaacacccggctacaccaacggccacaatgagaaatccaattgtaggaaagtacccatactaactgagttgaaaaacccaagtaatatccatttcattgaacagttgggagggctggagggttccctgcaggagaccaatctgcatttgagtacagcattttcaactggaacagtatttagtggctcgttcctggactccctgctggccaccgccttctacaactatcacgtcctggaactccttcagatgctggtgacagggggcgtctcaagccagctggagcagcatctggacaaggacaaggtgtacggcgttgctgactcctgcacatctctcctcagtggcaggaacaggtgtaagcttggactcctcagcctccacgaaacaatcttatctgacgtcaacccccggaacactttcggacagctgttctgcgggtcattggacctgttcggcatcttatgtgtcggcctctacaggattatagatgaggaagagctgaacccagaaaacaagaggttcgttatcaccagaccagccaacgaatttaaactgctaccatccgatctggtgttctgtgcaattccttttagtacagcatgttataagaggaacgaggagttctcactgcagaaaagttatgagatcgtgaataaggctagtcagaccaccgagacccactcagatacgaattgccctcccacaatagattcggtgaccgagacactgtacagtccagtgtatagttaccagcctagaactaactctttgtctttcccaaagcagatagcgtggaaccaatcgcgaaccaactccatcatctcttctcaaatcccactgggggacaatgcaaaagaaaatgagcgtaaaacaagcgacgaggtatatgacgaggaccctttcgcatatagcgaacctctttag

SEQ ID NO: 30065 - DNA, 3450 bp, Artificial Sequence
  derived and/or modified sequence
atgttccagaccaagctgagaaatgagacctgggaggacctgcccaagatgagctgcaccacagagatccaggccgccttcatcctgagcagctttgtgaccttcttcagcggcctcatcatcctgctgatcttccgcctcatctggaggtctgtgaagaagtggcagatcatcaagggcaccggcatcatcctggagctgttcaccagcggcaccatcgcccggagccacgtgcgcagcctgcacttccagggccagttccgggaccacatcgagatgctgctgagcgcccagacctttgtgggccaggtgctggtgatcctggtgtttgtgctgagcatcggcagcctcatcatctacttcatcaacagcgctgaccctgtgggcagctgcagcagctatgaggacaagaccatccccatcgacctggtgttcaatgccttcttctccttctacttcggcctgcgcttcatggccgcagatgacaagatcaagttctggctggagatgaacagcatcgtggacatcttcaccatcccccccaccttcatctcctactacctgaagagcaactggctgggcctgcgcttcctgcgggccctgcggctgctggagctgccccagatcctgcagatcctgcgggccatcaagaccagcaacagcgtgaagttcagcaagctgctgagcatcatcctgagcacctggttcaccgctgctggcttcatccacctggtggagaacagcggggacccctggctgaagggcaggaacagccagaacatctcctactttgagagcatctacctggtgatggccaccaccagcacagtgggctttggagatgtggtggccaagaccagcctgggccgcaccttcatcatgttcttcaccctgggcagcctcatcctgtttgccaactacatccctgagatggtggagctgtttgccaacaagaggaagtacaccagcagctatgaggccctgaagggcaagaagttcatcgtggtgtgtggcaacatcaccgtggacagcgtgacagccttcctgaggaacttcctgcgggacaagtctggagagatcaacacagagatcgtgttcctgggggagaccccacccagcctggagctggagaccatcttcaagtgctacctggcctacaccaccttcatcagcggcagcgccatgaagtgggaggacctgcggcgggtggccgtggagagcgctgaggcctgcctgatcatcgccaaccccctgtgcagcgacagccatgctgaggacatcagcaacatcatgagggtgctgagcatcaagaactatgacagcaccacccgcatcatcatccagatcctgcagagccacaacaaggtgtacctgcccaagatccccagctggaactgggacaccggggacaacatcatctgctttgctgagctgaagctgggcttcatcgcccagggctgcctggtgcccggcctgtgcaccttcctgaccagcctgtttgtggagcagaacaagaaggtgatgcccaagcagacctggaagaagcacttcctgaacagcatgaagaacaagatcctgacccagaggctgagtgatgactttgctggcatgtccttccctgaggtggcccggctgtgcttcctgaagatgcacctgctgctgattgccatcgagtacaagagcctcttcacagatggcttctgtggcctcatcctgaaccccccaccccaggtgcgcatcaggaagaacaccctgggcttcttcatcgccgagacccccaaggatgtgagaagagccctcttctactgcagcgtgtgccatgatgatgtgttcatccctgagctgatcaccaactgtggctgcaagagccgcagccggcagcacatcaccgtgcccagcgtgaagaggatgaagaagtgcctgaagggcatcagcagccgcatcagcggccaggacagccccccccgggtgtctgccagcaccagcagcatcagcaacttcaccaccaggaccctgcagcatgatgtggagcaggacagcgaccagctggacagcagcggcatgttccactggtgcaagcccaccagcctggacaaggtgaccctgaagaggacaggcaagagcaagtacaagttcaggaaccacatcgtggcctgtgtgtttggagatgcccacagcgcccccatgggcctgaggaactttgtgatgcccctgcgggccagcaactacaccaggaaggagctgaaggacatcgtgttcatcggcagcctggactacctgcagcgggagtggaggttcctgtggaacttcccccagatctacatcctgcccggctgtgccctgtacagcggggacctgcacgccgccaacatcgagcagtgcagcatgtgtgctgtgctgagccccccaccccagcccagcagcaaccagaccctggtggacacagaggccatcatggccaccctgaccatcggcagcctgcagattgacagcagcagtgaccccagccccagcgtgtctgaggagaccccaggctacaccaacggccacaatgagaagagcaactgcaggaaggtgcccatcctgacagagctgaagaaccccagcaacatccacttcatcgagcagctgggcggcctggagggcagcctgcaggagaccaacctgcacctgagcacagccttcagcactggaacagtgttcagcggcagcttcctggacagcctgctggccacagccttctacaactaccacgtgctggagctgctgcagatgctggtgactggaggagtgagcagccagctggagcagcacctggacaaggacaaggtgtatggagtggccgacagctgcaccagcctgctgagcggcaggaaccgctgcaagctgggcctgctgagcctgcacgagaccatcctgagtgatgtgaaccccaggaacaccttcggccagctgttctgtggcagcctggacctgtttggcatcctgtgtgtgggcctgtaccgcatcattgatgaggaggagctgaaccctgagaacaagcgcttcgtcatcaccaggcctgccaatgagttcaagctgctgcccagcgacctggtgttctgtgccatccccttcagcacagcctgctacaagagaaatgaggagttcagcctgcagaagagctatgagatcgtgaacaaggccagccagaccacagagacccacagcgacaccaactgcccccccaccatcgacagcgtgacagagaccctgtacagccctgtgtacagctaccagcccaggaccaacagcctgtccttccccaagcagatcgcctggaaccagagcaggaccaacagcatcatcagcagccagatccccctgggggacaatgccaaggaaaatgaaaggaagaccagtgatgaggtgtatgatgaggacccctttgcctacagcgagcccctgtag

SEQ ID NO: 30066 - DNA, 3450 bp, Artificial Sequence
  derived and/or modified sequence
atgttccagaccaagctgcggaacgagacctgggaggacctgcccaagatgagctgcaccaccgagatacaagcagcattcatcttatcttcttttgtaacttttttcagtggtctgattattctgctcattttcagattaatttggcgatccgtgaaaaaatggcagataattaaagggaccggcataatcctggaactgtttacgagtggaactattgccagatcacatgtgaggagtctgcacttccagggccagttcagggatcacattgagatgctgctttctgctcagacattcgtcggacaagtgctcgtgatactagtcttcgtattgagcatcggtagtcttatcatctatttcatcaattccgcagaccctgtggggtcctgtagtagctatgaggataaaactattccgatcgatctggtctttaacgccttcttttccttctatttcgggctgaggttcatggcagcagacgacaagataaagttttggctggagatgaactcaattgtggacatcttcacaattccacctacttttatttcttattacctcaagtctaactggctcggactgcggttcctccgtgccttacggcttctggaactgcctcagatactccagattctgagggctatcaaaacctccaacagcgtgaaatttagcaaactgcttagtatcatcctctcaacgtggtttacagctgccgggtttattcatctggtagaaaatagcggagatccctggctgaaaggccgcaatagccagaacatctcctattttgaatcaatatatttggtgatggccacaacttccacggtcggcttcggtgacgtggttgccaaaacttcattggggcgcacctttattatgttctttacccttggatcgctgattctctttgctaattatattccagagatggtcgaattatttgcaaacaaaaggaaatatacttctagttatgaggctctaaaaggcaagaaattcatcgtcgtctgtgggaatatcaccgtggatagcgtgaccgctttcctgcggaatttcctccgcgataaatccggcgaaattaatacggagatagtttttctgggggagacccccccaagtctcgagctggaaacaattttcaagtgttacttggcgtacactacattcatctctggatccgccatgaaatgggaagacctgcggcgagtcgccgtggaatctgctgaagcttgtctgatcatcgcaaacccgctgtgttctgacagtcacgccgaagatatctccaacatcatgagagtgttatcaatcaagaactatgacagtacaacacgaattatcatacagatactgcagtcgcataataaggtatatctgccaaagattccatcttggaactgggacacaggtgataatatcatttgcttcgcagagcttaaactgggcttcatcgcccagggctgcctagtacccggtctgtgtacttttctcaccagtttgtttgtggagcagaacaagaaagtgatgcccaagcaaacttggaaaaaacactttctgaactctatgaaaaataaaatccttacacaacgcctatcagatgattttgcaggtatgagctttcctgaggttgctcgcttgtgcttcctgaagatgcatctgttgctgattgctattgagtacaaaagtctctttacggatgggttttgcggcctgatcctaaacccaccgccacaggtgcggatcaggaagaatacactcggtttcttcatcgcagaaacaccaaaggacgttcgcagggccctgttctattgcagtgtctgtcacgatgatgttttcattccagagcttattacaaattgtggatgtaagagcaggtcacggcagcatatcaccgtgcctagtgttaaaaggatgaaaaagtgtcttaagggtatttcctcgcggattagtggccaggattcacctccccgtgtgagcgctagcacatctagtatctccaatttcactacaaggaccctacaacatgatgtcgagcaagactcagatcagctggactctagtgggatgtttcattggtgtaagcccacttccctcgacaaagtgaccctgaagcggacaggcaaatctaagtacaaattcaggaatcatatagttgcatgtgtgtttggagacgcccactctgcgccgatgggccttcgcaacttcgtaatgccactgcgcgcatcaaattatactagaaaagaacttaaggacatcgtgtttatcggaagcttagactatctgcagcgcgagtggcgttttctttggaattttccccagatctatatcttgcctgggtgcgccctctattcgggcgatttgcacgccgccaatattgagcagtgttcgatgtgcgctgtgctcagcccaccgccgcaaccgtcctccaatcagacccttgtggataccgaggccattatggcaacattgactataggcagtctgcagattgactctagcagcgacccgtccccatcagtatctgaggaaacacctggctataccaatgggcataacgaaaaatcgaattgccggaaggtgcctattctgacagaactgaagaaccccagcaatatccactttattgaacaactgggcggccttgagggctccctccaagagaccaatttgcacctcagcactgccttctctaccggcacggtattttccgggagctttctcgattccctgcttgccaccgccttttataactaccacgtgttggagctgctccagatgctggttacgggcggtgtgtcctcgcagctcgagcagcacctggataaggataaagtctacggagttgctgatagctgcacatctctcttatcagggcgcaaccgctgtaaattgggactcctctcccttcatgaaaccattctgtccgacgtgaatcccaggaatacgtttggccagctgttctgcgggtccttggacctgttcggcattttatgtgtcggcctctaccgcatcatcgatgaagaagaattaaatccagagaataagaggttcgtcatcaccaggcctgctaacgagtttaaattgctgcctagtgacctggtgttttgcgcgatcccgttctctaccgcatgctataagagaaatgaggaattctctctacaaaagtcatacgaaattgtaaataaagcttctcaaaccaccgagacacattcagatacaaattgccctcccacaatcgactcggtgactgagactctgtacagtcccgtttactcttatcaaccgcggacaaattccttgtcatttcctaaacagatagcatggaaccaatccaggaccaactctatcatttcttcgcaaataccccttggcgacaacgctaaggagaatgaaagaaagacaagtgacgaggtgtacgacgaagacccattcgcctatagcgagcctctgtag

SEQ ID NO: 30067 - DNA, 3450 bp, Artificial Sequence
  derived and/or modified sequence
atgtttcagactaagctcaggaatgagacttgggaagacttgcccaagatgtcctgtaccacagaaatccaggccgcattcatcctgtcctcctttgtcaccttcttctctgggctgataatcctcctcatcttccggctcatctggagatccgtcaaaaagtggcaaattataaagggcaccggaattattctggaactgttcaccagtggtacgatagcccgaagccatgtgcgaagcctacactttcagggccaattccgtgaccacatcgagatgctactctctgcacagacattcgtggggcaggtcctggttattctggtcttcgtcctgtccatcggctccctgatcatttactttatcaactctgccgatcctgttggctcttgctcctcttatgaggacaagacaatccctattgacctggtttttaatgccttcttttcattttactttggacttcggtttatggccgctgatgacaaaattaagttctggctggagatgaactctatcgtagacatcttcaccatccccccaacatttatttcttattacctgaagtcaaattggctgggtctccgctttctgcgcgcactcagattattggagctgccccagattcttcaaattctgcgcgctataaaaacaagcaattctgtcaagttctcaaagctgctgtctataattctctccacgtggtttacagccgctggatttattcacttggtagagaacagtggcgacccctggctaaaggggcgtaatagtcaaaatatttcctacttcgagagcatctaccttgtgatggctacaaccagtaccgtgggattcggagatgtggtggcgaagacatccctcggcagaacatttatcatgtttttcaccctgggcagtctgatcctgttcgcaaactatatcccggaaatggtggagttgtttgccaataagcgcaagtatacgtcatcctatgaagccctcaaaggcaagaaatttatcgtggtctgtggcaatatcactgtggatagtgtaaccgcattcctgagaaatttccttagagacaaaagcggggagattaacacagagatcgttttccttggcgaaactccccctagcctcgagctggagacgatcttcaaatgctaccttgcctatactacctttatatcaggatccgcaatgaagtgggaagacctgagacgcgttgcggtggagtcggccgaagcgtgcctgattattgcgaacccactgtgttcggattcgcatgccgaggacatcagtaacatcatgcgggtgctctctatcaagaactacgacagcacaacacgaattatcatccagatcctccagtcccacaataaagtctatctgcccaaaatccccagctggaactgggataccggcgacaatatcatctgctttgccgagctcaagctgggctttatcgcccagggatgtcttgtgcccggtctctgcacattcctgacaagcctgttcgtggagcaaaacaaaaaggtgatgcccaaacagacatggaaaaagcacttcttaaacagcatgaaaaacaagatcctgacccaacgcctcagtgacgatttcgcgggaatgagttttccagaagtggccagattgtgcttcctgaaaatgcatcttttgctgatcgccattgagtataaaagtcttttcaccgacggcttctgcgggttaatactgaaccctccaccccaagttcgaattcggaagaacaccttgggcttcttcatcgccgagactcctaaggacgtgagacgcgcattgttttattgctcagtctgccatgacgatgtattcatccctgaactgatcacgaactgcggttgcaagtccagaagcaggcagcacataacggtcccttcagtcaagaggatgaaaaaatgtctgaaaggaatcagctctcgcattagcgggcaggatagtcctccaagggtgtctgcaagtacctcaagtataagcaatttcacaaccagaacactgcagcacgatgttgaacaggactccgaccagttagactcttcaggcatgtttcactggtgtaagccaacatccctggacaaagttactttaaagagaaccggcaaaagcaagtacaagttccggaatcatatagtggcttgcgtcttcggggacgcccacagcgccccaatggggctgcgaaattttgtgatgcctctccgcgcatccaactacacaaggaaggagctcaaggacattgtcttcatcgggtccctagattatttacagagggaatggcgttttttatggaattttccccagatttacattcttcccggatgcgccctctactcaggggacctgcatgcagcgaacatagagcagtgttctatgtgcgcggtgctctcccctcctcctcaacccagcagcaatcaaacattagttgacaccgaagcaattatggctactcttacaattggctctttacagatcgacagttcatcagatccttcccccagcgtatctgaggagactcctggctataccaatggtcacaacgaaaagagcaattgccgcaaagtccctatcctcacagaactgaagaatccaagcaatattcatttcattgagcagctgggtggccttgagggaagcttacaagaaaccaatctgcacttgtcgacggccttctctactgggactgtattctctggctcgttccttgactcactcctggctactgccttttacaattatcatgttctagagctcttacagatgctggtgacaggcggtgtgtcttcacagcttgagcagcatttagacaaggacaaggtctacggggtggccgatagttgtacctcacttctttccggtaggaatcgctgtaaactgggtctactgtcattgcacgagaccatcctttccgatgtaaaccccaggaatactttcggccagctgttctgtggctcgctggacctgttcggaatcctctgtgtgggactgtaccgaataattgacgaagaagagctgaaccctgaaaataaacggttcgtgattactcggccagcgaatgagtttaagctcctgccctcagacctggtcttctgtgccatcccttttagcaccgcatgttacaaaagaaatgaggaattcagcctccagaagtcctatgaaatcgtcaacaaggctagccagacaaccgagacacatagcgataccaactgtccacccactatagatagcgtgacagagactctctattctcccgtgtatagctatcagccacgcactaatagtctttcttttcctaaacagattgcctggaatcagagccgcaccaacagcattatttcttcacaaattcctttaggcgacaacgctaaggagaacgagagaaaaacatctgatgaggtgtacgacgaagatccttttgcttacagcgagccactttag

SEQ ID NO: 30068 - DNA, 3695 bp, Artificial Sequence
  derived and/or modified sequence
aaatgacctggcaattccgtctactgatgtctcgaacatgtttcagactaagctacgaaatgaaacttgggaagacttgccaaaaatgtcctgcacaactgagatccaagcagcattcattctctcttcctttgtgaccttcttcagtggactcatcatcctgttgatcttcaggctgatctggagatctgttaaaaaatggcaaatcatcaagggaacaggaattatcttggaactgttcacatcaggtaccatcgctaggagccatgtaagaagcctccacttccagggacaatttcgtgatcatatagaaatgttgctttcagcccagacctttgtggggcaagtgttggtgatccttgtctttgtactaagcattgggtctcttataatctatttcatcaattctgctgaccctgttggaagctgttcatcatatgaagacaaaaccattcctattgatttggttttcaatgctttctttagtttctattttggattgaggtttatggcagctgatgacaagatcaagttctggctggagatgaattcaatcgtagacatctttaccatcccaccaacctttatttcttattatttgaagagcaattggctaggtttaaggttcctaagagccttgcgcctgctagaactccctcaaatcttgcaaattctacgagccatcaagaccagtaactcagtgaagttttccaaactgctgtcaataattctcagtacctggttcacagctgcgggattcattcacctggtggaaaattctggtgatccctggctcaaaggtagaaattcacagaatatatcatattttgagtcaatttacctggtcatggcaacaacgtcaaccgttggatttggagatgtggtagccaagacatccttaggacggaccttcatcatgttcttcacactggggagtttgatattatttgcgaactatatacctgaaatggtggaactgtttgctaacaagaggaaatacaccagttcctatgaagcactcaaaggaaagaagtttattgtggtctgtggaaacatcactgtggacagtgtgaccgctttcctgaggaatttcctccgcgacaagtcaggagagatcaacactgaaattgttttcctgggagaaacccctccttctttggaacttgaaaccatatttaaatgctacttggcctacacaacgttcatttctggatctgcaatgaagtgggaggatctgaggcgagttgcggtggaatctgcagaggcatgcctgattatagccaatcctttgtgcagtgattcccatgctgaagatatttccaacattatgagggtgctctctatcaagaactatgattctaccaccagaatcatcatacagatactgcaatcccataacaaggtttatctgccaaagattcccagctggaactgggacaccggagacaacatcatctgctttgctgaattaaaacttggatttatcgcccaaggctgtttggtgccaggcttgtgtaccttcctaacatctctatttgtggagcaaaacaaaaaggttatgcctaaacagacctggaagaaacacttcttgaatagcatgaaaaacaaaattctgacccaacgtctctctgatgactttgctggaatgagctttcctgaagttgcccggctctgctttctgaagatgcacctcctgttgatagccatcgaatacaagtccctctttacggatggtttctgtggtctgatactaaatccacctccacaagtgaggatacgtaagaacacattagggttctttattgctgaaactccaaaggacgtcagaagagccttgttttactgttcagtctgtcatgatgatgtgttcattcctgagctaattacaaactgtggctgcaaaagcagaagccggcagcacatcacagtgccatcggtaaagagaatgaaaaaatgtctgaagggaatctcctctcgtatatcagggcaggattctccgccaagggtatctgcaagcacttcgagcatatcaaacttcaccaccaggactcttcaacatgatgtagaacaagattctgaccagcttgatagcagtgggatgtttcactggtgcaaaccaacctctttggacaaggtgactctgaaacgaactggcaagtcaaagtataagtttcggaaccatattgtagcatgtgtatttggagatgcccactcagccccgatggggcttcggaactttgtaatgcccttgagagccagcaactataccaggaaggagctgaaggacatagtgttcattgggtctctggactatctacagagagaatggcgatttctctggaattttccccagatatacattctgcctggatgtgcactttattctggagacctccatgcggccaacatagagcaatgctccatgtgtgctgtcttgtcccccccaccccagccatcaagcaaccagactttggtagacacagaagccatcatggcaaccctcaccatcggatccttgcaaattgactcctcctctgacccgtcaccctcagtgtcagaggagactccaggttacacaaatggacataatgagaaatcaaactgccgaaaagtccctatccttactgaactgaaaaatccttccaacattcactttattgaacagcttggtggactggaagggtccctccaagaaacaaatctgcatctcagcactgccttttctacgggcactgttttttccggcagcttcttggattctctgctggccacggccttctacaattatcatgtcctggaattgcttcagatgctggtgacaggaggagtaagttctcagctggaacaacatttagataaggataaagtctatggtgtggcagatagctgcacgtcgctcttgtctggaagaaaccggtgtaagctggggcttctgtccttacacgaaaccattttatcagacgttaatccaagaaacacctttggacaactgttctgtggctcattagatctttttggaatcctgtgtgttggcttataccgaataattgatgaagaggagctcaacccagaaaacaaaaggtttgtgatcacccggccagccaatgagttcaagctgctgccttcagatcttgtgttttgtgccatacccttcagcactgcttgttataaaaggaatgaagagttctcattgcaaaagtcatatgaaattgtaaataaagcatcacagacaacagagacacattcagacacaaattgtcctcccaccattgattcagttactgagacattgtattcaccagtctattcttaccagccgagaactaactccctctcttttcctaagcaaatagcatggaatcagagtagaacaaacagtattatatcatctcagatacctttaggtgacaatgcaaaagaaaatgaaaggaaaacttcagatgaggtttatgatgaggatccctttgcatattcagagccactatagacctgcccatattcttcacgtgctcttaacttgctgcttacaaatcatctcctgagatgctaactttgaacaaagaaaataagaatggaagcatgccatttttctgcccattgcttagtggttcatgaaggccacactgttttgggtgagacaaaagtctaatgccactggatcttgtgtgataaataaagaaatatatgatcaatgc

SEQ ID NO: 30069 - protein, 242 aa, Artificial Sequence
  derived and/or modified sequence
MDDLCEANGTFAISLFKILGEEDNSRNVFFSPMSISSALAMVFMGAKGSTAAQMSQALCLYKDGDIHRGFQSLLSEVNRTGTQYLLRTANRLFGEKTCDFLPDFKEYCQKFYQAELEELSFAEDTEECRKHINDWVAEKTEGKISEVLDAGTVDPLTKLVLVNAIYFKGKWNEQFDRKYTRGMLFKTNEEKKTVQMMFKEAKFKMGYADEVHTQVLELPYVEEELSMVILLPDDNTDLAVKE

SEQ ID NO: 30070 - protein, 124 aa, Artificial Sequence
  derived and/or modified sequence
MDDLCEANGTFAISLFKILGEEDNSRNVFFSPMSISSALAMVFMGAKGSTAAQMSQALCLYKDGDIHRGFQSLLSEVNRTGTQYLLRTANRLFGEKTCDFLPDFKEYCQKFYQAELEELSFAED

SEQ ID NO: 30071 - DNA, 729 bp, Artificial Sequence
  derived and/or modified sequence
atggatgatttatgtgaggcaaacggaacattcgcaatctcattgtttaagattcttggcgaagaggataattctcggaatgtgttctttagtcctatgtctataagctcggccctggccatggtgtttatgggcgctaaaggttccactgcagcacaaatgtcccaggctctctgtctctacaaggacggagatatacaccgtggattccagtctctgctcagcgaagtcaaccgtactggaacccaataccttctccgcaccgcgaacaggctgtttggcgaaaagacatgcgactttttgcccgactttaaagagtattgccagaagttctatcaagccgagctggaagaactctcctttgcagaggacaccgaagagtgccgcaaacacataaacgactgggtggctgagaagaccgaggggaaaatctctgaggtgctggatgccggaaccgtcgaccctttaaccaagctggtgctggtgaatgcgatctactttaaaggtaaatggaacgagcagttcgatcgaaagtatacaagagggatgttgtttaagaccaacgaggagaagaagactgtgcagatgatgttcaaggaggctaagttcaaaatggggtacgcggatgaggtgcatacgcaggtgcttgaattgccatacgtcgaagaagaacttagtatggttatcctgctgcccgacgataataccgatcttgccgtcaaggaatag

SEQ ID NO: 30072 - DNA, 495 bp, Artificial Sequence
  derived and/or modified sequence
atggacgatctgtgcgaggcaaatggaacatttgccatttcactgttcaaaattctgggagaagaagacaatagcagaaatgtattcttttcccctatgtccatctcatcagccctcgctatggtcttcatgggcgctaaaggaagtaccgccgcacagatgagccaggccctttgcttgtacaaggatggggacattcaccgtgggtttcagtccttactctcagaggtcaatagaacagggacacagtacctactccgcacagcaaaccgattatttggcgagaagacttgtgactttttgccagatttcaaggagtattgccaaaagttttaccaggccgagctcgaggagctaagctttgccgaggataccgaggaatgtcggaagcatattaacgactgggtggcagagaaaacagaaggaaagatatcagaagtgctggacgccgggactgttgatccccttaccaagctggtactcgtgaatgcttag

SEQ ID NO: 30073 - DNA, 375 bp, Artificial Sequence
  derived and/or modified sequence
atggacgacttatgcgaagccaatggtacgtttgcaatatcattgtttaaaatcttgggagaagaagacaatagtcgaaatgtattcttttcacccatgtccattagctcagcactggctatggtgttcatgggtgcgaaaggcagcaccgcggctcaaatgtcgcaagctctgtgcctgtataaggacggagatattcatcggggcttccagagcctgctcagcgaagtcaatcgcacaggaacgcagtacctgctcagaaccgccaaccgcctcttcggggaaaagacctgcgactttctccctgattttaaagagtattgtcaaaagttctaccaggcagagcttgaggagctcagtttcgcggaagattag

SEQ ID NO: 30074 - DNA, 729 bp, Artificial Sequence
  derived and/or modified sequence
atggatgacctgtgtgaggccaacggcacctttgccatcagcctcttcaagatcctgggggaggaggacaacagcagaaatgtgttcttcagccccatgagcatcagcagcgccctggccatggtgttcatgggcgccaagggcagcacagctgcccagatgagccaggccctgtgcctgtacaaggatggagacatccaccggggcttccagagcctgctgtctgaggtgaacagaacaggcacccagtacctgctgaggacagccaaccggctgtttggagagaagacctgtgacttcctgcctgacttcaaggagtactgccagaagttctaccaggccgagctggaggagctgagctttgctgaggacacagaagaatgtaggaagcacatcaatgactgggtggccgagaagacagagggcaagatcagcgaggtgctggatgctggcaccgtggaccccctgaccaagctggtgctggtgaatgccatctacttcaagggcaagtggaatgagcagtttgacaggaagtacacccggggcatgctgttcaagaccaatgaggagaagaagacagtgcagatgatgttcaaggaggccaagttcaagatgggctatgcagatgaggtgcacacccaggtgctggagctgccctacgtggaggaggagctgtccatggtgatcctgctgcctgatgacaacacagacctggccgtgaaggagtag

SEQ ID NO: 30075 - DNA, 495 bp, Artificial Sequence
  derived and/or modified sequence
atggatgacctgtgtgaggccaacggcacctttgccatcagcctcttcaagatcctgggggaggaggacaacagcagaaatgtgttcttcagccccatgagcatcagcagcgccctggccatggtgttcatgggcgccaagggcagcacagctgcccagatgagccaggccctgtgcctgtacaaggatggagacatccaccggggcttccagagcctgctgtctgaggtgaacagaacaggcacccagtacctgctgaggacagccaaccggctgtttggagagaagacctgtgacttcctgcctgacttcaaggagtactgccagaagttctaccaggccgagctggaggagctgagctttgctgaggacacagaagaatgtaggaagcacatcaatgactgggtggccgagaagacagagggcaagatcagcgaggtgctggatgctggcaccgtggaccccctgaccaagctggtgctggtgaatgcctag

SEQ ID NO: 30076 - DNA, 375 bp, Artificial Sequence
  derived and/or modified sequence
atggatgacctgtgtgaggccaacggcacctttgccatcagcctcttcaagatcctgggggaggaggacaacagcagaaatgtgttcttcagccccatgagcatcagcagcgccctggccatggtgttcatgggcgccaagggcagcacagctgcccagatgagccaggccctgtgcctgtacaaggatggagacatccaccggggcttccagagcctgctgtctgaggtgaacagaacaggcacccagtacctgctgaggacagccaaccggctgtttggagagaagacctgtgacttcctgcctgacttcaaggagtactgccagaagttctaccaggccgagctggaggagctgagctttgctgaagattag

SEQ ID NO: 30077 - DNA, 729 bp, Artificial Sequence
  derived and/or modified sequence
atggacgacctgtgcgaggccaacggcaccttcgccatcagcctgtttaaaatcctaggggaggaagataacagtcgcaatgtgttcttctcccctatgagcatttcatcagccctggcaatggtcttcatgggggccaaaggcagcaccgcagcacaaatgtctcaggccctatgcctgtataaagatggggatatccacagaggcttccagagtctgctgagtgaagtcaaccgcactggcacacagtatctgttgcggacggccaaccgcctgttcggggagaagacctgtgacttcctgcccgacttcaaggaatactgtcagaaattctaccaggccgaactggaggaattgtccttcgctgaagataccgaggaatgccggaagcacatcaacgactgggtcgcagaaaagacggagggcaaaatcagtgaagtgttggacgcaggcaccgtcgaccccctgactaaactggtgttggttaacgctatctattttaaaggcaaatggaacgagcagttcgaccgcaaatacactagaggcatgctattcaaaactaatgaagagaaaaaaaccgtgcagatgatgtttaaggaagctaagtttaaaatgggctatgctgatgaagttcacactcaggttctcgaactgccttacgtggaagaggaactgtctatggtgattctgctccctgatgacaatacagacttggctgtgaaggagtag

SEQ ID NO: 30078 - DNA, 495 bp, Artificial Sequence
  derived and/or modified sequence
atggacgacctgtgcgaggccaacggcaccttcgccatcagcctgtttaaaatccttggggaagaagataacagccgtaatgttttcttttctcctatgagcatctcctctgctcttgctatggtctttatgggggctaagggcagtaccgccgcacagatgtcgcaggcgctttgtctctacaaggatggtgacattcaccggggattccagtccctgctttctgaggtgaaccgtacagggactcagtatctgctcaggactgccaaccgcttgtttggggagaaaacgtgcgattttctcccggacttcaaagagtactgtcagaagttctatcaggctgagttagaagagctgagttttgccgaggacactgaggaatgtagaaagcatatcaacgactgggtggcagagaagaccgaggggaagattagcgaagttctcgacgccggcactgtcgatcccctgacaaaactggtattggtgaacgcatag

SEQ ID NO: 30079 - DNA, 375 bp, Artificial Sequence
  derived and/or modified sequence
atggacgacctgtgcgaggccaacggcaccttcgccatcagcctgtttaagattctgggtgaagaggacaattcccgaaatgtctttttctcacccatgagtatatcatctgccctcgctatggtattcatgggcgctaagggaagcactgccgcccagatgtctcaggcactgtgcctctacaaagacggcgacatccaccgtggtttccagtctctcctgagcgaggtgaaccgaaccggaactcagtacctgctccgcacggccaatagactcttcggcgagaaaacctgtgacttcctgcccgatttcaaggaatactgtcagaagttttaccaagctgaactggaagagcttagctttgctgaggattag

SEQ ID NO: 30080 - DNA, 729 bp, Artificial Sequence
  derived and/or modified sequence
atggatgacctatgcgaagcaaacggcacgttcgccataagcctctttaaaatactgggggaagaggacaactcccgtaatgtgttcttcagtcccatgtctattagctctgcccttgcgatggtgttcatgggcgctaaggggagcacagccgcacagatgagtcaggccctgtgcttatacaaggatggggacatccaccggggtttccagtcactcctgtccgaggtgaatcggaccgggacccaatacctcctcagaactgcaaaccggttgttcggagagaagacatgcgactttctgccagacttcaaagagtactgccaaaaattttaccaagccgagctggaggaactctccttcgcagaggatacagaagagtgcagaaagcacattaatgactgggtggccgaaaaaacagaaggcaaaatttcagaagtgctggacgccggaaccgtggatcccctgaccaagttggtcctggtcaatgctatatacttcaagggtaaatggaacgagcagtttgatcggaaatacaccaggggcatgctcttcaaaactaacgaagagaagaaaactgtacaaatgatgtttaaggaggcgaagttcaaaatgggttacgccgacgaagtccatactcaggtgcttgagctgccctacgtcgaagaagaactctctatggttatcctgctgcctgacgacaacactgatttggccgttaaggaatag

SEQ ID NO: 30081 - DNA, 495 bp, Artificial Sequence
  derived and/or modified sequence
atggatgacttgtgcgaggcaaacggaacctttgcaattagcctgttcaagatcctgggagaggaagacaattctcgcaatgtgtttttctcccctatgtctatttcctcggcactagccatggtgttcatgggtgctaaggggtcgactgcggctcagatgagtcaggcattatgtctatataaggacggtgacatccatcggggattccagtctcttctcagcgaagtaaatcgaacgggcacccagtacctgttgcggaccgccaacaggttatttggtgaaaaaacctgcgacttcctccctgacttcaaggagtactgtcagaaattttaccaagcagaactggaggagttgagtttcgccgaagatacggaagaatgccgtaaacacatcaatgattgggtggccgaaaaaactgaggggaaaataagcgaagtgctcgatgctggcacggtcgaccctctcacaaagttggtcttagtgaacgcctag

SEQ ID NO: 30082 - DNA, 375 bp, Artificial Sequence
  derived and/or modified sequence
atggatgacctttgtgaggccaatggtaccttcgctatctcgctttttaagattctgggtgaagaggataactccaggaacgtgtttttctctcccatgtctataagcagtgccctggccatggtatttatgggcgcaaaagggagtacagcagcccaaatgagccaggctttgtgtctgtataaagacggcgacatccaccgcggatttcagtccctactgtcagaagtgaatcggaccggtacgcagtatctgctgagaactgccaaccgtttattcggtgaaaagacctgtgatttcctcccagatttcaaggagtactgtcaaaagttctaccaggccgagctggaagagctgtcatttgcagaggactag

SEQ ID NO: 30083 - DNA, 1178 bp, Artificial Sequence
  derived and/or modified sequence
gtcaaagcagcagcggcggcggcggcggcggcagcagcagcagcagcaggagaccttctctgatggatgacctctgtgaagcaaatggcacttttgccatcagcttatttaaaatattgggggaagaggacaactcaagaaacgtattcttctctcccatgagcatctcctctgccctggccatggtcttcatgggggcaaagggaagcactgcagcccagatgtcccaggcactttgtttatacaaagacggagatattcaccgaggtttccagtcacttctcagtgaagttaacagaactggcactcagtacttgcttagaactgccaacagactctttggagaaaagacgtgtgatttccttccagactttaaagaatactgtcagaagttctatcaggcagagctggaggagttgtcctttgctgaagacactgaagagtgcaggaagcatataaatgactgggtggcagagaagactgaaggtaagatttcagaggtactggatgctgggacagtcgatcccctgacaaagctggtccttgtgaatgccatttatttcaagggaaagtggaatgagcaatttgacagaaagtacacaaggggaatgctctttaaaaccaacgaggaaaaaaagacagtgcagatgatgtttaaggaagctaagtttaaaatggggtatgcggatgaggtacacacccaggtcctggagctgccctatgtggaagaggagctgagcatggtcattctgcttcccgatgacaacacggacctcgccgtgaaagagtgatggatcttgaagaatttgaagctaactccaggacaggcagaggacaaacaaggatgctgatgaagtcttcttgcattccccatttctcgtctcatgctcccttctcatgcctcccttcatcttcagatgaaacacaattccctctcttttactctgagttgccctctgatttaaccctgaatagtcccctcattagactcagaagcagagttctgagccatgctctttgtcttttgtcaaacaatctctcccactcacagtagtatgtattgcatgaagattaatgtaatgaattggttagaattttctaaactgttaaaaaatgtttttaacatttgaaaggagttaggtacaaattgtttttattaaaaatttctgcctgtctca

SEQ ID NO: 30084 - DNA, 564 bp, Artificial Sequence
  derived and/or modified sequence
aggcttgcgatttgctgcgctgtgatttgctgccggatgggagcggggggtgacgcgagcaaccttctctgatggatgacctctgtgaagcaaatggcacttttgccatcagcttatttaaaatattgggggaagaggacaactcaagaaacgtattcttctctcccatgagcatctcctctgccctggccatggtcttcatgggggcaaagggaagcactgcagcccagatgtcccaggcactttgtttatacaaagacggagatattcaccgaggtttccagtcacttctcagtgaagttaacagaactggcactcagtacttgcttagaactgccaacagactctttggagaaaagacgtgtgatttccttccagactttaaagaatactgtcagaagttctatcaggcagagctggaggagttgtcctttgctgaagacactgaagagtgcaggaagcatataaatgactgggtggcagagaagactgaaggtaagatttcagaggtactggatgctgggacagtcgatcccctgacaaagctggtccttgtgaatgcca

SEQ ID NO: 30085 - DNA, 580 bp, Artificial Sequence
  derived and/or modified sequence
gtgcgtgagagaggggaagggaggaaggccagagcaggaatcagagcgaggcaaaggcgggcaggaactaggagaatgacggcgggaggcggccgggaaagagagtcgcggggctgtgggggtcgccctggcaccagccggggtcccaagccccaccgcgagacccggcgaaggccgagggccgggtcccgagaacagaccttctctgatggatgacctctgtgaagcaaatggcacttttgccatcagcttatttaaaatattgggggaagaggacaactcaagaaacgtattcttctctcccatgagcatctcctctgccctggccatggtcttcatgggggcaaagggaagcactgcagcccagatgtcccaggcactttgtttatacaaagacggagatattcaccgaggtttccagtcacttctcagtgaagttaacagaactggcactcagtacttgcttagaactgccaacagactctttggagaaaagacgtgtgatttccttccagactttaaagaatactgtcagaagttctatcaggcagagctggaggagttgtcctttgctgaagac

SEQ ID NO: 30086 - DNA, 729 bp, Artificial Sequence
  derived and/or modified sequence
atggacgacctgtgcgaggccaacggcaccttcgccatcagcctgttcaagatcctgggcgaggaggacaacagcagaaacgtgttcttcagccccatgagcatcagcagcgccctggccatggtgttcatgggcgccaagggcagcaccgccgcccagatgagccaggccctgtgcctgtacaaggacggcgacatccacagaggcttccagagcctgctgagcgaggtgaacagaaccggcacccagtacctgctgagaaccgccaacagactgttcggcgagaagacctgcgacttcctgcccgacttcaaggagtactgccagaagttctaccaggccgagctggaggagctgagcttcgccgaggacaccgaggagtgcagaaagcacatcaacgactgggtggccgagaagaccgagggcaagatcagcgaggtgctggacgccggcaccgtggaccccctgaccaagctggtgctggtgaacgccatctacttcaagggcaagtggaacgagcagttcgacagaaagtacaccagaggcatgctgttcaagaccaacgaggagaagaagaccgtgcagatgatgttcaaggaggccaagttcaagatgggctacgccgacgaggtgcacacccaggtgctggagctgccctacgtggaggaggagctgagcatggtgatcctgctgcccgacgacaacaccgacctggccgtgaaggagtag

SEQ ID NO: 30087 - DNA, 495 bp, Artificial Sequence
  derived and/or modified sequence
atggacgacctgtgcgaggccaacggcaccttcgccatcagcctgttcaagatcctgggcgaggaggacaacagcagaaacgtgttcttcagccccatgagcatcagcagcgccctggccatggtgttcatgggcgccaagggcagcaccgccgcccagatgagccaggccctgtgcctgtacaaggacggcgacatccacagaggcttccagagcctgctgagcgaggtgaacagaaccggcacccagtacctgctgagaaccgccaacagactgttcggcgagaagacctgcgacttcctgcccgacttcaaggagtactgccagaagttctaccaggccgagctggaggagctgagcttcgccgaggacaccgaggagtgcagaaagcacatcaacgactgggtggccgagaagaccgagggcaagatcagcgaggtgctggacgccggcaccgtggaccccctgaccaagctggtgctggtgaacgcctag

SEQ ID NO: 30088 - DNA, 375 bp, Artificial Sequence
  derived and/or modified sequence
atggacgacctgtgcgaggccaacggcaccttcgccatcagcctgttcaagatcctgggcgaggaggacaacagcagaaacgtgttcttcagccccatgagcatcagcagcgccctggccatggtgttcatgggcgccaagggcagcaccgccgcccagatgagccaggccctgtgcctgtacaaggacggcgacatccacagaggcttccagagcctgctgagcgaggtgaacagaaccggcacccagtacctgctgagaaccgccaacagactgttcggcgagaagacctgcgacttcctgcccgacttcaaggagtactgccagaagttctaccaggccgagctggaggagctgagcttcgccgaggactag

SEQ ID NO: 30089 - protein, 380 aa, Artificial Sequence
  derived and/or modified sequence
MRWLLLYYALCFSLSKASAHTVELNNMFGQIQSPGYPDSYPSDSEVTWNITVPDGFRIKLYFMHFNLESSYLCEYDYVKVETEDQVLATFCGRETTDTEQTPGQEVVLSPGSFMSITFRSDFSNEERFTGFDAHYMAVDVDECKEREDEELSCDHYCHNYIGGYYCSCRFGYILHTDNRTCRVECSDNLFTQRTGVITSPDFPNPYPKSSECLYTIELEEGFMVNLQFEDIFDIEDHPEVPCPYDYIKIKVGPKVLGPFCGEKAPEPISTQSHSVLILFHSDNSGENRGWRLSYRAAGNECPELQPPVHGKIEPSQAKYFFKDQVLVSCDTGYKVLKDNVEMDTFQIECLKDGTWSNKIPTCKKNEIDLESELKSEQVTE

SEQ ID NO: 30090 - DNA, 1143 bp, Artificial Sequence
  derived and/or modified sequence
atgagatggctcttactgtactacgccctctgctttagcctgtctaaggcatctgcccacaccgttgaactgaataacatgttcggacagattcagtctcctgggtatcctgactcctacccatccgattcagaggtcacctggaacatcactgtcccagatgggttcagaatcaaactgtactttatgcacttcaacctggaatcttcctatctgtgcgagtacgattatgtaaaggttgagacagaagaccaggtgctggctactttttgtggccgcgaaacaactgatacagaacagacccccggccaggaggtggtcctgagtcctggctcatttatgagtatcactttccggtctgatttctcaaacgaggaacggttcaccggcttcgatgcccattacatggcagtggatgtcgacgagtgcaaggagcgggaggacgaggaactctcttgtgaccattattgtcataattacattgggggctattactgttcttgtaggtttggctatattttacacacagacaatcgcacatgtagggttgaatgctctgataatcttttcacacagcggaccggggtcattacgagccccgattttcccaacccttaccccaaatctagtgaatgtctatataccattgagctggaagaaggttttatggtgaatctgcagtttgaggatatctttgacatcgaagaccaccctgaggtgccttgcccctatgactacattaagattaaagtgggtccaaaagtactgggccctttctgcggcgaaaaggcccctgaacctattagcacgcagtcacattccgtgctcatcctgtttcattctgacaattctggcgaaaatcggggctggagactttcttatagagccgcgggtaacgaatgtccagagcttcagccccctgtacatgggaaaattgaaccatctcaggccaagtatttcttcaaagaccaggtgctcgtgagttgcgacaccggttataaagtactgaaagataacgtggagatggatacctttcagatcgaatgtctgaaggacggcacttggtccaacaagatccctacgtgtaagaagaatgagatagatttagagtcggaattgaagtccgaacaagtgacagagtag

SEQ ID NO: 30091 - DNA, 1143 bp, Artificial Sequence
  derived and/or modified sequence
atgcgctggctgctgctgtactatgccctgtgcttcagcctgagcaaggccagcgcccacacagtggagctgaacaacatgtttggccagatccagagccctggctacccagacagctaccccagcgacagcgaggtgacctggaacatcaccgtgcctgatggcttccgcatcaagctgtacttcatgcacttcaacctggagagcagctacctgtgtgaatatgactatgtgaaggtggagacagaggaccaggtgctggccaccttctgtggccgggagaccacagacacagagcagaccccaggccaggaggtggtgctgagccctggcagcttcatgagcatcaccttcagaagtgacttcagcaatgaggagcgcttcaccggctttgatgcccactacatggctgtggatgtggatgagtgcaaggagagagaagatgaggagctgagctgtgaccactactgccacaactacatcggcggctactactgcagctgccgcttcggctacatcctgcacacagacaacagaacctgccgggtggagtgcagcgacaacctcttcacccagaggactggagtcatcaccagcccagacttccccaacccctaccccaagagcagtgaatgtctgtacaccatcgagctggaggagggcttcatggtgaacctgcagtttgaggacatctttgatattgaggaccaccctgaggtgccctgcccctatgactacatcaagatcaaggtgggccccaaggtgctgggccccttctgtggggagaaggcccctgagcccatcagcacccagagccacagcgtgctgatcctcttccacagcgacaacagcggggagaacagaggctggaggctgagctacagagctgctggaaatgaatgtcctgagctgcagccccctgtgcacggcaagattgagcccagccaggccaagtacttcttcaaggaccaggtgctggtgtcctgtgacaccggctacaaggtgctgaaggacaacgtggagatggacaccttccagatcgagtgcctgaaggatggcacctggagcaacaagatccccacctgcaagaagaatgaaattgacctggagagcgagctgaagtctgagcaggtgacagaatag

SEQ ID NO: 30092 - DNA, 2440 bp, Artificial Sequence
  derived and/or modified sequence
gccacacaggataaaggagggaagggaaggagcagatcttttcggtaggaagacagattttgttgtcaggttcctgggagtgcaagagcaagtcaaaggagagagagaggagagaggaaaagccagagggagagagggggagaggggatctgttgcaggcaggggaaggcgtgacctgaatggagaatgccagccaattccagagacacacagggacctcagaacaaagataaggcatcacggacaccacaccgggcacgagctcacaggcaagtcaagctgggaggaccaaggccgggcagccgggagcacccaaggcaggaaaatgaggtggctgcttctctattatgctctgtgcttctccctgtcaaaggcttcagcccacaccgtggagctaaacaatatgtttggccagatccagtcgcctggttatccagactcctatcccagtgattcagaggtgacttggaatatcactgtcccagatgggtttcggatcaagctttacttcatgcacttcaacttggaatcctcctacctttgtgaatatgactatgtgaaggtagaaactgaggaccaggtgctggcaaccttctgtggcagggagaccacagacacagagcagactcccggccaggaggtggtcctctcccctggctccttcatgtccatcactttccggtcagatttctccaatgaggagcgtttcacaggctttgatgcccactacatggctgtggatgtggacgagtgcaaggagagggaggacgaggagctgtcctgtgaccactactgccacaactacattggcggctactactgctcctgccgcttcggctacatcctccacacagacaacaggacctgccgagtggagtgcagtgacaacctcttcactcaaaggactggggtgatcaccagccctgacttcccaaacccttaccccaagagctctgaatgcctgtataccatcgagctggaggagggtttcatggtcaacctgcagtttgaggacatatttgacattgaggaccatcctgaggtgccctgcccctatgactacatcaagatcaaagttggtccaaaagttttggggcctttctgtggagagaaagccccagaacccatcagcacccagagccacagtgtcctgatcctgttccatagtgacaactcgggagagaaccggggctggaggctctcatacagggctgcaggaaatgagtgcccagagctacagcctcctgtccatgggaaaatcgagccctcccaagccaagtatttcttcaaagaccaagtgctcgtcagctgtgacacaggctacaaagtgctgaaggataatgtggagatggacacattccagattgagtgtctgaaggatgggacgtggagtaacaagattcccacctgtaaaaaaaatgaaatcgatctggagagcgaactcaagtcagagcaagtgacagagtgaatgacgggaccccacacaatgcagacatccagaaatggatcactcccaagacccctggggcccagagctgcaccacccctccccacccacaacacccccgtgcccctttccatgtggattagaatgggtgctgaacaacatgatctcagcagttgaagctgctacgtgtgtgaaagcaaattctccacttgagggtttgcccatcattcaaacactattccagaaaataatgaaaaaaaaatgtgggatttattttagcacctctgagtggactgtacttttctcaacggaaaaaaaaaatgcccttggtccttgagacaaaagatttaatatacaaccatgtggcctcaggctgaccagatcaaagtggtttctaatccattctacatgtcaagtttaaatgaaccagactgcctgtgactttatgaatctgaaggtattacctgttgctgctttcttaaccaccatgagtaggtaaagcaaataataactcacagagtgtggatttttgagaatctgaatgttttctcattcacaaaagtatcccttctacccctatctggcgcagggctgaaatgtcatcattagaggttctgtcttctggggcttacaagttctatgtttcttaaaattcgctgattaaaaattttaaaaagataggatcacacctgaaagcagtggtcccagctctgtgctgtgggacatcacaggtcctaaacagtgatagagaaagggctggggagtggcagctggaatctctgcttccgtctgaacatctggacacacatgtcagagaatctttgcattaaatggactgcccgatctatttggtgattaaatggctgtgcggtgaggggagaaccctgggcagtctggagactgaggtgccattctcggctagagacaccacccaaagaagagatgggctggctactaaagacaagtgtcagttgaataaatgtctttaaacct

SEQ ID NO: 30093 - DNA, 1143 bp, Artificial Sequence
  derived and/or modified sequence
atgcggtggctgctgctgtactacgccctgtgcttcagcctgagcaaggcctcagcacatacagttgaactcaacaatatgttcggccagatccagagccccgggtaccccgactcctatccatccgattccgaggttacctggaatataacagtgcccgacgggttcagaatcaaactgtactttatgcacttcaaccttgagagctcctatctgtgcgagtacgactacgtgaaagtggaaacagaggatcaggtcctcgccaccttctgcgggcgcgaaacaaccgacactgagcaaactcccggacaggaggtggttctgtcacctggttcatttatgtccatcacctttagaagcgatttttctaacgaggaacgcttcactggctttgatgcccactacatggcggtggatgttgatgaatgtaaggagagggaggacgaggaactgtcttgcgaccactactgccacaactatatcggggggtattattgcagctgtcgttttggatacatcctccacactgacaatcgaacctgtcgcgtagagtgttcagacaatctgtttactcagcgaaccggggtgattacttccccagacttccctaacccttaccccaagtcttcggagtgcctatacactattgaattggaggaaggcttcatggtgaatctgcagtttgaggacatatttgatatagaagaccacccagaggtaccctgtccctacgattatataaagatcaaagtgggcccgaaggtgctgggcccgttctgcggcgaaaaggcccccgaaccgattagcacacagtctcacagcgtcctgatcctcttccattctgacaactctggagagaatcgtggctggcgcctgtcctacagggccgcaggaaatgaatgtcctgaactgcaacctccagtacacggaaaaattgaaccgtcacaggccaaatactttttcaaagatcaggtgctggtgtcctgcgacactgggtataaggtactcaaagataacgtggaaatggatactttccaaattgagtgcttgaaggacggcacgtggtccaataagatccccacgtgtaaaaaaaatgagatcgatctggaaagtgagctgaagtcagagcaagtcactgaatag

SEQ ID NO: 30094 - DNA, 1143 bp, Artificial Sequence
  derived and/or modified sequence
atgagatggctattgctgtactatgccttatgtttcagcctgtctaaggcgtcagcccacacagtagagttgaacaacatgttcggccagattcaatctcctggctatcctgatagttacccgtcggatagcgaggtgacttggaatatcaccgtgcccgacggatttaggatcaaactctacttcatgcattttaacctggagtcatcttacctctgcgagtacgattatgtgaaagtggaaactgaggaccaggttctggctactttctgcgggagagagaccaccgacaccgaacagacaccaggccaggaggtggtgctcagcccaggttcctttatgagcatcacttttcgatcagactttagcaatgaagaacgctttacagggtttgacgcccactacatggccgtggatgtggacgagtgtaaggagcgcgaggacgaggagctgtcttgcgaccattattgtcacaattatataggaggctactactgttcctgccgatttggatatattctgcacaccgacaacagaacttgtcgcgtagagtgttctgacaacctgttcacccaaagaacaggcgtgattactagtccagattttcctaatccctatccaaagagctcagagtgcctctacacaatcgaattagaggaaggcttcatggtgaatctgcagtttgaagacattttcgatattgaagaccaccctgaagtgccgtgtccatacgactacattaagatcaaggtaggcccaaaggtattggggcctttttgcggtgaaaaggccccagaaccaatcagcacacagagtcactcggtgcttattttgtttcatagtgataattcaggtgagaaccgcggttggcgcctgtcctaccgggcagccggtaatgagtgtcccgagttgcagcctcccgtacacggaaagattgagcccagccaagctaagtatttcttcaaagaccaggtgctggtttcctgtgataccggctacaaagtgctcaaggacaacgtggagatggacacattccagattgagtgtctcaaggacggaacatggagcaacaagatccccacctgcaagaaaaatgaaatcgacctggaatcagagctgaagtcggagcaggtgacagaatag

SEQ ID NO: 30095 - DNA, 1143 bp, Artificial Sequence
  derived and/or modified sequence
atgaggtggctcctgctttattatgctctttgcttttccctgtcgaaggctagtgcccatacagttgaactcaataacatgttcggccagatacagtcaccaggatatccagactcctatccaagcgactcagaagtaacctggaatattactgttcccgacggctttcgtattaaactgtacttcatgcattttaatctagaaagctcctatttgtgcgaatacgactatgtaaaggtggagaccgaagaccaggtgctcgcaacattctgtgggagggagaccacagatactgagcagacccccggacaggaagttgtgctaagtccgggctctttcatgagcataacctttagaagtgacttctccaatgaggaaagatttacagggttcgatgcacattacatggccgtcgacgtggacgaatgtaaagaaagagaggacgaggagttatcttgcgaccactactgccacaattatataggaggatactactgctcttgtcgtttcgggtacatacttcatactgataatcgaacctgccgagtcgaatgtagtgataatttgttcacgcagcgtaccggtgtgattacctccccggactttcccaatccatatccaaagagcagcgagtgcctgtataccatcgagttggaagaaggctttatggtgaacctacagtttgaagacattttcgacatagaggatcacccagaagtgccatgcccctatgactacattaaaattaaggtcggacccaaggtgctagggccattttgcggcgagaaggcaccggaaccaattagcacacagtcgcattccgtgctgatcctgtttcattctgataacagcggagaaaacagaggatggagactcagctaccgcgccgccggaaatgaatgtcctgaactgcaacctcccgtacatgggaagattgaaccatcccaagcaaaatactttttcaaggaccaggtgcttgtgagttgcgacaccggctataaggtactcaaggataatgtcgaaatggatacatttcagatcgagtgcctgaaagacggtacatggtctaacaaaattcccacctgtaaaaagaatgaaattgacctagagtcagaactgaagagtgagcaggtcaccgagtag

SEQ ID NO: 30096 - DNA, 1143 bp, Artificial Sequence
  derived and/or modified sequence
atgagatggctgctactctattatgcactttgtttctccctatctaaggcttccgcccatacagtcgagctcaacaacatgttcggacaaattcaatcccccggttaccctgattcctaccccagtgacagcgaggtgacttggaatataacggtgcctgacggcttccggatcaaattgtactttatgcactttaacctggaaagcagttacctctgtgagtacgattacgttaaagtcgaaactgaagaccaagtccttgctactttctgcgggcgagaaacaactgacacagagcagacccctgggcaggaagtcgtcttgagtccaggttcattcatgtctatcacctttaggtcagacttttccaacgaggagcggttcacaggatttgatgctcactacatggccgtggatgtggatgagtgcaaagaaagagaagacgaggagctgtcttgcgatcactattgccacaattatattggcggatactactgctcatgcagatttgggtacatcttacacaccgataatcggacttgtagagtggagtgttctgataatttatttacgcagagaactggcgtcattacctcacctgactttcctaatccttatcctaaaagctctgagtgtttatatacgattgagttggaagagggctttatggtgaacctacaatttgaggacatttttgatattgaagaccaccccgaagtgccatgcccttacgattacattaagattaaagtgggacccaaagtcttaggcccattctgcggggaaaaagccccagagcctatttccacccagtcacacagcgtcctcattcttttccactccgacaattctggcgagaacaggggctggcggctgtcttaccgtgcagccggcaatgagtgtcccgaattgcaaccccctgtgcacggaaagattgagccctcacaggcaaagtactttttcaaagaccaggtcctggtgagctgcgatactggctataaagtcctgaaagacaacgttgaaatggatacattccagatagaatgcctcaaggacggtacatggagcaataagatccctacatgtaagaagaatgaaatcgatctggaaagtgaactcaaatctgagcaagttacagagtag

SEQ ID NO: 30097 - DNA, 1143 bp, Artificial Sequence
  derived and/or modified sequence
atgagatggctgctgctgtactacgccctgtgcttcagcctgagcaaggccagcgcccacaccgtggagctgaacaacatgttcggccagatccagagccccggctaccccgacagctaccccagcgacagcgaggtgacctggaacatcaccgtgcccgacggcttcagaatcaagctgtacttcatgcacttcaacctggagagcagctacctgtgcgagtacgactacgtgaaggtggagaccgaggaccaggtgctggccaccttctgcggcagagagaccaccgacaccgagcagacccccggccaggaggtggtgctgagccccggcagcttcatgagcatcaccttcagaagcgacttcagcaacgaggagagattcaccggcttcgacgcccactacatggccgtggacgtggacgagtgcaaggagagagaggacgaggagctgagctgcgaccactactgccacaactacatcggcggctactactgcagctgcagattcggctacatcctgcacaccgacaacagaacctgcagagtggagtgcagcgacaacctgttcacccagagaaccggcgtgatcaccagccccgacttccccaacccctaccccaagagcagcgagtgcctgtacaccatcgagctggaggagggcttcatggtgaacctgcagttcgaggacatcttcgacatcgaggaccaccccgaggtgccctgcccctacgactacatcaagatcaaggtgggccccaaggtgctgggccccttctgcggcgagaaggcccccgagcccatcagcacccagagccacagcgtgctgatcctgttccacagcgacaacagcggcgagaacagaggctggagactgagctacagagccgccggcaacgagtgccccgagctgcagccccccgtgcacggcaagatcgagcccagccaggccaagtacttcttcaaggaccaggtgctggtgagctgcgacaccggctacaaggtgctgaaggacaacgtggagatggacaccttccagatcgagtgcctgaaggacggcacctggagcaacaagatccccacctgcaagaagaacgagatcgacctggagagcgagctgaagagcgagcaggtgaccgagtag

SEQ ID NO: 30098 - protein, 424 aa, Artificial Sequence
  derived and/or modified sequence
MGPLSAPPCTQHITWKGLLLTASLLNFWNLPTTAQVIIEAKPPKVSEGKDVLLLVHNLPQNLTGYIWYKGQMTDLYHYITSYVVHGQIIYGPAYSGRETVYSNASLLIQNVTQEDAGSYTLHIIKRGDGTGGVTGYFTVTLYSETPKPSISSSNLNPREVMEAVRLICDPETPDASYLWLLNGQNLPMTHRLQLSKTNRTLYLFGVTKYIAGPYECEIRNPVSASRSDPVTLNLLPKLPMPYITINNLNPREKKDVLAFTCEPKSRNYTYIWWLNGQSLPVSPRVKRPIENRILILPSVTRNETGPYQCEIRDRYGGIRSNPVTLNVLYGPDLPRIYPSFTYYRSGENLDLSCFADSNPPAEYSWTINGKFQLSGQKLFIPQITTNHSGLYACSVRNSATGKEISKSMIVKVSGPCHGNQTESH

SEQ ID NO: 30099 - DNA, 1275 bp, Artificial Sequence
  derived and/or modified sequence
atgggaccactgtctgctcccccctgtacgcagcacattacctggaaaggactattgcttaccgcctctctgctaaacttttggaatctgcctaccacagctcaggtgattattgaggccaagccgccaaaagtttcagagggaaaagatgtgctactcttagtccataatcttcctcagaatctcaccgggtacatctggtacaaggggcagatgactgacctgtaccactatattactagttacgtggtccatggccagatcatctatgggcccgcgtacagcggccgcgagaccgtgtattcaaacgcgtcactgcttattcagaatgtcacgcaggaggatgctggatcgtacacccttcatattatcaagcgaggggacggaacaggcggcgtcaccggctactttaccgtaacactttactcggagacccctaagccgtctatctcttccagcaacctcaatccccgagaagttatggaagcggttcggcttatctgtgatcctgaaacacctgacgctagttacctgtggctcctcaatgggcagaacctgcccatgacacacagactgcagctatcgaagaccaaccggaccctctatctcttcggggtgactaaatacattgcaggcccctacgagtgcgagattcgaaaccctgtaagtgcctcaagaagtgacccagtgaccttgaatcttctgcctaaactgcccatgccatacatcaccatcaacaatttgaacccccgggaaaagaaggatgtgttagcttttacctgcgagcctaaaagtcgaaattacacatacatctggtggctcaacgggcagagcctccctgtgagcccccgcgtgaagagacctatcgagaaccgaatcttgatcctgccttccgtcacccggaacgaaactggtccttaccagtgcgagattcgggacagatatgggggtatccgtagtaacccagttactctgaatgtcctatacggcccagacttacctcgcatctaccccagcttcacctactatcgaagcggtgagaatcttgatctctcttgtttcgccgatagtaatcctcctgctgaatattcgtggacgatcaatggcaagttccagctgtctgggcaaaagctgttcattccccagataacaaccaaccactctgggctttatgcttgtagcgttagaaattccgccacgggaaaagagattagcaagtcaatgatcgtgaaagtctctggaccttgtcacggcaatcaaactgagtcccactag

SEQ ID NO: 30100 - DNA, 1275 bp, Artificial Sequence
  derived and/or modified sequence
atgggccccctgagcgccccaccctgcacccagcacatcacctggaagggcctgctgctgacagccagcctgctgaacttctggaacctgcccaccacagcccaggtgatcatcgaggccaagccacccaaggtgtctgagggcaaggatgtgctgctgctggtgcacaacctgccccagaacctgaccggctacatctggtacaagggccagatgacagacctgtaccactacatcaccagctatgtggtgcacggccagatcatctacggccctgcctacagcggccgggagaccgtgtacagcaatgccagcctgctgatccagaatgtgacccaggaggatgctggcagctacaccctgcacatcatcaagagaggagatggcaccggcggcgtgacaggctacttcaccgtgaccctgtacagcgagacccccaagcccagcatcagcagcagcaacctgaacccccgggaggtgatggaggccgtgcggctcatctgtgaccctgagaccccagatgccagctacctgtggctgctgaatggccagaacctgcccatgacccaccggctgcagctgagcaagaccaacagaaccctgtacctgtttggagtgaccaagtacatcgccggcccctatgaatgtgagatcagaaatcctgtgtctgccagcagaagtgaccctgtgaccctgaacctgctgcccaagctgcccatgccctacatcaccatcaacaacctgaacccccgggagaagaaggatgtgctggccttcacctgtgagcccaagagcaggaactacacctacatctggtggctgaatggccagagcctgcctgtgagcccccgggtgaagaggcccatcgagaaccgcatcctgatcctgcccagcgtgaccagaaatgagaccggcccctaccagtgtgagatccgggacagatatggaggcatccgcagcaaccctgtgaccctgaatgtgctgtatggccctgacctgccccgcatctaccccagcttcacctactacagaagtggagagaacctggacctgagctgctttgctgacagcaaccccccagctgagtacagctggaccatcaacgggaagttccagctgagcggccagaagctgttcatcccccagatcaccaccaaccacagcggcctgtatgcctgcagcgtgaggaacagcgccaccgggaaggagatcagcaagtccatgattgtgaaggtgtctggcccctgccacggcaaccagacagagagccactag

SEQ ID NO: 30101 - DNA, 1275 bp, Artificial Sequence
  derived and/or modified sequence
atgggccccctgagcgcccccccctgcacccagcacatcacctggaaaggtctgctgcttaccgcaagccttctgaacttttggaacttgcctacaacggcccaggttatcattgaagccaaaccacctaaggtgtcagagggcaaggatgtgctgctgctggttcataaccttccacagaacctgactggatacatatggtataagggccagatgaccgacttgtaccattatataaccagttacgtggtgcatggccagatcatctatgggccagcatactcaggtagagaaaccgtatatagcaatgcctctctgttaatccaaaatgttactcaggaagacgcgggcagctatacgctgcacattattaaacgaggcgatggcactggaggggtgacaggatacttcacggtaaccctgtattctgagacacccaagccttcaataagtagttctaatttgaatcctagagaagtcatggaggcggtcagactaatctgtgaccctgagacacccgatgcatcatatctgtggctgttgaatggtcagaatctcccgatgactcatcggttgcaactctccaagacaaataggacattgtacctcttcggagtgactaagtatatcgccggaccttacgagtgtgagattaggaacccagtctcggcctcaaggtccgaccctgtaaccttgaacctgcttcccaagcttccaatgccctatatcaccattaataatctgaatcccagagagaagaaggacgtgctcgcttttacctgtgagcctaagtcacggaactacacgtatatctggtggctgaacggccagagtctgcccgtgtcaccacgggtgaaaagacccatagagaaccgtatcctcatcctcccaagcgtgactcggaacgagacagggccctatcaatgcgagattagagaccggtatggcggtatacgtagtaatcctgtgactcttaatgtgctgtacggacctgatctcccgcggatctatccttcttttacatattatcgctctggcgaaaatttggacctctcctgcttcgccgattctaatccccctgccgagtacagttggaccatcaacggcaagttccagctgtcgggacaaaagctgtttatcccacagatcaccacaaatcactctgggctttacgcatgctcggtgaggaatagcgctactggcaaagaaatcagcaagtccatgatcgtgaaagtcagcggaccctgccatgggaaccaaacagagagtcactag

SEQ ID NO: 30102 - DNA, 1674 bp, Artificial Sequence
  derived and/or modified sequence
ctgctcaggaagtctctggatcctaggctcatctccacaggggagaacacacagacagcagagaccatgggacccctctcagcccctccctgcactcagcacatcacctggaaggggctcctgctcacagcatcacttttaaacttctggaacctgcccaccactgcccaagtaataattgaagccaagccacccaaagtttccgaggggaaggatgttcttctacttgtccacaatttgccccagaatcttactggctacatctggtacaaagggcaaatgacggacctctaccattacattacatcatatgtagtacacggtcaaattatatatgggcctgcctacagtggacgagaaacagtatattccaatgcatccctgctgatccagaatgtcacacaggaggatgcaggatcctacaccttacacatcataaagcgaggcgatgggactggaggagtaactggatatttcactgtcaccttatactcggagactcccaagccctccatctccagcagcaacttaaaccccagggaggtcatggaggctgtgcgcttaatctgtgatcctgagactccggatgcaagctacctgtggttgctgaatggtcagaacctccctatgactcacaggttgcagctgtccaaaaccaacaggaccctctatctatttggtgtcacaaagtatattgcaggaccctatgaatgtgaaatacggaacccagtgagtgccagccgcagtgacccagtcaccctgaatctcctcccgaagctgcccatgccttacatcaccatcaacaacttaaaccccagggagaagaaggatgtgttagccttcacctgtgaacctaagagtcggaactacacctacatttggtggctaaatggtcagagcctcccggtcagtccgagggtaaagcgacccattgaaaacaggatactcattctacccagtgtcacgagaaatgaaacaggaccctatcaatgtgaaatacgggaccgatatggtggcatccgcagtaacccagtcaccctgaatgtcctctatggtccagacctccccagaatttacccttcattcacctattaccgttcaggagaaaacctcgacttgtcctgctttgcggactctaacccaccggcagagtattcttggacaattaatgggaagtttcagctatcaggacaaaagctctttatcccccaaattactacaaatcatagcgggctctatgcttgctctgttcgtaactcagccactggcaaggaaatctccaaatccatgatagtcaaagtctctggtccctgccatggaaaccagacagagtctcattaatggctgccacaatagagacactgagaaaaagaacaggttgataccttcatgaaattcaagacaaagaagaaaaaaactcaatgttattggactaaataatcaaaaggataatgttttcataattttttattggaaaatgtgctgattcttggaatgttttattctccagatttatgaactttttttcttcagcaattggtaaagtatacttttgtaaacaaaaattgaaacatttgcttttgctctctatctgagtgccccagaattgggaaactattcatgagtattcataggtttatggtaataaagttatttgcacaagttcagtaagaa

SEQ ID NO: 30103 - DNA, 1275 bp, Artificial Sequence
  derived and/or modified sequence
atggggcctttgtcagcgccaccatgtactcagcacatcacctggaaaggtcttctcctgactgcttccttactgaacttttggaatctgcctaccactgcccaagtaatcatcgaggccaagccccctaaagtgagcgaaggaaaagatgtgttgctgttggtgcataacctcccacagaacttaacaggctacatctggtataaggggcagatgaccgatctatatcactatatcacaagctacgtggtccacggtcaaatcatctatggaccagcctactctggcagggaaaccgtgtatagtaatgctagccttctgatacagaacgtgacgcaggaagatgccggatcttacacactccatatcatcaagcggggagacgggacgggcggagttactggatattttaccgtgacactctattctgagacacctaagcctagcatctctagcagtaatctaaacccacgggaggtcatggaggccgtgcgcctaatttgtgacccagagacacccgatgccagttacctgtggcttctcaacggccaaaatttgccaatgacccaccgactgcagctgtctaaaactaatcggaccttatatcttttcggagtcaccaagtatatcgcaggaccatatgaatgcgagattagaaaccccgtctccgcctcacgctctgatcctgtgacattgaatcttctccccaagctgccaatgccttatataacgatcaacaatctgaaccctcgagagaaaaaggacgtgttggcattcacttgtgagccaaagtctcggaactacacttacatctggtggctcaatggacagagtcttcccgtgtcgcccagagtcaaaagacccatcgagaatcgcatactgattttgccatccgtcacaagaaatgaaacagggccttaccaatgcgagattcgagaccggtacggaggcattaggtcaaacccagtcaccctcaatgtgctctacggtcctgacctcccaaggatttatcccagttttacctactatagatcaggtgagaacctggatctctcctgctttgccgacagcaatccacccgctgagtactcatggaccatcaatggaaagttccagttgagtggccaaaaactgttcatcccccaaattacaactaaccactcaggcctctatgcctgttccgtgagaaacagcgccaccggcaaagagatcagcaagtcaatgattgtgaaagtgtctggtccatgccatgggaaccaaactgagagccattag

SEQ ID NO: 30104 - DNA, 1275 bp, Artificial Sequence
  derived and/or modified sequence
atgggccccctgagcgcccccccctgcacccagcacatcacctggaagggcctgctgctgaccgccagcctgctgaacttctggaacctgcccaccaccgcccaggtgatcatcgaggccaagccccccaaggtgagcgagggcaaggacgtgctgctgctggtgcacaacctgccccagaacctgaccggctacatctggtacaagggccagatgaccgacctgtaccactacatcaccagctacgtggtgcacggccagatcatctacggccccgcctacagcggcagagagaccgtgtacagcaacgccagcctgctgatccagaacgtgacccaggaggacgccggcagctacaccctgcacatcatcaagagaggcgacggcaccggcggcgtgaccggctacttcaccgtgaccctgtacagcgagacccccaagcccagcatcagcagcagcaacctgaaccccagagaggtgatggaggccgtgagactgatctgcgaccccgagacccccgacgccagctacctgtggctgctgaacggccagaacctgcccatgacccacagactgcagctgagcaagaccaacagaaccctgtacctgttcggcgtgaccaagtacatcgccggcccctacgagtgcgagatcagaaaccccgtgagcgccagcagaagcgaccccgtgaccctgaacctgctgcccaagctgcccatgccctacatcaccatcaacaacctgaaccccagagagaagaaggacgtgctggccttcacctgcgagcccaagagcagaaactacacctacatctggtggctgaacggccagagcctgcccgtgagccccagagtgaagagacccatcgagaacagaatcctgatcctgcccagcgtgaccagaaacgagaccggcccctaccagtgcgagatcagagacagatacggcggcatcagaagcaaccccgtgaccctgaacgtgctgtacggccccgacctgcccagaatctaccccagcttcacctactacagaagcggcgagaacctggacctgagctgcttcgccgacagcaacccccccgccgagtacagctggaccatcaacggcaagttccagctgagcggccagaagctgttcatcccccagatcaccaccaaccacagcggcctgtacgcctgcagcgtgagaaacagcgccaccggcaaggagatcagcaagagcatgatcgtgaaggtgagcggcccctgccacggcaaccagaccgagagccactag

SEQ ID NO: 30105 - protein, 579 aa, Artificial Sequence
  derived and/or modified sequence
MRRPPGNGEAASEGPGGWGLWGVQESRRLCCAGHDRCKQALLQIGINMMALPGGRHLDSVTLPGQRLHLMQVDSVQRWMEDLKLMTECECMCVLQAKPISLEEDAQGDLILAGGPGPGDPLQLLLKRGWVISTELRRIGQKLAQDRWARVHSMSVRLTCHARSMVSEYSAVSRNSLKEMGEIEKLLMEKCSELSAVTERCLQVENEHVLKSMKACVSETLSMLGQHFGQLLELALTREVQALVRKIDASDNIYTTESTTGNLFSLTQEGAPLCRIIAKEGGVVALFKVCRQDSFRCLYPQALRTLASICCVEEGVHQLEKVDGVLCLADILTDNSHSEATRAEAAAVVAQVTSPHLPVTQHLSSFLESMEEIVTALVKLCQEASSGEVFLLASAALANITFFDTMACEMLLQLNAIRVLLEACSDKQRVDTPYTRDQIVTILANMSVLEQCASDIIQENGVQLIMGMLSEKPRSGTPAEVAACERVQQKAAVTLARLSRDPDVAREAVRLSCMSRLIELCRSPSERNSSDAVLVACLAALRRLAGVCPEGLQDSDFQQLVQPRLVDSFLLCSNMEESFV

SEQ ID NO: 30106 - DNA, 1740 bp, Artificial Sequence
  derived and/or modified sequence
atgcgacgacctcccggcaacggggaagctgcgtcggaaggaccgggcggatgggggctgtggggcgtacaggaaagtcgacgactgtgttgtgccggccacgatcgctgtaagcaggcattgctgcagatcggaattaacatgatggcgctgccaggtggcagacaccttgatagcgtaactctcccaggacagcgactgcaccttatgcaggtcgattcagtccagaggtggatggaggacctgaagctgatgaccgaatgcgagtgtatgtgcgttcttcaagccaagcctataagcttggaagaggacgctcagggtgacctgatactagccggaggcccagggccgggtgacccactccagttgttactgaagagggggtgggtaatatctactgaactgcgtcgaattggacaaaagttagcccaagacaggtgggctagggtgcacagcatgagcgtcaggttgacatgccacgctcgctcaatggtgtctgaatatagcgctgtgtcaaggaatagccttaaagaaatgggagagatcgaaaagttgctgatggagaaatgctctgaattgtctgcggtgaccgaaagatgtctgcaagtggaaaatgaacacgtgcttaaatcgatgaaggcttgcgtaagtgaaactctgtctatgctgggacaacacttcgggcagcttctcgaattggcactaacgcgagaggttcaggccttggtgagaaagatagacgcatcagataatatctacactacagaaagtaccactggcaatctgttctctctgactcaggagggcgctcctctatgtcgtataatcgctaaagaggggggggtggtcgccctcttcaaagtgtgccgccaggactcttttaggtgtctctatccccaagctctgagaacactggcctctatttgctgcgtggaggagggcgtgcatcagctggaaaaagtcgacggggtgttgtgccttgctgatatcctcaccgacaacagccatagtgaagccactcgagctgaagcagccgcagtagtggcgcaggtcacgagcccccaccttccagtcactcagcatctgtctagcttcctggagagtatggaggaaatcgttacagctctggtgaaattatgtcaggaggcctcatccggtgaagtgttccttctcgcatctgcagctcttgctaacattacgtttttcgacacaatggcctgtgagatgctattgcagttgaatgctattcgcgtcctgttggaagcttgctccgacaaacaacgggtagatacaccatacacacgcgatcaaattgtcacgatcctcgccaacatgtcagtgttagaacagtgcgcctccgatataatccaagaaaacggcgtgcaattgatcatggggatgcttagtgaaaagccccgcagtggcacgcccgcagaggtggcggcttgtgagagggtccagcagaaggcagccgtcaccctcgcccggctgagccgcgatcccgacgtcgctcgagaagccgttcgtcttagttgcatgtctcgtttgatcgaactctgtagatccccctccgaacgcaactcaagcgacgcagtgctcgtggcttgcttggctgcgctcagacggctcgcaggcgtgtgcccagagggccttcaggattctgacttccagcagctggtgcagcctaggctggtggactcctttttgctctgcagtaatatggaggaatcttttgtatag

SEQ ID NO: 30107 - DNA, 2954 bp, Artificial Sequence
  derived and/or modified sequence
ggcctctgtaaggagacttggagtcgctgcagccaaggctggagccatgagacggccccctggcaatggagaggcggccagcgaaggtccaggtggctggggtctatggggagtccaggagtccaggaggctgtgctgtgccggtcacgaccgctgcaagcaggctttgctgcagattgggatcaacatgatggcactgcctggaggtcgccacctggactccgtcaccctgccgggtcagcggctacacctgatgcaggtggactcagtccagcgctggatggaagatctgaagctcatgaccgagtgcgagtgcatgtgtgtcctgcaggccaagcccatcagcctggaagaggatgcacagggtgacctcatcctggcaggtggccctggccctggagaccccctgcagctgctgctcaaacggggttgggtcattagcacagagctgcgcaggatcgggcagaagctggcccaggaccgctgggcacgggtgcacagcatgagcgtgcgtctgacctgccatgcccgctccatggtcagcgagtacagtgctgtcagcaggaactccttgaaggaaatgggcgagattgagaagctgctaatggagaaatgctcggagctctcggcagtcacagagaggtgccttcaggttgagaatgagcatgtcctgaagtcaatgaaggcctgcgtgagtgagaccctgagcatgctgggccagcactttggtcagctgctggagctggccctgacacgggaggttcaggcactggtgagaaaaattgatgcctcagacaatatctacaccacagagtccaccacagggaacctgttcagcctgacccaggagggggctcccttgtgccgcatcatagccaaggagggtggggtcgtagcactcttcaaggtttgccggcaggacagtttccggtgcttgtacccccaggcgctccgcacgctggcctccatctgctgcgtggaagagggtgtccaccagctggagaaggtggatggcgttctgtgcttggccgacatcctgaccgacaacagccactcagaggccacacgggctgaggctgcggctgtggtggcccaggtcacctccccacacctgcccgtcacccagcacctcagtagcttcctggagagcatggaggagatcgtgacagccctcgtcaaactgtgccaagaggcctcatcaggggaagtcttcctactggcctctgcggcccttgccaacatcacgttctttgacacaatggcctgcgagatgctcctgcagttgaatgccatccgtgttctcctggaagcctgcagtgacaagcagagagtggacacgccttacactcgggaccagattgtgaccatcttggcaaacatgtctgtcctagaacagtgtgcctctgacatcattcaggaaaatggggtccagcttatcatgggcatgctgtctgaaaaaccaaggtctgggactcctgctgaagtggcagcctgtgagcgagtccagcagaaagctgcagtgaccctggctcgtctcagccgagacccagatgtggcacgggaggccgtgcggctcagctgcatgtcccgtctcatcgagctctgcagatccccatcagagaggaacagcagtgacgccgtgcttgtggcctgcctggctgctctgcgtagattggctggggtctgccctgaaggcctccaggactctgactttcagcagttggtccagcctcggctggtggactccttcttactctgcagcaacatggaggagagttttgtgtagtgagtgtgggcgaagaaatacatttggctgttctcacaccccctctgactatgcaccagtgaacacatctgagtacataccagctctcctcatcttcttatttatacttaacttatttttgtgtgaaataaatggaggacaaaatcttagagcaacatcatcaaacagtctttggtccttgagaatcttctttgtgttttattttttgatttctgtagcttttcagttgcagatgttgaaattcgtaatgacaaatatgacaaattgtcatgggtgattccacttcatcttattttttctactctcactatacaatcttgcctcattttttaaaactttggaaccagaggatttcaactgcctagcaagttttttttttaagttggatttgctcttcccaaaaatctaaaatgaatttaataattgggtagaatatattggaaagaagtttctttttctttaataaatggaatcatataaaatgtatcccggattttcttattaaattgtattttaaactaggttcttgcttcccaggtttcattccccaaaaacttttccaaccattaaaagtacacacagaattgtcttgttttcataggtgtataaataggttaagttctgagtgacttagtgagaaaccaaagtgactttcaaaaatacacccaaaggcaccagaaaccctgcttcctttggcttctttgcttttgtgtaacctcctgttcacctcctggtgaatagaatcctcagatgaggcttattgaatgattgattcctcctcaaaagtatacttgaaagcagtggtgtgctgaagccagctcatgcccactcacaagggacaactgtgagaatttcttcctaactctgcactcagtgaccttgcgttggtagccatgagctacttcatgagccctcatgttgaaattggccatagtgggagtatttacaccacagaaattcacagatgctataaagcacagctttcgctttttttttttttagagagagctggtttaccaatttcactgcttgaaagtatcacaaaaatctggggatccttttgaaaatataaatgccatcatattgtgatataatttatacaatataatataattgtgtaaaatcatgattataataatgtttcaataaacatttcttaaattcccaa

SEQ ID NO: 30108 - DNA, 2878 bp, Artificial Sequence
  derived and/or modified sequence
tctggagctccagctgcgccccgccaccactggccgctcgcactaccagcctgtctcgcacgctaaggtcacgaccgctgcaagcaggctttgctgcagattgggatcaacatgatggcactgcctggaggtcgccacctggactccgtcaccctgccgggtcagcggctacacctgatgcaggtggactcagtccagcgctggatggaagatctgaagctcatgaccgagtgcgagtgcatgtgtgtcctgcaggccaagcccatcagcctggaagaggatgcacagggtgacctcatcctggcaggtggccctggccctggagaccccctgcagctgctgctcaaacggggttgggtcattagcacagagctgcgcaggatcgggcagaagctggcccaggaccgctgggcacgggtgcacagcatgagcgtgcgtctgacctgccatgcccgctccatggtcagcgagtacagtgctgtcagcaggaactccttgaaggaaatgggcgagattgagaagctgctaatggagaaatgctcggagctctcggcagtcacagagaggtgccttcaggttgagaatgagcatgtcctgaagtcaatgaaggcctgcgtgagtgagaccctgagcatgctgggccagcactttggtcagctgctggagctggccctgacacgggaggttcaggcactggtgagaaaaattgatgcctcagacaatatctacaccacagagtccaccacagggaacctgttcagcctgacccaggagggggctcccttgtgccgcatcatagccaaggagggtggggtcgtagcactcttcaaggtttgccggcaggacagtttccggtgcttgtacccccaggcgctccgcacgctggcctccatctgctgcgtggaagagggtgtccaccagctggagaaggtggatggcgttctgtgcttggccgacatcctgaccgacaacagccactcagaggccacacgggctgaggctgcggctgtggtggcccaggtcacctccccacacctgcccgtcacccagcacctcagtagcttcctggagagcatggaggagatcgtgacagccctcgtcaaactgtgccaagaggcctcatcaggggaagtcttcctactggcctctgcggcccttgccaacatcacgttctttgacacaatggcctgcgagatgctcctgcagttgaatgccatccgtgttctcctggaagcctgcagtgacaagcagagagtggacacgccttacactcgggaccagattgtgaccatcttggcaaacatgtctgtcctagaacagtgtgcctctgacatcattcaggaaaatggggtccagcttatcatgggcatgctgtctgaaaaaccaaggtctgggactcctgctgaagtggcagcctgtgagcgagtccagcagaaagctgcagtgaccctggctcgtctcagccgagacccagatgtggcacgggaggccgtgcggctcagctgcatgtcccgtctcatcgagctctgcagatccccatcagagaggaacagcagtgacgccgtgcttgtggcctgcctggctgctctgcgtagattggctggggtctgccctgaaggcctccaggactctgactttcagcagttggtccagcctcggctggtggactccttcttactctgcagcaacatggaggagagttttgtgtagtgagtgtgggcgaagaaatacatttggctgttctcacaccccctctgactatgcaccagtgaacacatctgagtacataccagctctcctcatcttcttatttatacttaacttatttttgtgtgaaataaatggaggacaaaatcttagagcaacatcatcaaacagtctttggtccttgagaatcttctttgtgttttattttttgatttctgtagcttttcagttgcagatgttgaaattcgtaatgacaaatatgacaaattgtcatgggtgattccacttcatcttattttttctactctcactatacaatcttgcctcattttttaaaactttggaaccagaggatttcaactgcctagcaagttttttttttaagttggatttgctcttcccaaaaatctaaaatgaatttaataattgggtagaatatattggaaagaagtttctttttctttaataaatggaatcatataaaatgtatcccggattttcttattaaattgtattttaaactaggttcttgcttcccaggtttcattccccaaaaacttttccaaccattaaaagtacacacagaattgtcttgttttcataggtgtataaataggttaagttctgagtgacttagtgagaaaccaaagtgactttcaaaaatacacccaaaggcaccagaaaccctgcttcctttggcttctttgcttttgtgtaacctcctgttcacctcctggtgaatagaatcctcagatgaggcttattgaatgattgattcctcctcaaaagtatacttgaaagcagtggtgtgctgaagccagctcatgcccactcacaagggacaactgtgagaatttcttcctaactctgcactcagtgaccttgcgttggtagccatgagctacttcatgagccctcatgttgaaattggccatagtgggagtatttacaccacagaaattcacagatgctataaagcacagctttcgctttttttttttttagagagagctggtttaccaatttcactgcttgaaagtatcacaaaaatctggggatccttttgaaaatataaatgccatcatattgtgatataatttatacaatataatataattgtgtaaaatcatgattataataatgtttcaataaacatttcttaaattcccaa

SEQ ID NO: 30109 - DNA, 2750 bp, Artificial Sequence
  derived and/or modified sequence
tctggagctccagctgcgccccgccaccactggccgctcgcactaccagcctgtctcgcacgctaaggtcacgaccgctgcaagcaggctttgctgcagattgggatcaacatgatggcactgcctggaggtcgccacctggactccgtcaccctgccgggtcagcggctacacctgatgcaggtggactcagtccagcgctggatggaagatctgaagctcatgaccgagtgcgagtgcatgtgtgtcctgcaggccaagcccatcagcctggaagaggatgcacagggtgacctcatcctggcaggtggccctggccctggagaccccctgcagctgctgctcaaacggggttgggtcattagcacagagctgcgcaggatcgggcagaagctggcccaggaccgctgggcacgggtgcacagcatgagcgtgcgtctgacctgccatgcccgctccatggtcagcgagtacagtgctgtcagcaggaactccttgaaggaaatgggcgagattgagaagctgctaatggagaaatgctcggagctctcggcagtcacagagaggtgccttcaggttgagaatgagcatgtcctgaagtcaatgaaggcctgcgtgagtgagaccctgagcatgctgggccagcactttggtcagctgctggagctggccctgacacgggaggttcaggcactggtgagaaaaattgatgcctcagacaatatctacaccacagagtccaccacagggaacctgttcagcctgacccaggagggggctcccttgtgccgcatcatagccaaggtggatggcgttctgtgcttggccgacatcctgaccgacaacagccactcagaggccacacgggctgaggctgcggctgtggtggcccaggtcacctccccacacctgcccgtcacccagcacctcagtagcttcctggagagcatggaggagatcgtgacagccctcgtcaaactgtgccaagaggcctcatcaggggaagtcttcctactggcctctgcggcccttgccaacatcacgttctttgacacaatggcctgcgagatgctcctgcagttgaatgccatccgtgttctcctggaagcctgcagtgacaagcagagagtggacacgccttacactcgggaccagattgtgaccatcttggcaaacatgtctgtcctagaacagtgtgcctctgacatcattcaggaaaatggggtccagcttatcatgggcatgctgtctgaaaaaccaaggtctgggactcctgctgaagtggcagcctgtgagcgagtccagcagaaagctgcagtgaccctggctcgtctcagccgagacccagatgtggcacgggaggccgtgcggctcagctgcatgtcccgtctcatcgagctctgcagatccccatcagagaggaacagcagtgacgccgtgcttgtggcctgcctggctgctctgcgtagattggctggggtctgccctgaaggcctccaggactctgactttcagcagttggtccagcctcggctggtggactccttcttactctgcagcaacatggaggagagttttgtgtagtgagtgtgggcgaagaaatacatttggctgttctcacaccccctctgactatgcaccagtgaacacatctgagtacataccagctctcctcatcttcttatttatacttaacttatttttgtgtgaaataaatggaggacaaaatcttagagcaacatcatcaaacagtctttggtccttgagaatcttctttgtgttttattttttgatttctgtagcttttcagttgcagatgttgaaattcgtaatgacaaatatgacaaattgtcatgggtgattccacttcatcttattttttctactctcactatacaatcttgcctcattttttaaaactttggaaccagaggatttcaactgcctagcaagttttttttttaagttggatttgctcttcccaaaaatctaaaatgaatttaataattgggtagaatatattggaaagaagtttctttttctttaataaatggaatcatataaaatgtatcccggattttcttattaaattgtattttaaactaggttcttgcttcccaggtttcattccccaaaaacttttccaaccattaaaagtacacacagaattgtcttgttttcataggtgtataaataggttaagttctgagtgacttagtgagaaaccaaagtgactttcaaaaatacacccaaaggcaccagaaaccctgcttcctttggcttctttgcttttgtgtaacctcctgttcacctcctggtgaatagaatcctcagatgaggcttattgaatgattgattcctcctcaaaagtatacttgaaagcagtggtgtgctgaagccagctcatgcccactcacaagggacaactgtgagaatttcttcctaactctgcactcagtgaccttgcgttggtagccatgagctacttcatgagccctcatgttgaaattggccatagtgggagtatttacaccacagaaattcacagatgctataaagcacagctttcgctttttttttttttagagagagctggtttaccaatttcactgcttgaaagtatcacaaaaatctggggatccttttgaaaatataaatgccatcatattgtgatataatttatacaatataatataattgtgtaaaatcatgattataataatgtttcaataaacatttcttaaattccc

SEQ ID NO: 30110 - DNA, 1576 bp, Artificial Sequence
  derived and/or modified sequence
ccatcctgccctctattttcagggtcacgaccgctgcaagcaggctttgctgcagattgggatcaacatgatggcactgcctggaggtcgccacctggactccgtcaccctgccgggtcagcggctacacctgatgcaggtggactcagtccagcgctggatggaagatctgaagctcatgaccgagtgcgagtgcatgtgtgtcctgcaggccaagcccatcagcctggaagaggatgcacagggtgacctcatcctggcaggtggccctggccctggagaccccctgcagctgctgctcaaacggggttgggtcattagcacagagctgcgcaggatcgggcagaagctggcccaggaccgctgggcacgggtgcacagcatgagcgtgcgtctgacctgccatgcccgctccatggtcagcgagtacagtgctgtcagcaggaactccttgaaggaaatgggcgagattgagaagctgctaatggagaaatgctcggagctctcggcagtcacagagaggtgccttcaggttgagaatgagcatgtcctgaagtcaatgaaggcctgcgtgagtgagaccctgagcatgctgggccagcactttggtcagctgctggagctggccctgacacgggaggttcaggcactggtgagaaaaattgatgcctcagacaatatctacaccacagagtccaccacagggaacctgttcagcctgacccaggagggggctcccttgtgccgcatcatagccaaggtggatggcgttctgtgcttggccgacatcctgaccgacaacagccactcagaggccacacgggctgaggctgcggctgtggtggcccaggtcacctccccacacctgcccgtcacccagcacctcagtagcttcctggagagcatggaggagatcgtgacagccctcgtcaaactgtgccaagaggcctcatcaggggaagtcttcctactggcctctgcggcccttgccaacatcacgttctttgacacaatggcctgcgagatgctcctgcagttgaatgccatccgtgttctcctggaagcctgcagtgacaagcagagagtggacacgccttacactcgggaccagattgtgaccatcttggcaaacatgtctgtcctagaacagtgtgcctctgacatcattcaggaaaatggggtccagcttatcatgggcatgctgtctgaaaaaccaaggtctgggactcctgctgaagtggcagcctgtgagcgagtccagcagaaagctgcagtgaccctggctcgtctcagccgagacccagatgtggcacgggaggccgtgcggctcagctgcatgtcccgtctcatcgagctctgcagatccccatcagagaggaacagcagtgacgccgtgcttgtggcctgcctggctgctctgcgtagattggctggggtctgccctgaaggcctccaggactctgactttcagcagttggtccagcctcggctggtggactccttcttactctgcagcaacatggaggagagttttgtgtagtgagtgtgggcgaagaaatacatttggctgttctca

SEQ ID NO: 30111 - DNA, 1702 bp, Artificial Sequence
  derived and/or modified sequence
ccatcctgccctctattttcagggtcacgaccgctgcaagcaggctttgctgcagattgggatcaacatgatggcactgcctggaggtcgccacctggactccgtcaccctgccgggtcagcggctacacctgatgcaggtggactcagtccagcgctggatggaagatctgaagctcatgaccgagtgcgagtgcatgtgtgtcctgcaggccaagcccatcagcctggaagaggatgcacagggtgacctcatcctggcaggtggccctggccctggagaccccctgcagctgctgctcaaacggggttgggtcattagcacagagctgcgcaggatcgggcagaagctggcccaggaccgctgggcacgggtgcacagcatgagcgtgcgtctgacctgccatgcccgctccatggtcagcgagtacagtgctgtcagcaggaactccttgaaggaaatgggcgagattgagaagctgctaatggagaaatgctcggagctctcggcagtcacagagaggtgccttcaggttgagaatgagcatgtcctgaagtcaatgaaggcctgcgtgagtgagaccctgagcatgctgggccagcactttggtcagctgctggagctggccctgacacgggaggttcaggcactggtgagaaaaattgatgcctcagacaatatctacaccacagagtccaccacagggaacctgttcagcctgacccaggagggggctcccttgtgccgcatcatagccaaggagggtggggtcgtagcactcttcaaggtttgccggcaggacagtttccggtgcttgtacccccaggcgctccgcacgctggcctccatctgctgcgtggaagagggtgtccaccagctggagaaggtggatggcgttctgtgcttggccgacatcctgaccgacaacagccactcagaggccacacgggctgaggctgcggctgtggtggcccaggtcacctccccacacctgcccgtcacccagcacctcagtagcttcctggagagcatggaggagatcgtgacagccctcgtcaaactgtgccaagaggcctcatcaggggaagtcttcctactggcctctgcggcccttgccaacatcacgttctttgacacaatggcctgcgagatgctcctgcagttgaatgccatccgtgttctcctggaagcctgcagtgacaagcagagagtggacacgccttacactcgggaccagattgtgaccatcttggcaaacatgtctgtcctagaacagtgtgcctctgacatcattcaggaaaatggggtccagcttatcatgggcatgctgtctgaaaaaccaaggtctgggactcctgctgaagtggcagcctgtgagcgagtccagcagaaagctgcagtgaccctggctcgtctcagccgagacccagatgtggcacgggaggccgtgcggctcagctgcatgtcccgtctcatcgagctctgcagatccccatcagagaggaacagcagtgacgccgtgcttgtggcctgcctggctgctctgcgtagattggctggggtctgccctgaaggcctccaggactctgactttcagcagttggtccagcctcggctggtggactccttcttactctgcagcaacatggaggagagttttgtgtagtgagtgtgggcgaagaaatacatttggctgttctca

SEQ ID NO: 30112 - DNA, 1740 bp, Artificial Sequence
  derived and/or modified sequence
atgaggcggcccccaggaaatggagaggccgccagcgagggccctgggggctggggcctgtggggcgtgcaggagagccggcggctgtgctgtgccggccatgaccgctgcaagcaggccctgctgcagatcggcatcaacatgatggccctgcccggcggccgccacctggacagcgtgaccctgcccggccagaggctgcacctgatgcaggtggacagcgtgcagcgctggatggaggacctgaagctgatgacagaatgtgagtgcatgtgtgtgctgcaggccaagcccatcagcctggaggaggatgcccagggcgacctgatcctggccggcggccctggccctggggaccccctgcagctgctgctgaagaggggctgggtgatcagcacagagctgcggcgcatcggccagaagctggcccaggaccgctgggcccgggtgcacagcatgtctgtgcggctgacctgccacgcccgctccatggtgtctgagtacagcgctgtgtccaggaacagcctgaaggagatgggagaaattgagaagctgctgatggagaagtgcagcgagctgtctgctgtgacagagcgctgcctgcaggtggagaatgaacatgtgctgaagtccatgaaggcctgtgtgtctgagaccctgtccatgctgggccagcacttcggccagctgctggagctggccctgacccgggaggtgcaggccctggtgaggaagattgatgccagtgacaacatctacaccacagagagcaccactggaaacctcttcagcctgacccaggagggcgcccccctgtgccgcatcatcgccaaggagggcggcgtggtggccctcttcaaggtgtgccggcaggacagcttccgctgcctgtacccccaggccctgcggaccctggccagcatctgctgcgtggaggagggcgtgcaccagctggagaaggtggatggagtgctgtgcctggccgacatcctgacagacaacagccacagcgaggccaccagggctgaggccgctgctgtggtggcccaggtgaccagcccccacctgcctgtgacccagcacctgagcagcttcctggagagcatggaggagatcgtgacagccctggtgaagctgtgccaggaggccagcagtggagaggtgttcctgctggccagcgctgccctggccaacatcaccttctttgacaccatggcctgtgagatgctgctgcagctgaatgccatccgggtgctgctggaggcctgcagcgacaagcagagggtggacaccccctacacccgggaccagatcgtgaccatcctggccaacatgtctgtgctggagcagtgtgccagtgacatcatccaggagaatggagtgcagctgatcatgggcatgctgtctgagaagcccaggagcggcaccccagctgaggtggccgcctgtgagcgggtgcagcagaaggctgctgtgaccctggcccggctgagccgggaccctgatgtggcccgggaggccgtgcggctgagctgcatgagccggctgattgagctgtgccgcagccccagcgagaggaacagcagtgatgctgtgctggtggcctgcctggccgccctgcggcggctggccggcgtgtgcccagagggcctgcaggacagcgacttccagcagctggtgcagccccggctggtggacagcttcctgctgtgcagcaacatggaggagagctttgtgtag

SEQ ID NO: 30113 - DNA, 1740 bp, Artificial Sequence
  derived and/or modified sequence
atgcggcggccccccggcaacggcgaggccgccagcgagggccccgggggctggggcctttggggagtacaggagtcccggcggctgtgttgtgccggccatgataggtgcaaacaggccctgctccaaatcgggattaacatgatggctctgcccggcgggcgacatcttgattccgtaaccctccccggccagcgactgcacctaatgcaggtcgatagtgtgcagaggtggatggaggatctgaagcttatgaccgaatgtgaatgcatgtgcgttctgcaggcgaaaccaatttccctagaagaagacgcgcagggcgatctgattctggccgggggccccgggcctggagatcctcttcagctgttgctgaagcggggatgggtgattagcacagaattgaggagaatcggccagaagctcgcccaggatagatgggctagggttcactcaatgagcgtgcggctgacatgtcacgccaggtcaatggttagtgagtatagcgccgtaagccgaaactctctgaaagaaatgggtgagatcgagaaactgctgatggaaaaatgcagcgagctgtcggctgtgactgagcgctgtctccaggtggagaacgaacatgtgctgaaatcaatgaaggcgtgcgtatccgagacgttgagcatgctgggtcagcacttcggtcagttgctggagctggcgctaactagagaagtgcaggctttagtgagaaaaatcgatgcctcagacaatatttataccacagagtctactacggggaatctcttttctctcacccaagaaggagcgcctctctgtcggatcatcgcaaaggagggcggggtcgtggcgctgtttaaggtatgccgccaggactctttcaggtgtctctaccctcaggccttgcgcaccctggccagcatatgctgcgtggaagagggggttcaccagctcgaaaaggtagacggagtgctgtgcctggcggatatcttaacagacaattcacactctgaagccactagagccgaagcggctgcggtcgtcgcccaggtcacctcaccgcatctcccggttacacagcacctgtcgagtttcctggaatccatggaggagatcgtaacagccttagtgaagctgtgtcaggaggcaagcagcggagaggttttccttctggcttctgccgcccttgccaatatcaccttcttcgacaccatggcctgcgaaatgcttctgcaactcaacgcgattcgcgtgctgctggaggcgtgttctgataagcagcgggtcgacacaccgtataccagggatcagatcgtaaccattctggccaacatgagtgttctcgaacagtgcgctagcgatattatccaggagaacggtgtgcagttgattatgggaatgctgtcagagaaaccccggagtggtacccctgcagaagtcgccgcctgtgaaagggtgcagcagaaggcggccgtcacgcttgccaggctgagcagggacccagacgtggctagggaagccgtgaggctcagttgtatgtcccgccttattgagctgtgcagatcaccatctgagagaaatagttctgatgccgtccttgtggcctgcctagccgcattgcggcggttggcaggcgtttgcccagagggactgcaggattcggattttcagcagcttgttcagccacgactcgtggattctttcctgctttgctcaaacatggaagagtcctttgtgtag

SEQ ID NO: 30114 - DNA, 1740 bp, Artificial Sequence
  derived and/or modified sequence
atgagaaggcccccaggcaacggcgaagctgcaagcgaaggccctggagggtggggcctatggggggtgcaagagtcccgccgactctgctgtgccggacacgaccgctgtaaacaggctttactccaaattggcatcaacatgatggcgctgcccggaggtcgccacttggactctgtgacactcccaggtcagcgcttacacctgatgcaggtggactcagtgcagcggtggatggaagatctcaagctgatgaccgagtgcgagtgcatgtgtgtgctgcaggctaaaccaatcagcttagaagaagacgctcagggcgatttgattttagcaggcggaccagggcctggcgaccccttacaactgttattgaaacgtgggtgggtgataagtacagaactgcgcagaatcgggcagaaactcgctcaggacagatgggccagagtgcactcaatgtcggttcgcttgacctgtcatgcgcgaagcatggtgtctgaatactcagccgtctctcggaactcacttaaggagatgggagagattgaaaagctgctgatggaaaaatgtagcgagctgtccgcagtcaccgagagatgcttgcaagtggagaatgaacatgtcctgaagagcatgaaagcttgcgtgtcggagactttgagcatgctgggtcagcattttggacagctcctggagttggcacttaccagagaggtgcaagcgctggtgcggaagatcgacgcatccgataacatttataccacagagagtaccaccggtaatctcttctccttaactcaagaaggggctcccctctgtagaattatagcaaaggaagggggagtcgttgccctgttcaaggtgtgtcgccaggattcttttaggtgcctttaccctcaggccctgcgaacgcttgcttcaatctgctgcgttgaggagggggtgcatcaattagagaaagtggacggcgtgctgtgtctcgccgacatcctgactgataacagtcacagcgaggctacaagggccgaagcagccgcagtcgtggcgcaggtgactagccctcacctgcccgtcactcaacacctctcatcttttctggaatctatggaagagatcgtgacagctctggtgaagctttgccaagaagcgtcttccggcgaagttttcctcctggccagtgccgcactggctaacatcacgttcttcgacactatggcttgcgaaatgttgttgcaattgaacgccatccgagtcctgttagaggcttgcagcgataagcagcgggttgacaccccctatacaagagaccaaatcgtcaccattctggcaaacatgtcggtgttagaacagtgcgcctccgacataatccaggagaacggcgtccagctgataatggggatgctaagcgagaaaccaaggtctggaactccagcagaagttgctgcctgcgaacgggtgcaacagaaggcggcagtgaccctcgcccgtctctctagagatccagacgttgcgagggaagccgtccgattgtcctgtatgtccagattaatcgagctctgtcgtagcccatctgaaagaaattccagcgatgcagtgcttgtcgcttgcctggcagccctgcgacgtcttgccggagtctgcccagagggattacaggactcagattttcagcagttggtgcagcccaggctagtcgacagcttcctcctctgctcaaacatggaggaatccttcgtgtag

SEQ ID NO: 30115 - DNA, 1740 bp, Artificial Sequence
  derived and/or modified sequence
atgagaagaccccccggcaacggcgaggccgccagcgagggccccggcggctggggcctgtggggcgtgcaggagagcagaagactgtgctgcgccggccacgacagatgcaagcaggccctgctgcagatcggcatcaacatgatggccctgcccggcggcagacacctggacagcgtgaccctgcccggccagagactgcacctgatgcaggtggacagcgtgcagagatggatggaggacctgaagctgatgaccgagtgcgagtgcatgtgcgtgctgcaggccaagcccatcagcctggaggaggacgcccagggcgacctgatcctggccggcggccccggccccggcgaccccctgcagctgctgctgaagagaggctgggtgatcagcaccgagctgagaagaatcggccagaagctggcccaggacagatgggccagagtgcacagcatgagcgtgagactgacctgccacgccagaagcatggtgagcgagtacagcgccgtgagcagaaacagcctgaaggagatgggcgagatcgagaagctgctgatggagaagtgcagcgagctgagcgccgtgaccgagagatgcctgcaggtggagaacgagcacgtgctgaagagcatgaaggcctgcgtgagcgagaccctgagcatgctgggccagcacttcggccagctgctggagctggccctgaccagagaggtgcaggccctggtgagaaagatcgacgccagcgacaacatctacaccaccgagagcaccaccggcaacctgttcagcctgacccaggagggcgcccccctgtgcagaatcatcgccaaggagggcggcgtggtggccctgttcaaggtgtgcagacaggacagcttcagatgcctgtacccccaggccctgagaaccctggccagcatctgctgcgtggaggagggcgtgcaccagctggagaaggtggacggcgtgctgtgcctggccgacatcctgaccgacaacagccacagcgaggccaccagagccgaggccgccgccgtggtggcccaggtgaccagcccccacctgcccgtgacccagcacctgagcagcttcctggagagcatggaggagatcgtgaccgccctggtgaagctgtgccaggaggccagcagcggcgaggtgttcctgctggccagcgccgccctggccaacatcaccttcttcgacaccatggcctgcgagatgctgctgcagctgaacgccatcagagtgctgctggaggcctgcagcgacaagcagagagtggacaccccctacaccagagaccagatcgtgaccatcctggccaacatgagcgtgctggagcagtgcgccagcgacatcatccaggagaacggcgtgcagctgatcatgggcatgctgagcgagaagcccagaagcggcacccccgccgaggtggccgcctgcgagagagtgcagcagaaggccgccgtgaccctggccagactgagcagagaccccgacgtggccagagaggccgtgagactgagctgcatgagcagactgatcgagctgtgcagaagccccagcgagagaaacagcagcgacgccgtgctggtggcctgcctggccgccctgagaagactggccggcgtgtgccccgagggcctgcaggacagcgacttccagcagctggtgcagcccagactggtggacagcttcctgctgtgcagcaacatggaggagagcttcgtgtag

SEQ ID NO: 30116 - protein, 594 aa, Artificial Sequence
  derived and/or modified sequence
MAPIGLKAVVGEKIMHDVIKKVKKKGEWKVLVVDQLSMRMLSSCCKMTDIMTEGITIVEDINKRREPLPSLEAVYLITPSEKSVHSLISDFKDPPTAKYRAAHVFFTDSCPDALFNELVKSRAAKVIKTLTEINIAFLPYESQVYSLDSADSFQSFYSPHKAQMKNPILERLAEQIATLCATLKEYPAVRYRGEYKDNALLAQLIQDKLDAYKADDPTMGEGPDKARSQLLILDRGFDPSSPVLHELTFQAMSYDLLPIENDVYKYETSGIGEARVKEVLLDEDDDLWIALRHKHIAEVSQEVTRSLKDFSSSKRMNTGEKTTMRDLSQMLKKMPQYQKELSKYSTHLHLAEDCMKHYQGTVDKLCRVEQDLAMGTDAEGEKIKDPMRAIVPILLDANVSTYDKIRIILLYIFLKNGITEENLNKLIQHAQIPPEDSEIITNMAHLGVPIVTDSTLRRRSKPERKERISEQTYQLSRWTPIIKDIMEDTIEDKLDTKHYPYISTRSSASFSTTAVSARYGHWHKNKAPGEYRSGPRLIIFILGGVSLNEMRCAYEVTQANGKWEVLIGSTHILTPQKLLDTLKKLNKTDEEISS

SEQ ID NO: 30117 - DNA, 1785 bp, Artificial Sequence
  derived and/or modified sequence
atggcccccatcggcctgaaggccgtggtgggcgagaagatcatgcacgacgtgatcaagaaggtgaagaagaagggcgagtggaaggtgctggtggtggaccagctgagcatgagaatgctgagcagctgctgcaagatgaccgacatcatgaccgagggcatcaccatcgtggaggacatcaacaagagaagagagcccctgcccagcctggaggccgtgtacctgatcacccccagcgagaagagcgtgcacagcctgatcagcgacttcaaggacccccccaccgccaagtacagagccgcccacgtgttcttcaccgacagctgccccgacgccctgttcaacgagctggtgaagagcagagccgccaaggtgatcaagaccctgaccgagatcaacatcgccttcctgccctacgagagccaggtgtacagcctggacagcgccgacagcttccagagcttctacagcccccacaaggcccagatgaagaaccccatcctggagagactggccgagcagatcgccaccctgtgcgccaccctgaaggagtaccccgccgtgagatacagaggcgagtacaaggacaacgccctgctggcccagctgatccaggacaagctggacgcctacaaggccgacgaccccaccatgggcgagggccccgacaaggccagaagccagctgctgatcctggacagaggcttcgaccccagcagccccgtgctgcacgagctgaccttccaggccatgagctacgacctgctgcccatcgagaacgacgtgtacaagtacgagaccagcggcatcggcgaggccagagtgaaggaggtgctgctggacgaggacgacgacctgtggatcgccctgagacacaagcacatcgccgaggtgagccaggaggtgaccagaagcctgaaggacttcagcagcagcaagagaatgaacaccggcgagaagaccaccatgagagacctgagccagatgctgaagaagatgccccagtaccagaaggagctgagcaagtacagcacccacctgcacctggccgaggactgcatgaagcactaccagggcaccgtggacaagctgtgcagagtggagcaggacctggccatgggcaccgacgccgagggcgagaagatcaaggaccccatgagagccatcgtgcccatcctgctggacgccaacgtgagcacctacgacaagatcagaatcatcctgctgtacatcttcctgaagaacggcatcaccgaggagaacctgaacaagctgatccagcacgcccagatcccccccgaggacagcgagatcatcaccaacatggcccacctgggcgtgcccatcgtgaccgacagcaccctgagaagaagaagcaagcccgagagaaaggagagaatcagcgagcagacctaccagctgagcagatggacccccatcatcaaggacatcatggaggacaccatcgaggacaagctggacaccaagcactacccctacatcagcaccagaagcagcgccagcttcagcaccaccgccgtgagcgccagatacggccactggcacaagaacaaggcccccggcgagtacagaagcggccccagactgatcatcttcatcctgggcggcgtgagcctgaacgagatgagatgcgcctacgaggtgacccaggccaacggcaagtgggaggtgctgatcggcagcacccacatcctgaccccccagaagctgctggacaccctgaagaagctgaacaagaccgacgaggagatcagcagctag

SEQ ID NO: 30118 - DNA, 1785 bp, Artificial Sequence
  derived and/or modified sequence
atggcacctattggcctgaaagccgtggtgggagagaagattatgcacgatgtgattaagaaagtcaagaagaaaggcgaatggaaagtgctggtggttgaccaactctcgatgcgcatgcttagctcttgttgtaaaatgaccgatattatgacagaagggattacaatagtggaggatataaataagcggcgtgagcctttgccatcgcttgaggccgtatatctgataaccccctcagagaagtctgttcattctcttatttctgactttaaagacccacctacagcgaaatacagggctgctcacgtattcttcacagactcttgccccgatgccctatttaatgagctggtgaaaagtcgcgcagcgaaagtgatcaagactttaacggaaataaatattgccttcctgccttatgaaagtcaagtttacagcctagactcagctgattcatttcagtctttctactcccctcacaaagcccagatgaaaaatccaatactagaaaggcttgccgagcagatagcaactctgtgtgccacactcaaagagtacccagcagtacgctaccgaggcgagtacaaggataatgccctgctggcacagctgatacaggacaaattagacgcctataaggctgacgaccctactatgggggaaggccccgacaaggccagatcccagctgctaattcttgacaggggctttgatccctcctcacccgtgcttcatgagctgactttccaggccatgtcatacgatttgctaccaatcgagaatgacgtttataagtatgagaccagtggcatcggggaagctagagtcaaagaagtcctcctggatgaggatgatgatctctggatagctctccgccataagcatatcgctgaagtttctcaagaagtcactcgttcacttaaggacttcagcagctccaagagaatgaatacaggcgagaagaccaccatgagagatctttcacaaatgctcaaaaagatgccccagtaccagaaagagctgtccaaatactctacccacctgcaccttgcagaggactgcatgaaacactatcagggcaccgttgataagctgtgtagagtggagcaggacctggctatggggacagatgcagaaggcgagaagattaaggaccctatgagggccatcgtcccaatattgctggatgcgaatgtgagcacttacgacaagattcgcatcattcttctatacattttcctgaagaacggaataacagaagaaaatctgaacaagctgatccagcatgctcaaatcccgccagaagatagcgaaataattactaatatggcccacctaggagttccgatcgtgaccgactctactttgcgcagaaggagtaaacccgagcgaaaggagagaattagtgaacagacttaccaactgagccgatggactccaataataaaggacattatggaggataccatagaagacaagctcgacacgaaacactacccgtatattagcacgcggtcctcggcctcatttagcaccaccgccgtgtctgccaggtatggtcactggcataagaataaggctccaggcgagtataggtcaggcccacgcctcataatttttatcctgggcggtgtctcactgaatgagatgagatgcgcctatgaggttacccaggcgaatggcaaatgggaggtgctgataggctcaacccacatactcactccccagaaactgctagatactctgaagaaattaaacaaaaccgacgaggaaataagttcctag

SEQ ID NO: 30119 - DNA, 1785 bp, Artificial Sequence
  derived and/or modified sequence
atggcccccatcggcctgaaggctgtggtgggggagaagatcatgcatgatgtgatcaagaaggtgaagaagaagggggagtggaaggtgctggtggtggaccagctgtccatgaggatgctgagcagctgctgcaagatgacagacatcatgacagagggcatcaccatcgtggaggacatcaacaagaggcgggagcccctgcccagcctggaggccgtgtacctgatcacccccagcgagaagtctgtgcacagcctcatcagtgacttcaaggaccccccaacagccaagtacagagctgcccacgtgttcttcacagacagctgcccagatgccctcttcaatgagctggtgaagagcagagctgccaaggtgatcaagaccctgacagagatcaacatcgccttcctgccctatgagagccaggtgtacagcctggacagcgctgacagcttccagagcttctacagcccccacaaggcccagatgaagaaccccatcctggagcggctggccgagcagatcgccaccctgtgtgccaccctgaaggagtacccagctgtgcgctacagaggagagtacaaggacaatgccctgctggcccagctgatccaggacaagctggatgcctacaaggcagatgaccccaccatgggagagggccctgacaaggcccggagccagctgctgatcctggaccggggctttgaccccagcagccctgtgctgcacgagctgaccttccaggccatgtcctatgacctgctgcccattgaaaatgatgtgtacaagtatgagaccagcggcattggagaggcccgggtgaaggaggtgctgctggatgaagatgatgacctgtggatcgccctgcggcacaagcacatcgccgaggtgtcccaggaggtgaccaggagcctgaaggacttcagcagcagcaagaggatgaacacaggagagaagaccaccatgagggacctgagccagatgctgaagaagatgccccagtaccagaaggagctgagcaagtacagcacccacctgcacctggccgaggactgcatgaagcactaccagggcaccgtggacaagctgtgccgggtggagcaggacctggccatgggcacagatgctgagggggagaagatcaaggaccccatgagggccatcgtgcccatcctgctggatgccaacgtgtccacctatgacaagatccgcatcatcctgctgtacatcttcctgaagaatggcatcacagaggagaacctgaacaagctgatccagcacgcccagatccccccagaagattctgagatcatcaccaacatggcccacctgggcgtgcccatcgtgacagacagcaccctgcggcggcgcagcaagccagagaggaaggagcgcatcagcgagcagacctaccagctgagccgctggacccccatcatcaaggacatcatggaggacaccatcgaggacaagctggacaccaagcactacccctacatcagcaccaggagcagcgccagcttcagcaccacagctgtgtctgcccgctatggccactggcacaagaacaaggcccctggagagtacagaagtggccccaggctcatcatcttcatcctgggcggcgtgtccctgaatgagatgagatgtgcctatgaggtgacccaggccaacgggaagtgggaggtgctgattggcagcacccacatcctgaccccccagaagctgctggacaccctgaagaagctgaacaagacagatgaggagatcagcagctag

SEQ ID NO: 30120 - DNA, 1785 bp, Artificial Sequence
  derived and/or modified sequence
atggcccccatcggcctgaaggccgtggtgggcgagaagatcatgcacgacgtgattaagaaggttaagaagaagggcgagtggaaggtactggtggtcgaccaactgtctatgagaatgctgagcagttgttgcaaaatgaccgatatcatgaccgaaggcatcaccatagtcgaggacataaacaagcgccgagagcctctgcctagcctcgaagccgtctatctgattacaccaagcgagaagtcagttcattcactgattagtgactttaaagatccccctacggcaaagtatcgggcagctcacgttttctttacagattcatgtcctgacgctctttttaacgagctcgttaaaagccgcgctgccaaagttattaagaccttgaccgagattaacatcgccttcttgccttacgagtcacaggtgtacagcctggattccgcagacagctttcaatcattttacagcccacataaagctcaaatgaagaaccccatcctggagcggctggctgagcagatcgcgactctatgtgcgacgctcaaggaataccccgccgttcgttaccgaggagaatacaaggacaatgctctactcgcacaactcatacaggataaattggatgcgtacaaagccgacgaccccacaatgggggagggccccgacaaagccagatctcagcttcttatcctcgaccgtggctttgacccatcctccccggtactccatgagcttacattccaagcgatgtcctacgatctgcttcccatcgagaatgatgtttataagtacgagacctctggaattggtgaggcccgcgtgaaggaagtcctgctggacgaagacgacgacctgtggatagccttgagacacaagcatattgcagaggtttcccaggaggtaactagatcattaaaggacttctcatctagcaaacgcatgaacactggcgaaaaaacaacgatgcgtgacttatcacagatgctgaagaagatgccacagtatcaaaaagaattatctaagtatagtacgcacctacaccttgccgaggattgcatgaagcactatcaggggactgtggataagctgtgccgggtggagcaggacctggcaatgggcaccgatgccgagggcgagaaaattaaggatccgatgagggccatcgtccctatactgctcgacgcgaatgtcagtacttacgacaagattagaattatcctgctgtacattttcttgaagaacggaattaccgaggaaaaccttaataaactcatccagcacgcacagatccccccagaagactccgaaattattaccaacatggcccatctgggagtgccaatagttactgactctacgttgagacgtcgatccaaaccggagaggaaagaaaggatcagtgaacaaacataccaacttagtagatggacgcctattatcaaagacattatggaggacactatcgaagataagcttgatacgaaacactatccatacattagcactcgttcttcagccagcttcagcaccaccgctgtgagtgcgcggtacgggcattggcacaaaaacaaggctcccggcgagtatcgcagtggaccacgactgataatcttcattctaggcggcgtgtcactaaatgaaatgcgctgcgcctatgaggttacccaagccaatgggaaatgggaagtcctcataggatccacacacatcctgactccacagaagctcttagatacactgaagaaactgaacaagacagatgaggaaattagttcctag

SEQ ID NO: 30121 - DNA, 1785 bp, Artificial Sequence
  derived and/or modified sequence
atggctcccatcggattgaaggccgtggtcggagaaaagatcatgcacgacgtcatcaagaaagtgaagaagaaaggagaatggaaggtgctggtggtggaccagctttcgatgcggatgttatcctcttgttgcaagatgacggacattatgaccgagggaattaccattgtcgaggacattaataaacgcagagagcctcttccctcccttgaagctgtctatctgattactccttccgaaaagtccgttcattctctgatttctgactttaaggaccctccaactgctaagtatcgggcagcacacgtgttctttacagacagttgccctgatgctctcttcaatgaattagtgaaaagccgagccgcaaaggtgattaaaacccttaccgaaattaatattgccttcttgccatatgagtcccaggtatacagcctggattccgctgacagctttcagtccttttactctccacacaaagcccaaatgaaaaaccctatcctggagcgcctggcggaacaaattgcaacactttgcgccacccttaaggaatatcctgcggttcgctaccgcggagagtataaagataacgccttgctcgctcagctgatacaagacaagttggatgcctataaagccgacgatcccacgatgggcgagggacctgataaagctaggtctcagctgctcattctcgacaggggcttcgaccccagtagtcctgtcttgcacgagctcacatttcaggccatgtcttacgatctgctgcctatcgagaatgatgtctacaagtacgagacatccgggattggcgaggccagagtgaaggaagtgctcctggatgaagacgatgacctttggattgctttgcggcataagcatattgctgaagtctctcaggaggtaacacgtagccttaaagatttttctagctctaagcggatgaacacaggagagaagaccaccatgcgggatctctctcagatgttaaagaagatgccccagtatcaaaaagagctgtcaaagtactccactcatttgcacctggcagaagactgtatgaagcactaccagggaacagtggacaaattgtgccgcgtagaacaggacctggcaatgggtacggatgcagaaggagagaagataaaagatccaatgagagctatcgtacctatacttttggatgcgaatgtgtccacatacgataaaatcagaatcattctcctctatattttcctcaaaaacgggatcactgaggaaaacctgaacaagttgatccagcacgcgcagatccctcctgaggactcagagataatcactaacatggcccatcttggggtacccatagtaactgattctacacttagacgcagatctaaaccagagagaaaagagcgcatttcagagcagacctatcagttgtcccgctggactcctataattaaagatatcatggaagatactatcgaagataagcttgatacaaaacattatccctacattagtactcgctctagcgcgagtttttcaactactgctgtctccgcacgctatgggcattggcataaaaacaaggcgccaggagagtataggagcgggcctcgactgatcattttcattctcggaggagtctccttaaatgaaatgagatgcgcctatgaggtcacccaagccaacggcaaatgggaggtgctaataggatcaactcatattcttaccccccaaaaactgttggacacactaaaaaagctcaataaaacagatgaagaaataagctcttag

SEQ ID NO: 30122 - DNA, 3759 bp, Artificial Sequence
  derived and/or modified sequence
gcgcggctgcggggcggagagctgcggctggcccagcgcgcccacctgaggaggcggcggggtccgcaggcgtcgcgggacgaggagatcggagccgggagactcgcgcagcgccatggcccccattggcctcaaagctgttgtcggagagaagattatgcatgatgtgataaagaaggtcaagaagaagggggaatggaaggtgctggtggtggatcagttaagcatgaggatgctgtcctcctgctgcaagatgacagacatcatgaccgagggcataacgattgtggaagatatcaataagcgcagagagccgctccccagcctggaggctgtgtatctcatcactccatccgagaagtccgtccactctctcatcagtgactttaaggacccgccgactgctaaataccgggctgcacacgtcttcttcactgactcttgtccagatgccctgtttaatgaactggtaaaatcccgagcagccaaagtcatcaaaactctgacggaaatcaatattgcatttctcccgtatgaatcccaggtctattccttggactctgctgactctttccaaagcttctacagtccccacaaggctcagatgaagaatcctatactggagcgcctggcagagcagatcgcgaccctttgtgccaccctgaaggagtacccggctgtgcggtatcggggggaatacaaggacaatgccctgctggctcagctaatccaggacaagctcgatgcctataaagctgatgatccaacaatgggggagggcccagacaaggcacgctcccagctcctgatcctggatcgaggctttgaccccagctcccctgtgctccatgaattgacttttcaggctatgagttatgatctgctgcctatcgaaaatgatgtatacaagtatgagaccagcggcatcggggaggcacgggtgaaggaggtgctcctggacgaggacgacgacctgtggatagcactgcgccacaagcacatcgcagaggtgtcccaggaagtcacccggtctctgaaagatttttcttctagcaagagaatgaatactggagagaagaccaccatgcgggacctgtcccagatgctgaagaagatgcctcagtaccagaaagagctcagcaagtactccacccacctgcaccttgctgaggactgtatgaagcattaccaaggcaccgtagacaaactctgccgagtggagcaggacctggccatgggcacagatgctgagggagagaagatcaaggaccctatgcgagccatcgtccccattctgctggatgccaatgtcagcacttatgacaaaatccgcatcatccttctctacatctttttgaagaatggcatcacggaggaaaacctgaacaaactgatccagcacgcccagatacccccggaggatagtgagatcatcaccaacatggctcacctcggcgtgcccatcgtcaccgattccacgctgcgtcgccggagcaagccggagcggaaggaacgcatcagcgagcagacctaccagctctcacggtggactccgattatcaaggacatcatggaggacactattgaggacaaacttgacaccaaacactacccttatatctctacccgttcctctgcctccttcagcaccaccgccgtcagcgcccgctatgggcactggcataagaacaaggccccaggcgagtaccgcagtggcccccgcctcatcattttcatccttgggggtgtgagcctgaatgagatgcgctgcgcctacgaggtgacccaggccaacggaaagtgggaggtgctgataggatccacacacatcctcaccccacagaaactgctggacacactgaagaaactgaataaaacagatgaagaaataagcagttaaaaaaataagtcgcccctccaaaacacgcccccatcccacagcgctccgcagcttcccaccaccgcccgcctcagttcctttgcgtctgttgcctccccagccctgcacgccctggctggcactgttgccgctgcattctcgtgttcagtgatgccctcttcttgtttgaaacaaaagaaaataatgcattgtgttttttaaaaagagtatcttatacatgtatcctaaaaagagaagctcatgtgcaattggtgcacagcaggagaaatttctggactgttaggatgaatggacgccttctccccgttatttaagatttgtgaccttgtacataaccctgggtgacgtgcacattgcttgggtatggaacggtagaaatttgggtgtttttaaaaccttgtttggggttgttcctgtccttgttgagaatcatagagatgtctgtgttcttggagtatttcacactgaggactaatctgctatcttcattccagtccctacccctcagtgcctgctctcatccaaataacctgggaggtgacaatcaggatatctcaggaggtccaaggtggaacagacctctttgcctttcccagcgtctcatacccccggtagtgcagctgtgggtggaggctggggtgtctgcacgaagtcaggccagcgtcctcctccacagcctgtcactgccccctccccagcctgtgtccacagtgctgtgatcccgagggaagtcctccagtctaagtcacagtgccctgacaggtgagaagcaaactcccgctggaagcctccatctctttggaaaaacagttagtctggagcctgtggcccaggcccttctgtccccaggcatcatcccaacagctcattttccctagtccgccttcgttcaagggtcaggaatggaccagaacagatgggttctggaggcccctgaacagagggctatggctgtggagaaggttcttggcccgttggactcacacagaccctgtaccctctcggcaagcatcttcagtcagattatcctcagtttcagatacttcataataccttgtgttgtgtggggtcatacatcatcgtgtttgtaagagaagatggtcattttattctctgtataaaacttagctctaaagcagaaactaaagcagcaaatgcaggaaggctgtctcgccatcctcaagactcagcagctctcattctccagtggtgagcacaccatttgtgctgctgctgttgtcgtgaaatataataacagtggaagtcacaaaaatgtcccctgcccagccccctcgccgcccttgacctcctgcaggccatgtgtgtattacttgtctagtgatgtcctctcaaagtgctgtacgcgagctcggcgccacctccgcctccctttcagagcctgctccccgccctctctgctcgctgcattgtggtgttctcttctcaaggctttgaaatctccccttgcactgagattagtcgtcagatctctccccgtctccctcccaacttatacgacctgatttccttaggacggaaccgcaggcacctgcgccgggcgtcttactcccgctgcttgttctgtcccctccctcggaccaaacagtgctcatgcttcaggaccttgtttgtcgaagatgttggtttccctttctctgttatttatataaaaataatttatcaaaaggatattttaaaaaagctagtctgtcttgaaacttgtttaccttaaaattatcagaatctcagtgtttgaaagtactgaagcacaaacatatatcatctctgtaccattctgtactaaagcacttgagtctaataaataaagaaatcagcaccccttcccggtgtccaggggg

SEQ ID NO: 30123 - protein, 130 aa, Artificial Sequence
  derived and/or modified sequence
MVARVGLLLRALQLLLWGHLDAQPAERGGQELRKEAEAFLEKYGYLNEQVPKAPTSTRFSDAIRAFQWVSQLPVSGVLDRATLRQMTRPRCGVTDTNSYAAWAERISDLFARHRTKMRRKKRFAKQGEHC

SEQ ID NO: 30124 - DNA, 393 bp, Artificial Sequence
  derived and/or modified sequence
atggtggccagagtgggcctgctgctgagagccctgcagctgctgctgtggggccacctggacgcccagcccgccgagagaggcggccaggagctgagaaaggaggccgaggccttcctggagaagtacggctacctgaacgagcaggtgcccaaggcccccaccagcaccagattcagcgacgccatcagagccttccagtgggtgagccagctgcccgtgagcggcgtgctggacagagccaccctgagacagatgaccagacccagatgcggcgtgaccgacaccaacagctacgccgcctgggccgagagaatcagcgacctgttcgccagacacagaaccaagatgagaagaaagaagagattcgccaagcagggcgagcactgctag

SEQ ID NO: 30125 - DNA, 393 bp, Artificial Sequence
  derived and/or modified sequence
atggttgctagggtgggcctactgctgagagcattgcaactacttctgtggggccacttggatgcgcagcctgccgaacgtggagggcaggagctccgcaaggaagcagaagcctttctggaaaagtacggatatttgaacgagcaggtgcccaaagcaccgacttccacgcgtttctcagatgcaattcgggcatttcagtgggtgtcacagctgcccgtgtccggagtcctcgatcgcgcaacactgcggcaaatgacacgcccacggtgcggcgtcactgacaccaactcctatgcagcatgggccgagcgaatctctgatttgttcgctcgacacagaacaaagatgcggcgaaaaaaaagatttgctaaacagggtgaacactgctag

SEQ ID NO: 30126 - DNA, 393 bp, Artificial Sequence
  derived and/or modified sequence
atggtggcccgggtgggcctgctgctgcgggccctgcagctgctgctgtggggccacctggatgcccagcctgctgagcggggcggccaggagctgaggaaggaggccgaggccttcctggagaagtatggctacctgaatgagcaggtgcccaaggcccccaccagcacccgcttcagtgatgccatccgggccttccagtgggtgtcccagctgcctgtgtctggagtgctggaccgggccaccctgcggcagatgacccggccccgctgtggggtgacagacaccaacagctatgctgcctgggccgagcgcatcagtgacctgtttgcccggcacaggaccaagatgaggaggaagaagagatttgccaagcagggcgagcactgctag

SEQ ID NO: 30127 - DNA, 393 bp, Artificial Sequence
  derived and/or modified sequence
atggtggcccgggtgggcctgctgctgcgggccctgcagctgctgctctggggccatttggacgcacaacctgccgagagagggggacaggagttgaggaaggaagccgaggcttttttggaaaagtatgggtacctgaacgagcaagtgcctaaggcccccacttccacacggtttagtgacgccatccgtgccttccagtgggtgtcacagctgccagtttccggcgttcttgatagggcaactttaaggcaaatgacccgccctcgctgcggcgtaaccgacacaaacagctatgctgcatgggctgagagaatctcagatctcttcgcccggcacaggactaagatgcgaagaaagaagaggttcgccaagcaaggagaacactgctag

SEQ ID NO: 30128 - DNA, 393 bp, Artificial Sequence
  derived and/or modified sequence
atggtggcccgtgtcgggctcctccttcgcgcactgcagctgctgctgtggggccaccttgacgctcagccggcagaacggggtggacaagaactgcgcaaggaggccgaggccttcctggagaagtacggctatcttaacgaacaggtccccaaggccccaacgtccacacgattcagtgacgcaattcgggcttttcagtgggttagtcagctccctgtctcgggagtgctggaccgtgcgacactgcgccaaatgacgagacctagatgtggagtcaccgataccaattcgtatgccgcatgggcagagcggatctccgatctgttcgcaagacatcgcactaagatgcgcaggaaaaagcgtttcgctaaacagggagaacattgctag

SEQ ID NO: 30129 - DNA, 393 bp, Artificial Sequence
  derived and/or modified sequence
atggtggccagggtgggactattgctgagagccctgcagctcctactgtggggacatctcgatgcccagcctgcagagcgaggggggcaggagttacggaaggaagccgaggcctttctcgagaagtacggatatctgaatgagcaagttcctaaagcaccaacttccacacggttctcagacgctattcgggccttccagtgggtgtcacagcttccggtgagcggcgttctggaccgagccaccctgagacaaatgacacgacccagatgtggggtgaccgacactaacagttatgccgcctgggccgaaagaatatccgacttgtttgcgagacacagaacgaagatgagacgtaagaaaaggttcgcaaagcagggcgaacactgttag

SEQ ID NO: 30130 - DNA, 393 bp, Artificial Sequence
  derived and/or modified sequence
atggttgccagagtgggactgctgttaagagctctacaacttctgctttggggccatctcgacgctcagccagcggaaagggggggccaagagttgagaaaggaagccgaggcctttctagaaaaatatggatacctcaatgagcaggtcccaaaggcacccacatctacacgatttagcgacgccatacgtgcgttccagtgggtctcccaattgcctgttagcggtgtcttggatagagcaaccttgaggcaaatgacccggcctagatgtggcgttaccgatactaactcttatgcggcctgggccgaaagaatatccgacttgtttgcgagacacagaacgaagatgagacgtaagaaaaggttcgcaaagcagggcgaacactgttag

SEQ ID NO: 30131 - DNA, 1020 bp, Artificial Sequence
  derived and/or modified sequence
tccctcggtccccggggccggcggacccgcgggcaggcactgcccgggctggacgacgtctggccggctcccggcgaagggcagcggaggagcggcccagagcgcgcagctagggcactggcgaaaccccgggacagtccctctccgtgcgggggcggcgcagagcagtcccatccccggggtcccgggcgcggctgactgccggctggttccctgcgcgcagtagctccccgagccgggctgcaccggaggcggcgagatggtcgcgcgcgtcggcctcctgctgcgcgccctgcagctgctactgtggggccacctggacgcccagcccgcggagcgcggaggccaggagctgcgcaaggaggcggaggcattcctagagaagtacggatacctcaatgaacaggtccccaaagctcccacctccactcgattcagcgatgccatcagagcgtttcagtgggtgtcccagctacctgtcagcggcgtgttggaccgcgccaccctgcgccagatgactcgtccccgctgcggggttacagataccaacagttatgcggcctgggctgagaggatcagtgacttgtttgctagacaccggaccaaaatgaggcgtaagaaacgctttgcaaagcaaggtgagcactgttaaaatccggctaggccaagatttcccaatgtcttgaagccaatggctaggaaaacagctgagcctgggactggactttgtcagtaacctctcttccctagggcacgggaggagtgggtgaataggacctcttggcttgaggaccatgattgtgaatacagacatttaattcagaatgacacctacattgatgaattttcattgtacaagtgtttttccagatcaaacacaaaacccatgtaattccttgataaattttcaatgcagggcagataaactgttgctaacatttttcatttatatttactgaagttattttcatcagaattcattctttttcataagttattaaacaaatgtgtgatctattg

SEQ ID NO: 30132 - RNA, 393 nt, Artificial Sequence
  derived and/or modified sequence
augguggccagggugggacuauugcugagagcccugcagcuccuacuguggggacaucucgaugcccagccugcagagcgaggggggcaggaguuacggaaggaagccgaggccuuucucgagaaguacggauaucugaaugagcaaguuccuaaagcaccaacuuccacacgguucucagacgcuauucgggccuuccagugggugucacagcuuccggugagcggcguucuggaccgagccacccugagacaaaugacacgacccagauguggggugaccgacacuaacaguuaugccgccugggccgaaagaauauccgacuuguuugcgagacacagaacgaagaugagacguaagaaaagguucgcaaagcagggcgaacacuguuag

SEQ ID NO: 30133 - RNA, 393 nt, Artificial Sequence
  derived and/or modified sequence
augguugccagagugggacugcuguuaagagcucuacaacuucugcuuuggggccaucucgacgcucagccagcggaaagggggggccaagaguugagaaaggaagccgaggccuuucuagaaaaauauggauaccucaaugagcaggucccaaaggcacccacaucuacacgauuuagcgacgccauacgugcguuccagugggucucccaauugccuguuagcggugucuuggauagagcaaccuugaggcaaaugacccggccuagauguggcguuaccgauacuaacucuuaugcggccugggccgaaagaauauccgacuuguuugcgagacacagaacgaagaugagacguaagaaaagguucgcaaagcagggcgaacacuguuag

SEQ ID NO: 30134 - protein, 431 aa, Artificial Sequence
  derived and/or modified sequence
MLVHSFSAMDRHDGTSNGTARLPQLGTVGQSPYTSAPPLSHTPNADFQPPYFPPPYQPIYPQSQDPYSHVNDPYSLNPLHAQPQPQHPGWPGQRQSQESGLLHTHRGLPHQLSGLDPRRDYRRHEDLLHGPHALSSGLGDLSIHSLPHAIEEVPHVEDPGINIPDQTVIKKGPVSLSKSNSNAVSAIPINKDNLFGGVVNPNEVFCSVPGRLSLLSSTSKYKVTVAEVQRRLSPPECLNASLLGGVLRRAKSKNGGRSLREKLDKIGLNLPAGRRKAANVTLLTSLVEGEAVHLARDFGYVCETEFPAKAVAEFLNRQHSDPNEQVTRKNMLLATKQICKEFTDLLAQDRSPLGNSRPNPILEPGIQSCLTHFNLISHGFGSPAVCAAVTALQNYLTEALKAMDKMYLSNNPNSHTDNNAKSSDKEEKHRK

SEQ ID NO: 30135 - DNA, 1296 bp, Artificial Sequence
  derived and/or modified sequence
atgctggtgcacagcttcagcgccatggacagacacgacggcaccagcaacggcaccgccagactgccccagctgggcaccgtgggccagagcccctacaccagcgccccccccctgagccacacccccaacgccgacttccagcccccctacttcccccccccctaccagcccatctacccccagagccaggacccctacagccacgtgaacgacccctacagcctgaaccccctgcacgcccagccccagccccagcaccccggctggcccggccagagacagagccaggagagcggcctgctgcacacccacagaggcctgccccaccagctgagcggcctggaccccagaagagactacagaagacacgaggacctgctgcacggcccccacgccctgagcagcggcctgggcgacctgagcatccacagcctgccccacgccatcgaggaggtgccccacgtggaggaccccggcatcaacatccccgaccagaccgtgatcaagaagggccccgtgagcctgagcaagagcaacagcaacgccgtgagcgccatccccatcaacaaggacaacctgttcggcggcgtggtgaaccccaacgaggtgttctgcagcgtgcccggcagactgagcctgctgagcagcaccagcaagtacaaggtgaccgtggccgaggtgcagagaagactgagcccccccgagtgcctgaacgccagcctgctgggcggcgtgctgagaagagccaagagcaagaacggcggcagaagcctgagagagaagctggacaagatcggcctgaacctgcccgccggcagaagaaaggccgccaacgtgaccctgctgaccagcctggtggagggcgaggccgtgcacctggccagagacttcggctacgtgtgcgagaccgagttccccgccaaggccgtggccgagttcctgaacagacagcacagcgaccccaacgagcaggtgaccagaaagaacatgctgctggccaccaagcagatctgcaaggagttcaccgacctgctggcccaggacagaagccccctgggcaacagcagacccaaccccatcctggagcccggcatccagagctgcctgacccacttcaacctgatcagccacggcttcggcagccccgccgtgtgcgccgccgtgaccgccctgcagaactacctgaccgaggccctgaaggccatggacaagatgtacctgagcaacaaccccaacagccacaccgacaacaacgccaagagcagcgacaaggaggagaagcacagaaagtag

SEQ ID NO: 30136 - DNA, 1296 bp, Artificial Sequence
  derived and/or modified sequence
atgttagtccattcgttttctgctatggatcgacacgatggtacctccaacggtactgcccggcttccccaactcggcacggtggggcagtcaccttacacatccgctccccctctttcacatacaccaaacgcagactttcagcccccctactttccgcctccttatcagcctatctatccacagagtcaggatccgtactcacatgtcaatgacccatactctctcaatcctctccacgctcagccccagcctcagcatcccggctggcccggtcagcgacagtcccaggaatcaggactcctgcacactcaccgcgggttgccccatcagctgagcggcctggatcctcggcgggactatagaaggcacgaggatctgctacacggtccgcatgcgctctccagcgggctgggtgatttgtccattcacagccttccacacgcaatcgaggaagttccccatgtcgaggaccccgggatcaacatacctgaccagactgtgattaagaaagggcccgtgagcttgagcaagtcgaactcaaatgccgtttcagcgatccccataaacaaggataacctgttcgggggtgttgtgaaccctaatgaggtcttctgttccgtgccgggcagactcagcctgctctcgagtacgtccaagtacaaagtgaccgtcgctgaggtacagcgtaggctaagcccacccgagtgtctgaacgcatcgctacttgggggagtgttgcgccgggccaaaagtaaaaatggcggccgcagcctgagagaaaaacttgataagataggacttaacctaccagctggaagacgcaaggctgcaaatgtgacattacttacgtccttggtggagggagaggctgtgcatttggctagggatttcggctatgtttgtgaaaccgagttcccagcaaaggccgtcgcggagtttctaaatcggcaacactcagacccaaatgagcaggtaactcgcaagaacatgctgctcgcaactaaacagatatgcaaagagtttaccgatctgcttgcgcaagatcgttcgcctctgggaaactcccgaccaaacccaatcctggaaccaggcatacagagttgcctaacccactttaacctcatctcccatggattcggctcccccgcagtatgtgctgcggtgacggccttgcagaattacctgacagaggcccttaaggccatggataagatgtatctctccaacaacccgaacagccacactgataataacgctaaatcttccgataaagaggaaaaacatcgtaagtag

SEQ ID NO: 30137 - DNA, 1296 bp, Artificial Sequence
  derived and/or modified sequence
atgctggtgcacagcttcagcgccatggacagacatgatggcaccagcaatggaacagcccggctgccccagctgggcaccgtgggccagagcccctacaccagcgccccacccctgagccacaccccaaatgctgacttccagcccccctacttccccccaccctaccagcccatctacccccagagccaggacccctacagccacgtgaatgacccctacagcctgaaccccctgcacgcccagccccagccccagcaccctggctggccaggccagaggcagagccaggagagcggcctgctgcacacccaccggggcctgccccaccagctgagcggcctggacccccggcgggactacagaagacatgaggacctgctgcacggcccccacgccctgagcagcggcctgggggacctgagcatccacagcctgccccacgccatcgaggaggtgccccacgtggaggaccccggcatcaacatcccagaccagaccgtcatcaagaagggccctgtgtccctgagcaagagcaacagcaatgctgtgtctgccatccccatcaacaaggacaacctgtttggaggagtggtgaaccccaatgaggtgttctgcagcgtgcccggccgcctgagcctgctgagcagcaccagcaagtacaaggtgacagtggccgaggtgcagaggcggctgagccccccagagtgcctgaatgccagcctgctgggcggcgtgctgcggcgggccaagagcaagaatggaggccgcagcctgcgggagaagctggacaagattggcctgaacctgcctgctggccgcaggaaggccgccaacgtgaccctgctgaccagcctggtggagggggaggccgtgcacctggcccgggactttggctacgtgtgtgaaacagagttccctgccaaggctgtggccgagttcctgaaccggcagcacagcgaccccaatgagcaggtgaccaggaagaacatgctgctggccaccaagcagatctgcaaggagttcacagacctgctggcccaggacaggagccccctgggcaacagccggcccaaccccatcctggagcccggcatccagagctgcctgacccacttcaacctgatcagccacggcttcggcagccctgctgtgtgtgccgctgtgacagccctgcagaactacctgacagaggccctgaaggccatggacaagatgtacctgagcaacaaccccaacagccacacagacaacaatgccaagagcagtgacaaggaggagaagcacaggaagtag

SEQ ID NO: 30138 - DNA, 1296 bp, Artificial Sequence
  derived and/or modified sequence
atgctggtgcacagcttcagcgccatggaccggcacgacggcacctccaacggaacagctcgactgcctcagctaggcaccgtcggccaatcaccgtatacctccgcacctccccttagccacacacctaacgctgattttcaacctccctattttcccccaccgtatcaacctatttatcctcagtcgcaagacccctacagccacgtgaacgatccttactccttaaatccacttcacgcccagcctcagcctcagcatcctggctggcctggtcagcgacagagtcaggaatccggcctgttacacactcatcgaggtctaccccatcaactcagtggcctagatcctcgtcgggattatcgacgccacgaggatctcctgcacggaccccacgcactttctagcggactgggcgatctgagtatccatagcctgcctcacgcaattgaggaagtgccgcatgttgaggacccaggcataaacattcccgatcagactgtgatcaagaaggggccagttagcctgtccaagtctaattctaatgccgtgtcagcaatccccataaataaggacaatctcttcggtggggtagtaaacccaaacgaagtcttttgctctgtcccaggtcggctcagtctcctctcatccacatccaaatacaaagtaacagtcgccgaggtccagcgccggttgagcccgcctgagtgtctcaatgcttctctgttgggcggcgttcttaggcgagctaagtccaaaaatgggggccggagccttagggaaaaactggacaagatcgggttaaatttgccggcggggaggaggaaggccgcaaatgttactctgctcacaagcctggtggagggagaggctgtgcatttggcaagagattttgggtatgtgtgtgagaccgaattccctgctaaggcagtcgcggagttcctgaacagacagcacagcgaccctaacgaacaggtgacacgcaaaaacatgctgctcgccacgaagcagatttgtaaagagtttactgacctactggcccaggacaggagccctctgggcaattcccgtcctaatccgattttagaacctggtattcagtcgtgcctgacccactttaacctcatctcacacggctttgggagccctgccgtgtgcgctgctgttactgccctccagaactacctgactgaagctctcaaagccatggataagatgtatctatcaaataatcctaatagtcatactgacaataacgccaagagctcagacaaagaggaaaagcataggaagtag

SEQ ID NO: 30139 - DNA, 1296 bp, Artificial Sequence
  derived and/or modified sequence
atgctagtgcacagcttcagcgccatggatcgacacgatgggacctctaatggaaccgcgcgattgccccagcttggtacagtgggacagagtccatacacgagtgccccaccactttctcatacccctaatgccgatttccagccgccatatttcccacccccttatcagcccatatacccacagtctcaggatccctatagtcatgtgaatgatccttacagcctcaacccacttcacgcccagccccagccccagcacccaggctggcctggtcagaggcagagccaggagtcagggctcctccacacccatagaggcctgcctcaccagttaagcggccttgaccctaggcgagattaccgtagacacgaagaccttctccacgggccacatgcattgtcatcaggcctcggcgatttgagcatccactccctgccacatgctatagaggaggtccctcacgtcgaggaccctggaattaatatacctgatcagactgtgattaagaaaggacctgtgtcgttgagcaagtccaattccaatgctgtgagtgcaatccctatcaacaaagacaacctgttcggcggtgtggtaaacccgaatgaggtattttgctcagtgcccggaagactttctctgctgtcctctacctctaaatacaaagtgactgtggccgaggttcagcggagactcagcccaccggagtgcctcaatgcctcgctattggggggagtgctgagacgggctaagtcaaaaaacggcggacggtccctgcgggagaagttggacaaaattggtctgaacctgccggctggcaggcgcaaagccgctaacgtgacactattgacaagcctggtggagggtgaggccgtccacctggcacgggattttgggtacgtttgcgaaacagaattccccgcaaaagccgttgcagaattcctgaacagacagcacagcgatcctaatgagcaagtcacccgtaagaacatgttgttggccactaaacagatctgcaaggagtttaccgatctcttggcacaggatagatctccattgggtaattcccgccctaacccaattctggagcccggtattcagtcatgccttacgcattttaacctgatctcccacgggtttggatcccctgcagtgtgtgccgctgtgacagcccttcaaaactatcttaccgaagccctcaaagctatggacaaaatgtacctgagtaacaacccaaactcacacactgacaacaatgcaaagtctagtgacaaagaggagaaacacaggaaatag

SEQ ID NO: 30140 - DNA, 2576 bp, Artificial Sequence
  derived and/or modified sequence
cacgcacgcagacacattctccctctctgcgctctctccttcggtctccctctctgcctctttctctttcacttttgcatgccctgcaaccttttaaaatgttgccccttccctgtgattcgccagacgccgcgccgcggccccccgcgcgctcgcccgctccctctctcgctcgctttttgtctctcgcgctccctctccccactccgatttgctacactgagactcccgtcaatggactgcattgagagccggctccggcgcgagttgcctctccgcttcacgctcgatttccaggcattcttcccttattaagtattcgtgtaatattaatagtcatgaatatctgctattaggaggctccaggaacgctgcccagcgcggttattagaagctcaagcgaagccgccgctaagaaaagagggggagacacggattaaggaacacgcacgcacccacacactcacacatactttttcctttttccttttttggggtttttcatttttaaagaactttgaatcataaccagtcgcggcaggatagagaccgtgggttcgaccagctgaaggcgccgcgcgaatcggtggttcaagttcggatggatccgagccgggctcccgcgctccggggagcgtcggcgccgtgactggagtcctgggtggcgcggggctctcggcgccttttgtgtggggcgcgctcgggcggcggggcagccgggcgctccaggcttgcttgtttttttccaccctgactcgttaccccagactcttcgcagatgttagttcacagtttttcagccatggaccgtcacgacggcaccagcaacgggacggcacggttgccccagctgggcactgtaggtcaatctccctacacgagcgccccgccgctgtcccacacccccaatgccgacttccagcccccatacttccccccaccctaccagcctatctacccccagtcgcaagatccttactcccacgtcaacgacccctacagcctgaaccccctgcacgcccagccgcagccgcagcacccaggctggcccggccagaggcagagccaggagtctgggctcctgcacacgcaccgggggctgcctcaccagctgtcgggcctggatcctcgcagggactacaggcggcacgaggacctcctgcacggcccacacgcgctcagctcaggactcggagacctctcgatccactccttacctcacgccatcgaggaggtcccgcatgtagaagacccgggtattaacatcccagatcaaactgtaattaagaaaggccccgtgtccctgtccaagtccaacagcaatgccgtctccgccatccctattaacaaggacaacctcttcggcggcgtggtgaaccccaacgaagtcttctgttcagttccgggtcgcctctcgctcctcagctccacctcgaagtacaaggtcacggtggcggaagtgcagcggcggctctcaccacccgagtgtctcaacgcgtcgctgctgggcggagtgctccggagggcgaagtctaaaaatggaggaagatctttaagagaaaaactggacaaaataggattaaatctgcctgcagggagacgtaaagctgccaacgttaccctgctcacatcactagtagagggagaagctgtccacctagccagggactttgggtacgtgtgcgaaaccgaatttcctgccaaagcagtagctgaatttctcaaccgacaacattccgatcccaatgagcaagtgacaagaaaaaacatgctcctggctacaaaacagatatgcaaagagttcaccgacctgctggctcaggaccgatctcccctggggaactcacggcccaaccccatcctggagcccggcatccagagctgcttgacccacttcaacctcatctcccacggcttcggcagccccgcggtgtgtgccgcggtcacggccctgcagaactatctcaccgaggccctcaaggccatggacaaaatgtacctcagcaacaaccccaacagccacacggacaacaacgccaaaagcagtgacaaagaggagaagcacagaaagtgaggctctcctcccgccccgcccctcccacgcctcaccagccccccgcgcgcccaccctccggcgggtgacagctccgggatcagcaacccttcctgctgctgctactgctgctgctgctgccgccgccgccgccgccgctgcccttgggtccccccgagtctccgggactgccctctcgactgtcagtggggcagcctctccgactctgcacccgcctcgacctccccacccgctcccacacccctgtgccctcatgtggagcctaagagaacagaacaggccgtgaagccagcagagaaaagttctgccaagtttgtgaacccttttttttttaaacaaaacaacaaatcaacaacagcaacaacaacaacaaaaattaaaaacttttttctaaaaaaaaagtgaaaataaaaaaaattatatgcgcttcatgggactgagtcaccaccttcccttacatacttcagttcagattgtagccatacttaaaaaaaaaaaaaaa

SEQ ID NO: 30141 - protein, 251 aa, Artificial Sequence
  derived and/or modified sequence
MIYTMKKVHALWASVCLLLNLAPAPLNADSEEDEEHTIITDTELPPLKLMHSFCAFKADDGPCKAIMKRFFFNIFTRQCEEFIYGGCEGNQNRFESLEECKKMCTRDNANRIIKTTLQQEKPDFCFLEEDPGICRGYITRYFYNNQTKQCERFKYGGCLGNMNNFETLEECKNICEDGPNGFQVDNYGTQLNAVNNSLTPQSTKVPSLFVTKEGTNDGWKNAAHIYQVFLNAFCIHASMFFLGLDSISCLC

SEQ ID NO: 30142 - protein, 106 aa, Artificial Sequence
  derived and/or modified sequence
MIYTMKKVHALWASVCLLLNLAPAPLNADSEEDEEHTIITDTELPPLKLMHSFCAFKADDGPCKAIMKRFFFNIFTRQCEEFIYGGCEGNQNRFESLEECKKMCTR

SEQ ID NO: 30143 - DNA, 756 bp, Artificial Sequence
  derived and/or modified sequence
atgatctacaccatgaagaaggtgcacgccctgtgggccagcgtgtgcctgctgctgaacctggcccccgcccccctgaacgccgacagcgaggaggacgaggagcacaccatcatcaccgacaccgagctgccccccctgaagctgatgcacagcttctgcgccttcaaggccgacgacggcccctgcaaggccatcatgaagagattcttcttcaacatcttcaccagacagtgcgaggagttcatctacggcggctgcgagggcaaccagaacagattcgagagcctggaggagtgcaagaagatgtgcaccagagacaacgccaacagaatcatcaagaccaccctgcagcaggagaagcccgacttctgcttcctggaggaggaccccggcatctgcagaggctacatcaccagatacttctacaacaaccagaccaagcagtgcgagagattcaagtacggcggctgcctgggcaacatgaacaacttcgagaccctggaggagtgcaagaacatctgcgaggacggccccaacggcttccaggtggacaactacggcacccagctgaacgccgtgaacaacagcctgaccccccagagcaccaaggtgcccagcctgttcgtgaccaaggagggcaccaacgacggctggaagaacgccgcccacatctaccaggtgttcctgaacgccttctgcatccacgccagcatgttcttcctgggcctggacagcatcagctgcctgtgctag

SEQ ID NO: 30144 - DNA, 231 bp, Artificial Sequence
  derived and/or modified sequence
atgatctacaccatgaagaaggtgcacgccctgtgggccagcgtgtgcctgctgctgaacctggcccccgcccccctgaacgccgacagcgaggaggacgaggagcacaccatcatcaccgacaccgagctgccccccctgaagctgatgcacagcttctgcgccttcaaggccgacgacggcccctgcaaggccatcatgaagagattcttcttcaacatcttcacctag

SEQ ID NO: 30145 - DNA, 186 bp, Artificial Sequence
  derived and/or modified sequence
atgatctacaccatgaagaaggtgcacgccctgtgggccagcgtgtgcctgctgctgaacctggcccccgcccccctgaacgccgacagcgaggaggacgaggagcacaccatcatcaccgacaccgagctgccccccctgaagctgatgcacagcttctgcgccttcaaggccgacgacggctag

SEQ ID NO: 30146 - DNA, 321 bp, Artificial Sequence
  derived and/or modified sequence
atgatctacaccatgaagaaggtgcacgccctgtgggccagcgtgtgcctgctgctgaacctggcccccgcccccctgaacgccgacagcgaggaggacgaggagcacaccatcatcaccgacaccgagctgccccccctgaagctgatgcacagcttctgcgccttcaaggccgacgacggcccctgcaaggccatcatgaagagattcttcttcaacatcttcaccagacagtgcgaggagttcatctacggcggctgcgagggcaaccagaacagattcgagagcctggaggagtgcaagaagatgtgcaccagatag

SEQ ID NO: 30147 - DNA, 318 bp, Artificial Sequence
  derived and/or modified sequence
atgatctacaccatgaagaaggtgcacgccctgtgggccagcgtgtgcctgctgctgaacctggcccccgcccccctgaacgccgacagcgaggaggacgaggagcacaccatcatcaccgacaccgagctgccccccctgaagctgatgcacagcttctgcgccttcaaggccgacgacggcccctgcaaggccatcatgaagagattcttcttcaacatcttcaccagacagtgcgaggagttcatctacggcggctgcgagggcaaccagaacagattcgagagcctggaggagtgcaagaagatgtgcacctag

SEQ ID NO: 30148 - DNA, 756 bp, Artificial Sequence
  derived and/or modified sequence
atgatatacaccatgaagaaggtgcacgcactgtgggctagtgtctgtctactcctgaaccttgcacccgccccactcaatgcggactctgaggaagacgaggagcacaccataataacagacacggaattgccccctctgaagctgatgcactccttctgtgctttcaaagcggacgatgggccctgcaaggcaatcatgaagaggttcttcttcaatatctttaccaggcagtgtgaggagttcatctacggcggctgtgagggcaaccaaaaccgcttcgagtcactggaggaatgtaagaagatgtgcacccgcgacaatgcaaaccggatcattaagactactctgcagcaggagaagccagacttttgctttctggaggaggatccaggaatatgtagaggctacatcacaagatacttttataataaccaaacaaagcagtgcgaacgctttaagtatgggggctgtttgggcaacatgaacaactttgagactctcgaagagtgcaaaaacatttgtgaggatggaccaaatggctttcaggtggataactacggtacacagctaaacgccgtgaacaatagcctcaccccacagtccactaaagtacccagcttgtttgtgaccaaggaggggacaaacgatgggtggaagaatgccgcacatatctatcaggtgtttttaaacgccttttgtattcatgcaagtatgtttttcctcggcttggactccattagttgcctatgttag

SEQ ID NO: 30149 - DNA, 756 bp, Artificial Sequence
  derived and/or modified sequence
atgatatacaccatgaagaaagtacacgctttgtgggccagcgtgtgtctgcttctcaatctcgctcccgctccattaaacgctgactccgaggaagacgaggaacacacaattattaccgacacggaactcccaccactgaagctgatgcacagcttctgcgccttcaaggccgatgatggaccctgcaaggctattatgaagagatttttctttaacatatttacccggcagtgcgaagagtttatctacgggggctgcgaagggaaccaaaacaggtttgaatccctcgaggaatgtaagaagatgtgcacaagggacaatgcaaacagaatcatcaaaacaactctacaacaggagaaaccagacttctgttttcttgaagaggaccccggcatttgcagggggtacatcacccgatatttttacaacaatcagacaaagcaatgcgagagattcaaatatggcgggtgcttaggcaacatgaacaattttgagactttggaagaatgcaaaaatatatgtgaggacggcccgaacgggtttcaggttgataactacgggacccagctgaatgcagtcaataattctctgacaccacagagcactaaggttcctagcctcttcgtgactaaggagggtaccaatgacggatggaagaatgctgcgcacatttaccaggtctttctcaacgcattttgcattcacgcaagtatgttttttctgggactggacagtatcagttgcctctgttag

SEQ ID NO: 30150 - DNA, 231 bp, Artificial Sequence
  derived and/or modified sequence
atgatttacactatgaagaaagtccatgcactctgggcctccgtgtgtttattgctgaatttagcccccgcaccacttaatgccgactcagaagaagatgaggagcacaccatcatcaccgatactgagcttcccccccttaagctcatgcattctttttgtgcattcaaggcagatgatggaccttgtaaggccattatgaagcggttttttttcaacatattcacctag

SEQ ID NO: 30151 - DNA, 186 bp, Artificial Sequence
  derived and/or modified sequence
atgatttacacaatgaaaaaggtgcacgccctctgggcctcggtgtgtttgctcctgaatctcgctccagcacctctgaatgccgattctgaggaagatgaggagcatactattattaccgacacagaactccctccgctcaaacttatgcacagtttttgtgccttcaaagcagatgacggatag

SEQ ID NO: 30152 - DNA, 321 bp, Artificial Sequence
  derived and/or modified sequence
atgatatacactatgaagaaggtgcatgctctatgggccagtgtatgcttgctgctcaatctagccccagcaccgctgaatgccgactcagaggaagatgaggaacatacaatcattactgatactgaattgcccccactaaagctaatgcactcattctgtgccttcaaagctgacgacggaccttgtaaggctataatgaagcggtttttcttcaacatttttactagacagtgtgaggaattcatttacggcggttgcgaaggtaatcagaaccgcttcgagtccctcgaggaatgcaagaagatgtgcactcggtag

SEQ ID NO: 30153 - DNA, 321 bp, Artificial Sequence
  derived and/or modified sequence
atgatatacaccatgaaaaaggtccacgcactgtgggcttctgtctgtttgctgctaaacctggccccggccccgcttaacgcagacagcgaagaggatgaggagcacaccatcatcacagacactgaacttccccctctgaaattaatgcattcgttctgcgccttcaaggccgatgacggcccctgcaaagccatcatgaaacggttcttctttaatatattcactagacagtgtgaggaatttatctacggcggctgcgaaggaaatcagaaccgcttcgagagcctcgaagagtgcaagaagatgtgtacccgttag

SEQ ID NO: 30154 - DNA, 318 bp, Artificial Sequence
  derived and/or modified sequence
atgatctatacgatgaaaaaagtccacgccctgtgggcatctgtgtgtttactgcttaatttagcccctgcccccctgaacgctgactccgaggaagatgaggaacatacgatcataaccgatacagagctgcctccactcaaactcatgcattctttttgcgctttcaaggcagatgacggtccatgcaaggcaatcatgaagcggttttttttcaatattttcactagacagtgtgaagagttcatttatggaggttgtgaggggaatcaaaacagattcgaaagcctggaagaatgcaagaagatgtgtacgtag

SEQ ID NO: 30155 - DNA, 756 bp, Artificial Sequence
  derived and/or modified sequence
atgatctacaccatgaagaaggtgcacgccctgtgggcctctgtgtgcctgctgctgaacctggccccagcccccctgaatgctgacagcgaggaggatgaggagcacaccatcatcacagacacagagctgccccccctgaagctgatgcacagcttctgtgccttcaaggcagatgatggcccctgcaaggccatcatgaagcgcttcttcttcaacatcttcacccggcagtgtgaggagttcatctacggcggctgtgagggcaaccagaacagatttgagagcctggaggagtgcaagaagatgtgcacccgggacaatgccaaccgcatcatcaagaccaccctgcagcaggagaagccagacttctgcttcctggaggaggaccccggcatctgccggggctacatcacccgctacttctacaacaaccagaccaagcagtgtgagcgcttcaagtatggaggctgcctgggcaacatgaacaactttgagaccctggaggagtgcaagaacatctgtgaagatggccccaacggcttccaggtggacaactacggcacccagctgaatgctgtgaacaacagcctgaccccccagagcaccaaggtgcccagcctgtttgtgaccaaggagggcaccaatgatggctggaagaatgctgcccacatctaccaggtgttcctgaatgccttctgcatccacgcctccatgttcttcctgggcctggacagcatcagctgcctgtgctag

SEQ ID NO: 30156 - DNA, 231 bp, Artificial Sequence
  derived and/or modified sequence
atgatctacaccatgaagaaggtgcacgccctgtgggcctctgtgtgcctgctgctgaacctggccccagcccccctgaatgctgacagcgaggaggatgaggagcacaccatcatcacagacacagagctgccccccctgaagctgatgcacagcttctgtgccttcaaggcagatgatggcccctgcaaggccatcatgaagcgcttcttcttcaacatcttcacctag

SEQ ID NO: 30157 - DNA, 186 bp, Artificial Sequence
  derived and/or modified sequence
atgatctacaccatgaagaaggtgcacgccctgtgggcctctgtgtgcctgctgctgaacctggccccagcccccctgaatgctgacagcgaggaggatgaggagcacaccatcatcacagacacagagctgccccccctgaagctgatgcacagcttctgtgccttcaaggcagatgatggatag

SEQ ID NO: 30158 - DNA, 321 bp, Artificial Sequence
  derived and/or modified sequence
atgatctacaccatgaagaaggtgcacgccctgtgggcctctgtgtgcctgctgctgaacctggccccagcccccctgaatgctgacagcgaggaggatgaggagcacaccatcatcacagacacagagctgccccccctgaagctgatgcacagcttctgtgccttcaaggcagatgatggcccctgcaaggccatcatgaagcgcttcttcttcaacatcttcacccggcagtgtgaggagttcatctacggcggctgtgagggcaaccagaacagatttgagagcctggaggagtgcaagaagatgtgcaccaggtag

SEQ ID NO: 30159 - DNA, 318 bp, Artificial Sequence
  derived and/or modified sequence
atgatctacaccatgaagaaggtgcacgccctgtgggcctctgtgtgcctgctgctgaacctggccccagcccccctgaatgctgacagcgaggaggatgaggagcacaccatcatcacagacacagagctgccccccctgaagctgatgcacagcttctgtgccttcaaggcagatgatggcccctgcaaggccatcatgaagcgcttcttcttcaacatcttcacccggcagtgtgaggagttcatctacggcggctgtgagggcaaccagaacagatttgagagcctggaggagtgcaagaagatgtgcacctag

SEQ ID NO: 30160 - DNA, 756 bp, Artificial Sequence
  derived and/or modified sequence
atgatctacaccatgaagaaggtgcacgccctgtgggccagcgtgtgcctcctgctaaacctcgcaccagcccccctcaatgcagattcagaagaagacgaagagcacaccatcattaccgacaccgagttgccaccactgaagctcatgcattcattctgcgcattcaaagctgatgacgggccatgtaaggccattatgaagcgcttcttcttcaatatatttacacgacaatgtgaggaattcatctatggcggctgcgaagggaatcaaaaccgctttgagtctttagaggaatgcaagaagatgtgcacaagagacaacgccaaccggattattaagaccacccttcagcaagagaaaccggacttctgttttttggaggaggatccaggaatttgtagagggtacattacaagatacttctacaataaccaaacaaaacagtgcgagaggttcaaatacgggggttgtctgggtaatatgaacaatttcgagaccctggaggagtgcaaaaacatttgcgaggatggacccaatgggttccaggtggacaactacggtacacagctcaatgccgtcaataacagccttacccctcaaagcaccaaggtcccctcgctgttcgttacaaaggaaggcaccaacgatggatggaagaatgcggcgcacatataccaggtctttttgaatgcattttgcattcacgcctccatgttctttcttggtcttgacagtatctcctgtctttgttag

SEQ ID NO: 30161 - DNA, 756 bp, Artificial Sequence
  derived and/or modified sequence
atgatctacaccatgaagaaggtgcacgccctgtgggccagcgtgtgcttattgctgaacctcgccccagcgccattgaacgctgactcggaggaggatgaagaacacaccattataactgacaccgagcttccaccgttgaaactgatgcattctttctgcgcctttaaagctgatgatggcccatgcaaggcgatcatgaaaagattcttcttcaacatcttcacgagacaatgcgaggagtttatttatggaggctgcgaggggaatcagaatcggtttgagtccctggaggaatgcaaaaaaatgtgcacacgggacaatgctaaccggatcatcaagactactctccagcaggaaaagcccgatttctgtttcctcgaagaggaccccggcatatgtcgtggatatataacccggtacttctacaacaaccagaccaagcagtgcgagagattcaagtatggtggctgtttgggcaatatgaataacttcgaaaccctggaagaatgtaaaaacatctgtgaggatggcccgaatggctttcaagtagataattacggcacccaacttaacgcagttaacaacagtctcactcctcagtccacgaaggtcccctcactcttcgtgactaaagaaggaacgaacgacgggtggaaaaatgctgcccatatttatcaggtctttcttaatgccttctgcattcacgcctcaatgttctttttgggcctcgattcaattagctgcctgtgctag

SEQ ID NO: 30162 - DNA, 231 bp, Artificial Sequence
  derived and/or modified sequence
atgatctacaccatgaagaaggtgcacgccctgtgggccagcgtgtgcctcctgcttaatttggccccagcacctctgaatgctgacagcgaagaagacgaggagcacaccatcatcacagacacagaattacctccgctaaagctgatgcactctttttgcgccttcaaggcggatgacggcccgtgcaaggctatcatgaaaagattctttttcaacatcttcacctag

SEQ ID NO: 30163 - DNA, 186 bp, Artificial Sequence
  derived and/or modified sequence
atgatctacaccatgaagaaggtgcacgccctgtgggccagcgtgtgcttactcctgaacctggctcctgcccccctcaatgccgatagcgaagaggatgaagagcataccattattactgacactgaattgccaccgctaaagctgatgcactcattctgtgcgtttaaagccgacgacgggtag

SEQ ID NO: 30164 - DNA, 321 bp, Artificial Sequence
  derived and/or modified sequence
atgatctacaccatgaagaaggtgcacgccctgtgggccagcgtgtgtctcttgctgaacctagccccagcccctctgaacgctgacagcgaagaggacgaagaacataccatcatcaccgacacggagctccctccacttaagttgatgcacagcttctgcgctttcaaggctgacgatgggccatgcaaagccattatgaaacgattcttctttaacatcttcacccgccagtgcgaagagttcatttatggcggttgcgagggaaaccagaatagattcgagtcccttgaggagtgcaagaagatgtgtactagatag

SEQ ID NO: 30165 - DNA, 321 bp, Artificial Sequence
  derived and/or modified sequence
atgatctacaccatgaagaaggtgcacgccctgtgggccagcgtgtgcctgctgctgaatctggctcccgccccactgaatgccgactccgaggaagatgaggaacataccatcatcacagatactgaactgccaccactgaagctcatgcattcattctgtgccttcaaggccgatgacggcccttgtaaagccattatgaagagatttttcttcaacatcttcacccgacagtgcgaggagtttatttatggagggtgcgagggaaatcagaaccggtttgaaagcctggaggaatgtaagaagatgtgcactcggtag

SEQ ID NO: 30166 - DNA, 318 bp, Artificial Sequence
  derived and/or modified sequence
atgatctacaccatgaagaaggtgcacgccctgtgggccagcgtgtgtctgctgttaaaccttgccccggccccactcaacgccgatagtgaggaagacgaggagcataccattatcaccgatactgaactacctccactgaagctaatgcactccttttgcgcttttaaggctgacgatggtccttgcaaagctattatgaaacgcttctttttcaacattttcacacggcagtgcgaagaattcatctacgggggatgtgagggtaatcagaaccgctttgagagtctagaagagtgcaaaaagatgtgtacctag

SEQ ID NO: 30167 - DNA, 756 bp, Artificial Sequence
  derived and/or modified sequence
atgatctacacaatgaaaaaggtgcacgccctgtgggccagtgtgtgcctgctccttaacttggcgccagcccctcttaacgctgactcggaagaagacgaggaacacactatcatcaccgacaccgagctgcctcctctaaagctgatgcatagcttctgcgcctttaaggctgacgatggcccttgcaaagccataatgaagcgatttttttttaatatcttcactcggcaatgtgaagagtttatctacgggggatgtgaaggaaatcaaaaccgcttcgagtccctagaagagtgtaagaaaatgtgtacaagggacaacgcaaataggattatcaaaactacattacagcaggagaagccagatttttgtttcttggaagaagaccccggtatttgcagaggttacataacacggtatttctacaataaccagactaagcaatgtgaacgcttcaagtatgggggttgcctggggaatatgaacaattttgaaaccctcgaggagtgtaagaatatttgcgaagacggtccaaacggatttcaagtcgacaactacggcactcagctgaacgctgtgaataactcccttacaccccaatcaacgaaagtgccttctctgtttgtgacaaaggagggaaccaacgatggatggaaaaacgccgcacacatatatcaggttttcctgaatgcattttgtatccacgcctctatgttctttctagggttggactcaatcagctgtctctgttag

SEQ ID NO: 30168 - DNA, 756 bp, Artificial Sequence
  derived and/or modified sequence
atgatctacacaatgaagaaagtccatgcattgtgggcctcagtgtgtctgctccttaacctggcaccagcccctctaaatgcagacagtgaggaggacgaagaacacacaattattactgacaccgaattgccacctctgaagctgatgcacagcttttgtgcttttaaggctgacgatggaccatgcaaggcaattatgaaacgattcttttttaatatcttcaccaggcagtgtgaggagtttatctatggtggatgcgaggggaaccagaacaggttcgagagcctggaagagtgtaagaagatgtgcactagggataatgctaatcgcatcatcaagacaaccctgcagcaggagaagcctgacttctgtttccttgaagaggatcccggaatctgccgaggctacatcactagatacttctacaacaatcagacaaaacagtgcgagcggttcaagtatggcggttgcctcggaaatatgaataatttcgaaactttggaggagtgcaaaaacatatgtgaggacggaccgaatggattccaagtcgacaactatggcacccaactgaatgccgtgaataactccctgacaccacagagtactaaggtaccctctttgtttgtgaccaaagagggaacaaacgacggatggaaaaatgccgctcatatctaccaggttttcctgaatgcgttttgcattcacgcaagtatgttcttcctggggctggacagcatctcttgtctgtgctag

SEQ ID NO: 30169 - DNA, 231 bp, Artificial Sequence
  derived and/or modified sequence
atgatctatactatgaaaaaggttcatgccctgtgggccagcgtgtgcctcttgctgaatctggcgcctgcaccactgaacgccgactccgaggaggatgaggagcatacgatcatcactgacacggagctcccgccattgaagctgatgcattcgttctgtgcttttaaggccgacgatggcccttgcaaggcaatcatgaaaagatttttcttcaatatcttcacatag

SEQ ID NO: 30170 - DNA, 186 bp, Artificial Sequence
  derived and/or modified sequence
atgatttacactatgaagaaagtccatgccctctgggcatcggtgtgcctgctcttaaatctggcgcctgctcctctaaatgctgacagtgaagaagacgaggagcatacaatcattaccgataccgaactgccccctctgaagctaatgcattcattctgcgcgtttaaggctgatgatggctag

SEQ ID NO: 30171 - DNA, 321 bp, Artificial Sequence
  derived and/or modified sequence
atgatctacactatgaaaaaggtccacgcattatgggcatccgtgtgtttactgctgaacctcgccccagcaccactcaatgccgacagcgaagaggacgaggaacataccataattaccgatacggagctccctcccttaaaactgatgcactccttctgtgccttcaaagctgacgatggaccatgcaaagccatcatgaagcgattcttttttaacatcttcacccgtcagtgtgaagaatttatctacgggggatgtgaaggtaaccagaaccgatttgaatctctcgaggagtgtaagaagatgtgtacacggtag

SEQ ID NO: 30172 - DNA, 321 bp, Artificial Sequence
  derived and/or modified sequence
atgatctacacaatgaagaaggtgcacgctctctgggcatcagtgtgtttactactcaatctagcccctgccccactgaacgccgactcagaggaggacgaggaacataccatcataactgacactgaactgcccccactgaaactgatgcactcattttgcgctttcaaagcggacgacggcccatgtaaggctattatgaaaagattctttttcaacatcttcactcggcagtgtgaggaattcatttatggcggatgtgaaggaaaccagaacaggttcgaatctctagaggaatgtaaaaaaatgtgcactcggtag

SEQ ID NO: 30173 - DNA, 318 bp, Artificial Sequence
  derived and/or modified sequence
atgatctacaccatgaagaaagtgcatgccctgtgggcttccgtatgtcttctcctgaacctggccccagcccctctcaatgctgactccgaggaggatgaggagcataccattattaccgatacggagctgccgccactgaagcttatgcatagcttctgtgcctttaaggcagatgatgggccttgcaaggcgatcatgaagagattctttttcaatatattcactcgacagtgtgaagagttcatttacgggggatgtgaagggaaccagaatcgatttgagtctctggaggagtgcaagaagatgtgcacctag

SEQ ID NO: 30174 - DNA, 1088 bp, Artificial Sequence
  derived and/or modified sequence
aacagacagcagcgactttaggctggataatagtcaaattcttacctcgctctttcactgctagtaagatcagattgcgtttctttcagttactcttcaatcgccagtttcttgatctgcttctaaaagaagaagtagagaagataaatcctgtcttcaatacctggaaggaaaaacaaaataacctcaactccgttttgaaaaaaacattccaagaactttcatcagagattttacttagatgatttacacaatgaagaaagtacatgcactttgggcttctgtatgcctgctgcttaatcttgcccctgcccctcttaatgctgattctgaggaagatgaagaacacacaattatcacagatacggagttgccaccactgaaacttatgcattcattttgtgcattcaaggcggatgatggcccatgtaaagcaatcatgaaaagatttttcttcaatattttcactcgacagtgcgaagaatttatatatgggggatgtgaaggaaatcagaatcgatttgaaagtctggaagagtgcaaaaaaatgtgtacaagagataatgcaaacaggattataaagacaacattgcaacaagaaaagccagatttctgctttttggaagaagatcctggaatatgtcgaggttatattaccaggtatttttataacaatcagacaaaacagtgtgaacgtttcaagtatggtggatgcctgggcaatatgaacaattttgagacactggaagaatgcaagaacatttgtgaagatggtccgaatggtttccaggtggataattatggaacccagctcaatgctgtgaataactccctgactccgcaatcaaccaaggttcccagcctttttgttacaaaagaaggaacaaatgatggttggaagaatgcggctcatatttaccaagtctttctgaacgccttctgcattcatgcatccatgttctttctaggattggatagcatttcatgcctatgttaatatttgtgcttttggcatttccttaatatttatatgtatacgtgatgcctttgatagcatactgctaataaagttttaatatttacatgca

SEQ ID NO: 30175 - DNA, 1119 bp, Artificial Sequence
  derived and/or modified sequence
agcagcgactttaggctggataatagtcaaattcttacctcgctctttcactgctagtaagatcagattgcgtttctttcagttactcttcaatcgccagtttcttgatctgcttctaaaagaagaagtagagaagataaatcctgtcttcaatacctggaaggaaaaacaaaataacctcaactccgttttgaaaaaaacattccaagaactttcatcagagattttacttgaacagcagtctcagcggttagcagcacaagagatgatttacacaatgaagaaagtacatgcactttgggcttctgtatgcctgctgcttaatcttgcccctgcccctcttaatgctgattctgaggaagatgaagaacacacaattatcacagatacggagttgccaccactgaaacttatgcattcattttgtgcattcaaggcggatgatggcccatgtaaagcaatcatgaaaagatttttcttcaatattttcactcgacagtgcgaagaatttatatatgggggatgtgaaggaaatcagaatcgatttgaaagtctggaagagtgcaaaaaaatgtgtacaagagataatgcaaacaggattataaagacaacattgcaacaagaaaagccagatttctgctttttggaagaagatcctggaatatgtcgaggttatattaccaggtatttttataacaatcagacaaaacagtgtgaacgtttcaagtatggtggatgcctgggcaatatgaacaattttgagacactggaagaatgcaagaacatttgtgaagatggtccgaatggtttccaggtggataattatggaacccagctcaatgctgtgaataactccctgactccgcaatcaaccaaggttcccagcctttttgttacaaaagaaggaacaaatgatggttggaagaatgcggctcatatttaccaagtctttctgaacgccttctgcattcatgcatccatgttctttctaggattggatagcatttcatgcctatgttaatatttgtgcttttggcatttccttaatatttatatgtatacgtgatgcctttgatagcatactgctaataaagttttaatatttacatgcatagtaaa

SEQ ID NO: 30176 - DNA, 554 bp, Artificial Sequence
  derived and/or modified sequence
attcccaactgccagtgatctctgaagccgactctgaggctccctctttgctctaacagacagcagcgactttaggctggataatagtcaaattcttacctcgctctttcactgctagtaagatcagattgcgtttctttcagttactcttcaatcgccagtttcttgatctgcttctaaaagaagaagtagagaagataaatcctgtcttcaatacctggaaggaaaaacaaaataacctcaactccgttttgaaaaaaacattccaagaactttcatcagagattttacttgaacagcagtctcagcggttagcagcacaagagatgatttacacaatgaagaaagtacatgcactttgggcttctgtatgcctgctgcttaatcttgcccctgcccctcttaatgctgattctgaggaagatgaagaacacacaattatcacagatacggagttgccaccactgaaacttatgcattcattttgtgcattcaaggcggatgatggcccatgtaaagcaatcatgaaaagatttttcttcaatattttcact

SEQ ID NO: 30177 - DNA, 685 bp, Artificial Sequence
  derived and/or modified sequence
ctctgaggctccctctttgctctaacagacagcagcgactttaggctggataatagtcaaattcttacctcgctctttcactgctagtaagatcagattgcgtttctttcagttactcttcaatcgccagtttcttgatctgcttctaaaagaagaagtagagaagataaatcctgtcttcaatacctggaaggaaaaacaaaataacctcaactccgttttgaaaaaaacattccaagaactttcatcagagattttacttatgaagtcttgctctgttgcccaggctggagcgcagtggcacaatctcagctcactgaaaccttcgccccctgggctcaagctagccagtcttttagtaaacatttagtcaacaaatctgcaattataacggagtacgggtggctggcaagatggccgaataggaagagctccagtctacagctcccgcagagatcaacgcagaaggaacagcagtctcagcggttagcagcacaagagatgatttacacaatgaagaaagtacatgcactttgggcttctgtatgcctgctgcttaatcttgcccctgcccctcttaatgctgattctgaggaagatgaagaacacacaattatcacagatacggagttgccaccactgaaacttatgcattcattttgtgcattcaaggcggatgatggcc

SEQ ID NO: 30178 - DNA, 804 bp, Artificial Sequence
  derived and/or modified sequence
aataaacagtcatgtcgctaacacaaagcctgtttggtggtctcttcacatggacgcgcgtgaaatttggtgccgtgactcggatcgggggacctcccttgggagatcaatcccctgtcctcttgttctttgctccgtgagaaagatccacctacgacctcaggtcctcagaccaaccagcccaagaaacatctcaccaatttcaaatccgttactcttcaatcgccagtttcttgatctgcttctaaaagaagaagtagagaagataaatcctgtcttcaatacctggaaggaaaaacaaaataacctcaactccgttttgaaaaaaacattccaagaactttcatcagagattttacttgacaggaaaggccatgtgaggacatagggagaaagcagccaccattggcaagccaagagagagccctcaccaggaacgattggaccagcaccttgatcttggattttctagcctccagaactagatgatttacacaatgaagaaagtacatgcactttgggcttctgtatgcctgctgcttaatcttgcccctgcccctcttaatgctgattctgaggaagatgaagaacacacaattatcacagatacggagttgccaccactgaaacttatgcattcattttgtgcattcaaggcggatgatggcccatgtaaagcaatcatgaaaagatttttcttcaatattttcactcgacagtgcgaagaatttatatatgggggatgtgaaggaaatcagaatcgatttgaaagtctggaagagtgcaaaaaaatgtgtacaagag

SEQ ID NO: 30179 - DNA, 545 bp, Artificial Sequence
  derived and/or modified sequence
agttactcttcaatcgccagtttcttgatctgcttctaaaagaagaagtagagaagataaatcctgtcttcaatacctggaaggaaaaacaaaataacctcaactccgttttgaaaaaaacattccaagaactttcatcagagattttactttacgggtggctggcaagatggccgaataggaagagctccagtctacagctcccgcagagatcaacgcagaagagatgatttacacaatgaagaaagtacatgcactttgggcttctgtatgcctgctgcttaatcttgcccctgcccctcttaatgctgattctgaggaagatgaagaacacacaattatcacagatacggagttgccaccactgaaacttatgcattcattttgtgcattcaaggcggatgatggcccatgtaaagcaatcatgaaaagatttttcttcaatattttcactcgacagtgcgaagaatttatatatgggggatgtgaaggaaatcagaatcgatttgaaagtctggaagagtgcaaaaaaatgtgtacaagag

SEQ ID NO: 30180 - DNA, 733 bp, Artificial Sequence
  derived and/or modified sequence
attcccaactgccagtgatctctgaagccgactctgaggctccctctttgctctaacagacagcagcgactttaggctggataatagtcaaattcttacctcgctctttcactgctagtaagatcagattgcgtttctttcagttactcttcaatcgccagtttcttgatctgcttctaaaagaagaagtagagaagataaatcctgtcttcaatacctggaaggaaaaacaaaataacctcaactccgttttgaaaaaaacattccaagaactttcatcagagattttacttgacaggaaaggccatgtgaggacatagggagaaagcagccaccattggcaagccaagagagagccctcaccaggaacgattggaccagcaccttgatcttggattttctagcctccagaactagatgatttacacaatgaagaaagtacatgcactttgggcttctgtatgcctgctgcttaatcttgcccctgcccctcttaatgctgattctgaggaagatgaagaacacacaattatcacagatacggagttgccaccactgaaacttatgcattcattttgtgcattcaaggcggatgatggcccatgtaaagcaatcatgaaaagatttttcttcaatattttcactcgacagtgcgaagaatttatatatgggggatgtgaaggaaatcagaatcgatttgaaagtctggaagagtgcaaaaaaatgtgtacaa

SEQ ID NO: 30181 - protein, 469 aa, Artificial Sequence
  derived and/or modified sequence
MEERMEMISERPKESMYSWNKTAEKSDFEAVEALMSMSCSWKSDFKKYVENRPVTPVSDLSEEENLLPGTPDFHTIPAFCLTPPYSPSDFEPSQVSNLMAPAPSTVHFKSLSDTAKPHIAAPFKEEEKSPVSAPKLPKAQATSVIRHTADAQLCNHQTCPMKAASILNYQNNSFRRRTHLNVEAARKNIPCAAVSPNRSKCERNTVADVDEKASAALYDFSVPSSETVICRSQPAPVSPQQKSVLVSPPAVSAGGVPPMPVICQMVPLPANNPVVTTVVPSTPPSQPPAVCPPVVFMGTQVPKGAVMFVVPQPVVQSSKPPVVSPNGTRLSPIAPAPGFSPSAAKVTPQIDSSRIRSHICSHPGCGKTYFKSSHLKAHTRTHTGEKPFSCSWKGCERRFARSDELSRHRRTHTGEKKFACPMCDRRFMRSDHLTKHARRHLSAKKLPNWQMEVSKLNDIALPPTPAPTQ

SEQ ID NO: 30182 - DNA, 3659 bp, Artificial Sequence
  derived and/or modified sequence
ggttcctaagggaacggcggctcgcggggagctggaaggggcgggcgcctcccggagcctggcgcccgcagccccgcccctccccgcgggcccggcgcgcacggccgggcggttggcggcggcgcccgcggcccctcccccgggtcgggcgcgggcgggggcccgcaagctcaggaagtaggggaaaggtgacggcgcggcaattcccagttcacgtttcctgcgcctcccggagcagccgctgatcacgctttgttcacatgcctcgccccctcctcgcccacgcccccgccccgggccgcacagccaatccgggctcgggccgccgagccggccggccaatggcgggggcaggggcgcggggacgtgcgagcggcgaggaatgttcccagtgactcacccgtgagcctcattgaggttagggcggccccatccgtcggtctccgccagctaggatctcccccgccgtccgcccccgcccctcgtctgcctcccccgcccgcgcctccgcccgcgcttccctttcctgcctcgcgccccactccctttcctcccctccctgtttcccttcctgtccttcccagctcacgctctctttccctgccgcctgcctttcttttttcctttttttgcattggcgtcttggggctgttacacacacgcgcgctgtccattgcagcttacataaaggcgggcgcgattatgcaattatattgttagcgatatttcaagagcaatggctcgttttcttaggatttcaacacgaaggcatcatgcatttttgaaaaactagtattgagaataataccttgcaacgtaaagaatgttttttggtatttttacacaatctctactttgaccaaacgagtctggacagttttcttttaatggaaaataggagaaatggaggaaagaatggaaatgatttctgaaaggccaaaagagagtatgtattcctggaacaaaactgcagagaaaagtgattttgaagctgtagaagcacttatgtcaatgagctgcagttggaagtctgattttaagaaatacgttgaaaacagacctgttacaccagtatctgatttgtcagaggaagagaatctgcttccgggaacacctgattttcatacaatcccagcattttgtttgactccaccttacagtccttctgactttgaaccctctcaagtgtcaaatctgatggcaccagcgccatctactgtacacttcaagtcactctcagatactgccaaacctcacattgccgcacctttcaaagaggaagaaaagagcccagtatctgcccccaaactccccaaagctcaggcaacaagtgtgattcgtcatacagctgatgcccagctatgtaaccaccagacctgcccaatgaaagcagccagcatcctcaactatcagaacaattcttttagaagaagaacccacctaaatgttgaggctgcaagaaagaacataccatgtgccgctgtgtcaccaaacagatccaaatgtgagagaaacacagtggcagatgttgatgagaaagcaagtgctgcactttatgacttttctgtgccttcctcagagacggtcatctgcaggtctcagccagcccctgtgtccccacaacagaagtcagtgttggtctctccacctgcagtatctgcagggggagtgccacctatgccggtcatctgccagatggttccccttcctgccaacaaccctgttgtgacaacagtcgttcccagcactcctcccagccagccaccagccgtttgcccccctgttgtgttcatgggcacacaagtccccaaaggcgctgtcatgtttgtggtaccccagcccgttgtgcagagttcaaagcctccggtggtgagcccgaatggcaccagactctctcccattgcccctgctcctgggttttccccttcagcagcaaaagtcactcctcagattgattcatcaaggataaggagtcacatctgtagccacccaggatgtggcaagacatactttaaaagttcccatctgaaggcccacacgaggacgcacacaggagaaaagcctttcagctgtagctggaaaggttgtgaaaggaggtttgcccgttctgatgaactgtccagacacaggcgaacccacacgggtgagaagaaatttgcgtgccccatgtgtgaccggcggttcatgaggagtgaccatttgaccaagcatgcccggcgccatctatcagccaagaagctaccaaactggcagatggaagtgagcaagctaaatgacattgctctacctccaacccctgctcccacacagtgacagaccggaaagtgaagagtcagaactaactttggtctcagcgggagccagtggtgatgtaaaaatgcttccactgcaagtctgtggccccacaacgtgggcttaaagcagaagccccacagcctggcacgaaggccccgcctgggttaggtgactaaaagggcttcggccacaggcaggtcacagaaaggcaggtttcatttcttatcacataagagagatgagaaagcttttattcctttgaatattttttgaaggtttcagatgaggtcaacacaggtagcacagattttgaatctgtgtgcatatttgttactttacttttgctgtttatacttgagaccaacttttcaatgtgattcttctaaagcactggtttcaagaatatggaggctggaaggaaataaacattacggtacagacatggagatgtaaaatgagtttgtattattacaaatattgtcatctttttctagagttatcttctttattattcctagtctttccagtcaacatcgtggatgtagtgattaaatatatctagaactatcatttttacactattgtgaatatttggaattgaacgactgtatattgctaagagggcccaaagaattggaatcctccttaatttaattgctttgaagcatagctacaatttgtttttgcatttttgttttgaaagtttaacaaatgactgtatctaggcatttcattatgctttgaactttagtttgcctgcagtttcttgtgtagatttgaaaattgtataccaatgtgttttctgtagactctaagatacactgcactttgtttagaaaaaaaactgaagatgaaatatatattgtaaagaagggatattaagaatcttagataacttcttgaaaaagatggcttatgtcatcagtaaagtacctttatgttatgaggatataatgtgtgctttattgaattagaaaattagtgaccattattcacaggtggacaaatgttgatgttgtcctgttaatttataggcgttttttggggatgtggaggtagttgggtagaaaaattattagaacattcacttttgttaacagtatttctcttttattctgttatatagtggatgatatacacagtggcaaaacaaaagtacattgcttaaaatatatagtgaaaaatgtcactatatcttcccatttaacattgtttttgtatattgggtgtagatttctgacatcaaaacttggacccttggaaaacaaaagttttaattaaaaaaaatccttgtgacttacaatttgcacaatatttcttttgttgtactttatatcttgtttacaataaagaattccctttgg

SEQ ID NO: 30183 - DNA, 1410 bp, Artificial Sequence
  derived and/or modified sequence
atggaagagaggatggagatgatatctgaacggcccaaagagagcatgtactcatggaacaagaccgccgagaagtccgacttcgaggccgtagaggcactcatgtccatgtcttgtagctggaaaagcgacttcaaaaaatatgtggagaaccggccagtgacgcccgtatcagacttgagcgaagaggaaaatctgctccctggcacccctgattttcatactattcccgctttttgccttacacctccttacagtcctagcgattttgaaccaagccaggtgagtaatctgatggcacccgctccgtccaccgtgcactttaagagtctgtccgacaccgccaaaccccacatagcagcgcccttcaaggaggaggagaaaagcccagtgagtgcaccaaagttgccgaaggcccaggctacaagcgtgattcggcacactgccgacgcacaactttgcaaccatcaaacctgtccaatgaaggccgcgtctattctgaattaccagaataatagctttcgccgccgcacgcacctgaacgtggaagcggcccgtaaaaacattccctgtgctgcagtgagtcccaataggtccaaatgcgagcgcaacaccgtggccgatgtagatgaaaaagccagtgccgcattgtatgacttttctgtcccctcatcagagactgtcatttgtagaagccaacctgcgccagttagtccacagcagaaatctgttttggtgtctccaccggcagtcagcgcgggcggagtgccgcccatgcctgtcatctgccagatggtccccctgccagccaacaatccagtggtgacaacagtagtcccttccactcccccttcccagccccccgctgtatgtcctccagtggtgtttatgggcacccaggtgcccaagggagctgtaatgttcgtcgtgccacagcctgtagtgcagtcaagcaaacccccagtggtatcccctaacggtacgcggctcagcccaattgcaccagcgcctgggtttagcccctccgccgccaaggtcacaccccagatcgatagctcccgtattaggtctcatatctgctctcatcctggctgtggcaaaacctacttcaagtcaagtcatcttaaagcacatacaagaactcacacaggagaaaagcccttcagctgctcatggaagggttgtgagcggagattcgcccggtccgacgagttatccaggcacagaagaacacacactggagaaaaaaaatttgcttgtcctatgtgcgataggaggttcatgcggtctgaccatctgacgaaacacgcacgacgccatttgtctgcgaaaaaacttccaaactggcaaatggaggtgagcaagttgaacgacatcgcactgcctcccacgcctgcaccgacccagtag

SEQ ID NO: 30184 - DNA, 1410 bp, Artificial Sequence
  derived and/or modified sequence
atggaggagaggatggagatgatcagcgagcggcccaaggagagcatgtacagctggaacaagacagctgagaagagtgactttgaggccgtggaggccctgatgtccatgagctgctcctggaagagtgacttcaagaagtatgtggagaacagacctgtgacccctgtgtctgacctgtctgaggaggagaacctgctgcccggcaccccagacttccacaccatcccagccttctgcctgaccccaccctacagccccagcgactttgagcccagccaggtgagcaacctgatggccccagcccccagcacagtgcacttcaagagcctgagtgacacagccaagccccacatcgccgcccccttcaaggaggaggagaagagccctgtgtctgcccccaagctgcccaaggcccaggccaccagcgtcatccgccacacagcagatgcccagctgtgcaaccaccagacctgccccatgaaggccgccagcatcctgaactaccagaacaacagcttcagaagaaggacccacctgaatgtggaggccgccaggaagaacatcccctgtgccgctgtgagccccaacagaagcaaatgtgaaagaaacacagtggctgatgtggatgagaaggccagcgctgccctgtatgacttctctgtgcccagcagcgagaccgtcatctgccgcagccagcctgcccctgtgagcccccagcagaagtctgtgctggtgagccccccagctgtgtctgctggaggagtgccccccatgcctgtgatctgccagatggtgcccctgcctgccaacaaccctgtggtgaccaccgtggtgcccagcaccccacccagccagcccccagctgtgtgcccccctgtggtgttcatgggcacccaggtgcccaagggagctgtgatgtttgtggtgccccagcctgtggtgcagagcagcaagccccctgtggtgagccccaacggcacccggctgagccccatcgccccagcccctggcttcagccccagcgctgccaaggtgaccccccagattgacagcagccgcatccgcagccacatctgcagccaccctggctgcggcaagacctacttcaagagcagccacctgaaggcccacaccaggacccacactggagagaagcccttcagctgctcctggaagggctgtgaaagaagatttgcccggagtgatgagctgagccgccacaggaggacccacactggagagaagaagtttgcctgccccatgtgtgaccggcgcttcatgagaagtgaccacctgaccaagcacgcccggcggcacctgagcgccaagaagctgcccaactggcagatggaggtgtccaagctgaatgacatcgccctgccccccaccccagcccccacccagtag

SEQ ID NO: 30185 - DNA, 1410 bp, Artificial Sequence
  derived and/or modified sequence
atggaggagcggatggagatgatcagcgagcggcccaaggagagcatgtacagctggaacaagactgctgagaagtcagacttcgaagcagtggaggccttgatgtcaatgtcttgttcctggaaatcagacttcaaaaagtatgtggagaacaggcccgtgacccctgtgtccgatctgtcagaagaggagaatctactgcctggcacccccgactttcacacaatcccagccttttgcctgactcccccctattcgccttcagattttgagccttcgcaggtctcaaatttgatggctccagccccttccaccgtgcatttcaagagtttatcagacacagctaagccacacatcgcggccccatttaaagaagaggagaagagtcccgttagtgcaccaaaactgcccaaagcacaggccacctctgtcattcggcacacggccgatgctcagctgtgcaaccatcagacatgtccgatgaaagcagccagtattttaaattatcaaaataactcatttcgtaggcgtacccatctgaatgttgaggccgcccgcaagaacattccatgcgcagcggtgtcccctaacaggtccaagtgtgagaggaataccgtggctgatgttgacgagaaggcctctgcagccctgtacgattttagcgttcctagtagcgaaacggttatctgcagaagccagcctgctccagtgtctcctcagcagaagtccgtcctcgtgtccccccctgctgtgtctgctggaggtgtgccccccatgccagtcatctgtcagatggtgcctctgcccgcaaataaccccgtcgttaccacagtcgtcccaagtacaccaccgtctcagcctcccgcagtgtgcccgccagtggtttttatgggcacacaggtacctaagggtgccgtgatgttcgtggttccccagcctgtggttcaaagttcaaagccacctgtggtgtcccccaatggaacaagactatcccccatcgcaccagcaccaggtttttccccatcagctgctaaggttactccacagatcgacagttcgagaatcagatctcatatatgctcccacccaggctgcggcaagacatactttaagagctctcaccttaaagcacatactaggacccacacaggggagaaacccttctcttgtagctggaagggctgcgagagacggttcgcaaggtccgatgagctgagtaggcaccggcgaacccacacgggcgagaaaaagttcgcctgtccaatgtgtgacagacgctttatgcgaagcgatcacctcaccaagcacgcaaggcggcacctgtccgccaagaagctccctaattggcaaatggaagtgagcaaactcaatgatatagcgcttcctccaactccggcccccacccagtag

SEQ ID NO: 30186 - DNA, 1410 bp, Artificial Sequence
  derived and/or modified sequence
atggaggagcggatggagatgatttccgagcgcccaaaggagagcatgtactcctggaacaaaacggctgagaagtccgactttgaagcggttgaagctctgatgtcgatgtcatgctcatggaaaagtgattttaagaagtacgtggagaatcggcctgtaacacctgtgagtgatttgagtgaagaggaaaacctgcttccagggactccagatttccacactatccccgcattctgcctgacaccaccctacagtccctccgacttcgagcccagccaggtatccaatttgatggctcctgctcctagcacagtccactttaagagtctcagcgatacagcgaagcctcatattgctgccccttttaaagaggaagagaagtcacccgtgagtgcaccaaaactacccaaagcccaggctaccagcgtcattcgtcatacagcagacgcccaactgtgcaatcaccagacctgtccgatgaaggccgcttccatcctgaactaccagaacaacagtttccgccgacgaacccacctgaacgtggaagcagccaggaaaaacatcccgtgcgcagccgtttcacctaatcgtagcaaatgcgaacgcaacaccgtggccgatgtcgacgaaaaagccagcgccgcattgtatgacttttcagtacccagttccgagaccgtgatctgtcgcagccagcccgctccggtgagtcctcagcaaaagagcgtacttgtgagtcccccagctgtcagtgcgggaggtgtaccgcctatgcctgtgatctgccaaatggtgccgcttcctgccaacaatccagtggtcacaacggttgtacccagtacccctccttcccagcctccagcggtatgtccccctgttgtgtttatgggcactcaggtgcccaagggtgcagtgatgttcgttgtgccacagcctgtggtccaaagcagtaaacctcctgtggttagccctaatggcacaaggctttcgccgattgctcccgctcccggtttcagtccaagcgccgctaaagttactccccagattgactctagccgaatccgatcacacatctgcagccatcccggttgcgggaaaacctacttcaagagtagccatctcaaggcgcacaccagaacgcatactggtgaaaaaccattttcttgctcttggaaggggtgtgagagacggttcgccagatccgacgaactgtcccgccaccgtcgaacacataccggcgagaagaaatttgcatgcccgatgtgcgaccgccgatttatgagaagcgaccatctgaccaagcacgctcggagacacctctctgccaaaaagcttcctaattggcaaatggaagtcagtaagttgaatgacattgcactccctcctactcctgcgcctacacaatag

SEQ ID NO: 30187 - DNA, 1410 bp, Artificial Sequence
  derived and/or modified sequence
atggaggagagaatggagatgatcagcgagagacccaaggagagcatgtacagctggaacaagaccgccgagaagagcgacttcgaggccgtggaggccctgatgagcatgagctgcagctggaagagcgacttcaagaagtacgtggagaacagacccgtgacccccgtgagcgacctgagcgaggaggagaacctgctgcccggcacccccgacttccacaccatccccgccttctgcctgacccccccctacagccccagcgacttcgagcccagccaggtgagcaacctgatggcccccgcccccagcaccgtgcacttcaagagcctgagcgacaccgccaagccccacatcgccgcccccttcaaggaggaggagaagagccccgtgagcgcccccaagctgcccaaggcccaggccaccagcgtgatcagacacaccgccgacgcccagctgtgcaaccaccagacctgccccatgaaggccgccagcatcctgaactaccagaacaacagcttcagaagaagaacccacctgaacgtggaggccgccagaaagaacatcccctgcgccgccgtgagccccaacagaagcaagtgcgagagaaacaccgtggccgacgtggacgagaaggccagcgccgccctgtacgacttcagcgtgcccagcagcgagaccgtgatctgcagaagccagcccgcccccgtgagcccccagcagaagagcgtgctggtgagcccccccgccgtgagcgccggcggcgtgccccccatgcccgtgatctgccagatggtgcccctgcccgccaacaaccccgtggtgaccaccgtggtgcccagcaccccccccagccagccccccgccgtgtgcccccccgtggtgttcatgggcacccaggtgcccaagggcgccgtgatgttcgtggtgccccagcccgtggtgcagagcagcaagccccccgtggtgagccccaacggcaccagactgagccccatcgcccccgcccccggcttcagccccagcgccgccaaggtgaccccccagatcgacagcagcagaatcagaagccacatctgcagccaccccggctgcggcaagacctacttcaagagcagccacctgaaggcccacaccagaacccacaccggcgagaagcccttcagctgcagctggaagggctgcgagagaagattcgccagaagcgacgagctgagcagacacagaagaacccacaccggcgagaagaagttcgcctgccccatgtgcgacagaagattcatgagaagcgaccacctgaccaagcacgccagaagacacctgagcgccaagaagctgcccaactggcagatggaggtgagcaagctgaacgacatcgccctgccccccacccccgcccccacccagtag

SEQ ID NO: 30188 - protein, 454 aa, Artificial Sequence
  derived and/or modified sequence
MPEFLEDPSVLTKDKLKSELVANNVTLPAGEQRKDVYVQLYLQHLTARNRPPLPAGTNSKGPPDFSSDEEREPTPVLGSGAAAAGRSRAAVGRKATKKTDKPRQEDKDDLDVTELTNEDLLDQLVKYGVNPGPIVGTTRKLYEKKLLKLREQGTESRSSTPLPTISSSAENTRQNGSNDSDRYSDNEEDSKIELKLEKREPLKGRAKTPVTLKQRRVEHNQSYSQAGITETEWTSGSSKGGPLQALTRESTRGSRRTPRKRVETSEHFRIDGPVISESTPIAETIMASSNESLVVNRVTGNFKHASPILPITEFSDIPRRAPKKPLTRAEVGEKTEERRVERDILKEMFPYEASTPTGISASCRRPIKGAAGRPLELSDFRMEESFSSKYVPKYVPLADVKSEKTKKGRSIPVWIKILLFVVVAVFLFLVYQAMETNQVNPFSNFLHVDPRKSN

SEQ ID NO: 30189 - DNA, 1365 bp, Artificial Sequence
  derived and/or modified sequence
atgcccgagttcctggaggaccccagcgtgctgaccaaggacaagctgaagagcgagctggtggccaacaacgtgaccctgcccgccggcgagcagagaaaggacgtgtacgtgcagctgtacctgcagcacctgaccgccagaaacagaccccccctgcccgccggcaccaacagcaagggcccccccgacttcagcagcgacgaggagagagagcccacccccgtgctgggcagcggcgccgccgccgccggcagaagcagagccgccgtgggcagaaaggccaccaagaagaccgacaagcccagacaggaggacaaggacgacctggacgtgaccgagctgaccaacgaggacctgctggaccagctggtgaagtacggcgtgaaccccggccccatcgtgggcaccaccagaaagctgtacgagaagaagctgctgaagctgagagagcagggcaccgagagcagaagcagcacccccctgcccaccatcagcagcagcgccgagaacaccagacagaacggcagcaacgacagcgacagatacagcgacaacgaggaggacagcaagatcgagctgaagctggagaagagagagcccctgaagggcagagccaagacccccgtgaccctgaagcagagaagagtggagcacaaccagagctacagccaggccggcatcaccgagaccgagtggaccagcggcagcagcaagggcggccccctgcaggccctgaccagagagagcaccagaggcagcagaagaacccccagaaagagagtggagaccagcgagcacttcagaatcgacggccccgtgatcagcgagagcacccccatcgccgagaccatcatggccagcagcaacgagagcctggtggtgaacagagtgaccggcaacttcaagcacgccagccccatcctgcccatcaccgagttcagcgacatccccagaagagcccccaagaagcccctgaccagagccgaggtgggcgagaagaccgaggagagaagagtggagagagacatcctgaaggagatgttcccctacgaggccagcacccccaccggcatcagcgccagctgcagaagacccatcaagggcgccgccggcagacccctggagctgagcgacttcagaatggaggagagcttcagcagcaagtacgtgcccaagtacgtgcccctggccgacgtgaagagcgagaagaccaagaagggcagaagcatccccgtgtggatcaagatcctgctgttcgtggtggtggccgtgttcctgttcctggtgtaccaggccatggagaccaaccaggtgaaccccttcagcaacttcctgcacgtggaccccagaaagagcaactag

SEQ ID NO: 30190 - DNA, 1365 bp, Artificial Sequence
  derived and/or modified sequence
atgcccgagtttcttgaggatccatccgtgctcaccaaggacaaactgaaatcagagctggtagcaaataacgtcaccctcccggccggagagcagcggaaagacgtctatgttcaactgtacctgcaacacttgaccgcacgcaatcgtcctcccttacccgccggcaccaattctaagggccccccggacttcagtagcgacgaggagagggaaccaaccccggtgctgggctctggcgctgctgctgcgggccgctctagggcagcagttggcaggaaagccaccaagaagacagataaacctagacaagaggacaaggatgatttagacgtgacagagctgacgaacgaagacctcctcgaccaactcgtgaagtacggggttaatcctggaccaatcgtcgggacaacccggaaactgtatgagaaaaagttgctgaagttacgggagcagggtacagaaagtaggagcagtacgcccttgcctactatatcaagctcggcagagaatactcggcagaacggctctaatgactcggatcgctacagcgacaacgaggaggattccaagatagaacttaagctggaaaaaagggagcccctgaaggggagggcaaagactccggtgacccttaagcagagacgtgtggaacataaccaaagttacagccaggcaggcattactgagactgaatggacttctgggtccagtaaggggggcccgcttcaggccctgacgcgggaatcaactaggggcagtcggcggaccccacgcaagagagtcgagacctcggagcacttcaggattgacggtccagttatcagcgagagcactcccattgcggagacgattatggcatcttctaacgagagtttagtagtgaatagggttacaggaaacttcaagcacgccagcccaatccttcccattaccgagttcagcgacatccctagaagggcccccaagaagccactcacgagggcagaagtgggagaaaaaacggaggagcgaagagtagaaagagatatcctgaaagagatgtttccctacgaggcctcaaccccgactggcatcagcgcctcctgtagacgaccaatcaagggagccgcagggaggcctctcgaactcagcgatttccgcatggaggagagcttcagttctaaatatgtgccaaagtatgtgcctctggcagatgtcaaatctgagaagactaagaaaggtcgcagcattcctgtttggatcaagatactgctgtttgttgtcgtagccgtgttcctgttccttgtgtatcaggcgatggaaacaaatcaagtgaacccgttttcgaacttcctccatgttgacccccgcaaatcaaattag

SEQ ID NO: 30191 - DNA, 1365 bp, Artificial Sequence
  derived and/or modified sequence
atgcctgagttcctggaggaccccagcgtgctgaccaaggacaagctgaagtctgagctggtggccaacaacgtgaccctgcctgctggggagcagaggaaggatgtgtatgtgcagctgtacctgcagcacctgacagccaggaacagaccacccctgcctgctggcaccaacagcaagggccccccagacttcagcagtgatgaggagcgggagcccacccctgtgctgggcagcggggctgctgctgctggccgcagcagagctgctgtgggcaggaaggccaccaagaagacagacaagccccggcaggaggacaaggatgacctggatgtgacagagctgaccaatgaagacctgctggaccagctggtgaagtatggagtgaaccctggccccatcgtgggcaccaccaggaagctgtatgagaagaagctgctgaagctgcgggagcagggcacagagagccgcagcagcacccccctgcccaccatcagcagcagcgctgagaacacccggcagaatggcagcaatgacagcgaccgctacagcgacaatgaggaggacagcaagattgagctgaagctggagaagcgggagcccctgaagggccgggccaagacccctgtgaccctgaagcagaggagagtggagcacaaccagagctacagccaggccggcatcacagaaacagagtggaccagcggcagcagcaaaggaggccccctgcaggccctgacccgggagagcacccggggcagcaggaggacccccaggaagagggtggagaccagcgagcacttcagaattgatggccctgtgatcagcgagagcacccccatcgccgagaccatcatggccagcagcaatgaaagcctggtggtgaacagagtgactggaaacttcaagcacgccagccccatcctgcccatcacagagttcagtgacatcccccggcgggcccccaagaagcccctgaccagggctgaggtgggggagaagacagaggagcggcgggtggagcgggacatcctgaaggagatgttcccctatgaggccagcacccccaccggcatcagcgccagctgccggcggcccatcaagggagctgctggccggcccctggagctgagtgacttcaggatggaggagagcttcagcagcaaatatgtgcccaagtatgtgcccctggctgatgtgaagtctgagaagaccaagaagggccgcagcatccctgtgtggatcaagatcctgctgtttgtggtggtggccgtgttcctgttcctggtgtaccaggccatggagaccaaccaggtgaaccccttcagcaacttcctgcacgtggaccccaggaagagcaactag

SEQ ID NO: 30192 - DNA, 1365 bp, Artificial Sequence
  derived and/or modified sequence
atgcccgagttcctggaggaccccagcgtgctgaccaaggacaagctgaagagcgaactggttgccaacaacgttacacttccagctggagagcagaggaaggacgtatacgtgcagctttacttacaacacctgactgcccgaaaccgccctcctctgccagcggggaccaactctaaagggcctccagacttttcttccgatgaggagcgggagcctactcccgtgcttgggtcaggagcagctgccgctggcaggtctagagccgccgttgggcgtaaggctactaaaaagacagacaaaccccgccaggaagacaaggatgatctggacgtcaccgaactgaccaacgaggatctgctcgatcagcttgtcaaatacggcgtgaaccctggccctatcgtggggaccacgcgaaaactatacgagaagaaactactgaaactgagggaacaggggaccgagtctcgaagttctacacccttgccaaccatttcttcctcagccgagaacactcgccaaaatgggtcaaatgattcagacaggtactccgataatgaggaagattccaagatagaattaaagcttgagaagcgtgagcccctgaagggacgcgccaaaacccccgtgactctgaagcaacggagagtcgagcacaaccagtcgtactctcaggccgggatcaccgagacagaatggaccagcggatcgtccaagggggggcccctccaggctctcacaagggaatcaactagaggttccagacggacgccgcgaaaaagagtggagaccagcgaacattttcgcatcgacggacccgtgatctccgagtcaacgccgattgcggaaaccataatggcttcgtccaatgagagcttggtggtcaaccgggtgacaggaaatttcaaacatgctagcccaatcttgcctatcactgaattcagcgacattccgagacgggcccctaaaaagcccctgacacgtgctgaggttggggagaagactgaagaaaggagggtcgagagagatatactgaaggagatgtttccatatgaggcaagtacccccacaggaatctctgctagttgcaggcggccgatcaagggcgctgccggccgccccctggagctgagcgacttcaggatggaagagagcttctcgagcaaatacgtgcctaagtatgtcccgctcgcggacgttaaaagcgagaagaccaaaaaaggacgctcgattcccgtctggattaaaatcctgctgttcgtggtcgttgctgtctttctgtttctggtctatcaggccatggagacaaaccaggtgaacccattcagtaacttcttgcacgtcgaccctcgcaagagtaactag

SEQ ID NO: 30193 - DNA, 1365 bp, Artificial Sequence
  derived and/or modified sequence
atgccagaatttctggaagatccctctgtcttgaccaaagataagctcaagtctgagctggtcgccaacaacgtaaccctccctgcgggtgaacaaaggaaagatgtttatgtgcagttatacctacagcaccttactgccagaaacagacctccgctgcccgctgggactaatagcaagggtccgccagacttctcctcggacgaggagagggagccaacccccgtcctcgggtctggtgccgcagccgcaggacgctctagggccgcagtcggtaggaaggctaccaagaaaactgataaacccaggcaggaggacaaggatgaccttgacgttaccgagctcactaatgaggacctcctcgaccagctggtaaaatacggcgtcaaccccggacctattgttggcacaacccgcaagctctatgaaaagaagctgctcaagctcagggagcagggcaccgaaagtcggtcaagcacccctttgccaaccataagttcaagcgcagagaacacacgccaaaatgggtccaacgactcagaccgttatagtgacaacgaggaggactccaagatcgagttgaagcttgaaaagcgtgaaccacttaaaggtagagccaagacccccgtgacactaaagcagagaagagtggaacacaatcagtcatactcccaagctggtataacagaaacagagtggaccagtggctcctctaaaggaggtccgttacaggccctcacgagggaaagcactagagggtcaagacgaactccccgaaagcgggtagagacttccgagcactttaggatagacggtccagtcatcagcgaaagcactccaatcgccgaaaccattatggcttcttccaatgagagtctcgtggtgaaccgggtcacagggaactttaaacacgcgtccccgatactcccaatcacggagtttagcgacatcccgagacgtgctccaaagaagcccctgactagagctgaagtgggagagaagacagaggagagacgggtggaacgcgacatcctgaaagaaatgttcccttacgaggcttctactccaacgggtatctcggcttcatgccggagaccaatcaagggtgccgcaggtcgcccactggaacttagtgattttaggatggaggaaagcttttcctctaaatatgtgcccaagtacgtcccactggcagacgtaaaatcagaaaagactaaaaagggtaggagtatccctgtttggattaagatcctcttgttcgtggtggtggccgttttcctgttcctggtgtatcaggccatggagaccaaccaagtcaacccttttagcaatttcttgcatgtagaccctcgaaaatccaactag

SEQ ID NO: 30194 - DNA, 4242 bp, Artificial Sequence
  derived and/or modified sequence
cgcgagccgtctcgccaatcaccgccgcgcttcctcccgtcgcccgccaatggcggcgcgcgttcttggggcgtgggcgaagcaggctgctcgcctcctgcctgtagtgtgtgggctggggttggtgcgagcttccagcttggccgcagttggttcgtagttcggctctggggtcttttgtgtccgggtctggcttggctttgtgtccgcgagtttttgttccgctccgcagcgctcttcccgggcaggagccgtgaggctcggaggcggcagcgcggtccccggccaggagcaagcgcgccggcgtgagcggcggcggcaaaggctgtggggagggggcttcgcagatccccgagatgccggagttcctggaagacccctcggtcctgacaaaagacaagttgaagagtgagttggtcgccaacaatgtgacgctgccggccggggagcagcgcaaagacgtgtacgtccagctctacctgcagcacctcacggctcgcaaccggccgccgctccccgccggcaccaacagcaaggggcccccggacttctccagtgacgaagagcgcgagcccaccccggtcctcggctctggggccgccgccgcgggccggagccgagcagccgtcggcaggaaagccacaaaaaaaactgataaacccagacaagaagataaagatgatctagatgtaacagagctcactaatgaagatcttttggatcagcttgtgaaatacggagtgaatcctggtcctattgtgggaacaaccaggaagctatatgagaaaaagcttttgaaactgagggaacaaggaacagaatcaagatcttctactcctctgccaacaatttcttcttcagcagaaaatacaaggcagaatggaagtaatgattctgacagatacagtgacaatgaagaagactctaaaatagagctcaagcttgagaagagagaaccactaaagggcagagcaaagactccagtaacactcaagcaaagaagagttgagcacaatcagagctattctcaagctggaataactgagactgaatggacaagtggatcttcaaaaggcggacctctgcaggcattaactagggaatctacaagagggtcaagaagaactccaaggaaaagggtggaaacttcagaacattttcgtatagatggtccagtaatttcagagagtactcccatagctgaaactataatggcttcaagcaacgaatccttagttgtcaatagggtgactggaaatttcaagcatgcatctcctattctgccaatcactgaattctcagacatacccagaagagcaccaaagaaaccattgacaagagctgaagtgggagaaaaaacagaggaaagaagagtagaaagggatattcttaaggaaatgttcccctatgaagcatctacaccaacaggaattagtgctagttgccgcagaccaatcaaaggggctgcaggccggccattagaactcagtgatttcaggatggaggagtctttttcatctaaatatgttcctaagtatgttcccttggcagatgtcaagtcagaaaagacaaaaaagggacgctccattcccgtatggataaaaattttgctgtttgttgttgtggcagtttttttgtttttggtctatcaagctatggaaaccaaccaagtaaatcccttctctaattttcttcatgttgaccctagaaaatccaactgaatggtatctctttggcacgttcaacttggtctcctattttcaataactgttgaaaaacatttgtgtacacttgttgactccaagaactaaaaataatgtgatttcgcctcaataaatgtagtatttcattgaaaagcaaacaaaatatatataaatggacttcattaaaatgtttttgaactttggactagtaggagatcactttgtgccatatgaataatcttttttagctctggaactttttgtaggctttatttttttaatgtgggcatcttatttcatttttgaaaaaatgtatatgttttttgtgtatttgggaaacgaagggtgaaacatggtagtataatgtgaagctacacatttaaatacttagaattcttacagaaaagattttaagaattattctctgctgaataaaaactgcaaatatgtgaaacataatgaaattcagtaagaggaaaagtaacttggttgtactttttgtaactgcaacaaagtttgatggtgtttatgaggaaaagtacagcaataatctcttctgtaacctttattaatagtaatgttgttgtagccctatcatactcactttttaagacacagtatcatgaaagtcctatttcagtaagacccatttacatacagtagatttttagcagagatcttttagtgtaacatacatattttagagaattgttggctagctgtacatgttttgaaaagctgtttagctagctataaggctataattggaaatttgtattttttatttacagcaaaacatttattcagtcatccagtttgctaccaaaatatgttttagataagtgtgtgtatgtttgtttagaagttagaaattgtaaacactggtcttatgtttcatttggattcattattgcattgtcttgttaccagaaacaaattttgccgagctttttttgccctatatttcccagcataatttgattagaaagtacaaaaagggccaggcgcggtggcttacgcctgtaatcccagcactttgggaggccagggcgggtggatcacgaggtcaagagatcaagaccatcctggccaacatggtgaaaccccgtctctactaaaaatacaaaaaaattagctgggcgtgatgatgtgcgcctgtagtcctgtctactagggagactgaggcaggagaatcgtttgaacccaggaggcagaggttgcagtgagcagagattacgtcactgcactgtagcctggcgacagagcaagactccatctcaaaaaaaataaaaaagtacaaaaagtacttgcttttatattacatcataagcagtagttaataaagttgtatactcttaagaggtgggcattatgattattttttatttttttattttttatgagatggagtctcactcttgtcacccagactgtagtgcagtggcacgatctgggctcgatgcaacctctgcctcccaggttcaagcaattttcctgcctcggcagagacggggtttcaccatgttggccaggctggtctcgaacccctgacctcaagtgatcagcccacctcagcttcccaaagtgctgggattacaggtgtgatccactgcacccggccggcattatgattttgtgtactcttgaaatggttatctttgtggatgatttttttttttaagctgaaacttacctcatgaataacttgattaaagtagtaggtgattaaaatttcaatagaatcaaatgagacaaaaattttaaactgactcatttgagtttcaactttacagtcattgaccataaagcacactaaaaatgtaagttatttttaaatacatctgaaataaaaatacttactaaaaaggaagaagccgaagatgtatatttagaccagcacacaattttgatttcaattagccttattctaatatttagcttttagatctttcatacacattttcacgtactttgcaattgagaccagaaagacttgtaggtctttctgcagaatgagtgggtccttgcaaagtgagtgggaaacttactcctagatcagaaatgtttgcctctctgagtaaaatgtttctttcagatgagccatagagggggcaccttttactcaacttttctttgttttgaaactttgtttcccatactgttttcagccttttgtttataattagaaattgtgagaagcttcatttagtgtttaaaaatgtggggagataaatcagacttaacatgtatgtaagatcaattcacttaaaagtatggtccaaatagcaaaaataggaccaggtgaaacatgtagtcattttttaaaaacatgtacttggtcttttgtgtgtgtctgttttattccattagaataaatgtgtccttgatgtaaatgcaaagcatttcttcctgattaaattgtagatgtagactttacaatataattcaataataaaaagtaattaacctctagttttgtcgttgcaataaatggttttcagatagcacaaactgtgatttctggataacatttcttatg

SEQ ID NO: 30195 - protein, 345 aa, Artificial Sequence
  derived and/or modified sequence
MPEFLEDPSVLTKDKLKSELVANNVTLPAGEQRKDVYVQLYLQHLTARNRPPLPAGTNSKGPPDFSSDEEREPTPVLGSGAAAAGRSRAAVGRKATKKTDKPRQEDKDDLDVTELTNEDLLDQLVKYGVNPGPIVGTTRKLYEKKLLKLREQGTESRSSTPLPTISSSAENTRQNGSNDSDRYSDNEEDSKIELKLEKREPLKGRAKTPVTLKQRRVEHNQVGEKTEERRVERDILKEMFPYEASTPTGISASCRRPIKGAAGRPLELSDFRMEESFSSKYVPKYVPLADVKSEKTKKGRSIPVWIKILLFVVVAVFLFLVYQAMETNQVNPFSNFLHVDPRKSN

SEQ ID NO: 30196 - DNA, 747 bp, Artificial Sequence
  derived and/or modified sequence
atgcccgagttcctggaggaccccagcgtgctgaccaaggacaagctgaagagcgagctggtggccaacaacgtgaccctgcccgccggcgagcagagaaaggacgtgtacgtgcagctgtacctgcagcacctgaccgccagaaacagaccccccctgcccgccggcaccaacagcaagggcccccccgacttcagcagcgacgaggagagagagcccacccccgtgctgggcagcggcgccgccgccgccggcagaagcagagccgccgtgggcagaaaggccaccaagaagaccgacaagcccagacaggaggacaaggacgacctggacgtgaccgagctgaccaacgaggacctgctggaccagctggtgaagtacggcgtgaaccccggccccatcgtgggcaccaccagaaagctgtacgagaagaagctgctgaagctgagagagcagggcaccgagagcagaagcagcacccccctgcccaccatcagcagcagcgccgagaacaccagacagaacggcagcaacgacagcgacagatacagcgacaacgaggaggacagcaagatcgagctgaagctggagaagagagagcccctgaagggcagagccaagacccccgtgaccctgaagcagagaagagtggagcacaaccaggtgagcctggtgctgctgcccccctgcaccggcatcaacaacctgctgaccaccctgatccacgtgctggccttcaacggctag

SEQ ID NO: 30197 - DNA, 1038 bp, Artificial Sequence
  derived and/or modified sequence
atgcccgagttcctggaggaccccagcgtgctgaccaaggacaagctgaagagcgagctggtggccaacaacgtgaccctgcccgccggcgagcagagaaaggacgtgtacgtgcagctgtacctgcagcacctgaccgccagaaacagaccccccctgcccgccggcaccaacagcaagggcccccccgacttcagcagcgacgaggagagagagcccacccccgtgctgggcagcggcgccgccgccgccggcagaagcagagccgccgtgggcagaaaggccaccaagaagaccgacaagcccagacaggaggacaaggacgacctggacgtgaccgagctgaccaacgaggacctgctggaccagctggtgaagtacggcgtgaaccccggccccatcgtgggcaccaccagaaagctgtacgagaagaagctgctgaagctgagagagcagggcaccgagagcagaagcagcacccccctgcccaccatcagcagcagcgccgagaacaccagacagaacggcagcaacgacagcgacagatacagcgacaacgaggaggacagcaagatcgagctgaagctggagaagagagagcccctgaagggcagagccaagacccccgtgaccctgaagcagagaagagtggagcacaaccaggtgggcgagaagaccgaggagagaagagtggagagagacatcctgaaggagatgttcccctacgaggccagcacccccaccggcatcagcgccagctgcagaagacccatcaagggcgccgccggcagacccctggagctgagcgacttcagaatggaggagagcttcagcagcaagtacgtgcccaagtacgtgcccctggccgacgtgaagagcgagaagaccaagaagggcagaagcatccccgtgtggatcaagatcctgctgttcgtggtggtggccgtgttcctgttcctggtgtaccaggccatggagaccaaccaggtgaaccccttcagcaacttcctgcacgtggaccccagaaagagcaactag

SEQ ID NO: 30198 - DNA, 747 bp, Artificial Sequence
  derived and/or modified sequence
atgcctgaatttttggaagatccaagtgtgctcacaaaggataaactcaaatccgagctagttgctaataatgtgacactgcccgctggggaacagagaaaggacgtctacgtgcagctctatttgcagcatctcactgccaggaatcgccctccactgccggccggtaccaatagcaagggcccccctgacttctctagtgacgaggaaagggaacctacaccagtccttggcagcggagccgctgccgcgggacgcagcagggccgcagtaggacgcaaagcaacaaaaaaaactgacaagccaaggcaggaggacaaggacgacttggacgtcaccgagctcactaacgaggatttacttgatcagttggtgaaatacggcgtcaatcccggtccaatcgttgggactactaggaagctttatgaaaaaaaattacttaaactccgcgaacaaggtactgagagccgatcaagcacacctttgccaaccatctcttcctccgccgagaacaccaggcaaaacggtagcaacgacagcgataggtattctgacaatgaagaagactccaaaattgaactgaagttagagaaaagagagcctcttaaaggacgggcaaaaacgcctgttaccttaaaacaacgtagggtggagcacaaccaggtctctctggtactgctccctccatgcacaggcataaataacttgctgacgactttgatacatgtattggcctttaacgggtag

SEQ ID NO: 30199 - DNA, 1038 bp, Artificial Sequence
  derived and/or modified sequence
atgcccgaatttctggaggacccctcagtgttgactaaagataagctcaagtccgagctcgtcgccaacaacgtcaccttacccgctggtgaacagcggaaggatgtgtacgtacagctatatctccagcatctgactgcccgaaatagaccccccctgcctgcagggacaaactcaaagggcccacccgacttttctagcgatgaagagcgcgagccgacgcctgtgctgggaagtggcgccgcggccgcgggtagatcccgggctgccgttggcagaaaagcgaccaaaaagacagacaaacctaggcaggaagacaaagatgatctggacgttaccgagctgacaaatgaggatctgctcgatcagctcgtgaagtacggagtgaatccaggcccgattgtgggcaccacgcgcaagttgtacgaaaaaaagctgttgaaacttcgagagcagggaacagagtctagatcttccacccctctcccaaccatctctagcagcgcagaaaacacccggcagaatggctccaatgactccgacaggtactccgataatgaggaagacagcaaaatagaactcaagctcgaaaaaagagaacccttgaaaggaagggccaagactcccgttacactcaagcagaggagggtggaacacaatcaggtgggtgaaaagacggaggagcggagggtggagcgcgatatccttaaagaaatgttcccatacgaagccagcacccccaccgggatcagtgcatcatgtcggaggccaatcaagggggccgccggacggccccttgagctctccgatttccgcatggaggagtccttctccagcaaatacgttccaaagtatgtacccctcgccgatgtcaagtcagaaaagaccaaaaaaggcagatccatcccagtgtggatcaagatcttattatttgtagttgtagcagttttcctttttttggtctatcaggccatggaaacgaaccaggtcaatcccttcagtaatttcttgcatgtggacccaagaaagtctaactag

SEQ ID NO: 30200 - DNA, 747 bp, Artificial Sequence
  derived and/or modified sequence
atgcctgagttcctggaggaccccagcgtgctgaccaaggacaagctgaagtctgagctggtggccaacaacgtgaccctgcctgctggggagcagaggaaggatgtgtatgtgcagctgtacctgcagcacctgacagccaggaacagaccacccctgcctgctggcaccaacagcaagggccccccagacttcagcagtgatgaggagcgggagcccacccctgtgctgggcagcggggctgctgctgctggccgcagcagagctgctgtgggcaggaaggccaccaagaagacagacaagccccggcaggaggacaaggatgacctggatgtgacagagctgaccaatgaagacctgctggaccagctggtgaagtatggagtgaaccctggccccatcgtgggcaccaccaggaagctgtatgagaagaagctgctgaagctgcgggagcagggcacagagagccgcagcagcacccccctgcccaccatcagcagcagcgctgagaacacccggcagaatggcagcaatgacagcgaccgctacagcgacaatgaggaggacagcaagattgagctgaagctggagaagcgggagcccctgaagggccgggccaagacccctgtgaccctgaagcagaggagagtggagcacaaccaggtgtccctggtgctgctgcccccctgcaccggcatcaacaacctgctgaccaccctcatccacgtgctggccttcaatggatag

SEQ ID NO: 30201 - DNA, 1038 bp, Artificial Sequence
  derived and/or modified sequence
atgcctgagttcctggaggaccccagcgtgctgaccaaggacaagctgaagtctgagctggtggccaacaacgtgaccctgcctgctggggagcagaggaaggatgtgtatgtgcagctgtacctgcagcacctgacagccaggaacagaccacccctgcctgctggcaccaacagcaagggccccccagacttcagcagtgatgaggagcgggagcccacccctgtgctgggcagcggggctgctgctgctggccgcagcagagctgctgtgggcaggaaggccaccaagaagacagacaagccccggcaggaggacaaggatgacctggatgtgacagagctgaccaatgaagacctgctggaccagctggtgaagtatggagtgaaccctggccccatcgtgggcaccaccaggaagctgtatgagaagaagctgctgaagctgcgggagcagggcacagagagccgcagcagcacccccctgcccaccatcagcagcagcgctgagaacacccggcagaatggcagcaatgacagcgaccgctacagcgacaatgaggaggacagcaagattgagctgaagctggagaagcgggagcccctgaagggccgggccaagacccctgtgaccctgaagcagaggagagtggagcacaaccaggtgggggagaagacagaggagaggagagtggagcgggacatcctgaaggagatgttcccctatgaggccagcacccccaccggcatcagcgccagctgcagaagacccatcaagggagctgctggccggcccctggagctgagtgacttcaggatggaggagagcttcagcagcaaatatgtgcccaagtatgtgcccctggctgatgtgaagtctgagaagaccaagaagggccgcagcatccctgtgtggatcaagatcctgctgtttgtggtggtggccgtgttcctgttcctggtgtaccaggccatggagaccaaccaggtgaaccccttcagcaacttcctgcacgtggaccccaggaagagcaactag

SEQ ID NO: 30202 - DNA, 747 bp, Artificial Sequence
  derived and/or modified sequence
atgcccgagttcctggaggaccccagcgtgctgaccaaggacaagttgaagtctgagctggtcgcgaataacgtgactctgcctgctggagagcagcggaaagatgtgtatgtacaactgtatttacagcatctgacagcacggaatcgacccccactccccgccggaacaaattctaagggccctcccgacttcagtagtgatgaagaacgtgaaccaacaccagttctgggatcgggcgctgctgctgccggaagatcccgtgcggcagttggccgcaaggctaccaaaaagacagacaaacctcggcaggaagataaggacgatcttgacgtgacagaattaactaacgaggatctgctggatcagctggttaagtacggggtcaaccctgggccaatagttggcactacacggaaactctacgaaaagaaactcctgaagctgcgcgaacaaggcactgaatctagatcctcaacaccactgcctaccatcagctcctccgctgaaaatactcgccagaatggttccaacgacagtgatcggtattcggacaacgaggaggattctaagatagagctgaagctggagaaacgcgaaccgctgaaaggaagggctaagacgccggtcactctgaagcaaagaagagtggaacacaatcaggtaagtctcgtactcctaccaccatgtacgggaataaataacctgctcactaccctaatccatgtgttagcatttaacggatag

SEQ ID NO: 30203 - DNA, 1038 bp, Artificial Sequence
  derived and/or modified sequence
atgcccgagttcctggaggaccccagcgtgctgaccaaggacaagctgaagagtgagctcgtagcgaataacgtgacgctgccagccggggaacagcgcaaggatgtgtacgttcaattatatctgcagcatctgactgccaggaatcgaccaccgctccccgcaggtaccaactccaaaggccctccagactttagtagtgacgaggagagggaaccaacccccgtcttgggttctggtgctgccgctgctgggaggagtagagctgccgtgggccgtaaagcaaccaagaagaccgataagcccaggcaggaggataaagatgacctcgacgtcaccgagctgacaaacgaggatctccttgatcagctagtgaaatacggagtgaatcccggacctattgtgggcaccaccaggaaactttacgagaagaagctgctcaagttgagggagcagggcaccgaatcccggtcatcgacacctctgccgactatttccagttctgcggaaaacacaaggcagaatggcagtaacgatagtgaccgctatagcgataatgaagaggacagcaaaattgagctgaagctcgagaagcgggaaccattaaagggccgagccaaaacacctgtgactctcaagcagaggagggtcgaacacaaccaggtcggtgagaaaactgaggagcggcgcgtggagagggatattctgaaagagatgttcccatatgaagcttccacccccactggaatttctgcttcctgccgtaggcctatcaagggggctgccgggcgccctctggaactctccgatttcaggatggaagagtcctttagtagtaaatatgttcccaagtacgtgcccctggctgacgttaagagcgagaaaacaaaaaagggccgtagcatccctgtgtggatcaagatcctgcttttcgtcgtagtggcagtgttcctatttctagtgtatcaagccatggaaacaaaccaagtgaatcccttctcgaacttcttgcatgtggaccctagaaagagcaactag

SEQ ID NO: 30204 - DNA, 747 bp, Artificial Sequence
  derived and/or modified sequence
atgccagaattcctcgaggacccaagcgtgctgaccaaagacaaactgaagtcagaattggtggctaacaatgtgaccctgcctgccggagaacagaggaaagacgtatatgtccaactgtatctccagcatttgacagcgaggaataggccacctttgcctgctggaaccaattctaaggggcctcctgacttttcaagtgacgaggagcgggagcccaccccagttttaggctccggagctgcagccgctggcaggagtagggcggcagtgggaagaaaagctactaaaaaaacggacaaaccacgccaggaggataaagacgacttggatgtgaccgaactcacaaatgaagatctgctcgatcagctcgtgaagtacggggttaatcctggacctatcgtcggcaccacaaggaaactatatgagaagaaactgttgaagctaagagaacagggcacagagtcccgtagcagcaccccccttcccactatctcctcatcagcagagaatacccggcagaatggatctaatgattctgacaggtactctgataacgaggaggacagcaaaattgagcttaagctggagaaacgcgaacctctgaaaggccgtgccaaaactccggtaactctgaagcaacggagggtggagcacaaccaggtttctctcgtgctcctcccaccttgtactggtattaacaatctcttaactacattgatacacgttctggcattcaatggctag

SEQ ID NO: 30205 - DNA, 1038 bp, Artificial Sequence
  derived and/or modified sequence
atgccagagttcctggaggatccatccgtgctcaccaaagacaaactgaagtccgagctcgtagcaaataatgttacccttcctgcaggggaacagcgcaaagacgtgtacgtgcagctgtacttacagcacttgaccgccaggaaccgccctccgctgcctgctggcaccaactctaaggggccacctgacttcagcagtgacgaagaacgggagccaacgccagtcctaggatccggagcagccgcagcgggaagaagccgcgctgccgtaggtaggaaggcaaccaaaaaaacagacaagccccgacaggaagacaaagatgatttggatgttacagagctgaccaacgaagatctgttggatcaactggttaagtacggggtgaaccccggtccaatcgttggcacaacccgcaaactgtatgagaaaaaactcctaaagttgcgtgagcaaggtaccgagtcacggagtagtacacctctgccaaccattagctctagtgccgagaacaccagacagaacggaagcaacgattcagatcgctattcggacaatgaggaagactccaagatcgaactcaagttagaaaagagagagcctttgaaaggccgtgcgaagacacctgtcacactcaaacagcgtagagtcgagcacaaccaggtgggagaaaaaacagaagaaaggcgagtggaacgggacattcttaaagagatgttcccctacgaagctagtactcctactggcattagtgcctcctgccgtcgccctattaaaggagccgctggccgaccgcttgagctatcagatttccggatggaggagtccttcagttccaaatacgtgccgaaatacgtaccactggcggacgtcaagtccgagaagaccaaaaagggtagaagcatccctgtctggattaaaatcctcctcttcgtggtagtcgccgtgtttttattccttgtttatcaggccatggagacaaatcaggtgaaccctttttctaacttcttgcacgtggacccacggaagtcgaactag

SEQ ID NO: 30206 - DNA, 820 bp, Artificial Sequence
  derived and/or modified sequence
ttcgcagatccccgagatgccggagttcctggaagacccctcggtcctgacaaaagacaagttgaagagtgagttggtcgccaacaatgtgacgctgccggccggggagcagcgcaaagacgtgtacgtccagctctacctgcagcacctcacggctcgcaaccggccgccgctccccgccggcaccaacagcaaggggcccccggacttctccagtgacgaagagcgcgagcccaccccggtcctcggctctggggccgccgccgcgggccggagccgagcagccgtcggcaggaaagccacaaaaaaaactgataaacccagacaagaagataaagatgatctagatgtaacagagctcactaatgaagatcttttggatcagcttgtgaaatacggagtgaatcctggtcctattgtgggaacaaccaggaagctatatgagaaaaagcttttgaaactgagggaacaaggaacagaatcaagatcttctactcctctgccaacaatttcttcttcagcagaaaatacaaggcagaatggaagtaatgattctgacagatacagtgacaatgaagaagactctaaaatagagctcaagcttgagaagagagaaccactaaagggcagagcaaagactccagtaacactcaagcaaagaagagttgagcacaatcaggtatctttagttttattaccaccgtgtacaggtataaataacctcctgacaacactaatccatgttttagcctttaatggttgacacccagattccagcacgctcaataaacttaattctgttgttaaatgatactaaaaa

SEQ ID NO: 30207 - DNA, 2374 bp, Artificial Sequence
  derived and/or modified sequence
ggttggtgcgagcttccagcttggccgcagttggttcgtagttcggctctggggtcttttgtgtccgggtctggcttggctttgtgtccgcgagtttttgttccgctccgcagcgctcttcccgggcaggagccgtgaggctcggaggcggcagcgcggtccccggccaggagcaagcgcgccggcgtgagcggcggcggcaaaggctgtggggagggggcttcgcagatccccgagatgccggagttcctggaagacccctcggtcctgacaaaagacaagttgaagagtgagttggtcgccaacaatgtgacgctgccggccggggagcagcgcaaagacgtgtacgtccagctctacctgcagcacctcacggctcgcaaccggccgccgctccccgccggcaccaacagcaaggggcccccggacttctccagtgacgaagagcgcgagcccaccccggtcctcggctctggggccgccgccgcgggccggagccgagcagccgtcggcaggaaagccacaaaaaaaactgataaacccagacaagaagataaagatgatctagatgtaacagagctcactaatgaagatcttttggatcagcttgtgaaatacggagtgaatcctggtcctattgtgggaacaaccaggaagctatatgagaaaaagcttttgaaactgagggaacaaggaacagaatcaagatcttctactcctctgccaacaatttcttcttcagcagaaaatacaaggcagaatggaagtaatgattctgacagatacagtgacaatgaagaagactctaaaatagagctcaagcttgagaagagagaaccactaaagggcagagcaaagactccagtaacactcaagcaaagaagagttgagcacaatcaggtgggagaaaaaacagaggaaagaagagtagaaagggatattcttaaggaaatgttcccctatgaagcatctacaccaacaggaattagtgctagttgccgcagaccaatcaaaggggctgcaggccggccattagaactcagtgatttcaggatggaggagtctttttcatctaaatatgttcctaagtatgttcccttggcagatgtcaagtcagaaaagacaaaaaagggacgctccattcccgtatggataaaaattttgctgtttgttgttgtggcagtttttttgtttttggtctatcaagctatggaaaccaaccaagtaaatcccttctctaattttcttcatgttgaccctagaaaatccaactgaatggtatctctttggcacgttcaacttggtctcctattttcaataactgttgaaaaacatttgtgtacacttgttgactccaagaactaaaaataatgtgatttcgcctcaataaatgtagtatttcattgaaaagcaaacaaaatatatataaatggacttcattaaaatgtttttgaactttggactagtaggagatcactttgtgccatatgaataatcttttttagctctggaactttttgtaggctttatttttttaatgtgggcatcttatttcatttttgaaaaaatgtatatgttttttgtgtatttgggaaacgaagggtgaaacatggtagtataatgtgaagctacacatttaaatacttagaattcttacagaaaagattttaagaattattctctgctgaataaaaactgcaaatatgtgaaacataatgaaattcagtaagaggaaaagtaacttggttgtactttttgtaactgcaacaaagtttgatggtgtttatgaggaaaagtacagcaataatctcttctgtaacctttattaatagtaatgttgttgtagccctatcatactcactttttaagacacagtatcatgaaagtcctatttcagtaagacccatttacatacagtagatttttagcagagatcttttagtgtaacatacatattttagagaattgttggctagctgtacatgttttgaaaagctgtttagctagctataaggctataattggaaatttgtattttttatttacagcaaaacatttattcagtcatccagtttgctaccaaaatatgttttagataagtgtgtgtatgtttgtttagaagttagaaattgtaaacactggtcttatgtttcatttggattcattattgcattgtcttgttaccagaaacaaattttgccgagctttttttgccctatatttcccagcataatttgattagaaagtacaaaaagggccaggcgcggtggcttacgcctgtaatcccagcactttgggaggccagggcgggtggatcacgaggtcaagagatcaagaccatcctggccaacatggtgaaaccccgtctctacta

SEQ ID NO: 30208 - protein, 467 aa, Artificial Sequence
  derived and/or modified sequence
MATIEEIAHQIIEQQMGEIVTEQQTGQKIQIVTALDHNTQGKQFILTNHDGSTPSKVILARQDSTPGKVFLTTPDAAGVNQLFFTTPDLSAQHLQLLTDNSPDQGPNKVFDLCVVCGDKASGRHYGAVTCEGCKGFFKRSIRKNLVYSCRGSKDCIINKHHRNRCQYCRLQRCIAFGMKQDSVQCERKPIEVSREKSSNCAASTEKIYIRKDLRSPLTATPTFVTDSESTRSTGLLDSGMFMNIHPSGVKTESAVLMTSDKAESCQGDLSTLANVVTSLANLGKTKDLSQNSNEMSMIESLSNDDTSLCEFQEMQTNGDVSRAFDTLAKALNPGESTACQSSVAGMEGSVHLITGDSSINYTEKEGPLLSDSHVAFRLTMPSPMPEYLNVHYIGESASRLLFLSMHWALSIPSFQALGQENSISLVKAYWNELFTLGLAQCWQVMNVATILATFVNCLHNSLQQAEG

SEQ ID NO: 30209 - DNA, 1404 bp, Artificial Sequence
  derived and/or modified sequence
atggcaactatcgaggagattgcccaccagatcatagagcaacagatgggcgaaatagtgaccgaacaacagaccgggcaaaagattcagatcgttacggccctggaccataacacccagggtaaacaatttattctcacaaaccacgacgggagcacacccagcaaggtcatccttgctcggcaggactctacacctgggaaggtttttttgactactccagacgctgccggcgttaaccagctatttttcaccaccccagacctgtcagcacagcacctccagctccttacagacaattcccctgaccagggcccaaacaaggtgttcgatctctgcgtggtctgcggagataaggcctcaggtaggcactatggcgccgttacctgtgagggctgtaagggattttttaaacggtctattagaaaaaatcttgtctactcctgtcgcggcagcaaagactgtatcattaataaacaccaccgcaaccggtgccagtattgccgactccagcggtgtattgccttcggaatgaagcaagatagcgtgcaatgtgagcggaaaccaatcgaggttagtcgtgagaaatccagcaattgtgccgcctccaccgagaagatctatattaggaaggacttgaggtcacctctgactgccactccgacgtttgttaccgattcggaaagcactcgaagcactggacttttagactccggaatgtttatgaacattcaccccagcggtgttaaaactgagtcagctgtgttgatgacatccgataaggccgaatcttgccagggagatttgtccacattggcaaatgtggtcactagcctagcaaatctcggcaaaacaaaggatctgtcacagaacagtaatgagatgtcaatgattgagagtctcagcaacgacgatacctccctgtgcgaattccaggagatgcagacaaatggagatgtgtcccgagcctttgatacactggccaaggcactcaaccctggtgagagtactgcatgccagagctccgtcgccggcatggaaggatctgttcacctgataacaggcgactcgtctataaactacaccgaaaaggaaggacctctgctaagcgacagtcatgttgcattccgtttgaccatgccttcccccatgccagagtatctgaacgtccattacatcggcgaatccgcctccagactactattcctgtctatgcactgggctctgtctatcccatcatttcaagccttaggccaggaaaacagcatttccttggtcaaagcatattggaatgagttgtttaccctggggcttgcccagtgctggcaggttatgaatgtggccaccattctggcgacttttgtcaattgtctccataactcgctccaacaagccgaaggctag

SEQ ID NO: 30210 - DNA, 1822 bp, Artificial Sequence
  derived and/or modified sequence
cgagccgagaaagaggtcacgaactctgaccccccagaaatacccaaacacagaaagctctctccgccgtgaatctcgatcccacatcccgtcggctttcttcaacctctcttcccggagcgccccccaatccacgagtggcagccgcgggactgtcgcgtcggcgcccgacgccggagtcagcagggcgcaaaagcgccggtagatcatggcaaccatagaagaaattgcacatcaaattattgaacaacagatgggagagattgttacagagcagcaaactgggcagaaaatccagattgtgacagcacttgatcataatacccaaggcaagcagttcattctgacaaatcacgacggctctactccaagcaaagtcattctggccaggcaagattccactccgggaaaagttttccttacaactccagatgcagcaggtgtcaaccagttattttttaccactcctgatctgtctgcacaacacctgcagctcctaacagataattctccagaccaaggaccaaataaggtttttgatctttgcgtagtatgtggagacaaagcatcaggacgtcattatggagcagtaacttgtgaaggctgcaaaggattttttaaaagaagcatccgaaaaaatttagtatattcatgtcgaggatcaaaggattgtattattaataagcaccaccgaaaccgctgtcaatactgcaggttacagagatgtattgcgtttggaatgaagcaagactctgtccaatgtgaaagaaaacccattgaagtatcacgagaaaaatcttccaactgtgccgcttcaacagaaaaaatctatatccgaaaggaccttcgtagcccattaactgcaactccaacttttgtaacagatagtgaaagtacaaggtcaacaggactgttagattcaggaatgttcatgaatattcatccatctggagtaaaaactgagtcagctgtgctgatgacatcagataaggctgaatcatgtcagggagatttaagtacattggccaatgtggttacatcattagcgaatcttggaaaaactaaagatctttctcaaaatagtaatgaaatgtctatgattgaaagcttaagcaatgatgatacctctttgtgtgaatttcaagaaatgcagaccaacggtgatgtttcaagggcatttgacactcttgcaaaagcattgaatcctggagagagcacagcctgccagagctcagtagcgggcatggaaggaagtgtacacctaatcactggagattcaagcataaattacaccgaaaaagaggggccacttctcagcgattcacatgtagctttcaggctcaccatgccttctcctatgcctgagtacctgaatgtgcactacattggggagtctgcctccagactgctgttcttatcaatgcactgggcactttcgattccttctttccaggctctagggcaagaaaacagcatatcactggtgaaagcttactggaatgaactttttactcttggtcttgcccagtgctggcaagtgatgaatgtagcaactatattagcaacatttgtcaattgtcttcacaatagtcttcaacaagcagaggggtaatcaccttaaaatgtcatcaaaaatagatctactagaaggcagcatcacattcccatcttacttatggactcctacccctggttcatgtcttatatgcctgtaatggttataaagcctaccttcaggaaagctatggttgactaattactaatggatgggttttaaacatgtccctctacaataaattaaaatctttattgtaaaacttta

SEQ ID NO: 30211 - DNA, 1404 bp, Artificial Sequence
  derived and/or modified sequence
atggccaccatcgaggagatcgcccaccagatcatcgagcagcagatgggagaaattgtgacagagcagcagacaggccagaagatccagatcgtgacagccctggaccacaacacccagggcaagcagttcatcctgaccaaccatgatggcagcacccccagcaaggtgatcctggcccggcaggacagcacccctgggaaggtgttcctgaccaccccagatgctgctggggtgaaccagctgttcttcaccaccccagacctgagcgcccagcacctgcagctgctgacagacaacagcccagaccagggccccaacaaggtgtttgacctgtgtgtggtgtgtggggacaaggccagcggccgccactatggagctgtgacctgtgagggctgcaagggcttcttcaagaggagcatcaggaagaacctggtgtacagctgccggggcagcaaggactgcatcatcaacaagcaccacaggaaccgctgccagtactgccgcctgcagcgctgcatcgccttcggcatgaagcaggacagcgtgcagtgtgagaggaagcccatcgaggtgtcccgggagaagagcagcaactgtgccgccagcacagagaagatctacatcaggaaggacctgcggagccccctgacagccacccccacctttgtgacagattctgagagcaccaggagcacaggcctgctggacagcggcatgttcatgaacatccaccccagcggcgtgaagacagaatctgctgtgctgatgaccagtgacaaggccgagagctgccagggcgacctgagcaccctggccaacgtggtgaccagcctggccaacctgggcaagaccaaggacctgagccagaacagcaatgagatgtccatgattgagagcctgagcaatgatgacaccagcctgtgtgagttccaggagatgcagaccaatggagatgtgtcccgggcctttgacaccctggccaaggccctgaaccctggagagagcacagcctgccagagctctgtggccggcatggagggctctgtgcacctgatcaccggggacagcagcatcaactacacagagaaggagggccccctgctgagtgacagccacgtggccttccggctgaccatgcccagccccatgcctgagtacctgaatgtgcactacatcggggagagcgccagccggctgctcttcctgtccatgcactgggccctgagcatccccagcttccaggccctgggccaggagaacagcatcagcctggtgaaggcctactggaatgaactcttcaccctgggcctggcccagtgctggcaggtgatgaatgtggccaccatcctggccacctttgtgaactgcctgcacaacagcctgcagcaggccgagggctag

SEQ ID NO: 30212 - DNA, 1404 bp, Artificial Sequence
  derived and/or modified sequence
atggccaccatcgaggagatcgcccaccagatcatcgagcagcagatgggcgaaatagtcacagaacaacagactggccagaagatacagatcgttacagccctggaccacaatacacagggtaaacagttcattctgacaaaccatgatggctccaccccctcaaaagttatccttgcaagacaggattctactcccgggaaggtttttctcacaacccctgacgccgcaggagtaaaccagctcttcttcactacaccagacttatcagcccagcaccttcagttgctcaccgacaattcacctgatcagggccctaacaaagtctttgacctgtgtgttgtatgcggcgacaaagccagcgggcgccactacggagctgtgacctgtgagggctgtaagggcttcttcaagcgatcaatcaggaaaaatttggtatacagctgccgtggttccaaggactgcattatcaataaacatcaccgaaaccgatgccagtactgtcgccttcagcgttgtattgcgtttggaatgaaacaggactctgtgcagtgcgagaggaagcccattgaggtaagccgagagaagtccagcaactgcgccgcttccaccgaaaagatctatattagaaaagatcttcggtcccctctgacagcaacccccacatttgttaccgactcagaaagcacgagaagcactggcctgctcgatagcgggatgttcatgaacattcacccatccggcgtcaagacggaatcagcggtgctgatgacgtcagataaagccgaatcttgtcagggtgatctaagcaccctggccaatgtcgtgacctctctggctaacttgggtaaaaccaaggaccttagtcagaattcaaatgaaatgtccatgattgaaagcctgtcgaatgatgatacaagtctctgtgaatttcaggaaatgcagaccaatggagacgtatctcgtgccttcgataccttggccaaggccttgaacccaggtgagagcactgcctgtcagtcatctgtcgccggaatggaggggtctgtgcacttaataacgggagattcatccataaattacaccgagaaagaggggcccttgctatctgactcacacgtcgccttccggttgacaatgcctagcccaatgccagagtatctgaacgtgcactatattggtgaatctgcctcgcgccttttattcctgtcgatgcactgggccttgagcataccatcgtttcaggctctggggcaggaaaattcaattagcctggtcaaggcttactggaatgaattgttcactcttggactagctcagtgttggcaggttatgaatgtggctacaatactcgccacttttgtcaactgcttgcacaactcccttcagcaggcagaagggtag

SEQ ID NO: 30213 - DNA, 1404 bp, Artificial Sequence
  derived and/or modified sequence
atggctacaattgaggagattgcacaccagataattgaacagcagatgggagaaatcgtgaccgagcagcagacaggccagaagatacagatcgtgactgccctcgatcacaacacccagggcaagcagtttattctcactaaccatgatggttcaaccccctcaaaagtgatcctcgcacggcaggactctactccagggaaagttttcctcactacccctgatgcagccggtgtcaaccagcttttcttcacaactcccgacctttccgcacagcatctgcagctcctcacggataacagtcccgatcagggccctaataaggtctttgatctttgtgtagtgtgcggagacaaagcgtccggcaggcactatggcgcagtgacatgcgaggggtgtaaaggtttctttaagaggtcaattaggaagaaccttgtgtatagttgcaggggctccaaagattgcattataaacaagcaccacagaaataggtgtcagtactgtaggctgcagcgctgtattgcgttcggaatgaaacaggattccgtacagtgcgagcgcaaaccgattgaggttagcagggagaaatcttcgaactgcgcggcatcaactgagaaaatctatatacggaaggatctgaggagcccccttaccgctacccccacgtttgtgacagacagcgagtctacccgcagtacaggcttgttagactccgggatgttcatgaatattcaccccagcggcgtgaagactgaatcagccgtactcatgacctccgataaagctgagagttgccagggcgacctctcaaccttggcaaatgtggtgactagcttggccaatctaggcaagactaaagacctcagccagaattccaacgaaatgagtatgatcgaaagcttaagcaatgacgacactagcctgtgcgagtttcaggagatgcagaccaatggtgacgttagccgagcttttgatacgctggcgaaagcattaaaccccggtgagtctaccgcatgtcagtcctccgtcgcaggcatggaaggatctgtacatctcattaccggtgattcatcgataaattatactgagaaagaaggcccactgctttccgactctcatgtcgccttcaggctgactatgcctagtcccatgccagagtatctgaatgttcactatattggagagagtgcgtctcggcttttgttcctgtccatgcattgggccctatccatccccagctttcaggctctagggcaggagaactctataagcctcgttaaggcttactggaatgaactgttcacactgggtctggctcagtgctggcaagttatgaatgtcgccaccatactggccactttcgtgaattgcctgcacaattctctgcagcaggccgagggctag

SEQ ID NO: 30214 - DNA, 1404 bp, Artificial Sequence
  derived and/or modified sequence
atggccaccatcgaggagatcgcccaccagatcatcgagcagcagatgggcgagatcgtgaccgagcagcagaccggccagaagatccagatcgtgaccgccctggaccacaacacccagggcaagcagttcatcctgaccaaccacgacggcagcacccccagcaaggtgatcctggccagacaggacagcacccccggcaaggtgttcctgaccacccccgacgccgccggcgtgaaccagctgttcttcaccacccccgacctgagcgcccagcacctgcagctgctgaccgacaacagccccgaccagggccccaacaaggtgttcgacctgtgcgtggtgtgcggcgacaaggccagcggcagacactacggcgccgtgacctgcgagggctgcaagggcttcttcaagagaagcatcagaaagaacctggtgtacagctgcagaggcagcaaggactgcatcatcaacaagcaccacagaaacagatgccagtactgcagactgcagagatgcatcgccttcggcatgaagcaggacagcgtgcagtgcgagagaaagcccatcgaggtgagcagagagaagagcagcaactgcgccgccagcaccgagaagatctacatcagaaaggacctgagaagccccctgaccgccacccccaccttcgtgaccgacagcgagagcaccagaagcaccggcctgctggacagcggcatgttcatgaacatccaccccagcggcgtgaagaccgagagcgccgtgctgatgaccagcgacaaggccgagagctgccagggcgacctgagcaccctggccaacgtggtgaccagcctggccaacctgggcaagaccaaggacctgagccagaacagcaacgagatgagcatgatcgagagcctgagcaacgacgacaccagcctgtgcgagttccaggagatgcagaccaacggcgacgtgagcagagccttcgacaccctggccaaggccctgaaccccggcgagagcaccgcctgccagagcagcgtggccggcatggagggcagcgtgcacctgatcaccggcgacagcagcatcaactacaccgagaaggagggccccctgctgagcgacagccacgtggccttcagactgaccatgcccagccccatgcccgagtacctgaacgtgcactacatcggcgagagcgccagcagactgctgttcctgagcatgcactgggccctgagcatccccagcttccaggccctgggccaggagaacagcatcagcctggtgaaggcctactggaacgagctgttcaccctgggcctggcccagtgctggcaggtgatgaacgtggccaccatcctggccaccttcgtgaactgcctgcacaacagcctgcagcaggccgagggctag

SEQ ID NO: 30215 - protein, 147 aa, Artificial Sequence
  derived and/or modified sequence
MAATTGSGVKVPRNFRLLEELEEGQKGVGDGTVSWGLEDDEDMTLTRWTGMIIGPPRTIYENRIYSLKIECGPKYPEAPPFVRFVTKINMNGVNSSNGVVDPRAISVLAKWQNSYSIKVVLQELRRLMMSKENMKLPQPPEGQCYSN

SEQ ID NO: 30216 - DNA, 444 bp, Artificial Sequence
  derived and/or modified sequence
atggccgccaccaccggcagcggcgtgaaggtgcccagaaacttcagactgctggaggagctggaggagggccagaagggcgtgggcgacggcaccgtgagctggggcctggaggacgacgaggacatgaccctgaccagatggaccggcatgatcatcggcccccccagaaccatctacgagaacagaatctacagcctgaagatcgagtgcggccccaagtaccccgaggccccccccttcgtgagattcgtgaccaagatcaacatgaacggcgtgaacagcagcaacggcgtggtggaccccagagccatcagcgtgctggccaagtggcagaacagctacagcatcaaggtggtgctgcaggagctgagaagactgatgatgagcaaggagaacatgaagctgccccagccccccgagggccagtgctacagcaactag

SEQ ID NO: 30217 - DNA, 444 bp, Artificial Sequence
  derived and/or modified sequence
atggctgcaactaccggctctggcgtcaaagtccctagaaatttcaggctcctggaggaattggaagagggacaaaagggtgtgggggatggcaccgtgagttgggggctggaggacgacgaagatatgacactaactcgttggacaggtatgatcatcggcccgccacgaactatatacgagaaccggatatacagtctgaagattgagtgcggacccaaataccctgaagctcctcctttcgtgcggttcgtgaccaagattaacatgaatggggtaaattcgtctaacggggtcgtggatccaagggccattagtgtgctggctaagtggcagaattcttatagtatcaaggtggtcctacaagagctgaggcggctgatgatgagcaaagagaatatgaagttgccgcaaccacccgaaggacagtgttatagtaattag

SEQ ID NO: 30218 - DNA, 444 bp, Artificial Sequence
  derived and/or modified sequence
atggccgccaccactggaagtggagtgaaggtgcccaggaacttccggctgctggaggagctggaggagggccagaagggcgtgggagatggcaccgtgtcctggggcctggaggatgatgaggacatgaccctgacccgctggacaggcatgatcatcggcccccccaggaccatctatgaaaatcgcatctacagcctgaagattgaatgtggccccaagtacccagaggcccccccatttgtgcgctttgtgaccaagatcaacatgaatggagtgaacagcagcaatggagtggtggacccccgggccatctctgtgctggccaagtggcagaacagctacagcatcaaggtggtgctgcaggagctgcggcggctgatgatgagcaaggagaacatgaagctgccccagcccccagagggccagtgctacagcaactag

SEQ ID NO: 30219 - DNA, 444 bp, Artificial Sequence
  derived and/or modified sequence
atggccgccaccaccggcagcggcgtgaaggtgccccggaacttccggctactcgaggagctagaggaaggacaaaagggcgttggcgatggaaccgtgtcctggggcctggaggacgatgaggatatgaccctcacacgctggacaggcatgatcatcgggccacctcggaccatctatgaaaaccggatctactccttgaagatcgagtgcggaccgaaatatccagaagctccaccattcgtgcgcttcgttacaaaaataaacatgaatggcgtcaacagttcgaacggcgtggtcgacccacgcgccattagtgtgttagcaaagtggcaaaattcgtacagcatcaaggtagtgctgcaagagctcaggagactgatgatgtctaaggagaacatgaaattgcctcagcccccagaaggacaatgttactcaaattag

SEQ ID NO: 30220 - DNA, 444 bp, Artificial Sequence
  derived and/or modified sequence
atggctgcaacaaccggctccggagtgaaggtgcccagaaattttcggcttctggaagagttggaagaaggccagaagggcgtcggtgatggaactgttagttggggcttagaggatgacgaagatatgaccctaaccagatggacgggaatgattatcgggccaccacgaactatctacgaaaataggatttattctctcaagatcgaatgcgggcctaaatatccggaagctcctccttttgtgaggtttgtgaccaaaattaatatgaacggcgtgaacagctcaaacggggtcgtggacccaagagctatctctgtccttgccaagtggcaaaactcatacagcatcaaggtcgtgcttcaggagctacggaggctaatgatgagtaaagagaacatgaagctgcctcagccaccagagggtcagtgctactcgaattag

SEQ ID NO: 30221 - DNA, 2133 bp, Artificial Sequence
  derived and/or modified sequence
gggggggtgaagaaggggccggccttcaagcaagagcgacgcaagatggcagccaccacgggctcgggagtaaaagtccctcgcaatttccgactgttggaagaactcgaagaaggccagaaaggagtaggagatggcacagttagctggggtctagaagatgacgaagacatgacacttacaagatggacagggatgataattgggcctccaagaacaatttatgaaaaccgaatatacagccttaaaatagaatgtggacctaaatacccagaagcacccccctttgtaagatttgtaacaaaaattaatatgaatggagtaaatagttctaatggagtggtggacccaagagccatatcagtgctagcaaaatggcagaattcatatagcatcaaagttgtcctgcaagagcttcggcgcctaatgatgtctaaagaaaatatgaaactccctcagccgcccgaaggacagtgttacagcaattaatcaaaaagaaaaaccacaggcccttccccttccccccaattcgatttaatcagtcttcattttccacagtagtaaattttctagatacgtcttgtagacctcaaagtaccggaaaggaagctcccattcaaaggaaatttatcttaagatactgtaaatgatactaattttttgtccatttgaaatatataagttgtgctataacaaatcatcctgtcaagtgtaaccactgtccacgtagttgaacttctgggatcaagaaagtctatttaaattgattcccatcataactggtggggcacatctaactcaactgtgaaaagacacatcacacaatcaccttgctgctgattacacggcctggggtctctgccttctccccttaccctcccgcctcccaccctccctgcaacaacagccctctagcctggggggcttgttagagtagatgtgaaggtttcaggtcgcagcctgtgggactactgctaggtgtgtggggtgtttcgcctgcacccctggtttctttaagtcttaagtgatgccccttccaaaccatcatcctgtccccacgctcctccactcccgcccttggccgaagcatagattgtaacccctccactcccctctgagattggccttcggtgaggaattcagggctttccccatatcttctctcccccacctttatcgaggggtgctgctttttctccctcctcctcaagttcctttttgcaccgtcaccacccaacaccttccatgacacttccttgctttggccagaagccatcaggtaaggttggaaagagcctctgacctcccttgtttagttttggaaccatactcactcactctccaccagcctgggaaatgaatattgggtcctcagccctgccaccctctgctgtcatcagctgatgcattgtttttagctcaggttttgataaggtgaaaagaatagtcaccagggttactcagacctgccagctctcggagtccttggtggttgaacttggagaaagaccgcatgaagatacttgtaagcacacatgatccctctgaattgttttactttcctgtaactgcttttgcttttaaaaattgaagaagttttaaacagggctttcatttggtcatccttgcaatccattggggtctagtttggaatctgacaactggaacaaaaagaaccttgaatccggtgcatgccttggttttggtgctgctgctgcttcccaagatcctcagcagggattaagaaggaacccggtgtgcacagcagatccccgaaattggtgggcttgacctcctggcaaattgctgcgtctttccacttgctgttcaggaccactaaatgctgaaatgtggatgcataccgaaataaaagcaattcattgtgtactaaaggttttttttttttttttaatttagtatttgtgtaaaaccaccttttgaagcagcaactatcaagtctgaaaagcaattgatgtttccattaatctttttctggggggaaaaccttagttctaaggatttaacatcctgtaagtgaagtttaacataacagtattccataagcagcctttttattgtcagaccattgcctgattttaatataataaaaaaaaagtgtgcgttaatatttaa

SEQ ID NO: 30222 - protein, 242 aa, Artificial Sequence
  derived and/or modified sequence
MAAVGAGGSTAAPGPGAVSAGALEPGTASAAHRRLKYISLAVLVVQNASLILSIRYARTLPGDRFFATTAVVMAEVLKGLTCLLLLFAQKRGNVKHLVLFLHEAVLVQYVDTLKLAVPSLIYTLQNNLQYVAISNLPAATFQPSPRCSQSHSLCLCLRLRALRSPAASRAATTTAAVFPPWRPHHGALSAKVSAGEVRAGSNGGTQGRGTGVEGVGHLQDPSRHPPGPGSSGFGRWSFLPGH

SEQ ID NO: 30223 - DNA, 729 bp, Artificial Sequence
  derived and/or modified sequence
atggctgccgtcggagcaggcggcagtactgccgctcctggtcctggcgcggtgtccgctggagctctggaaccaggcaccgcctcagccgcacatcggcggttgaagtatatctcccttgccgtccttgttgtgcagaatgccagtcttatactctccattaggtatgcccggaccctccccggtgacagattctttgcaacaacagccgttgttatggcagaggttcttaaggggctcacttgtctgttgctgttatttgcccaaaaacgcgggaacgtaaaacacctggttctatttctgcatgaggccgtcctggtgcaatacgtggacactctgaaacttgccgtgccatctctgatatacaccttacagaataatctccagtatgtggccatttccaaccttcccgccgccactttccaaccctctcctagatgctcccagagtcattctctctgcctctgcctcagacttagggcgctcagatcccctgcagcctctcgggctgctacaacaacggccgccgtgtttccgccgtggcgcccccatcatggcgcattgagcgccaaagtcagcgcaggggaggttcgcgccgggagcaacggcggcacccagggtcgtggaactggcgtggaaggggtgggccatctgcaggatccttctcgccacccacccggtccagggtcctctggcttcgggagatggtcttttctacctggacactag

SEQ ID NO: 30224 - DNA, 729 bp, Artificial Sequence
  derived and/or modified sequence
atggctgctgtgggcgctgggggcagcacagctgcccctggccctggagctgtgtctgctggggccctggagcctggaacagccagcgctgcccaccggcggctgaagtacatcagcctggccgtgctggtggtgcagaatgccagcctcatcctgagcatccgctatgcccggaccctgcccggggaccgcttctttgccaccacagctgtggtgatggccgaggtgctgaagggcctgacctgcctgctgctgctgtttgcccagaagagaggaaatgtgaagcacctggtgctcttcctgcacgaggccgtgctggtgcagtatgtggacaccctgaagctggccgtgcccagcctcatctacaccctgcagaacaacctgcagtatgtggccatcagcaacctgcctgctgccaccttccagcccagcccccgctgcagccagagccacagcctgtgcctgtgcctgcggctgcgggccctgcggagccctgctgccagccgggccgccaccaccacagctgctgtgtttcctccctggaggccccaccacggggccctgagcgccaaggtgtctgctggggaggtgcgggccggcagcaatggaggcacccagggccggggcaccggggtggagggcgtgggccacctgcaggaccccagccgccaccccccaggccctggcagcagcggcttcggccgctggagcttcctgcccggccactag

SEQ ID NO: 30225 - DNA, 729 bp, Artificial Sequence
  derived and/or modified sequence
atggccgccgtgggcgccggcggcagcaccgccgcccccggccccggggctgtgtcagccggcgctttagagcccggaacggctagcgcagcgcatagacggctgaagtatatcagcctagccgtgctcgttgtccagaacgcatccctcattctgagcatccgctacgccaggaccctccctggagatcgattttttgcgactaccgccgtggtgatggcagaggttttaaaggggctgacttgcctactcttactattcgcccaaaaaagggggaatgtgaaacacctcgtgctgttccttcacgaggccgttctcgtccagtatgtggatacactaaagctggccgtgccatctctgatttacacgctccagaacaaccttcagtatgttgcaatctccaacctccccgccgctacctttcaacctagcccccgatgctcacaaagtcactcactgtgcctctgccttcgactcagagcactccgctcccccgccgcgtcccgagcagccacaacgaccgcggccgtatttcccccttggaggccacatcatggggctctgtctgctaaggtgtctgcaggagaagtacgggcagggtccaatggcgggacacagggtagaggcactggagtcgagggggtaggtcatctgcaggatccaagccgtcatccaccgggtcctgggtctagcggctttggaaggtggagctttcttccgggccactag

SEQ ID NO: 30226 - DNA, 729 bp, Artificial Sequence
  derived and/or modified sequence
atggcagccgtcggtgctggcggtagcaccgcggctcctgggccaggggcagtgtctgcaggcgcactggagccaggaacagccagcgctgcacaccgaagactgaagtacatttcgctggccgtgcttgtcgtccagaatgcgagcctaatcctgagcatacgctacgcacggactctgcctggcgatcggttctttgcgactacagctgtcgtgatggccgaagtccttaaggggctaacctgcctcctcctgctgttcgcccagaaaagagggaacgtgaagcatctggtactgttcctccacgaagccgtcctggtgcaatatgtggatacactcaaactcgctgttcctagcttgatttacacactccagaacaatctccagtacgtcgcgataagcaatctgccagcggctacttttcaaccaagtcctcggtgttcccaaagtcactccctgtgcctgtgcctgaggctgcgcgcactaagaagtcctgctgcttccagagctgcaacgaccactgccgctgtatttcctccttggcgtccccaccacggagctctgagcgccaaagtctccgcaggcgaggtccgtgccggatccaatggaggtacccagggtcggggaaccggggtggaaggtgtggggcacctgcaggaccctagcagacatccgcctggacccggaagctcgggcttcggtcggtggagctttctgcctgggcattag

SEQ ID NO: 30227 - DNA, 1726 bp, Artificial Sequence
  derived and/or modified sequence
cgggccgggcagatgccaacatggcagcggttggggctggtggttccaccgcggcgcccgggccaggggcggtttccgcgggtgcattggagccggggaccgccagtgcggctcacaggcgcctgaagtacatatccctagctgtgctggtggtccagaatgcctccctcatcctcagcatccgctacgcccgcacgttgccaggggaccgcttctttgccaccactgctgtggtcatggcggaagtgctcaaaggtctcacctgcctgctgctgctcttcgcacagaagaggggtaacgtgaagcacctggttctcttcctccatgaggctgtcctggtgcagtatgtggacacgctcaagctcgcagtgccctctctcatctacaccttgcagaataacctccagtatgttgccatctctaacctaccagctgccactttccagccttccccgaggtgcagccaaagccatagcctctgcctctgcctccgcctccgggccctgcgttcaccagcagcctcccgggcagccaccaccaccgcagctgtcttcccaccgtggagacctcatcacggagccctttctgccaaagtcagtgctggtgaagtgagggctggcagcaatggggggacacaagggagggggactggggtggagggtgttgggcatctgcaggacccaagtcgccaccctccggggcctggctcctctgggtttgggagatggtcttttctcccaggtcactgagacttctggaggggtgtgggactagagctgggtgtcacgtgaacccttcctggtagggtgacccccttcccctggagggggttttagagctgccgcctctgctccctctaacctctttggaggcagggttgggggtattgtcattcaaggccttttttttgtctgctccctccccgaccctgtgccctcttctggaggtttctcgtctgggagagtccctcccagcagtccctccacctccataaggacacactggacaaaactcccgcagctcttcaggaatgaccgatgcctacctgtggggttcagttgcccatagtttgaggccttctctcctcccttaccaccgctctggatcatgttactagttccgtcttttgtgtggccttgggccagcttccttgataccttgaagatgggcttcttgtgagtccccagggagaaagggacaagagctaagatttttgcatcagcccttctggcagaaggtgtggtaggggccatttgttttttttagtggacttgggatttgtggtgtaatcatatcattaatgatccagggtgtgggaaaaatggaggtccttgaagtggctgaatctcattgtatttaagacactgtcagttgccagatgtaggcttatttttggagatgtctaggagaggaaaaagctaccaatcatactcttgatatccgtctggctgtgtgaggcacccctacctcatgggggtgtcttgggattgatgaactgtggaacctgcctcctgcgctccccaaagcttattaaccccttaactgtatcggggcggggtgtgtgtgtgcatggaagatgcctgggctgtctttgctatatgtaaatagagccattggatctttatttttgattaatttgttctgattttttggtttgttttttaaggaactgtaatgaacaaatgtcaggatatccaatgccaaataaagatgttgtatttattta

SEQ ID NO: 30228 - DNA, 729 bp, Artificial Sequence
  derived and/or modified sequence
atggccgccgtgggcgccggcggcagcaccgccgcccccggccccggcgccgtgagcgccggcgccctggagcccggcaccgccagcgccgcccacagaagactgaagtacatcagcctggccgtgctggtggtgcagaacgccagcctgatcctgagcatcagatacgccagaaccctgcccggcgacagattcttcgccaccaccgccgtggtgatggccgaggtgctgaagggcctgacctgcctgctgctgctgttcgcccagaagagaggcaacgtgaagcacctggtgctgttcctgcacgaggccgtgctggtgcagtacgtggacaccctgaagctggccgtgcccagcctgatctacaccctgcagaacaacctgcagtacgtggccatcagcaacctgcccgccgccaccttccagcccagccccagatgcagccagagccacagcctgtgcctgtgcctgagactgagagccctgagaagccccgccgccagcagagccgccaccaccaccgccgccgtgttccccccctggagaccccaccacggcgccctgagcgccaaggtgagcgccggcgaggtgagagccggcagcaacggcggcacccagggcagaggcaccggcgtggagggcgtgggccacctgcaggaccccagcagacacccccccggccccggcagcagcggcttcggcagatggagcttcctgcccggccactag

SEQ ID NO: 30229 - protein, 439 aa, Artificial Sequence
  derived and/or modified sequence
MQNLKADPEELFTKLEKIGKGSFGEVFKGIDNRTQKVVAIKIIDLEEAEDEIEDIQQEITVLSQCDSPYVTKYYGSYLKDTKLWIIMEYLGGGSALDLLEPGPLDETQIATILREILKGLDYLHSEKKIHRDIKAANVLLSEHGEVKLADFGVAGQLTDTQIKRNTFVGTPFWMAPEVIKQSAYDSKADIWSLGITAIELARGEPPHSELHPMKVLFLIPKNNPPTLEGNYSKPLKEFVEACLNKEPSFRPTAKELLKHKFILRNAKKTSYLTELIDRYKRWKAEQSHDDSSSEDSDAETDGQASGGSDSGDWIFTIREKDPKNLENGALQPSDLDRNKMKDIPKRPFSQCLSTIISPLFAELKEKSQACGGNLGSIEELRGAIYLAEEACPGISDTMVAQLVQRLQRSIHGNQAPPDCHLAQVQAFGGSGCVLGSRSV

SEQ ID NO: 30230 - protein, 431 aa, Artificial Sequence
  derived and/or modified sequence
MAHSPVQSGLPGMQNLKADPEELFTKLEKIGKGSFGEVFKGIDNRTQKVVAIKIIDLEEAEDEIEDIQQEITVLSQCDSPYVTKYYGSYLKDTKLWIIMEYLGGGSALDLLEPGPLDETQIATILREILKGLDYLHSEKKIHRDIKAANVLLSEHGEVKLADFGVAGQLTDTQIKRNTFVGTPFWMAPEVIKQSAYDSKADIWSLGITAIELARGEPPHSELHPMKVLFLIPKNNPPTLEGNYSKPLKEFVEACLNKEPSFRPTAKELLKHKFILRNAKKTSYLTELIDRYKRWKAEQSHDDSSSEDSDAETDGQASGGSDSGDWIFTIREKDPKNLENGALQPSDLDRNKMKDIPKRPFSQCLSTIISPLFAELKEKSQACGGNLGSIEELRGAIYLAEEACPGISDTMVAQLVQRLQRYSLSGGGTSSH

SEQ ID NO: 30231 - protein, 342 aa, Artificial Sequence
  derived and/or modified sequence
MAHSPVQSGLPGMQNLKADPEELFTKLEKIGKGSFGEVFKGIDNRTQKVVAIKIIDLEEAEDEIEDIQQEITVLSQCDSPYVTKYYGSYLKDTKLWIIMEYLGGGSALDLLEPGPLDETQIATILREILKGLDYLHSEKKIHRDIKAANVLLSEHGEVKLADFGVAGQLTDTQIKRNTFVGTPFWMAPEVIKQSAYDSKADIWSLGITAIELARGEPPHSELHPMKVLFLIPKNNPPTLEGNYSKPLKEFVEACLNKEPSFRPTAKELLKHKFILRNAKKTSYLTELIDRYKRWKAEQSHDDSSSEDSDAETDGQASGGSDSGDWIFTIREWSSSAIGLGQK

SEQ ID NO: 30232 - DNA, 1320 bp, Artificial Sequence
  derived and/or modified sequence
atgcagaatttgaaggctgaccccgaagaattattcacgaaactagagaaaattgggaaaggaagttttggagaagtgttcaaggggatcgataataggacccagaaggttgttgccatcaaaataatcgacttagaggaagccgaggacgaaattgaagatatacagcaggagatcactgtgttaagccagtgcgattcaccatacgtaactaagtattacggcagttacctgaaggacaccaagctttggattatcatggaatatctcggcggcggatccgcgttagacctgttagagcccggcccgctcgacgagactcagatagccactattttgagagagattctgaaaggacttgactatctgcacagcgagaagaagatccaccgagacattaaggccgccaacgttctactgtccgaacatggggaagtgaagctggcagactttggtgtggccggacagctcacagacacgcagatcaagcggaatacattcgtgggcacgccgttttggatggcacccgaggtaatcaaacagagtgcctatgactctaaggccgacatttggagcctgggcatcacagcaattgagcttgcacggggcgagcctccacactcagaactgcatcctatgaaagtgctgttcctcatccctaagaacaatccgcccaccttagagggaaattatagcaagccgctcaaagaattcgtggaagcatgcctaaacaaagagcctagctttcgtccaacagccaaagagctactcaagcacaaatttatactaagaaatgccaagaagacttcatatctcactgagctcatcgacaggtacaagcgttggaaagcagaacagagccacgatgacagctcttcagaagactctgacgccgaaacagatggccaagcctccggaggcagtgatagcggcgattggatctttacaatcagggagaaagaccccaagaatctggaaaatggcgctctgcaaccatctgatctagaccgcaacaagatgaaggacatccccaagcgaccattcagccaatgtttgtccacaatcatcagccccctgttcgctgagttgaaagagaagagtcaggcttgcggcgggaatttaggctccattgaagagctacgtggcgcgatctacctcgctgaggaggcatgcccggggatctccgatacaatggttgcgcaactcgtgcaaaggcttcaaagaagcatacatggcaaccaagcaccgcccgattgccatctagcacaagtccaggcctttggcggctcaggctgcgtgttaggcagcagatcggtgtag

SEQ ID NO: 30233 - DNA, 1296 bp, Artificial Sequence
  derived and/or modified sequence
atggcccactctccagttcaatcaggcctcccagggatgcagaatctgaaggccgaccccgaggaactctttaccaaattagagaagattggcaaggggagcttcggagaagtatttaagggaatagacaaccggacccagaaagtggttgcgatcaagattatcgacctggaagaagctgaagacgaaatcgaggatatccagcaagaaattacagtgctatcccaatgtgactctccctacgtcacaaaatactatggctcatatctgaaagacacaaagctgtggatcattatggagtatcttggcggcggctccgccctagatttgctggagcccgggccactggatgagacccaaatcgccaccattctgcgcgaaatcctgaaaggactggactaccttcattccgagaaaaaaatccatagggacattaaagcagccaatgttctcttgagcgagcatggcgaggtaaaactcgctgatttcggggtggccggtcagctcacagatacacagatcaagcgaaatacctttgttggcacgcccttctggatggctcctgaggtaatcaaacaatccgcctatgacagcaaggccgatatctggtcacttggcatcacggccatcgaactcgctaggggcgagcccccccactctgagctgcatcctatgaaagtgttgtttctcatccccaagaataacccccctaccctcgaggggaattattcaaagccactgaaagagttcgtggaggcttgccttaataaggagccaagctttaggccgactgctaaggagctgctgaagcataagttcattttacgcaacgccaaaaaaaccagctacctaactgagttgatcgacagatacaagaggtggaaggccgaacagtctcatgacgattcaagcagtgaggattcggatgctgaaacagacggacaggcatcaggcggttcagatagcggcgattggattttcaccatccgcgaaaaggatccgaagaacctggaaaacggcgcacttcagccctcagatcttgacagaaataagatgaaggacattcccaaacgaccattcagtcagtgcctgtctacaatcattagtcccctctttgctgaattaaaggagaagtcccaagcctgcggcggcaatctggggtctatcgaagagttaagaggagccatctatcttgcagaggaggcttgcccggggatctcggataccatggtcgctcagctcgtgcagagactgcaaagatatagcctttcgggtgggggtactagtagtcattag

SEQ ID NO: 30234 - DNA, 1029 bp, Artificial Sequence
  derived and/or modified sequence
atggcacattcccctgttcaatcaggtttgcccggaatgcagaacttaaaagccgaccctgaggagctgttcaccaagctcgagaaaatcggtaagggctcttttggagaagtcttcaaaggcattgacaataggacgcagaaggtggtagccattaagatcatagacctagaagaggctgaagacgagatcgaagacatacagcaggagatcaccgtgctctcccagtgtgactctccctatgtgacaaagtattatggatcgtatttgaaggatactaaactatggataattatggagtacctcggtggcggttccgctctggatctgcttgaacccgggcctctagacgaaacccagattgcaaccattctgcgcgagatcctgaagggactcgactacctgcatagtgaaaaaaaaattcaccgggacatcaaagccgcaaatgtgctgctttcagaacacggggaggttaagctggccgacttcggtgttgcaggccagttaaccgacacacagattaaaagaaatacctttgtaggcacaccattctggatggctcccgaggtgataaaacagagcgcatacgacagcaaggccgatatctggagcttgggaatcacagccatcgaacttgcacggggggagccaccacactctgagctgcacccaatgaaggtgctattcctgattcccaaaaacaatccccccacccttgaggggaattattcaaaacctttaaaggagttcgttgaagcgtgcctgaacaaagaaccatctttcaggccaactgctaaggaactcctgaaacacaaattcatactcaggaatgccaagaagactagttacctgaccgagctgatcgaccgctataaacgctggaaagccgaacagtcacacgacgactcttcctccgaggatagcgatgccgagactgatggtcaagcgtcaggggggtcagattcaggcgactggatctttaccatacgggagtggagcagtagtgctatcggtctaggccagaagtag

SEQ ID NO: 30235 - DNA, 1320 bp, Artificial Sequence
  derived and/or modified sequence
atgcagaacctgaaggctgaccctgaggagctgttcaccaagctggagaagattggcaagggcagctttggagaggtgttcaagggcatcgacaacagaacccagaaggtggtggccatcaagatcatcgacctggaggaggctgaagatgaaattgaggacatccagcaggagatcaccgtgctgagccagtgtgacagcccctacgtgaccaagtactacggcagctacctgaaggacaccaagctgtggatcatcatggagtacctgggcggcggcagcgccctggacctgctggagcccggccccctggatgagacccagatcgccaccatcctgcgggagatcctgaagggcctggactacctgcacagcgagaagaagatccaccgggacatcaaggccgccaacgtgctgctgtctgaacatggagaggtgaagctggccgactttggagtggccggccagctgacagacacccagatcaagaggaacacctttgtgggcacccccttctggatggcccctgaggtgatcaagcagagcgcctatgacagcaaggctgacatctggagcctgggcatcacagccatcgagctggcccggggggagcccccccacagcgagctgcaccccatgaaggtgctcttcctgatccccaagaacaacccccccaccctggagggcaactacagcaagcccctgaaggagtttgtggaggcctgcctgaacaaggagcccagcttccggcccacagccaaggagctgctgaagcacaagttcatcctgagaaatgccaagaagaccagctacctgacagagctgattgaccgctacaagcgctggaaggccgagcagagccatgatgacagcagcagcgaggacagtgatgctgagacagatggccaggccagcggcggcagtgacagcggggactggatcttcaccatccgggagaaggaccccaagaacctggagaatggagccctgcagcccagcgacctggacaggaacaagatgaaggacatccccaagaggcccttcagccagtgcctgagcaccatcatcagccccctgtttgctgagctgaaggagaagagccaggcctgtggcggcaacctgggcagcattgaggagctgcggggggccatctacctggccgaggaggcctgccccggcatcagtgacaccatggtggcccagctggtgcagaggctgcagaggagcatccacggcaaccaggcccccccagactgccacctggcccaggtgcaggcctttggaggcagcggctgtgtgctgggcagccgctctgtgtag

SEQ ID NO: 30236 - DNA, 1296 bp, Artificial Sequence
  derived and/or modified sequence
atggcccacagccctgtgcagagcggcctgcccggcatgcagaacctgaaggctgaccctgaggagctgttcaccaagctggagaagattggcaagggcagctttggagaggtgttcaagggcatcgacaacagaacccagaaggtggtggccatcaagatcatcgacctggaggaggctgaagatgaaattgaggacatccagcaggagatcaccgtgctgagccagtgtgacagcccctacgtgaccaagtactacggcagctacctgaaggacaccaagctgtggatcatcatggagtacctgggcggcggcagcgccctggacctgctggagcccggccccctggatgagacccagatcgccaccatcctgcgggagatcctgaagggcctggactacctgcacagcgagaagaagatccaccgggacatcaaggccgccaacgtgctgctgtctgaacatggagaggtgaagctggccgactttggagtggccggccagctgacagacacccagatcaagaggaacacctttgtgggcacccccttctggatggcccctgaggtgatcaagcagagcgcctatgacagcaaggctgacatctggagcctgggcatcacagccatcgagctggcccggggggagcccccccacagcgagctgcaccccatgaaggtgctcttcctgatccccaagaacaacccccccaccctggagggcaactacagcaagcccctgaaggagtttgtggaggcctgcctgaacaaggagcccagcttccggcccacagccaaggagctgctgaagcacaagttcatcctgagaaatgccaagaagaccagctacctgacagagctgattgaccgctacaagcgctggaaggccgagcagagccatgatgacagcagcagcgaggacagtgatgctgagacagatggccaggccagcggcggcagtgacagcggggactggatcttcaccatccgggagaaggaccccaagaacctggagaatggagccctgcagcccagcgacctggacaggaacaagatgaaggacatccccaagaggcccttcagccagtgcctgagcaccatcatcagccccctgtttgctgagctgaaggagaagagccaggcctgtggcggcaacctgggcagcattgaggagctgcggggggccatctacctggccgaggaggcctgccccggcatcagtgacaccatggtggcccagctggtgcagaggctgcagcgctacagcctgagcggcggcggcaccagcagccactag

SEQ ID NO: 30237 - DNA, 1029 bp, Artificial Sequence
  derived and/or modified sequence
atggcccacagccctgtgcagagcggcctgcccggcatgcagaacctgaaggctgaccctgaggagctgttcaccaagctggagaagattggcaagggcagctttggagaggtgttcaagggcatcgacaacagaacccagaaggtggtggccatcaagatcatcgacctggaggaggctgaagatgaaattgaggacatccagcaggagatcaccgtgctgagccagtgtgacagcccctacgtgaccaagtactacggcagctacctgaaggacaccaagctgtggatcatcatggagtacctgggcggcggcagcgccctggacctgctggagcccggccccctggatgagacccagatcgccaccatcctgcgggagatcctgaagggcctggactacctgcacagcgagaagaagatccaccgggacatcaaggccgccaacgtgctgctgtctgaacatggagaggtgaagctggccgactttggagtggccggccagctgacagacacccagatcaagaggaacacctttgtgggcacccccttctggatggcccctgaggtgatcaagcagagcgcctatgacagcaaggctgacatctggagcctgggcatcacagccatcgagctggcccggggggagcccccccacagcgagctgcaccccatgaaggtgctcttcctgatccccaagaacaacccccccaccctggagggcaactacagcaagcccctgaaggagtttgtggaggcctgcctgaacaaggagcccagcttccggcccacagccaaggagctgctgaagcacaagttcatcctgagaaatgccaagaagaccagctacctgacagagctgattgaccgctacaagcgctggaaggccgagcagagccatgatgacagcagcagcgaggacagtgatgctgagacagatggccaggccagcggcggcagtgacagcggggactggatcttcaccatccgggagtggagcagcagcgccatcggcctgggccagaagtag

SEQ ID NO: 30238 - DNA, 1320 bp, Artificial Sequence
  derived and/or modified sequence
atgcagaacctgaaggccgaccccgaggagctgttcaccaagctggagaagataggcaaaggcagcttcggcgaggtttttaagggtatagacaacaggacacagaaagtggtcgccatcaagattatcgatctcgaagaagctgaagacgaaatcgaggacatacagcaggagatcacggtgctttctcagtgcgattccccatacgttactaagtactacggctcttatttgaaggacacaaagctgtggattatcatggaatacctaggcggcggctccgccctcgacctgttggagccgggaccccttgacgagacccagatagctacaattttgcgggagatcttgaagggtctcgattaccttcacagtgagaaaaaaattcacagagacataaaggctgccaatgttctgctgagtgaacatggagaggtcaaactcgccgatttcggcgtggctggccagctgaccgacacccagatcaaaaggaatacattcgtgggcacaccattctggatggccccggaagtgattaaacagagcgcctacgactcaaaggccgatatctggtctctgggcattacagctatcgagcttgcacgaggtgaaccacctcacagcgaactccaccctatgaaagtcctctttctgattcccaaaaacaaccctccaacactggaggggaattattctaaaccactgaaagagtttgtcgaagcatgcctcaacaaggagccatctttcaggccgaccgccaaggagctgctaaaacacaagttcattttacgcaatgctaaaaaaaccagctacctaaccgaactgatcgatcgctataagagatggaaggccgaacaaagccacgacgacagctcctctgaggactctgacgccgaaactgatggccaggcctcaggcggcagcgactcgggcgactggatctttacaatccgagagaaggaccctaagaacctcgaaaatggagccttgcagccttccgaccttgatcggaacaaaatgaaagacatcccaaagaggccttttagccagtgcctgtctaccatcatctcacctctgtttgcggagcttaaggaaaagtcccaggcttgcggagggaacctgggaagtatagaggaactcaggggggctatttatttggctgaggaagcttgtccaggcataagcgataccatggtggcccagctcgtccagcgccttcaaaggtccattcacggcaatcaggcacccccggactgccaccttgcacaagtgcaagctttcggaggaagcgggtgtgttctggggagccggagcgtgtag

SEQ ID NO: 30239 - DNA, 1296 bp, Artificial Sequence
  derived and/or modified sequence
atggcccacagccccgtgcagagcggcctgcccggcatgcagaacctgaaggccgatccagaggagctctttacaaagttggaaaagatcggcaaaggtagtttcggagaggtttttaagggtatcgacaaccgcacacagaaggtggtggcaataaagatcattgatctggaagaagccgaggacgaaatagaggacattcagcaggagatcaccgtgctgtcccagtgcgactccccgtatgttaccaaatattatggatcttacctcaaagacacgaaactctggataataatggagtatctcggcggaggaagtgccctcgacctgctggaacctggccctctggatgagacccagatcgcgactattctacgcgagatcctgaaaggcctggactatctccactcagagaaaaaaatccaccgggacattaaggctgccaatgtgctgctgtccgagcacggagaggttaaacttgccgactttggggtggcaggccagctgaccgatactcagatcaagagaaacactttcgtcggcactcctttctggatggccccagaagtgatcaaacaaagcgcctatgactcaaaagctgatatctggtcattggggattacagccatcgagttagcaaggggcgaacccccacatagcgagcttcaccccatgaaggttctgtttttaattcccaaaaataaccccccgacattggagggcaattactcaaagccactgaaagaattcgtggaggcctgcctgaacaaggagccctcgtttcgtccaacggccaaagagttactgaagcacaagtttatcctcagaaatgctaaaaaaacctcatacttgactgagctgatcgatcggtacaaacgctggaaggccgagcagagccacgacgactctagttctgaagattccgacgccgaaactgatggtcaagcctctgggggatcggactcaggagattggatttttaccatccgggagaaagaccccaagaacctggagaacggcgctctccagccatcagatttagataggaacaaaatgaaggatattcccaagagaccatttagccagtgcctgagcaccatcataagcccactcttcgcagagctgaaggaaaaatctcaggcttgcggcgggaatctcgggagcatcgaggaactcaggggggcgatttacttggcagaagaagcatgtcctggcatcagcgacacgatggtggcccaactggtacagcgacttcagagatatagcctaagtggaggtggtacgtctagccactag

SEQ ID NO: 30240 - DNA, 1029 bp, Artificial Sequence
  derived and/or modified sequence
atggcccacagccccgtgcagagcggcctgcccggcatgcagaacctgaaggcggacccagaggaactctttaccaaactggagaaaatcggaaagggatcgtttggcgaagtgttcaaaggcatcgacaataggacccagaaagtcgtcgccattaagattatagatttggaggaagctgaagatgaaatcgaagatatccaacaggaaattacagtcttgtcccagtgcgactccccctatgtaaccaaatactatggcagctatctgaaggataccaagctctggataatcatggaatatctgggcgggggatctgcgctggacttacttgaacccgggcccctcgatgagacgcagattgcgacgatcctccgcgagatcctgaagggactggactatttacactccgaaaagaaaatccacagggatatcaaagctgccaatgtgctcctgagcgaacatggggaagttaaattagctgatttcggggtggctggtcagttaactgatacacagattaaaaggaatacgttcgtgggaactcctttttggatggctcctgaggtcatcaagcagtccgcttacgattccaaagcagacatttggtctctcggaatcaccgctattgagctcgcccgcggtgaacctccacacagtgaattgcatccgatgaaggtccttttccttatccctaaaaacaaccctcccacattggagggaaattactcgaagcctctgaaagaatttgttgaagcctgtctgaacaaggaaccttccttccggcccaccgctaaggagctgcttaagcacaagttcatcctcaggaatgctaagaagacctcttacctaacagagctgatcgataggtataagcgctggaaagccgagcaatcacacgacgattcatcttccgaggacagcgatgccgaaaccgatggacaggcttctggaggatcagactcaggggattggatctttacaataagggaatggagtagttcagccataggcttgggacagaagtag

SEQ ID NO: 30241 - DNA, 1320 bp, Artificial Sequence
  derived and/or modified sequence
atgcagaacttgaaagcagacccagaagaattgttcacaaagttagagaagataggcaaagggtccttcggagaggtgtttaagggaattgataaccggactcagaaggtagtagcaattaagatcatcgatttggaggaggccgaagatgagatagaagacatccagcaagagatcacagtactcagtcaatgcgactccccctatgttactaaatactatgggtcgtacctgaaagataccaagttgtggattatcatggaatacctcgggggagggtccgccctcgacctgcttgaaccgggacctctcgacgagactcaaatcgccactatcctgcgggagatcctaaaaggcttggattacctgcacagtgaaaaaaaaatccatcgcgacattaaggccgctaatgtgttgctgtcagagcacggcgaagtcaagctagctgatttcggggtggctggccagctaaccgacacacagatcaaacgaaatactttcgtgggaacgccgttctggatggcccctgaagtgatcaagcagagcgcttacgactctaaggccgatatctggtcactgggcatcactgctattgagctggcccgtggcgagcctccccattctgagttacaccccatgaaggttctgtttttgatccccaaaaataatccgcctaccctcgaaggcaattactcaaagccactaaaagagttcgtggaggcctgtctcaataaggaacctagcttccgacctaccgcgaaggagttacttaagcataagtttattttacgaaacgccaagaaaacttcctatctgaccgaacttatcgacagatacaaaaggtggaaagccgagcagtctcatgatgactccagcagtgaagattcagacgccgagactgacggtcaggctagtggcggttctgactcgggggattggatctttacaatacgcgagaaagaccccaagaacttggaaaacggagccctccagccatctgatctcgacagaaataaaatgaaggatataccgaaaaggcccttttcgcagtgcctgtccactataatcagccccttgtttgcagaattaaaggaaaaatctcaggcctgtggcggtaacctcggttccatcgaggaattgagaggagctatctacctagcagaagaagcttgccctgggatatcagacacaatggtggcgcaacttgtccagcgtctccagcgttccatacacggaaaccaagcaccaccggattgtcacctcgctcaggtgcaggctttcggagggtctgggtgcgtgttagggagtagatcagtctag

SEQ ID NO: 30242 - DNA, 1296 bp, Artificial Sequence
  derived and/or modified sequence
atggcgcatagcccagtgcagtccggcctaccagggatgcagaaccttaaggccgatcccgaagagctgtttactaaactggaaaagatcggtaaaggctctttcggagaggtctttaaaggtattgataaccggactcaaaaggtcgtggctatcaaaattatagacctagaagaagcggaggacgagatcgaagatatacaacaggaaataaccgtcctgagtcaatgcgactccccctacgtcaccaaatactatgggtcttacctaaaagacactaagttatggataattatggagtatctaggcggagggagcgccctggatctgcttgagccaggccctcttgacgagacacagatagccacaatcctccgggagatcctaaaaggactcgactacctgcatagcgaaaaaaaaattcaccgggacattaaggcggcaaatgtcctgctaagcgagcatggtgaagtgaaactggcggatttcggtgtagccggacaactgaccgacacccaaattaagcgtaacacgttcgtaggcacccccttctggatggccccagaagtcattaagcagtctgcttacgatagtaaggcggacatttggtcacttgggatcacagccatcgaactagccagaggcgagcccccacactctgagctgcaccctatgaaggttctgtttctgatcccaaagaataaccctccaacactggaaggtaattacagtaaacccttaaaagaatttgtggaagcctgtttaaacaaagagccgtcattcaggcccactgccaaggaactgcttaaacacaagtttatcctccgcaacgccaagaagactagctaccttactgagctgatcgacagatataagcgatggaaagctgagcagtctcacgacgacagctcctcggaggactccgatgctgagaccgacggacaggccagtggcggaagcgatagtggagactggatattcaccattcgagaaaaagaccctaagaacctggaaaatggcgctctgcaaccatctgacttggaccgtaacaagatgaaggatatacctaaaagacctttctcccagtgtctctccaccatcatctccccattatttgccgagttaaaggaaaaatctcaggcctgcggcggaaatctcggcagcattgaggagttgaggggagccatttaccttgctgaagaggcatgcccaggcatcagcgacaccatggtggcccagctcgttcagcgtctgcagcgctattcactgtccggcggaggtacctcttcgcactag

SEQ ID NO: 30243 - DNA, 1029 bp, Artificial Sequence
  derived and/or modified sequence
atggctcatagccctgtgcagtccggtctccctggcatgcagaaccttaaggcagatccggaagagctgttcacgaaactggaaaaaatcggaaaagggtcttttggcgaggttttcaaaggcattgacaaccgtactcaaaaagtcgtagccattaaaatcatcgacttagaagaagcagaggacgagattgaggacatccaacaagaaattacggtcctgagccagtgtgactcaccctacgtgaccaagtactacggcagttatttaaaagacaccaagctgtggatcataatggaatacctaggagggggatctgccctggaccttctcgaaccagggcctctcgatgagacccagatcgctaccatcctgagggaaatcctcaaagggctcgattacctgcactctgaaaaaaagattcaccgagatattaaagccgctaacgtgctgctgtcagaacacggtgaggtcaaattggccgactttggtgtagccggacagctgacggacacgcagatcaagaggaatacattcgtggggacgcctttctggatggccccagaagtcattaaacagagtgcctacgactcaaaagcggacatctggagcctgggaatcacagccattgaactggcgagaggtgagcccccacactctgagctgcaccctatgaaagtgctgttccttatacccaaaaacaatccccctaccctggaaggaaactacagcaagcccctcaaggagttcgtggaggcgtgcctgaataaggaacctagctttcgacctacggccaaggagctcctcaagcacaagtttatcctccggaatgccaagaaaacttcataccttaccgagttgatcgaccgatataagaggtggaaagcagagcaatctcacgatgactcttcgtccgaggattccgatgccgaaaccgacggccaagcaagcggtgggtccgattctggggactggatattcaccatcagggagtggtcgagctctgcgattggcttgggccaaaagtag

SEQ ID NO: 30244 - DNA, 1668 bp, Artificial Sequence
  derived and/or modified sequence
ccagcggccagcgcgcgcgggcccaggccgcccggctccagcccagcagtagcggcagcagcggcggcggcggcagtgcgcgcgaggccctgcgcccccagcagctcctccctggcgccgtgcatggagacgcggcccgccacccgccgctgagcccccgccgcccggccgggacccgccagggctggggtggcctcgggctccggccggccccgccgcccgagggctgcgcgcggcccgcgggcctcgccgccccgcgcggatcgtcgcggcccggccgtcccgtcccaggaagtggccgtcctgagcgccatggctcactccccggtgcagtcgggcctgcccggcatgcagaacctaaaggcagacccagaagagctttttacaaaactagagaaaattgggaagggctcctttggagaggtgttcaaaggcattgacaatcggactcagaaagtggttgccataaagatcattgatctggaagaagctgaagatgagatagaggacattcaacaagaaatcacagtgctgagtcagtgtgacagtccatatgtaaccaaatattatggatcctatctgaaggatacaaaattatggataataatggaatatcttggtggaggctccgcactagatctattagaacctggcccattagatgaaacccagatcgctactatattaagagaaatactgaaaggactcgattatctccattcggagaagaaaatccacagagacattaaagcggccaacgtcctgctgtctgagcatggcgaggtgaagctggcggactttggcgtggctggccagctgacagacacccagatcaaaaggaacaccttcgtgggcaccccattctggatggcacccgaggtcatcaaacagtcggcctatgactcgaaggcagacatctggtccctgggcataacagctattgaacttgcaagaggggaaccacctcattccgagctgcaccccatgaaagttttattcctcattccaaagaacaacccaccgacgttggaaggaaactacagtaaacccctcaaggagtttgtggaggcctgtttgaataaggagccgagctttagacccactgctaaggagttattgaagcacaagtttatactacgcaatgcaaagaaaacttcctacttgaccgagctcatcgacaggtacaagagatggaaggccgagcagagccatgacgactcgagctccgaggattccgacgcggaaacagatggccaagcctcggggggcagtgattctggggactggatcttcacaatccgagaaaaagatcccaagaatctcgagaatggagctcttcagccatcggacttggacagaaataagatgaaagacatcccgaagaggcctttctctcagtgtttatctacaattatttctcctctgtttgcagagttgaaggagaagagccaggcgtgcggagggaacttggggtccattgaagagctgcgaggggccatctacctagcggaggaggcgtgccctggcatctccgacaccatggtggcccagctcgtgcagcggctccagaggagtatccatgggaaccaagcccctcctgactgccatctggcacaagtgcaggcgtttggaggcagtggatgtgtgctgggaagccgctctgtgtga

SEQ ID NO: 30245 - DNA, 2552 bp, Artificial Sequence
  derived and/or modified sequence
ccagcggccagcgcgcgcgggcccaggccgcccggctccagcccagcagtagcggcagcagcggcggcggcggcagtgcgcgcgaggccctgcgcccccagcagctcctccctggcgccgtgcatggagacgcggcccgccacccgccgctgagcccccgccgcccggccgggacccgccagggctggggtggcctcgggctccggccggccccgccgcccgagggctgcgcgcggcccgcgggcctcgccgccccgcgcggatcgtcgcggcccggccgtcccgtcccaggaagtggccgtcctgagcgccatggctcactccccggtgcagtcgggcctgcccggcatgcagaacctaaaggcagacccagaagagctttttacaaaactagagaaaattgggaagggctcctttggagaggtgttcaaaggcattgacaatcggactcagaaagtggttgccataaagatcattgatctggaagaagctgaagatgagatagaggacattcaacaagaaatcacagtgctgagtcagtgtgacagtccatatgtaaccaaatattatggatcctatctgaaggatacaaaattatggataataatggaatatcttggtggaggctccgcactagatctattagaacctggcccattagatgaaacccagatcgctactatattaagagaaatactgaaaggactcgattatctccattcggagaagaaaatccacagagacattaaagcggccaacgtcctgctgtctgagcatggcgaggtgaagctggcggactttggcgtggctggccagctgacagacacccagatcaaaaggaacaccttcgtgggcaccccattctggatggcacccgaggtcatcaaacagtcggcctatgactcgaaggcagacatctggtccctgggcataacagctattgaacttgcaagaggggaaccacctcattccgagctgcaccccatgaaagttttattcctcattccaaagaacaacccaccgacgttggaaggaaactacagtaaacccctcaaggagtttgtggaggcctgtttgaataaggagccgagctttagacccactgctaaggagttattgaagcacaagtttatactacgcaatgcaaagaaaacttcctacttgaccgagctcatcgacaggtacaagagatggaaggccgagcagagccatgacgactcgagctccgaggattccgacgcggaaacagatggccaagcctcggggggcagtgattctggggactggatcttcacaatccgagaaaaagatcccaagaatctcgagaatggagctcttcagccatcggacttggacagaaataagttgaaggagaagagccaggcgtgcggagggaacttggggtccattgaagagctgcgaggggccatctacctagcggaggaggcgtgccctggcatctccgacaccatggtggcccagctcgtgcagcggctccagagatactctctaagtggtggaggaacttcatcccactgaaattcctttggcatttggggttttgtttttccttttttccttcttcatcctcctccttttttaaaagtcaacgagagccttcgctgactccaccgaagaggtgcgccactgggagccaccccagcgccaggcgcccgtccagggacacacacagtcttcactgtgctgcagccagatgaagtctctcagatgggtggggagggtcagctccttccagcgatcattttattttattttattacttttgtttttaattttaaccatagtgcacatattccaggaaagtgtctttaaaaacaaaaacaaaccctgaaatgtatatttgggattatgataaggcaactaaagacatgaaacctcaggtatcctgctttaagttgataactccctctgggagctggagaatcgctctggtggatgggtgtacagatttgtatataatgtcatttttacggaaaccctttcggcgtgcataaggaatcactgtgtacaaactggccaagtgcttctgtagataacgtcagtggagtaaatattcgacaggccataacttgagtctattgccttgcctttattacatgtacattttgaattctgtgaccagtgatttgggttttattttgtatttgcagggtttgtcattaataattaatgcccctctcttacagaacactcctatttgtacctcaacaaatgcaaattttccccgtttgccctacgccccttttggtacacctagaggttgatttcctttttcatcgatggtactatttcttagtgttttaaattggaacatatcttgcctcatgaagctttaaattataattttcagtttctccccatgaagcgctctcgtctgacatttgtttggaatcgtgccactgctggtctgcgccagatgtaccgtcctttccaatacgattttctgttgcaccttgtagtggattctgcatatcatctttcccacctaaaaatgtctgaatgcttacacaaataaattttataacacgctt

SEQ ID NO: 30246 - DNA, 4345 bp, Artificial Sequence
  derived and/or modified sequence
gcccgcgggcctcgccgccccgcgcggatcgtcgcggcccggccgtcccgtcccaggaagtggccgtcctgagcgccatggctcactccccggtgcagtcgggcctgcccggcatgcagaacctaaaggcagacccagaagagctttttacaaaactagagaaaattgggaagggctcctttggagaggtgttcaaaggcattgacaatcggactcagaaagtggttgccataaagatcattgatctggaagaagctgaagatgagatagaggacattcaacaagaaatcacagtgctgagtcagtgtgacagtccatatgtaaccaaatattatggatcctatctgaaggatacaaaattatggataataatggaatatcttggtggaggctccgcactagatctattagaacctggcccattagatgaaacccagatcgctactatattaagagaaatactgaaaggactcgattatctccattcggagaagaaaatccacagagacattaaagcggccaacgtcctgctgtctgagcatggcgaggtgaagctggcggactttggcgtggctggccagctgacagacacccagatcaaaaggaacaccttcgtgggcaccccattctggatggcacccgaggtcatcaaacagtcggcctatgactcgaaggcagacatctggtccctgggcataacagctattgaacttgcaagaggggaaccacctcattccgagctgcaccccatgaaagttttattcctcattccaaagaacaacccaccgacgttggaaggaaactacagtaaacccctcaaggagtttgtggaggcctgtttgaataaggagccgagctttagacccactgctaaggagttattgaagcacaagtttatactacgcaatgcaaagaaaacttcctacttgaccgagctcatcgacaggtacaagagatggaaggccgagcagagccatgacgactcgagctccgaggattccgacgcggaaacagatggccaagcctcggggggcagtgattctggggactggatcttcacaatccgagaaaaagatcccaagaatctcgagaatggagctcttcagccatcggacttggacagaaataagatgaaagacatcccgaagaggcctttctctcagtgtttatctacaattatttctcctctgtttgcagagttgaaggagaagagccaggcgtgcggagggaacttggggtccattgaagagctgcgaggggccatctacctagcggaggaggcgtgccctggcatctccgacaccatggtggcccagctcgtgcagcggctccagagatactctctaagtggtggaggaacttcatcccactgaaattcctttggcatttggggttttgtttttccttttttccttcttcatcctcctccttttttaaaagtcaacgagagccttcgctgactccaccgaagaggtgcgccactgggagccaccccagcgccaggcgcccgtccagggacacacacagtcttcactgtgctgcagccagatgaagtctctcagatgggtggggagggtcagctccttccagcgatcattttattttattttattacttttgtttttaattttaaccatagtgcacatattccaggaaagtgtctttaaaaacaaaaacaaaccctgaaatgtatatttgggattatgataaggcaactaaagacatgaaacctcaggtatcctgctttaagttgataactccctctgggagctggagaatcgctctggtggatgggtgtacagatttgtatataatgtcatttttacggaaaccctttcggcgtgcataaggaatcactgtgtacaaactggccaagtgcttctgtagataacgtcagtggagtaaatattcgacaggccataacttgagtctattgccttgcctttattacatgtacattttgaattctgtgaccagtgatttgggttttattttgtatttgcagggtttgtcattaataattaatgcccctctcttacagaacactcctatttgtacctcaacaaatgcaaattttccccgtttgccctacgccccttttggtacacctagaggttgatttcctttttcatcgatggtactatttcttagtgttttaaattggaacatatcttgcctcatgaagctttaaattataattttcagtttctccccatgaagcgctctcgtctgacatttgtttggaatcgtgccactgctggtctgcgccagatgtaccgtcctttccaatacgattttctgttgcaccttgtagtggattctgcatatcatctttcccacctaaaaatgtctgaatgcttacacaaataaattttataacacgcttattttgcatactccttgaaatgtgactcttcagaggacagggcacctgctgtgtatgtgtggccgtgcgtgtgtactcgtggctgtgtgtgtgtgatgagacactttggaagactccagggagaagtccccaggcctggagctgccgagtgcccaggtcagcgccctggactgcttgcgcacttgctcaccgagatgatgcagttggaggttgctgatctgtgcgattgctgtagcggttgccggggaccttaagagttattttgcttctctggaaggggcctatgcttgctaggcaggcagccagtgtgtctgtttttcttggtttgctgtgggaccttgcttggcgagggggaaaatctctgggtttctggagtgggagggttcgtgcagcagctgttgactggtacatgaagcattcttttatgtttgttgaagctgatgattgacatctcccgtgggtgtgccagttcttgtggagttaagacaggatttttggaagcaaggaagttagtgggtgagcttggggatgtagctcagctatctgctggtctagtggcctctaagctatagggaggggacagagccctgagctacagatgcttgagtgggttattgtgtcggtttgctagtgcagtctggtttttaagctctaaaattgaggtattttattagaagtggatttgggttgaactcttaatttgtataagggatatattttggttggggaaatagaactgagttgctaattcttattgtactcattactccatacaagaatgttatgttgaataataaaattggagaagatttcattttgtgtttccagggagtattctgtgtggggaactgtttccttacgtgaggccggcggcataagtcaaagatgagttttgtccttgcgaatcacacagattgagtctgtgttccccagggtgtgccgttacctgatttttaagtgagccagggcggacagcagcttttctgatttacagagttcttcagatttacaaatggacaatgacatcacagtttttagcactgaagccagtctcatgctagtaacagtgggtgagccgctcgagggactgggttctaatgaatactggtatgaacggggagtctctgcagtcgccagacaaatcatactcagccccttcccccgtagagcaacaagtggttcttttagagttgactggcagcatttcctgtcgggggaggtggggtttgatggagttagaaagctcgcctctgtgtacattctctcctgggctgttactttctgtagacgcacaaaatcagccccaatgtttttaagggcatcttagccaaggaagctggcttttgtgtcgccacttccaggcctgcattaagagagagcccaggcaccagggctaccactggaacctgcctcagcgtcaactgctgctggtctgtagccaggcccagcctttgagacgggtttactgtcaccagtagcctctcagtgccagccctgagctgctcctggctcagctgcccagagcctgcagcctggggaggtactcagcctctgggagacgagggccgtggactgggtggctggtagctcctgcgtttttgagctgtgtcctggctggctgctgccaatgaggtggacaccagtgtggtttggggtgcactggccacttcttgctgggttctgattttcttggaagtgcatctgccttccttatccaatagttttatccctgcattgctcttgtgaagtggctggtttggttctgtatgtagcattttgtacctttcctctggcaaaacactgtcagtttataaacattttttatatttccctcctttaaaaacagcttgtgtatttctgctataaaatgtgtcagcaaaggcagagtgacctaatagggcatgttcttaagcacagggactgtatcatgcaggggccaataaagctcaagaaaacgag

SEQ ID NO: 30247 - DNA, 1341 bp, Artificial Sequence
  derived and/or modified sequence
ccagcggccagcgcgcgcgggcccaggccgcccggctccagcccagcagtagcggcagcagcggcggcggcggcagtgcgcgcgaggccctgcgcccccagcagctcctccctggcgccgtgcatggagacgcggcccgccacccgccgctgagcccccgccgcccggccgggacccgccagggctggggtggcctcgggctccggccggccccgccgcccgagggctgcgcgcggcccgcgggcctcgccgccccgcgcggatcgtcgcggcccggccgtcccgtcccaggaagtggccgtcctgagcgccatggctcactccccggtgcagtcgggcctgcccggcatgcagaacctaaaggcagacccagaagagctttttacaaaactagagaaaattgggaagggctcctttggagaggtgttcaaaggcattgacaatcggactcagaaagtggttgccataaagatcattgatctggaagaagctgaagatgagatagaggacattcaacaagaaatcacagtgctgagtcagtgtgacagtccatatgtaaccaaatattatggatcctatctgaaggatacaaaattatggataataatggaatatcttggtggaggctccgcactagatctattagaacctggcccattagatgaaacccagatcgctactatattaagagaaatactgaaaggactcgattatctccattcggagaagaaaatccacagagacattaaagcggccaacgtcctgctgtctgagcatggcgaggtgaagctggcggactttggcgtggctggccagctgacagacacccagatcaaaaggaacaccttcgtgggcaccccattctggatggcacccgaggtcatcaaacagtcggcctatgactcgaaggcagacatctggtccctgggcataacagctattgaacttgcaagaggggaaccacctcattccgagctgcaccccatgaaagttttattcctcattccaaagaacaacccaccgacgttggaaggaaactacagtaaacccctcaaggagtttgtggaggcctgtttgaataaggagccgagctttagacccactgctaaggagttattgaagcacaagtttatactacgcaatgcaaagaaaacttcctacttgaccgagctcatcgacaggtacaagagatggaaggccgagcagagccatgacgactcgagctccgaggattccgacgcggaaacagatggccaagcctcggggggcagtgattctggggactggatcttcacaatccgagaatggagctcttcagccatcggacttggacagaaataa

SEQ ID NO: 30248 - DNA, 1320 bp, Artificial Sequence
  derived and/or modified sequence
atgcagaacctgaaggccgaccccgaggagctgttcaccaagctggagaagatcggcaagggcagcttcggcgaggtgttcaagggcatcgacaacagaacccagaaggtggtggccatcaagatcatcgacctggaggaggccgaggacgagatcgaggacatccagcaggagatcaccgtgctgagccagtgcgacagcccctacgtgaccaagtactacggcagctacctgaaggacaccaagctgtggatcatcatggagtacctgggcggcggcagcgccctggacctgctggagcccggccccctggacgagacccagatcgccaccatcctgagagagatcctgaagggcctggactacctgcacagcgagaagaagatccacagagacatcaaggccgccaacgtgctgctgagcgagcacggcgaggtgaagctggccgacttcggcgtggccggccagctgaccgacacccagatcaagagaaacaccttcgtgggcacccccttctggatggcccccgaggtgatcaagcagagcgcctacgacagcaaggccgacatctggagcctgggcatcaccgccatcgagctggccagaggcgagcccccccacagcgagctgcaccccatgaaggtgctgttcctgatccccaagaacaacccccccaccctggagggcaactacagcaagcccctgaaggagttcgtggaggcctgcctgaacaaggagcccagcttcagacccaccgccaaggagctgctgaagcacaagttcatcctgagaaacgccaagaagaccagctacctgaccgagctgatcgacagatacaagagatggaaggccgagcagagccacgacgacagcagcagcgaggacagcgacgccgagaccgacggccaggccagcggcggcagcgacagcggcgactggatcttcaccatcagagagaaggaccccaagaacctggagaacggcgccctgcagcccagcgacctggacagaaacaagatgaaggacatccccaagagacccttcagccagtgcctgagcaccatcatcagccccctgttcgccgagctgaaggagaagagccaggcctgcggcggcaacctgggcagcatcgaggagctgagaggcgccatctacctggccgaggaggcctgccccggcatcagcgacaccatggtggcccagctggtgcagagactgcagagaagcatccacggcaaccaggccccccccgactgccacctggcccaggtgcaggccttcggcggcagcggctgcgtgctgggcagcagaagcgtgtag

SEQ ID NO: 30249 - DNA, 1296 bp, Artificial Sequence
  derived and/or modified sequence
atggcccacagccccgtgcagagcggcctgcccggcatgcagaacctgaaggccgaccccgaggagctgttcaccaagctggagaagatcggcaagggcagcttcggcgaggtgttcaagggcatcgacaacagaacccagaaggtggtggccatcaagatcatcgacctggaggaggccgaggacgagatcgaggacatccagcaggagatcaccgtgctgagccagtgcgacagcccctacgtgaccaagtactacggcagctacctgaaggacaccaagctgtggatcatcatggagtacctgggcggcggcagcgccctggacctgctggagcccggccccctggacgagacccagatcgccaccatcctgagagagatcctgaagggcctggactacctgcacagcgagaagaagatccacagagacatcaaggccgccaacgtgctgctgagcgagcacggcgaggtgaagctggccgacttcggcgtggccggccagctgaccgacacccagatcaagagaaacaccttcgtgggcacccccttctggatggcccccgaggtgatcaagcagagcgcctacgacagcaaggccgacatctggagcctgggcatcaccgccatcgagctggccagaggcgagcccccccacagcgagctgcaccccatgaaggtgctgttcctgatccccaagaacaacccccccaccctggagggcaactacagcaagcccctgaaggagttcgtggaggcctgcctgaacaaggagcccagcttcagacccaccgccaaggagctgctgaagcacaagttcatcctgagaaacgccaagaagaccagctacctgaccgagctgatcgacagatacaagagatggaaggccgagcagagccacgacgacagcagcagcgaggacagcgacgccgagaccgacggccaggccagcggcggcagcgacagcggcgactggatcttcaccatcagagagaaggaccccaagaacctggagaacggcgccctgcagcccagcgacctggacagaaacaagatgaaggacatccccaagagacccttcagccagtgcctgagcaccatcatcagccccctgttcgccgagctgaaggagaagagccaggcctgcggcggcaacctgggcagcatcgaggagctgagaggcgccatctacctggccgaggaggcctgccccggcatcagcgacaccatggtggcccagctggtgcagagactgcagagatacagcctgagcggcggcggcaccagcagccactag

SEQ ID NO: 30250 - DNA, 1029 bp, Artificial Sequence
  derived and/or modified sequence
atggcccacagccccgtgcagagcggcctgcccggcatgcagaacctgaaggccgaccccgaggagctgttcaccaagctggagaagatcggcaagggcagcttcggcgaggtgttcaagggcatcgacaacagaacccagaaggtggtggccatcaagatcatcgacctggaggaggccgaggacgagatcgaggacatccagcaggagatcaccgtgctgagccagtgcgacagcccctacgtgaccaagtactacggcagctacctgaaggacaccaagctgtggatcatcatggagtacctgggcggcggcagcgccctggacctgctggagcccggccccctggacgagacccagatcgccaccatcctgagagagatcctgaagggcctggactacctgcacagcgagaagaagatccacagagacatcaaggccgccaacgtgctgctgagcgagcacggcgaggtgaagctggccgacttcggcgtggccggccagctgaccgacacccagatcaagagaaacaccttcgtgggcacccccttctggatggcccccgaggtgatcaagcagagcgcctacgacagcaaggccgacatctggagcctgggcatcaccgccatcgagctggccagaggcgagcccccccacagcgagctgcaccccatgaaggtgctgttcctgatccccaagaacaacccccccaccctggagggcaactacagcaagcccctgaaggagttcgtggaggcctgcctgaacaaggagcccagcttcagacccaccgccaaggagctgctgaagcacaagttcatcctgagaaacgccaagaagaccagctacctgaccgagctgatcgacagatacaagagatggaaggccgagcagagccacgacgacagcagcagcgaggacagcgacgccgagaccgacggccaggccagcggcggcagcgacagcggcgactggatcttcaccatcagagagtggagcagcagcgccatcggcctgggccagaagtag

SEQ ID NO: 30251 - protein, 513 aa, Artificial Sequence
  derived and/or modified sequence
MAPARTMARARLAPAGIPAVALWLLCTLGLQGTQAGPPPAPPGLPAGADCLNSFTAGVPGFVLDTNASVSNGATFLESPTVRRGWDCVRACCTTQNCNLALVELQPDRGEDAIAACFLINCLYEQNFVCKFAPREGFINYLTREVYRSYRQLRTQGFGGSGIPKAWAGIDLKVQPQEPLVLKDVENTDWRLLRGDTDVRVERKDPNQVELWGLKEGTYLFQLTVTSSDHPEDTANVTVTVLSTKQTEDYCLASNKVGRCRGSFPRWYYDPTEQICKSFVYGGCLGNKNNYLREEECILACRGVQGPSMERRHPVCSGTCQPTQFRCSNGCCIDSFLECDDTPNCPDASDEAACEKYTSGFDELQRIHFPSDKGHCVDLPDTGLCKESIPRWYYNPFSEHCARFTYGGCYGNKNNFEEEQQCLESCRGISKKDVFGLRREIPIPSTGSVEMAVAVFLVICIVVVVAILGYCFFKNQRKDFHGHHHHPPPTPASSTVSTTEDTEHLVYNHTTRPL

SEQ ID NO: 30252 - DNA, 1542 bp, Artificial Sequence
  derived and/or modified sequence
atggcccccgcccggaccatggcccgggcccggctggcccccgccggtattcctgcagtggccctctggctcttgtgcacgttgggactgcagggaactcaggctggcccgccccccgccccgccaggcctccccgctggcgccgactgtctgaacagctttacagcaggcgtacccggattcgtcctcgacacaaatgcctcagtcagcaatggagccacatttctggaaagtcccactgtgcggcgggggtgggattgtgtgagggcatgttgcaccacccagaactgtaacttggctttggtcgagttgcagcccgatcgcggggaggatgctattgccgcctgttttctgatcaactgcctgtatgagcagaattttgtttgtaaattcgctccaagggaggggttcataaattacttgaccagggaagtatacaggagttatcggcagcttcggacacagggatttggagggtccggcatacccaaggcctgggctggcatagacctcaaagttcagccccaggagcccctggttctcaaggatgtggaaaatacagattggcggcttctcagaggtgatactgatgtcagagttgaacgtaaggaccccaatcaagtagaactttgggggcttaaagaaggcacctatctgtttcagctgacagtaaccagctccgatcaccccgaagataccgccaatgttacagtaacagtgctgtccactaagcagacagaggactattgtttagcatcaaataaggtgggcaggtgtcgaggaagctttcctcgttggtactatgacccaacagagcaaatctgtaagagcttcgtatacgggggctgcctaggcaacaagaacaactaccttcgggaggaagaatgcatcttggcgtgtcggggggtgcagggaccatctatggagagacgtcaccccgtgtgtagcggcacgtgtcaaccaactcaatttcgatgtagcaatgggtgctgtatcgacagctttttggagtgtgatgatacaccgaactgtcccgacgcatctgatgaggcagcctgcgagaagtacacatctggctttgatgaactgcagagaattcatttcccaagcgacaagggacactgtgtggacctcccggatacaggactgtgcaaggaatctataccacggtggtactacaacccattcagtgagcattgtgcaagattcacctatggtggatgctacggcaataaaaataattttgaagaagaacagcagtgtttggagtcttgcagaggtatcagtaagaaagatgtgttcggtcttagacgggagatccccataccaagcactggatcagtagaaatggccgtggcagtgtttctcgtgatttgtatcgtggtggtcgtggcgattcttgggtactgctttttcaagaatcagcggaaagattttcacggccaccaccatcatcctcctcccaccccagcaagctcgaccgtgtccaccaccgaggatactgaacacctcgtgtacaaccatacgacccgccccctgtag

SEQ ID NO: 30253 - DNA, 1542 bp, Artificial Sequence
  derived and/or modified sequence
atggcacccgcacgcacaatggcccgagcacggctggccccagccggtattccagccgtggcgctgtggcttctgtgcaccctcggtctccaggggacccaagctggtccacccccagcccctccaggactgccggctggagccgactgcctcaactcatttacagccggtgtccctgggttcgtgttagacaccaatgctagcgtgtctaacggtgcaaccttcctggagtcgcccacggtaaggcgcggatgggattgcgtcagagcatgttgtacgacgcagaattgcaatcttgcgctggtggaattgcagcctgaccgcggagaagatgcgatagctgcatgcttcctgatcaattgtttgtatgagcagaactttgtatgcaaatttgcacctagagaagggttcattaattatctgactcgcgaagtgtataggtcatatcggcagctgcgtactcaggggttcgggggtagtggaatacctaaggcttgggcgggaatagacctgaaagtgcagccgcaagagccgctggtgttgaaggacgttgaaaatacagattggcgactgctccgtggagacactgacgtcagagtggaacggaaggatccaaaccaggttgagctgtggggtcttaaagaaggcacttatttgttccagctcactgtgacatcttccgaccatccagaggacactgccaatgtcaccgttacagtgctgtcaaccaaacaaactgaggactattgcttggcttcgaataaggtcggcaggtgccggggttcgtttccacggtggtactacgaccccactgaacagatctgtaagagcttcgtctacgggggatgtctcgggaataagaataattacctgcgcgaagaagagtgtatactcgcctgccggggagtgcaggggccttctatggagagacgacaccctgtttgttccggaacatgtcagcccacacagttccggtgttctaacggatgctgtatcgactctttcttagagtgcgacgacaccccaaattgccccgacgctagtgacgaggccgcatgtgaaaagtatacatctggctttgacgagctacagaggatacacttccctagtgacaaggggcattgcgtcgacttgcccgacaccggcctctgcaaggaaagcatccccaggtggtattacaacccgttctccgaacattgtgcacgttttacttatggagggtgctacggaaacaagaataatttcgaggaggagcaacagtgccttgaaagttgcagaggcataagtaagaaggacgtgttcgggctacgacgggagattcctattccttccacggggagtgtggaaatggcggtggctgtcttcctagtgatttgtatagtggtcgttgtagccatcctgggctactgtttcttcaagaaccagcgtaaggactttcacggccatcaccatcacccgcctccgactcctgcctcctccaccgttagcactacagaggatacggagcatttggtctacaatcacactaccaggcccctgtag

SEQ ID NO: 30254 - DNA, 1542 bp, Artificial Sequence
  derived and/or modified sequence
atggcaccagcacgaacaatggccagggccagactcgcccctgccggaataccagcagttgccctgtggcttttgtgcacactaggcctacaaggcacccaggccggacccccacccgcacctccaggattgccagccggtgccgattgtctcaattcttttaccgcaggcgtcccaggcttcgtgctagacacaaatgcgtcagtctctaacggtgcgaccttcttggagtcacctacagtgagacgaggctgggattgcgtccgcgcttgctgtaccacgcagaattgcaacctggctctggtcgagttgcagcctgaccgcggtgaggacgccatcgcagcatgcttcctaattaattgtctgtacgagcagaattttgtgtgcaagtttgctccaagggaaggctttatcaactatcttacacgagaagtgtataggtcttatcggcagctccgaacccaagggtttggaggaagcggcatacccaaggcctgggcaggcatcgacctgaaagttcagccccaggagcctttagtgttgaaggatgtggagaacactgactggcgcctgctcaggggggataccgatgtgagagtcgaacggaaggatcctaatcaagtcgagctgtgggggctgaaggaggggacctacctcttccagctgacagtaacaagttctgaccatcccgaggatacagcgaatgttacagttacggtactgtccacaaagcagaccgaagattattgtctggcgtcaaacaaagtggggagatgtagagggagctttccgaggtggtattacgatccaacagaacaaatctgcaagtcttttgtgtacggcggatgccttggcaacaagaataactacttgcgggaggaggagtgcattctcgcttgtagaggggtccaaggcccttctatggagcggagacacccagtttgctctggtacgtgtcaacccacccagttccgatgctctaacggatgctgcatcgactcttttcttgaatgcgatgacaccccaaattgtccggacgcctccgacgaagctgcttgcgagaaatatacatccggcttcgacgagctccaacgtatacactttccctcagataaaggccactgtgtggacttgccggacacaggcctgtgcaaggagtccattcccagatggtattataaccctttctccgaacactgtgccaggttcacttatggtggttgctacggaaataagaataatttcgaggaggaacaacagtgtctggagtcttgtagaggaatcagtaaaaaagatgtgttcggccttcggagggaaatcccgattccctccaccggctccgtggaaatggcagtggctgtgttcttggtcatctgcatagtagtggtggtggcgatccttgggtattgtttttttaaaaatcagaggaaagacttccacggtcaccatcaccaccctccaccaacccccgctagctctacagtctctacaaccgaggatactgagcatcttgtctacaaccatactactaggccgttgtag

SEQ ID NO: 30255 - DNA, 2331 bp, Artificial Sequence
  derived and/or modified sequence
gctgatcaggtgtgtctcctcctctgtcccctcccttcttctcaggtcaccagcaccctcggaacccagaggcccgcgctctgaaggtgacccccctggggaggaaggcgatggcccctgcgaggacgatggcccgcgcccgcctcgccccggccggcatccctgccgtcgccttgtggcttctgtgcacgctcggcctccagggcacccaggccgggccaccgcccgcgccccctgggctgcccgcgggagccgactgcctgaacagctttaccgccggggtgcctggcttcgtgctggacaccaacgcctcggtcagcaacggagctaccttcctggagtcccccaccgtgcgccggggctgggactgcgtgcgcgcctgctgcaccacccagaactgcaacttggcgctagtggagctgcagcccgaccgcggggaggacgccatcgccgcctgcttcctcatcaactgcctctacgagcagaacttcgtgtgcaagttcgcgcccagggagggcttcatcaactacctcacgagggaagtgtaccgctcctaccgccagctgcggacccagggctttggagggtctgggatccccaaggcctgggcaggcatagacttgaaggtacaaccccaggaacccctggtgctgaaggatgtggaaaacacagattggcgcctactgcggggtgacacggatgtcagggtagagaggaaagacccaaaccaggtggaactgtggggactcaaggaaggcacctacctgttccagctgacagtgactagctcagaccacccagaggacacggccaacgtcacagtcactgtgctgtccaccaagcagacagaagactactgcctcgcatccaacaaggtgggtcgctgccggggctctttcccacgctggtactatgaccccacggagcagatctgcaagagtttcgtttatggaggctgcttgggcaacaagaacaactaccttcgggaagaagagtgcattctagcctgtcggggtgtgcaaggcccctccatggaaaggcgccatccagtgtgctctggcacctgtcagcccacccagttccgctgcagcaatggctgctgcatcgacagtttcctggagtgtgacgacacccccaactgccccgacgcctccgacgaggctgcctgtgaaaaatacacgagtggctttgacgagctccagcgcatccatttccccagtgacaaagggcactgcgtggacctgccagacacaggactctgcaaggagagcatcccgcgctggtactacaaccccttcagcgaacactgcgcccgctttacctatggtggttgttacggcaacaagaacaactttgaggaagagcagcagtgcctcgagtcttgtcgcggcatctccaagaaggatgtgtttggcctgaggcgggaaatccccattcccagcacaggctctgtggagatggctgtcgcagtgttcctggtcatctgcattgtggtggtggtagccatcttgggttactgcttcttcaagaaccagagaaaggacttccacggacaccaccaccacccaccacccacccctgccagctccactgtctccactaccgaggacacggagcacctggtctataaccacaccacgcggcccctctgagcctgggtctcaccggctctcacctggccctgcttcctgcttgccaaggcagaggcctgggctgggaaaaactttggaaccagactcttgcctgtttcccaggcccactgtgcctcagagaccagggctccagcccctcttggagaagtctcagctaagctcacgtcctgagaaagctcaaaggtttggaaggagcagaaaacccttgggccagaagtaccagactagatggacctgcctgcataggagtttggaggaagttggagttttgtttcctctgttcaaagctgcctgtccctaccccatggtgctaggaagaggagtggggtggtgtcagaccctggaggccccaaccctgtcctcccgagctcctcttccatgctgtgcgcccagggctgggaggaaggacttccctgtgtagtttgtgctgtaaagagttgctttttgtttatttaatgctgtggcatgggtgaagaggaggggaagaggcctgtttggcctctctatcctctcttcctcttcccccaagattgagctctctgcccttgatcagccccaccctggcctagaccagcagacagagccaggagaagctcagctgcattccgcagcccccacccccaaggttctccaacatcacagcccagcccgcccactgggtaataaaagtggtttgtgg

SEQ ID NO: 30256 - DNA, 1542 bp, Artificial Sequence
  derived and/or modified sequence
atggctccagccagaactatggcccgcgcccgtctcgcacccgcagggataccagccgttgccctgtggctgctgtgcacattgggcttgcagggcacccaggccggacctccccccgcccctccaggactgccagccggggccgactgccttaatagctttacagctggggtgcccggctttgtgctggatacaaacgcaagcgtgtccaatggcgcaaccttcctggagtcgcctacagtccgcagaggctgggactgcgtgcgggcatgctgtacaacacagaactgtaacctggcactggtggagctccagccagacagaggtgaagacgcaatcgctgcctgtttcctgattaactgtctctatgaacagaattttgtgtgtaaatttgcacctagagagggattcatcaactacttaacccgcgaggtgtaccgctcttatagacagcttagaacccagggattcggaggaagcgggatccctaaagcctgggccggcattgatctgaaagtacaacctcaggagcctctagtgcttaaagacgtcgaaaatacagactggcggcttcttagaggcgatactgatgtcagggttgagaggaaagatcctaatcaggtagagctatggggtctgaaggagggtacttacttgttccaactcacagtcacctcgagcgaccatcctgaggatacagcaaacgttactgtaaccgtgttatcaaccaagcaaaccgaagactattgccttgcctccaataaagtaggcaggtgtagaggctcattcccccggtggtactatgaccctaccgaacagatctgtaaatcatttgtttatggcggctgtctaggcaacaaaaataactatttacgagaggaagagtgcatcctcgcctgccggggcgttcaaggcccttctatggaaaggaggcaccctgtttgttcaggtacttgccaaccaacacaattccgctgttctaacggttgttgtatcgactctttcttggagtgtgatgacacaccgaactgccctgatgccagcgatgaggctgcctgcgagaaatatacgtctggttttgatgaactgcagcggatccatttccccagcgataaaggccattgtgttgacctgccagataccggactttgcaaggaaagcatcccccggtggtactacaatcctttctcggagcattgcgctaggtttacttacgggggatgttatggcaataaaaacaactttgaggaggaacaacagtgtctagagtcatgcagaggaatctcgaagaaggatgtgtttggtttgcggcgcgaaatacccataccctctacgggctccgtggagatggccgttgctgtctttctggttatatgcatcgtcgtggtcgtagccattcttggttattgctttttcaaaaatcagagaaaggacttccacggacatcaccaccatccgcctccaaccccagctagcagtacagtgagcacaacagaagatactgagcacctggtttataaccacacgacaagaccactttag

SEQ ID NO: 30257 - DNA, 1542 bp, Artificial Sequence
  derived and/or modified sequence
atggcacctgcacgcactatggctcgcgccagacttgctcccgccggaatcccagcggtggctctgtggctgctgtgcactctgggcttgcaaggaacccaagccggtccacctcccgctccaccagggcttccagccggagctgactgcctcaattcattcacggccggcgtccccggcttcgtgctcgacacaaacgcatccgtgtcgaatggtgcgacttttcttgaaagtcctactgtgaggcggggctgggactgcgttagggcctgttgcacgacccagaactgcaacctggctcttgttgagctccagcctgatcgaggagaagacgcaatagctgcatgctttctcatcaattgtctgtacgaacagaactttgtgtgcaaattcgcaccacgcgagggtttcattaattacctgaccagagaagtgtatcgttcgtatcggcagctgcgtacacaaggtttcggcgggtctggtatccctaaagcatgggccggcattgacttgaaggtgcagcctcaggaacctcttgtgctgaaagacgtggagaacaccgattggcgcttgctgcgcggggacaccgatgtccgtgtagaacgtaaagaccctaaccaggttgagctttggggacttaaagagggaacgtaccttttccagctgacagtaacatcatcagatcaccctgaggacaccgccaacgtgaccgttacagtgctttctaccaagcagactgaggactactgtttggcttcaaacaaggttggtcgatgtcgtggatcatttcccagatggtattatgatcctacagaacaaatctgtaagagttttgtatacggtggctgtcttgggaacaaaaataactatctgcgggaagaggaatgtatcttggcatgccggggagtccaaggccccagtatggaacggcggcatcccgtatgtagcggaacttgccagcccacccagtttcggtgttctaatggatgctgcatagattccttccttgaatgcgatgatacacctaattgcccggatgctagcgacgaggctgcctgtgaaaaatatacaagtgggttcgacgagctccagagaattcattttccctctgacaaaggacactgtgtggacctcccagatacaggcttgtgtaaggagtctattccccgttggtactacaatccattcagtgaacactgtgcaaggtttacttacggaggttgctatgggaataagaataacttcgaggaagagcaacagtgcctagagtcatgccgtgggatttccaagaaggatgtgtttgggcttaggcgggaaatccccattccatcaacaggctcagttgaaatggcagtcgctgtgttcctcgtgatctgtatagtcgtggtggttgctattctcggatactgttttttcaaaaatcagcgtaaggatttccatggtcaccaccaccatccccctcctactccggcatcttctacggtgagtacaaccgaagatacagagcatctggtctacaaccatacaactcggccactctag

SEQ ID NO: 30258 - DNA, 1542 bp, Artificial Sequence
  derived and/or modified sequence
atggcccctgctcgcactatggcccgggcccgactcgcccccgctggtatcccagcagtcgccctgtggctgctctgcacactcggcttgcaaggcacacaggccggcccaccacccgctcctcctggccttcccgctggagcagactgccttaatagttttaccgctggggtgcctggtttcgtgttggatacaaatgcttcagtgtctaatggagccacttttctcgaatccccaacagtgcgcagaggctgggattgtgtacgggcttgttgtactacccagaattgtaacctcgctcttgttgagttgcagccagatagaggagaggacgccatagcagcctgcttccttataaactgtttgtacgagcagaatttcgtttgtaagttcgctccaagagaagggtttatcaattacttgacccgagaggtttatagatcttaccggcagcttagaactcagggatttggtggttctggtattccgaaggcatgggccggcatcgatcttaaggtgcaaccccaagaaccgctggtactaaaagatgtagagaataccgattggcgtctccttaggggcgatactgatgtgcgggtggaaagaaaggatcctaaccaggtcgagttgtggggtctcaaggagggcacctacctatttcaactaaccgtgaccagttcggaccatcctgaagacactgcaaatgtgacggtcaccgtgttatccactaaacaaaccgaagattattgtttagcctccaacaaagtgggtcgatgtagaggtagtttcccaaggtggtactacgacccaaccgagcagatttgtaagtccttcgtctacggcggttgcttaggcaacaagaataactacctgcgcgaggaagaatgtatactagcctgtcgaggcgtccagggaccttctatggagagacgtcaccccgtctgttccggcacttgtcagcctactcaattccggtgctctaacggctgttgtattgactccttccttgaatgcgatgacactccaaactgtccagatgcgagcgacgaggcagcctgcgaaaagtacacatctggcttcgacgaattacagcgtatccattttccaagcgataaaggccactgcgtagatctaccggataccggtctttgtaaggaatccatcccaagatggtattacaatcccttttcagaacactgcgcaagattcacatacggtgggtgttatggcaacaagaataacttcgaagaagaacaacaatgtctcgagagctgtaggggtatatctaaaaaggacgtgttcggattaaggagagaaatcccaataccaagcaccggcagcgttgaaatggcggtggcagtgtttctggtcatatgcatcgtggtggtggttgctatcctgggctactgcttcttcaaaaaccagagaaaagattttcacggtcaccatcaccacccaccccctacccccgcgtcaagcaccgttagtacaacagaagatacagaacatctcgtctataatcatactactcgccccttatag

SEQ ID NO: 30259 - DNA, 1542 bp, Artificial Sequence
  derived and/or modified sequence
atggccccagccagaacgatggcacgcgcaagactcgcccctgccggaatccccgctgtcgctctttggctgctatgtacattgggccttcaaggcacgcaagcaggtcctccccctgccccacccggcctacctgctggagccgattgcctcaattctttcacagctggcgtcccaggatttgtcttagacaccaatgcaagtgtatccaacggagctactttcctcgaaagccccacagttcggcgcggctgggactgcgtaagagcctgctgtacaacccagaattgtaatctcgcactggtggagcttcagcccgatagaggtgaggatgctatcgctgcctgttttctcattaactgtttgtatgaacagaactttgtgtgcaaatttgcccctcgcgaaggctttatcaattatctgactcgcgaagtgtatcgatcttaccgccagctgagaactcaaggatttgggggaagtggaatcccaaaagcatgggctggcattgatcttaaagtacaacctcaggagcccctggtcctcaaggacgttgagaatacagattggagactgctacgaggcgacacagacgttagagtggagcggaaggaccccaatcaggttgagctttgggggcttaaagaaggaacctatttattccaacttaccgttacatcatccgatcatcccgaagacacagctaacgtcacagtcactgtactctcaacgaagcagactgaagactattgtcttgcctccaataaggtgggcagatgcagaggcagcttcccacggtggtattatgatccaacggagcagatatgtaagtccttcgtgtatggcggatgcctcgggaataaaaataactacctgcgagaagaagaatgtatcttagcctgcaggggcgtgcagggtcccagcatggaacgcagacaccccgtatgctctggaacctgtcagccaacacagtttaggtgctccaacggatgttgcattgacagcttcttagagtgtgatgatacacccaactgccctgatgcaagcgacgaggccgcatgtgaaaaatataccagcggatttgatgaacttcaacggatccatttccctagtgacaaaggccattgcgttgaccttccggacactggattatgtaaagaatcaatcccccgatggtactataacccattctctgaacactgcgccagatttacttacgggggctgttatggcaataagaataactttgaagaggaacaacaatgtttagagtcctgcagaggtattagcaaaaaggatgtctttggcctgagacgagagattccaattccatcaactggcagtgtagagatggctgtggccgtatttctagtcatttgcatagtcgtagtcgtagcaattctgggatactgcttttttaagaaccagagaaaagatttccacggacaccatcatcacccaccgcccaccccagcatcaagtacagtttcaaccactgaagataccgagcacctagtttacaaccatacaacccggcccctatag

SEQ ID NO: 30260 - DNA, 2456 bp, Artificial Sequence
  derived and/or modified sequence
atgtcggccccgccccgacggcgctgactcagtttcaccagaaaccagggggagaaggcggccgagccccagctctccgagcaccgggtcggaagccgcgacccgagccgcgcaggaagctgggaccggaacctcggcggacccggccccacccaactcacctgcgcaggtcaccagcaccctcggaacccagaggcccgcgctctgaaggtgacccccctggggaggaaggcgatggcccctgcgaggacgatggcccgcgcccgcctcgccccggccggcatccctgccgtcgccttgtggcttctgtgcacgctcggcctccagggcacccaggccgggccaccgcccgcgccccctgggctgcccgcgggagccgactgcctgaacagctttaccgccggggtgcctggcttcgtgctggacaccaacgcctcggtcagcaacggagctaccttcctggagtcccccaccgtgcgccggggctgggactgcgtgcgcgcctgctgcaccacccagaactgcaacttggcgctagtggagctgcagcccgaccgcggggaggacgccatcgccgcctgcttcctcatcaactgcctctacgagcagaacttcgtgtgcaagttcgcgcccagggagggcttcatcaactacctcacgagggaagtgtaccgctcctaccgccagctgcggacccagggctttggagggtctgggatccccaaggcctgggcaggcatagacttgaaggtacaaccccaggaacccctggtgctgaaggatgtggaaaacacagattggcgcctactgcggggtgacacggatgtcagggtagagaggaaagacccaaaccaggtggaactgtggggactcaaggaaggcacctacctgttccagctgacagtgactagctcagaccacccagaggacacggccaacgtcacagtcactgtgctgtccaccaagcagacagaagactactgcctcgcatccaacaaggtgggtcgctgccggggctctttcccacgctggtactatgaccccacggagcagatctgcaagagtttcgtttatggaggctgcttgggcaacaagaacaactaccttcgggaagaagagtgcattctagcctgtcggggtgtgcaaggcccctccatggaaaggcgccatccagtgtgctctggcacctgtcagcccacccagttccgctgcagcaatggctgctgcatcgacagtttcctggagtgtgacgacacccccaactgccccgacgcctccgacgaggctgcctgtgaaaaatacacgagtggctttgacgagctccagcgcatccatttccccagtgacaaagggcactgcgtggacctgccagacacaggactctgcaaggagagcatcccgcgctggtactacaaccccttcagcgaacactgcgcccgctttacctatggtggttgttacggcaacaagaacaactttgaggaagagcagcagtgcctcgagtcttgtcgcggcatctccaagaaggatgtgtttggcctgaggcgggaaatccccattcccagcacaggctctgtggagatggctgtcgcagtgttcctggtcatctgcattgtggtggtggtagccatcttgggttactgcttcttcaagaaccagagaaaggacttccacggacaccaccaccacccaccacccacccctgccagctccactgtctccactaccgaggacacggagcacctggtctataaccacaccacgcggcccctctgagcctgggtctcaccggctctcacctggccctgcttcctgcttgccaaggcagaggcctgggctgggaaaaactttggaaccagactcttgcctgtttcccaggcccactgtgcctcagagaccagggctccagcccctcttggagaagtctcagctaagctcacgtcctgagaaagctcaaaggtttggaaggagcagaaaacccttgggccagaagtaccagactagatggacctgcctgcataggagtttggaggaagttggagttttgtttcctctgttcaaagctgcctgtccctaccccatggtgctaggaagaggagtggggtggtgtcagaccctggaggccccaaccctgtcctcccgagctcctcttccatgctgtgcgcccagggctgggaggaaggacttccctgtgtagtttgtgctgtaaagagttgctttttgtttatttaatgctgtggcatgggtgaagaggaggggaagaggcctgtttggcctctctatcctctcttcctcttcccccaagattgagctctctgcccttgatcagccccaccctggcctagaccagcagacagagccaggagaagctcagctgcattccgcagcccccacccccaaggttctccaacatcacagcccagcccgcccactgggtaataaaagtggtttgtgga

SEQ ID NO: 30261 - DNA, 1542 bp, Artificial Sequence
  derived and/or modified sequence
atggcccccgccagaaccatggccagagccagactggcccccgccggcatccccgccgtggccctgtggctgctgtgcaccctgggcctgcagggcacccaggccggccccccccccgccccccccggcctgcccgccggcgccgactgcctgaacagcttcaccgccggcgtgcccggcttcgtgctggacaccaacgccagcgtgagcaacggcgccaccttcctggagagccccaccgtgagaagaggctgggactgcgtgagagcctgctgcaccacccagaactgcaacctggccctggtggagctgcagcccgacagaggcgaggacgccatcgccgcctgcttcctgatcaactgcctgtacgagcagaacttcgtgtgcaagttcgcccccagagagggcttcatcaactacctgaccagagaggtgtacagaagctacagacagctgagaacccagggcttcggcggcagcggcatccccaaggcctgggccggcatcgacctgaaggtgcagccccaggagcccctggtgctgaaggacgtggagaacaccgactggagactgctgagaggcgacaccgacgtgagagtggagagaaaggaccccaaccaggtggagctgtggggcctgaaggagggcacctacctgttccagctgaccgtgaccagcagcgaccaccccgaggacaccgccaacgtgaccgtgaccgtgctgagcaccaagcagaccgaggactactgcctggccagcaacaaggtgggcagatgcagaggcagcttccccagatggtactacgaccccaccgagcagatctgcaagagcttcgtgtacggcggctgcctgggcaacaagaacaactacctgagagaggaggagtgcatcctggcctgcagaggcgtgcagggccccagcatggagagaagacaccccgtgtgcagcggcacctgccagcccacccagttcagatgcagcaacggctgctgcatcgacagcttcctggagtgcgacgacacccccaactgccccgacgccagcgacgaggccgcctgcgagaagtacaccagcggcttcgacgagctgcagagaatccacttccccagcgacaagggccactgcgtggacctgcccgacaccggcctgtgcaaggagagcatccccagatggtactacaaccccttcagcgagcactgcgccagattcacctacggcggctgctacggcaacaagaacaacttcgaggaggagcagcagtgcctggagagctgcagaggcatcagcaagaaggacgtgttcggcctgagaagagagatccccatccccagcaccggcagcgtggagatggccgtggccgtgttcctggtgatctgcatcgtggtggtggtggccatcctgggctactgcttcttcaagaaccagagaaaggacttccacggccaccaccaccaccccccccccacccccgccagcagcaccgtgagcaccaccgaggacaccgagcacctggtgtacaaccacaccaccagacccctgtag

SEQ ID NO: 30262 - DNA, 1542 bp, Artificial Sequence
  derived and/or modified sequence
atggccccggctaggacgatggctcgcgccaggttggcccctgccggtatcccagccgtggccctttggctgctctgcacactggggctgcagggcacacaggcagggcctcctccggctccgccgggacttcccgctggggccgactgccttaattcttttactgctggtgtcccaggcttcgtgctggacacaaacgcatcagtgtccaacggagctaccttcctggagtcccctaccgtcagacgggggtgggattgtgttcgagcatgttgcacgacccagaactgtaacctcgctctggtcgaactccagcctgacagaggggaggacgctattgcagcatgtttccttattaactgcttgtacgagcagaattttgtatgtaagttcgcacctagagaaggctttattaattatctaacccgggaagtctataggtcatatagacagctgcgaactcaaggcttcggggggtccggtattcccaaagcctgggccggcattgatctcaaagtccagccccaggaaccactggttctcaaagacgttgagaacaccgattggcgactgctgaggggggacacagacgtgcgggtggagagaaaggatccaaatcaggttgaactgtgggggctgaaggaggggacttatttatttcagctgacggtgactagttcggaccaccccgaagatacagctaatgttacagtgacagtcctgtccaccaagcaaacagaggactattgtctcgcctcaaacaaggtcggccgatgtagaggttcctttccaaggtggtactatgatcccactgaacaaatatgcaagtcgttcgtgtatggagggtgtttgggaaacaaaaacaattatctgcgagaagaggaatgtattttagcctgtagaggggttcagggcccaagcatggagcgcagacaccctgtgtgctccggcacctgccagcctacacagtttagatgctcgaacggatgttgcatcgacagctttctggaatgcgatgacacgccgaattgcccggatgccagtgatgaggccgcctgcgaaaagtatacctcagggtttgatgagctccagcgcatacacttcccctcggacaagggacattgcgtggacctgccagacacgggtctgtgtaaggaaagcatcccccgctggtactataatccattttctgagcattgtgcccggttcacatacggtggctgctacgggaacaaaaataactttgaggaagagcagcagtgtttggaatcctgccgtggcattagcaagaaagacgtctttggactcaggagggagatacctatcccttctacaggttccgtcgagatggcggtcgcggtcttcttggtgatctgcattgtcgtggtggttgcaatactaggatactgtttcttcaaaaaccaaagaaaggatttccacggtcatcatcatcatcccccccctacgcctgcatcttccacagtaagtaccacagaagataccgagcatctggtgtataaccacactactcgccctctgtag

SEQ ID NO: 30263 - DNA, 1542 bp, Artificial Sequence
  derived and/or modified sequence
atggccccagcacgcacaatggcccgcgcacggcttgcacccgcaggcataccggctgtggccctctggcttctgtgcacgctggggctacagggcacgcaggccggccccccccctgctcctcccgggctcccggccggcgcggactgtcttaactcctttacagcaggggttccaggctttgtgctcgataccaatgcctcggtgtctaatggtgcgacatttctagagagtccgacagtaagaagggggtgggactgtgtccgggcctgctgcacaactcagaactgcaatttggccctcgttgagctgcagccagataggggcgaggatgctattgcggcctgcttccttataaactgtctgtacgaacagaacttcgtgtgtaagtttgctcctcgagagggtttcatcaattacctgacccgggaggtgtaccgcagctatcgccagctgcgcactcagggatttggtgggtccggtatccctaaggcctgggcaggcatcgacctcaaagtccagcctcaggaaccgctggtccttaaggatgtggaaaacactgattggcgactccttcggggagatactgacgtgagagtcgaaagaaaggatcccaatcaggtggaactgtgggggctgaaggagggaacttacctgttccagttgactgtgacctcttcagaccacccggaagacaccgcaaacgtcacagtaaccgtactgagcactaagcagacggaggattactgcctggcgagcaataaagtcgggcgttgtagggggagcttccccaggtggtactatgaccctactgagcagatttgcaaatcgtttgtttacggtggatgtctaggtaacaaaaataattacttacgggaagaggaatgcattctggcttgtaggggagttcagggccccagcatggagcgtcggcatcctgtgtgttcgggtacctgtcagccaacccagtttcgttgctcaaacggctgctgtatcgacagctttctggaatgtgacgatacacccaattgccctgatgcgtctgacgaagccgcttgcgagaagtacacatctgggttcgatgagctccagcggatccactttcccagcgataagggtcattgtgtagacctccctgacaccggcctgtgcaaagagtccatacccaggtggtattacaacccttttagtgagcattgcgcccgcttcacctacggaggatgttatggcaacaaaaacaactttgaggaagagcagcagtgcctggaatcctgtagggggatctccaaaaaagatgtgtttggtctgaggcgcgagattccaatcccatcaacaggctctgtggagatggccgttgctgtgtttctggtgatctgcatagtggtggtcgtggcaatactggggtattgtttcttcaaaaaccagagaaaggactttcacggccatcaccatcacccaccccccacgcctgcttcctctactgttagcacgactgaagatacggaacatctggtgtacaatcacaccacaagaccactgtag

SEQ ID NO: 30264 - DNA, 1542 bp, Artificial Sequence
  derived and/or modified sequence
atggccccagcccggaccatggcccgggcccggctggccccagctggcatcccagctgtggccctgtggctgctgtgcaccctgggcctgcagggcacccaggccggccccccaccagcccctcctggcctgcctgctggagctgactgcctgaacagcttcaccgctggggtgcccggctttgtgctggacaccaatgcctctgtgtccaatggagccaccttcctggagagccccaccgtgcggcggggctgggactgtgtgcgggcctgctgcaccacccagaactgcaacctggccctggtggagctgcagcctgacagaggagaagatgccatcgccgcctgcttcctgatcaactgcctgtatgagcagaactttgtgtgcaagtttgccccccgggagggcttcatcaactacctgacccgggaggtgtaccgcagctaccggcagctgcggacccagggctttggaggcagcggcatccccaaggcctgggccggcatcgacctgaaggtgcagccccaggagcccctggtgctgaaggatgtggagaacacagactggaggctgctgcggggggacacagatgtgcgggtggagaggaaggaccccaaccaggtggagctgtggggcctgaaggagggcacctacctgttccagctgactgtgaccagcagtgaccaccctgaggacacagccaacgtgacagtgacagtgctgagcaccaagcagacagaggactactgcctggccagcaacaaggtgggccgctgccggggcagcttcccccgctggtactatgaccccacagagcagatctgcaagagctttgtgtatggaggctgcctgggcaacaagaacaactacctgcgggaggaggagtgcatcctggcctgccggggcgtgcagggccccagcatggagcggcggcaccctgtgtgcagcggcacctgccagcccacccagttccgctgcagcaatggctgctgcatcgacagcttcctggagtgtgatgacacccccaactgcccagatgccagtgatgaagctgcctgtgagaagtacaccagcggctttgatgagctgcagaggatccacttccccagcgacaagggccactgtgtggacctgcctgacaccggcctgtgcaaggagagcatcccccgctggtactacaaccccttcagcgagcactgtgcccgcttcacctatggaggctgctacggcaacaagaacaactttgaggaggagcagcagtgcctggagagctgccggggcatcagcaagaaggatgtgtttggcctgcggcgggagatccccatccccagcactggatctgtggagatggctgtggccgtgttcctggtgatctgcatcgtggtggtggtggccatcctgggctactgcttcttcaagaaccagaggaaggacttccacggccaccaccaccaccccccacccaccccagccagcagcacagtgtccaccacagaggacacagagcacctggtgtacaaccacaccacccggcccctgtag

SEQ ID NO: 30265 - DNA, 1542 bp, Artificial Sequence
  derived and/or modified sequence
atggcccccgcccggaccatggcccgggcccggctggcccccgccggcatacctgcggtggctctgtggctgttgtgtacgctgggtctccagggaacacaagctggcccaccacccgcccccccgggacttccagctggggcagattgtttgaacagcttcacagctggggtccccggttttgtgttggatactaacgccagtgttagcaacggcgctacatttttagaaagcccgaccgtacggagaggatgggactgcgtacgcgcttgctgcacaacacaaaattgcaatttagccctcgtcgagctgcagcccgacaggggggaggacgccattgcggcatgcttcctaataaactgtctctatgagcaaaatttcgtatgtaagtttgcccccagagaaggatttatcaattatctaacacgagaggtctatcgctcctatcgccaactccggacacagggattcggcggatccgggattccaaaagcctgggctggcatagaccttaaggtgcaaccacaggaacccttggtgttaaaagacgtggaaaatacagactggaggctgctccgcggggacacggatgtgagggtggaacgtaaagatcccaatcaggtggagctttggggtctcaaggaaggcacctacctattccagctcaccgttactagttcagaccaccctgaggatacagccaacgtcacagtgaccgttttatcaaccaaacagaccgaagactactgccttgcctccaataaggtcggaaggtgtcgtggtagcttcccgcgatggtattacgatcccactgagcagatttgcaaaagtttcgtctatggcgggtgcctgggcaacaagaacaactacttgcgcgaggaagagtgtattctggcttgcagaggcgtgcagggaccttccatggagcgacgccaccctgtttgctccggcacctgccagccaactcagttcagatgctcgaatggctgttgcatcgattctttcctggaatgtgatgacactcctaactgtcccgacgcgagcgacgaggcagcctgcgagaagtacacatctggattcgatgagctccagcgcattcactttccctccgacaaaggtcattgtgtcgatttacctgataccgggctttgtaaggagagcataccccggtggtactataacccatttagtgaacactgtgctcgctttacatacggcggatgttatggcaacaaaaataattttgaagaggaacagcaatgcctggagtcatgtcgtgggattagtaaaaaggacgtgttcggcctgaggagagaaatccccatcccatctactggcagcgtggagatggccgtcgctgttttcctggtgatctgtattgtggttgtggtagctatactgggctactgtttcttcaagaatcaacgcaaggactttcacgggcatcaccatcaccctccaccgacacccgcctcgagtacggttagcaccaccgaggacactgaacacctcgtgtacaaccatacgacgagaccattatag

SEQ ID NO: 30266 - RNA, 1542 nt, Artificial Sequence
  derived and/or modified sequence
auggcuccagccagaacuauggcccgcgcccgucucgcacccgcagggauaccagccguugcccuguggcugcugugcacauugggcuugcagggcacccaggccggaccuccccccgccccuccaggacugccagccggggccgacugccuuaauagcuuuacagcuggggugcccggcuuugugcuggauacaaacgcaagcguguccaauggcgcaaccuuccuggagucgccuacaguccgcagaggcugggacugcgugcgggcaugcuguacaacacagaacuguaaccuggcacugguggagcuccagccagacagaggugaagacgcaaucgcugccuguuuccugauuaacugucucuaugaacagaauuuuguguguaaauuugcaccuagagagggauucaucaacuacuuaacccgcgagguguaccgcucuuauagacagcuuagaacccagggauucggaggaagcgggaucccuaaagccugggccggcauugaucugaaaguacaaccucaggagccucuagugcuuaaagacgucgaaaauacagacuggcggcuucuuagaggcgauacugaugucaggguugagaggaaagauccuaaucagguagagcuauggggucugaaggaggguacuuacuuguuccaacucacagucaccucgagcgaccauccugaggauacagcaaacguuacuguaaccguguuaucaaccaagcaaaccgaagacuauugccuugccuccaauaaaguaggcagguguagaggcucauucccccggugguacuaugacccuaccgaacagaucuguaaaucauuuguuuauggcggcugucuaggcaacaaaaauaacuauuuacgagaggaagagugcauccucgccugccggggcguucaaggcccuucuauggaaaggaggcacccuguuuguucagguacuugccaaccaacacaauuccgcuguucuaacgguuguuguaucgacucuuucuuggagugugaugacacaccgaacugcccugaugccagcgaugaggcugccugcgagaaauauacgucugguuuugaugaacugcagcggauccauuuccccagcgauaaaggccauuguguugaccugccagauaccggacuuugcaaggaaagcaucccccggugguacuacaauccuuucucggagcauugcgcuagguuuacuuacgggggauguuauggcaauaaaaacaacuuugaggaggaacaacagugucuagagucaugcagaggaaucucgaagaaggauguguuugguuugcggcgcgaaauacccauacccucuacgggcuccguggagauggccguugcugucuuucugguuauaugcaucgucguggucguagccauucuugguuauugcuuuuucaaaaaucagagaaaggacuuccacggacaucaccaccauccgccuccaaccccagcuagcaguacagugagcacaacagaagauacugagcaccugguuuauaaccacacgacaagaccacuuuag

SEQ ID NO: 30267 - RNA, 1542 nt, Artificial Sequence
  derived and/or modified sequence
auggcaccugcacgcacuauggcucgcgccagacuugcucccgccggaaucccagcgguggcucuguggcugcugugcacucugggcuugcaaggaacccaagccgguccaccucccgcuccaccagggcuuccagccggagcugacugccucaauucauucacggccggcguccccggcuucgugcucgacacaaacgcauccgugucgaauggugcgacuuuucuugaaaguccuacugugaggcggggcugggacugcguuagggccuguugcacgacccagaacugcaaccuggcucuuguugagcuccagccugaucgaggagaagacgcaauagcugcaugcuuucucaucaauugucuguacgaacagaacuuugugugcaaauucgcaccacgcgaggguuucauuaauuaccugaccagagaaguguaucguucguaucggcagcugcguacacaagguuucggcgggucugguaucccuaaagcaugggccggcauugacuugaaggugcagccucaggaaccucuugugcugaaagacguggagaacaccgauuggcgcuugcugcgcggggacaccgauguccguguagaacguaaagacccuaaccagguugagcuuuggggacuuaaagagggaacguaccuuuuccagcugacaguaacaucaucagaucacccugaggacaccgccaacgugaccguuacagugcuuucuaccaagcagacugaggacuacuguuuggcuucaaacaagguuggucgaugucguggaucauuucccagaugguauuaugauccuacagaacaaaucuguaagaguuuuguauacgguggcugucuugggaacaaaaauaacuaucugcgggaagaggaauguaucuuggcaugccggggaguccaaggccccaguauggaacggcggcaucccguauguagcggaacuugccagcccacccaguuucgguguucuaauggaugcugcauagauuccuuccuugaaugcgaugauacaccuaauugcccggaugcuagcgacgaggcugccugugaaaaauauacaaguggguucgacgagcuccagagaauucauuuucccucugacaaaggacacuguguggaccucccagauacaggcuuguguaaggagucuauuccccguugguacuacaauccauucagugaacacugugcaagguuuacuuacggagguugcuaugggaauaagaauaacuucgaggaagagcaacagugccuagagucaugccgugggauuuccaagaaggauguguuugggcuuaggcgggaaauccccauuccaucaacaggcucaguugaaauggcagucgcuguguuccucgugaucuguauagucguggugguugcuauucucggauacuguuuuuucaaaaaucagcguaaggauuuccauggucaccaccaccaucccccuccuacuccggcaucuucuacggugaguacaaccgaagauacagagcaucuggucuacaaccauacaacucggccacucuag

SEQ ID NO: 30268 - RNA, 1542 nt, Artificial Sequence
  derived and/or modified sequence
auggccccugcucgcacuauggcccgggcccgacucgcccccgcugguaucccagcagucgcccuguggcugcucugcacacucggcuugcaaggcacacaggccggcccaccacccgcuccuccuggccuucccgcuggagcagacugccuuaauaguuuuaccgcuggggugccugguuucguguuggauacaaaugcuucagugucuaauggagccacuuuucucgaauccccaacagugcgcagaggcugggauuguguacgggcuuguuguacuacccagaauuguaaccucgcucuuguugaguugcagccagauagaggagaggacgccauagcagccugcuuccuuauaaacuguuuguacgagcagaauuucguuuguaaguucgcuccaagagaaggguuuaucaauuacuugacccgagagguuuauagaucuuaccggcagcuuagaacucagggauuuggugguucugguauuccgaaggcaugggccggcaucgaucuuaaggugcaaccccaagaaccgcugguacuaaaagauguagagaauaccgauuggcgucuccuuaggggcgauacugaugugcggguggaaagaaaggauccuaaccaggucgaguuguggggucucaaggagggcaccuaccuauuucaacuaaccgugaccaguucggaccauccugaagacacugcaaaugugacggucaccguguuauccacuaaacaaaccgaagauuauuguuuagccuccaacaaagugggucgauguagagguaguuucccaaggugguacuacgacccaaccgagcagauuuguaaguccuucgucuacggcgguugcuuaggcaacaagaauaacuaccugcgcgaggaagaauguauacuagccugucgaggcguccagggaccuucuauggagagacgucaccccgucuguuccggcacuugucagccuacucaauuccggugcucuaacggcuguuguauugacuccuuccuugaaugcgaugacacuccaaacuguccagaugcgagcgacgaggcagccugcgaaaaguacacaucuggcuucgacgaauuacagcguauccauuuuccaagcgauaaaggccacugcguagaucuaccggauaccggucuuuguaaggaauccaucccaagaugguauuacaaucccuuuucagaacacugcgcaagauucacauacgguggguguuauggcaacaagaauaacuucgaagaagaacaacaaugucucgagagcuguagggguauaucuaaaaaggacguguucggauuaaggagagaaaucccaauaccaagcaccggcagcguugaaauggcgguggcaguguuucuggucauaugcaucgugguggugguugcuauccugggcuacugcuucuucaaaaaccagagaaaagauuuucacggucaccaucaccacccacccccuacccccgcgucaagcaccguuaguacaacagaagauacagaacaucucgucuauaaucauacuacucgccccuuauag

SEQ ID NO: 30269 - RNA, 1542 nt, Artificial Sequence
  derived and/or modified sequence
auggccccagccagaacgauggcacgcgcaagacucgccccugccggaauccccgcugucgcucuuuggcugcuauguacauugggccuucaaggcacgcaagcagguccucccccugccccacccggccuaccugcuggagccgauugccucaauucuuucacagcuggcgucccaggauuugucuuagacaccaaugcaaguguauccaacggagcuacuuuccucgaaagccccacaguucggcgcggcugggacugcguaagagccugcuguacaacccagaauuguaaucucgcacugguggagcuucagcccgauagaggugaggaugcuaucgcugccuguuuucucauuaacuguuuguaugaacagaacuuugugugcaaauuugccccucgcgaaggcuuuaucaauuaucugacucgcgaaguguaucgaucuuaccgccagcugagaacucaaggauuugggggaaguggaaucccaaaagcaugggcuggcauugaucuuaaaguacaaccucaggagccccugguccucaaggacguugagaauacagauuggagacugcuacgaggcgacacagacguuagaguggagcggaaggaccccaaucagguugagcuuugggggcuuaaagaaggaaccuauuuauuccaacuuaccguuacaucauccgaucaucccgaagacacagcuaacgucacagucacuguacucucaacgaagcagacugaagacuauugucuugccuccaauaaggugggcagaugcagaggcagcuucccacggugguauuaugauccaacggagcagauauguaaguccuucguguauggcggaugccucgggaauaaaaauaacuaccugcgagaagaagaauguaucuuagccugcaggggcgugcagggucccagcauggaacgcagacaccccguaugcucuggaaccugucagccaacacaguuuaggugcuccaacggauguugcauugacagcuucuuagagugugaugauacacccaacugcccugaugcaagcgacgaggccgcaugugaaaaauauaccagcggauuugaugaacuucaacggauccauuucccuagugacaaaggccauugcguugaccuuccggacacuggauuauguaaagaaucaaucccccgaugguacuauaacccauucucugaacacugcgccagauuuacuuacgggggcuguuauggcaauaagaauaacuuugaagaggaacaacaauguuuagaguccugcagagguauuagcaaaaaggaugucuuuggccugagacgagagauuccaauuccaucaacuggcaguguagagauggcuguggccguauuucuagucauuugcauagucguagucguagcaauucugggauacugcuuuuuuaagaaccagagaaaagauuuccacggacaccaucaucacccaccgcccaccccagcaucaaguacaguuucaaccacugaagauaccgagcaccuaguuuacaaccauacaacccggccccuauag

SEQ ID NO: 30270 - protein, 279 aa, Artificial Sequence
  derived and/or modified sequence
MATRQRESSITSCCSTSSCDADDEGVRGTCEDASLCKRFAVSIGYWHDPYIQHFVRLSKERKAPEINRGYFARVHGVSQLIKAFLRKTECHCQIVNLGAGMDTTFWRLKDEDLLPSKYFEVDFPMIVTRKLHSIKLPTLLIAECVLVYMTPEQSANLLKWAANSFERAMFINYEQVNMGDRFGQIMIENLRRRQCDLAGVETCKSLESQKERLLSNGWETASAVDMMELYNRLPRAEVSRIESLEFLDEMELLEQLMRHYCLCWATKGGNELGLKEITY

SEQ ID NO: 30271 - DNA, 840 bp, Artificial Sequence
  derived and/or modified sequence
atggccactcgacagcgcgaaagtagtatcacttcttgctgctccacgagtagctgtgatgctgacgatgaaggcgtacgcggcacatgtgaggatgcgtcgctgtgcaaaaggtttgctgttagcattgggtactggcatgatccatacatccagcattttgtccgcctgagtaaagagcgcaaggctcccgaaattaatagaggctatttcgctagagtccacggggtaagccagctgatcaaggcattcttacggaagactgaatgccactgtcagatagtgaatctgggggccggcatggacactacgttctggcgccttaaggatgaggacctgctgccgagcaaatacttcgaggtggacttcccaatgatcgtgacccggaagctgcattcaatcaaactgcccacccttcttatcgctgaatgtgtcctggtgtacatgactcctgaacagtctgctaacctgcttaaatgggctgccaactctttcgaacgggctatgttcatcaactatgaacaggtgaacatgggcgacagattcggccagattatgattgaaaacttacgacggaggcagtgcgacttagccggcgtggaaacttgcaagagcctcgagtcccagaaggaaaggctattgtccaatgggtgggagactgccagcgcagttgacatgatggaactgtataatcggctccccagagccgaggtgtcaaggattgagtcgctcgaatttctggacgaaatggagctgctggagcagcttatgcggcactattgtctctgttgggcaactaaaggcggaaatgagctgggacttaaagaaatcacctattag

SEQ ID NO: 30272 - DNA, 840 bp, Artificial Sequence
  derived and/or modified sequence
atggccacccggcagcgggagagcagcatcaccagctgctgcagcaccagcagctgtgatgctgatgatgaaggagtgcggggcacctgtgaagatgccagcctgtgcaagagatttgctgtgtccatcggctactggcatgacccctacatccagcactttgtgcggctgagcaaggagaggaaggcccctgagatcaacagaggctactttgcccgggtgcatggagtgtcccagctgatcaaggccttcctgaggaagacagagtgccactgccagatcgtgaacctgggcgccggcatggacaccaccttctggaggctgaaggatgaggacctgctgcccagcaagtactttgaggtggacttccccatgattgtgaccaggaagctgcacagcatcaagctgcccaccctgctgattgctgaatgtgtgctggtgtacatgaccccagagcagagcgccaacctgctgaagtgggccgccaacagctttgagcgggccatgttcatcaactatgagcaggtgaacatgggagaccgcttcggccagatcatgattgagaacctgcggcggcggcagtgtgacctggccggcgtggagacctgcaagagcctggagagccagaaggagcggctgctgagcaatggctgggagacagccagcgctgtggacatgatggagctgtacaaccggctgcccagggctgaggtgtccagaattgagagcctggagttcctggatgagatggagctgctggagcagctgatgaggcactactgcctgtgctgggccaccaagggcggcaatgagctgggcctgaaggagatcacctactag

SEQ ID NO: 30273 - DNA, 1205 bp, Artificial Sequence
  derived and/or modified sequence
agccggcgtgggcggcgtcactgagccgcgccagctgagccaggtagggccctaccctcttctgttgctttctccctgtggctcgcgccgtcccccgccgcccgtcgaccccgcttccatgtccctggcggacacagctcccaggaacctccacgcccatggccactaggcagagggaatcctctatcacctcctgctgttccacctcgagctgcgacgcagacgacgagggcgtgcgcggcacctgcgaagatgcttccctgtgcaagaggtttgcagtaagcattggctactggcatgacccttacatacagcactttgtgagactgtctaaagagaggaaagcccctgaaatcaacagaggatattttgctcgagtccatggtgtcagtcagcttataaaggcatttctacggaagacagaatgtcattgtcaaattgtcaaccttggggcaggcatggataccaccttctggagattaaaggatgaagatcttctcccaagtaaatattttgaggttgactttccaatgattgtcacgagaaagctgcacagtatcaaattgccaacactcctgatagctgaatgtgtgctggtttacatgactccagagcagtccgcaaacctcctgaagtgggcagccaacagttttgagagagccatgttcataaactacgaacaggtgaacatgggtgatcggtttgggcagatcatgattgaaaacctgcggagacgccagtgtgacctggcgggagtggagacctgcaagtcattagagtcacagaaagaacggctcctgtcgaatgggtgggaaacagcatcggccgtcgacatgatggagttgtacaacaggttacctcgagctgaagtgagcaggatagaatcacttgaattcctggatgaaatggagctgctggagcagctcatgcggcattactgcctttgctgggcaaccaaaggaggaaatgagcttgggctgaaggagataacttattaatctgtcgaaggcttatgccgagccagaagccgaagccacttgccctcctggaggagacctgcaagctccctgagcggtgggcgggcctcgtccgcaggtctcatcccacactcttgagaagccttggtcactacagtggtcgcacatgttcctcttcctgttcctgttgacatgtcgttgtttaaataaatctcacttgccaccagt

SEQ ID NO: 30274 - DNA, 840 bp, Artificial Sequence
  derived and/or modified sequence
atggccacccggcagcgggagagcagcatcaccagctgctgcagcacatcatcttgcgacgctgatgatgagggcgtccggggcacctgcgaagacgccagtctgtgcaagaggttcgccgtgtcaatcggttactggcacgacccctatattcagcactttgtaaggttatccaaggagcgcaaggcacctgagatcaacagaggctatttcgccagagtgcacggggtgtctcaactgatcaaagcctttttgcgtaagacagagtgtcattgtcagatcgtgaacttaggcgctggtatggacacaaccttttggcgcctgaaagacgaggatctgttgcccagtaaatacttcgaggtcgacttccctatgattgttaccagaaaattgcactccatcaagctgccaactctgcttatcgccgaatgtgtcctagtgtacatgactcctgaacagtccgcaaatctattaaaatgggccgcaaactcctttgagagggccatgtttattaactacgaacaagtcaacatgggtgaccggtttgggcagattatgatcgagaatttgagacgacgccagtgtgacctggcaggcgtagagacatgcaaatctctggagtcacagaaggaacggctcctgtcaaatggatgggagacggcttcagccgtggatatgatggaactttacaaccggcttcccagagctgaggtcagtcggattgagagtctggagtttctggacgagatggaactgctcgaacagctgatgcgtcactattgtctgtgctgggctacaaaggggggtaatgaactgggcctaaaggaaatcacatactag

SEQ ID NO: 30275 - DNA, 840 bp, Artificial Sequence
  derived and/or modified sequence
atggccacgaggcagagagagtcttccataacgagctgttgcagtacgtcttcttgtgacgccgatgacgagggcgtgagggggacatgcgaggacgcttccctatgtaaacgttttgccgtgagtatcgggtattggcacgacccctacatccagcatttcgtgcggctgtcgaaggagagaaaggccccagaaatcaaccgcggatacttcgcaagggtacatggcgtctcacagctaataaaagcattcctacgcaaaacagagtgccattgccagatcgtgaacctcggggcaggaatggatactactttttggagactaaaagacgaagacctcctgccgtccaaatatttcgaagtcgatttccctatgatcgtgacccggaagctgcatagcattaagctgccaacccttcttattgccgaatgtgtcctggtgtacatgactcccgaacagtctgctaatctgttgaagtgggctgcaaactcattcgaaagggccatgttcattaactacgagcaggtgaacatgggcgaccggttcggccagattatgatcgaaaacctccgccgaagacaatgtgacctggctggcgtcgaaacctgtaaaagccttgagtcgcaaaaagaacggttgttgtccaatggatgggaaacagcctctgctgttgatatgatggaattgtacaaccgcctgccgagagctgaagtcagcagaattgagtccttggaattcctggatgagatggagctcctcgaacaactcatgcgacattactgcctttgctgggcgacaaagggtgggaatgaactaggtcttaaggagatcacgtactag

SEQ ID NO: 30276 - DNA, 840 bp, Artificial Sequence
  derived and/or modified sequence
atggccaccagacagagagagagcagcatcaccagctgctgcagcaccagcagctgcgacgccgacgacgagggcgtgagaggcacctgcgaggacgccagcctgtgcaagagattcgccgtgagcatcggctactggcacgacccctacatccagcacttcgtgagactgagcaaggagagaaaggcccccgagatcaacagaggctacttcgccagagtgcacggcgtgagccagctgatcaaggccttcctgagaaagaccgagtgccactgccagatcgtgaacctgggcgccggcatggacaccaccttctggagactgaaggacgaggacctgctgcccagcaagtacttcgaggtggacttccccatgatcgtgaccagaaagctgcacagcatcaagctgcccaccctgctgatcgccgagtgcgtgctggtgtacatgacccccgagcagagcgccaacctgctgaagtgggccgccaacagcttcgagagagccatgttcatcaactacgagcaggtgaacatgggcgacagattcggccagatcatgatcgagaacctgagaagaagacagtgcgacctggccggcgtggagacctgcaagagcctggagagccagaaggagagactgctgagcaacggctgggagaccgccagcgccgtggacatgatggagctgtacaacagactgcccagagccgaggtgagcagaatcgagagcctggagttcctggacgagatggagctgctggagcagctgatgagacactactgcctgtgctgggccaccaagggcggcaacgagctgggcctgaaggagatcacctactag

SEQ ID NO: 30277 - protein, 449 aa, Artificial Sequence
  derived and/or modified sequence
MMLSTEGREGFVVKVRGLPWSCSADEVMRFFSDCKIQNGTSGIRFIYTREGRPSGEAFVELESEEEVKLALKKDRETMGHRYVEVFKSNSVEMDWVLKHTGPNSPDTANDGFVRLRGLPFGCSKEEIVQFFSGLEIVPNGMTLPVDFQGRSTGEAFVQFASQEIAEKALKKHKERIGHRYIEIFKSSRAEVRTHYDPPRKLMAMQRPGPYDRPGAGRGYNSIGRGAGFERMRRGAYGGGYGGYDDYGGYNDGYGFGSDRFGRDLNYCFSGMSDHRYGDGGSSFQSTTGHCVHMRGLPYRATENDIYNFFSPLNPMRVHIEIGPDGRVTGEADVEFATHEDAVAAMAKDKANMQHRYVELFLNSTAGTSGGAYDHSYVELFLNSTAGASGGAYGSQMMGGMGLSNQSSYGGPASQQLSGGYGGGYGGQSSMSGYDQVLQENSSDYQSNLA

SEQ ID NO: 30278 - protein, 404 aa, Artificial Sequence
  derived and/or modified sequence
MMLSTEGREGFVVKVRGLPWSCSADEVMRFFSDCKIQNGTSGIRFIYTREGRPSGEAFVELESEEEVKLALKKDRETMGHRYVEVFKSNSVEMDWMTLPVDFQGRSTGEAFVQFASQEIAEKALKKHKERIGHRYIEIFKSSRAEVRTHYDPPRKLMAMQRPGPYDRPGAGRGYNSIGRGAGFERMRRGAYGGGYGGYDDYGGYNDGYGFGSDRFGRDLNYCFSGMSDHRYGDGGSSFQSTTGHCVHMRGLPYRATENDIYNFFSPLNPMRVHIEIGPDGRVTGEADVEFATHEDAVAAMAKDKANMQHRYVELFLNSTAGTSGGAYDHSYVELFLNSTAGASGGAYGSQMMGGMGLSNQSSYGGPASQQLSGGYGGGYGGQSSMSGYDQVLQENSSDYQSNLA

SEQ ID NO: 30279 - DNA, 1215 bp, Artificial Sequence
  derived and/or modified sequence
atgatgctgagcaccgagggcagagagggcttcgtggtgaaggtgagaggcctgccctggagctgcagcgccgacgaggtgatgagattcttcagcgactgcaagatccagaacggcaccagcggcatcagattcatctacaccagagagggcagacccagcggcgaggccttcgtggagctggagagcgaggaggaggtgaagctggccctgaagaaggacagagagaccatgggccacagatacgtggaggtgttcaagagcaacagcgtggagatggactggatgaccctgcccgtggacttccagggcagaagcaccggcgaggccttcgtgcagttcgccagccaggagatcgccgagaaggccctgaagaagcacaaggagagaatcggccacagatacatcgagatcttcaagagcagcagagccgaggtgagaacccactacgacccccccagaaagctgatggccatgcagagacccggcccctacgacagacccggcgccggcagaggctacaacagcatcggcagaggcgccggcttcgagagaatgagaagaggcgcctacggcggcggctacggcggctacgacgactacggcggctacaacgacggctacggcttcggcagcgacagattcggcagagacctgaactactgcttcagcggcatgagcgaccacagatacggcgacggcggcagcagcttccagagcaccaccggccactgcgtgcacatgagaggcctgccctacagagccaccgagaacgacatctacaacttcttcagccccctgaaccccatgagagtgcacatcgagatcggccccgacggcagagtgaccggcgaggccgacgtggagttcgccacccacgaggacgccgtggccgccatggccaaggacaaggccaacatgcagcacagatacgtggagctgttcctgaacagcaccgccggcaccagcggcggcgcctacgaccacagctacgtggagctgttcctgaacagcaccgccggcgccagcggcggcgcctacggcagccagatgatgggcggcatgggcctgagcaaccagagcagctacggcggccccgccagccagcagctgagcggcggctacggcggcggctacggcggccagagcagcatgagcggctacgaccaggtgctgcaggagaacagcagcgactaccagagcaacctggcctag

SEQ ID NO: 30280 - DNA, 1350 bp, Artificial Sequence
  derived and/or modified sequence
atgatgttgtctaccgagggcagagaaggttttgtagtgaaagtgaggggcctgccatggtcatgcagcgccgatgaagtcatgaggtttttttcggactgcaagatccagaatggcacatccgggattcggtttatttataccagggagggaaggcccagtggggaggccttcgtggagctggaaagtgaggaggaggtgaagctagcactcaagaaagacagggagactatgggccaccgatacgtggaagtcttcaagagcaactcagtggagatggattgggttttgaagcacaccggccctaacagccctgacaccgctaacgacggattcgtgcgactccgcggattgccttttggctgctctaaggaggaaatagtgcagtttttcagcgggctggagatagtgccgaacggcatgaccctaccagtcgacttccaggggagaagcaccggggaagccttcgtacaattcgcatcccaggagatcgcagagaaggcgttaaagaaacataaagagcggatcggccatcgctatatcgaaatctttaagagttcacgcgccgaggtgagaacccactacgacccccctcggaaattgatggctatgcaacggccgggcccatacgatcgtcctggggccggtaggggctacaattctatcgggagaggagctggctttgagagaatgagacgtggagcttacggaggcggatatgggggctacgatgactatggtgggtacaatgatgggtacggcttcggatcagatcgcttcggccgagacttgaactactgtttcagcggtatgtccgatcataggtacggggatgggggttcatcattccaaagtactacaggccactgcgtgcacatgcgaggcctcccttatcgcgcaacggagaacgatatttataacttctttagccccttgaacccaatgcgagttcacatcgagattggtcccgatgggcgcgttactggggaagccgatgtggagttcgcaacacacgaggatgctgtcgctgccatggcaaaggacaaagccaatatgcagcatcgctatgtcgagctcttcctaaacagcactgcgggcaccagcggaggcgcgtacgaccattcatacgtggagctgttcctgaacagtaccgccggtgctagcggcggtgcttatggctcccagatgatgggtggaatgggactatcgaatcagtccagctacgggggtccagcttctcagcagctgtcaggcggttatggcggggggtatgggggccaaagcagcatgtctggctatgatcaggttctgcaagaaaacagctctgattaccagtccaacctagcttag

SEQ ID NO: 30281 - DNA, 1215 bp, Artificial Sequence
  derived and/or modified sequence
atgatgttgtccaccgaaggacgggaaggattcgtggtgaaagtacgggggctgccctggagctgtagtgctgacgaggtgatgaggttcttttccgattgcaagatccagaacggtacatctggaatccggttcatttacacccgtgagggaaggccctcaggagaagcgttcgttgagcttgagtccgaggaggaggtgaaactcgcacttaaaaaggaccgcgagacaatggggcaccgctacgtcgaggtgttcaagtccaactcggtagagatggactggatgactctccctgtggacttccagggccggtctaccggcgaggctttcgtacagttcgcgtcccaggagatagccgagaaagcccttaagaaacacaaggagcggattggacatcggtacatcgaaattttcaagagttccagggccgaggttagaacccactacgacccacctaggaagcttatggccatgcagaggccaggcccttatgacagacccggggccggaagaggctataattctatcgggcgcggagccggctttgaaaggatgcgccggggtgcttatgggggtggctatgggggatacgatgattatggaggatataatgacggatatgggtttgggtctgaccgctttgggagagacctgaactactgtttcagcggaatgagcgatcatcgctatggggatggtggctcctcattccagtccacgaccggtcattgcgtccacatgagggggctgccctatagggccactgaaaacgacatctataacttcttcagccccctgaatcccatgcgtgtgcatatagaaataggcccggacggcagagtgacaggcgaagctgatgtggaattcgctacacacgaggacgcagtcgctgctatggccaaagacaaggccaacatgcagcacaggtacgtggagcttttcctgaattccacagccggcacaagtgggggagcctatgaccacagttacgtggaactgtttttgaactccactgcaggtgcttcaggtggggcttacggctcccaaatgatgggaggcatgggcctctcaaaccagtcatcttacgggggccccgccagccagcaattaagtgggggttatggcggtggatacggaggccagtcctctatgagtggttacgatcaggttttacaggaaaattcctccgactatcagagtaacttagcgtag

SEQ ID NO: 30282 - DNA, 1350 bp, Artificial Sequence
  derived and/or modified sequence
atgatgctgagcacagagggccgggagggctttgtggtgaaggtgcggggcctgccctggagctgcagcgcagatgaggtgatgaggttcttcagtgactgcaagatccagaatggcaccagcggcatccgcttcatctacacccgggagggccggcccagcggggaggcctttgtggagctggagagcgaggaggaggtgaagctggccctgaagaaggaccgggagaccatgggccaccgctacgtggaggtgttcaagagcaacagcgtggagatggactgggtgctgaagcacacaggccccaacagcccagacacagccaatgatggctttgtgcggctgcggggcctgcccttcggctgcagcaaggaggagatcgtgcagttcttcagcggcctggagatcgtgcccaacggcatgaccctgcctgtggacttccagggccgcagcactggagaggcctttgtgcagtttgccagccaggagattgctgagaaggccctgaagaagcacaaggagcgcatcggccaccgctacatcgagatcttcaagagcagcagagctgaggtgaggacccactatgacccccccaggaagctgatggccatgcagaggcctggcccctatgacaggcctggagctggccggggctacaacagcatcggccgcggggccggctttgagaggatgagaagaggagcctacggcggcggctacggcggctatgatgattatggaggctacaatgatggctacggctttggaagtgaccgcttcggccgggacctgaactactgcttcagcggcatgtctgaccacagatatggagatggcggcagcagcttccagagcaccaccggccactgtgtgcacatgaggggcctgccctaccgggccacagaaaatgacatctacaacttcttcagccccctgaaccccatgagggtgcacattgaaattggaccagatggccgggtgactggagaggctgatgtggagtttgccacccatgaagatgctgtggccgccatggccaaggacaaggccaacatgcagcaccgctacgtggagctgttcctgaacagcacagctggcaccagcggcggggcctatgaccacagctatgtggagctgttcctgaacagcacagctggggccagcggcggggcctacggcagccagatgatgggcggcatgggcctgagcaaccagagcagctatggaggccctgccagccagcagctgagcggcggctacggcggcggctacggcggccagagctccatgagcggctatgaccaggtgctgcaggagaacagcagtgactaccagagcaacctggcctag

SEQ ID NO: 30283 - DNA, 1215 bp, Artificial Sequence
  derived and/or modified sequence
atgatgctgagcacagagggccgggagggctttgtggtgaaggtgcggggcctgccctggagctgcagcgcagatgaggtgatgaggttcttcagtgactgcaagatccagaatggcaccagcggcatccgcttcatctacacccgggagggccggcccagcggggaggcctttgtggagctggagagcgaggaggaggtgaagctggccctgaagaaggaccgggagaccatgggccaccgctacgtggaggtgttcaagagcaacagcgtggagatggactggatgaccctgcctgtggacttccagggccgcagcactggagaggcctttgtgcagtttgccagccaggagattgctgagaaggccctgaagaagcacaaggagagaattggccaccgctacatcgagatcttcaagagcagcagagctgaggtgaggacccactatgacccccccaggaagctgatggccatgcagaggcctggcccctatgacaggcctggggccggccggggctacaacagcatcggcagaggagctggctttgagaggatgagaagaggagcctatggaggcggctatggaggctatgatgattatggaggctacaatgatggctacggcttcggcagtgacagatttggccgggacctgaactactgcttcagcggcatgtctgaccacagatatggagatggcggcagcagcttccagagcaccaccggccactgtgtgcacatgaggggcctgccctaccgggccacagaaaatgacatctacaacttcttcagccccctgaaccccatgagggtgcacatcgagatcggcccagatggccgggtgactggagaggctgatgtggagtttgccacccatgaagatgctgtggccgccatggccaaggacaaggccaacatgcagcacagatatgtggagctgttcctgaacagcacagctggcaccagcggcggggcctatgaccacagctatgtggagctgttcctgaacagcacagctggggccagcggcggggcctacggcagccagatgatgggcggcatgggcctgagcaaccagagcagctatggaggccctgccagccagcagctgagcggcggctatggaggcggctatggaggccagagctccatgagcggctatgaccaggtgctgcaggagaacagcagtgactaccagagcaacctggcctag

SEQ ID NO: 30284 - DNA, 1350 bp, Artificial Sequence
  derived and/or modified sequence
atgatgctgagcaccgagggccgggagggcttcgtggtgaaggtgaggggactaccttggtcttgctctgctgacgaggtcatgcggttcttctccgactgtaaaatccagaatgggacgagcggtattcgcttcatctatacaagagagggccgtcccagcggcgaagcctttgtggagctggagtccgaggaggaggttaaactcgcgctaaaaaaagatcgggaaaccatgggtcacaggtatgtggaggtgtttaagtcgaacagcgtcgaaatggactgggtgctgaaacataccggacctaattcacctgatacggctaacgatggtttcgtcaggctaagaggtttgccattcgggtgttcaaaagaggaaatcgttcagttcttttccgggctggagatcgtgcccaatggaatgacccttcctgtggatttccaaggacgatccactggcgaggcttttgtccagttcgccagccaggaaatcgccgaaaaggccttaaaaaagcataaggaacgcattggacacaggtacatcgagatctttaaatccagtagggctgaagtcaggacccactacgaccctccacgtaaattgatggccatgcaaagacccggtccgtacgatcgaccgggtgccggaagaggatacaacagtatcggccggggcgccggatttgagcggatgcgccgaggagcttatggaggaggctatggcggatatgatgactatggtggctacaatgacggctatggatttggatctgaccgtttcggccgggatctcaattattgtttttctggtatgagcgaccatcgatacggcgacggaggaagcagcttccagagcactaccggacactgcgtccacatgaggggcctgccttatcgggctaccgaaaacgatatctataacttcttctctcccctgaacccaatgagggttcatatcgagatcggccccgatgggagagtgacgggggaagccgatgtcgagttcgccacacacgaagacgccgtcgcggccatggccaaggacaaagcaaatatgcagcataggtacgtcgaattgttcttgaactctaccgcaggtacctcaggaggagcttacgatcatagctacgtcgaattatttctcaacagcacagccggtgcctctggaggcgcctatggaagtcagatgatgggcggaatgggcctgtctaaccagtcttcttatgggggtccagcgagccaacagctatccggcgggtatggtggcggttatggggggcagtcctccatgtcagggtacgatcaggtcttacaggagaacagcagcgattaccagtctaatctggcttag

SEQ ID NO: 30285 - DNA, 1215 bp, Artificial Sequence
  derived and/or modified sequence
atgatgctgagcaccgagggccgggagggcttcgtggtgaaggtgcgtggtctgccgtggtcgtgctcagcagatgaggttatgcgattcttttcagactgtaaaatccagaatggaacaagcggtattcggtttatttatactagagaggggcggccctccggtgaagccttcgtggagcttgaatcagaagaagaggtcaagctggcgctcaaaaaagaccgggagactatgggccatagatacgtggaggtgtttaagtccaacagcgtggaaatggactggatgactctcccggtggatttccagggacgtagcactggggaggccttcgtccaattcgcttcacaagaaattgctgaaaaagcgctgaagaagcacaaggaaagaatcggccaccggtatatcgaaattttcaagagtagtcgggccgaggtgcggacacactatgatcctccgcgcaagctcatggccatgcaacgccctggcccgtacgaccggccgggagccggaagaggctataactctatcggtaggggcgcagggttcgagcggatgagaagaggagcatacggtggagggtacggtgggtacgacgattatggaggttataatgacggctatgggttcggcagcgatcggtttggcagggatctgaattattgtttctcaggcatgtccgaccaccggtacggagatggcggtagcagtttccagagcactaccgggcattgcgttcacatgcgtggtctaccgtatcgggcgacggaaaatgatatttataacttcttcagcccgcttaatcccatgcgagtgcatattgaaataggacctgacggaagagtcacgggcgaagctgatgtggaattcgccacacacgaagatgccgtcgctgcaatggccaaggataaggctaacatgcagcaccgctatgtggagctgttcctcaactccaccgctggaacatctggtggtgcttatgaccactcctacgtggagttgttcttgaattccactgcaggagctagcgggggggcatacggcagccaaatgatgggcggaatgggcctgagtaaccagtcttcttatgggggccctgcgtctcagcagctgagcggcggatatggtggcgggtatgggggtcagtcatctatgtcagggtacgaccaggtgctgcaggaaaatagctccgactatcagtctaacctggcctag

SEQ ID NO: 30286 - DNA, 1350 bp, Artificial Sequence
  derived and/or modified sequence
atgatgctcagtaccgaaggaagagaaggctttgtggtgaaggtgagagggctaccctggagttgttcagctgatgaagtaatgcggtttttcagcgactgcaagatccagaacggcaccagtggcattcggtttatctacacccgggaagggaggccgagcggcgaagcatttgtagaacttgagagcgaagaggaagtgaaactggcactcaagaaggatagggaaaccatgggccatagatacgttgaggtattcaaaagcaattccgttgaaatggactgggtccttaaacacactgggcctaacagcccagacactgcaaatgacggctttgtccggctgagggggttgcccttcgggtgttctaaggaggaaatcgttcaattcttctctggtcttgaaatcgttcccaatgggatgaccttaccagttgactttcagggccgttcgaccggcgaagcattcgtgcagtttgctagtcaggaaattgccgagaaagcgcttaagaagcataaggagcgaataggccatcgatatatcgaaatctttaaaagcagcagagccgaggtgaggacacactacgacccaccgcgtaagctgatggccatgcagagacccggtccttacgaccggcctggagccggacggggttacaacagcattgggaggggggctggttttgagagaatgagaaggggtgcctatggcggaggctacggcggatatgatgactatggcggatacaatgatggttacggcttcggaagcgatcgatttgggagagacctgaactattgctttagtgggatgtctgatcaccggtatggcgatggcggatcttctttccaatccacaacaggccattgcgtccacatgcggggtcttccataccgggctactgagaacgacatctacaactttttttcacccctcaatccgatgcgagtccacattgagattggcccagatggcagggtaacaggggaagctgatgttgagtttgccacccatgaggatgcggttgctgccatggccaaagataaagccaatatgcagcatcgttatgtggaactcttcctcaactcgactgccggtacatcaggtggagcgtacgatcattcctatgtagagttgtttctgaatagtactgccggagcttcagggggagcctacggttctcagatgatgggcggtatgggcttgtccaatcagagttcatatgggggtccagcaagccagcagctctcaggtggctacgggggtgggtatggagggcagagctcaatgtctggctatgatcaggtgctacaggagaatagttctgattaccagtccaacttggcatag

SEQ ID NO: 30287 - DNA, 1215 bp, Artificial Sequence
  derived and/or modified sequence
atgatgcttagcacggaaggaagggagggttttgtcgtgaaggtacgtggtttgccctggagctgcagcgctgacgaagtgatgagattttttagtgactgtaagatacagaatggaacaagcggtattcgctttatttacactcgcgagggcagacccagcggggaagctttcgtagagctggaaagtgaggaggaggtgaagttggccctaaaaaaggatagggagactatggggcacaggtacgttgaagtcttcaaatctaatagcgtcgagatggattggatgacactgccagtagacttccaaggtcgcagtacaggcgaggctttcgttcagttcgcttctcaggaaatcgccgagaaagcattaaaaaaacataaagaaagaattggccatagatacattgaaatcttcaagagctctagggccgaggtgcgtacgcactatgatcctcctaggaagctgatggcgatgcaacgacctggaccatatgaccgcccaggggcaggacggggttataattccatcggtcgcggagccggatttgagcggatgcgtaggggcgcatacggtggtgggtatggcggatatgacgactacggaggttacaacgatgggtatggcttcggctctgatcgctttggaagggacctcaactattgcttcagcgggatgagcgaccacaggtacggcgacggaggatcttccttccagtccactaccggacattgtgttcacatgcgaggacttccgtatagggctactgagaacgacatttacaacttcttcagcccccttaaccccatgcgcgttcacatcgagattgggcctgacgggagagtgaccggcgaagccgacgtggagtttgcgacacacgaagacgcagtggctgcgatggcgaaagataaggcaaacatgcagcatcgttatgtagagctattccttaactccaccgcgggaaccagtggaggggcttatgatcactcatacgtggagctgttcctcaactcaactgcaggcgcttcaggtggagcttatggctctcagatgatgggcggtatgggattaagcaatcagtccagctacggaggtccggcatcacaacagctttctgggggatacggaggtggatacgggggtcaaagttctatgtccggatatgatcaagtgctccaagagaatagtagtgattaccagtccaatttggcgtag

SEQ ID NO: 30288 - DNA, 1856 bp, Artificial Sequence
  derived and/or modified sequence
attactcgcttacgtgagcagaagtagttctggtcgtcgtctaccgtctcgctatagccgtttgagggaagaaggaggaaaattacccgctacaccaaaattgcattgagccaaacttgccaccaagagcccaacaatcaccatgatgctgagcacggaaggcagggaggggttcgtggtgaaggtcaggggcctaccctggtcctgctcagccgatgaagtgatgcgcttcttctctgattgcaagatccaaaatggcacatcaggtattcgtttcatctacaccagagaaggcagaccaagtggtgaagcatttgttgaacttgaatctgaagaggaagtgaaattggctttgaagaaggacagagaaaccatgggacacagatacgttgaagtattcaagtctaacagtgttgaaatggattggatgacactgccagtggactttcaggggcgaagcacaggggaagcctttgtgcagtttgcttcacaggagatagctgagaaggccttaaagaaacacaaggaaagaatagggcacaggtacattgagatcttcaagagtagccgagctgaagttcgaacccactatgatccccctcgaaagctcatggctatgcagcggccaggtccctatgataggccgggggctggcagagggtataatagcattggcagaggagctgggtttgaaaggatgaggcgtggtgcctatggtggagggtatggaggctatgatgactatggtggctataatgatggatatggctttgggtctgatagatttggaagagacctcaattactgtttttcaggaatgtctgatcatagatacggagatggtgggtccagtttccagagcaccacagggcactgtgtacacatgagggggttaccttacagagccactgagaatgatatttataatttcttctcacctcttaatcccatgagagtacatattgaaattggacccgatggcagagttaccggtgaggcagatgttgaatttgctactcatgaagatgctgtggcagctatggcaaaagacaaagctaatatgcaacacagatatgtggagctcttcttaaattctactgcaggaacaagtgggggtgcttacgatcacagctatgtagaactttttttgaattctacagcaggggcaagtggtggcgcttatggtagccaaatgatgggagggatgggcttatccaaccagtctagttatggaggtcctgctagccagcagctgagtggtggttatggaggtggttatggtggtcagagcagtatgagtggatatgaccaagttctgcaggaaaactccagtgactatcagtcaaaccttgcttaggtagagaaggagcactaaatagctactccagatataaaagctgtacatttgtgggagttgaatagaatgggagggatgtttagtatatccagtatgattggtaaatgggaaatataattgattctgatcactcttggtcagcttctctttctttatctttctttctccttttttaagaaaacgagttaagtttaacagttttgcattacaggcttgtgattcatgcttactgtaaagtggaagttgagattattttaaaacttcaagctcagtaattttgaacactgaaacattcatctaggacataataacaaagttcagtattgaccataactgttaaaacaatttttagctttcctcaagttagttatgttgtaggagtgtacctaagcagtaagcgtatttaggttaatgcagtttcacttatgttaaatgttgctcttataccacaaatacattgaaaacttcggatgcatgttgagaaacatgcctttctgta

SEQ ID NO: 30289 - DNA, 2223 bp, Artificial Sequence
  derived and/or modified sequence
ggaaaattacccggtatcgttagagctacaccaaaattgcattgagccaaacttgccaccaagagcccaacaatcaccatgatgctgagcacggaaggcagggaggggttcgtggtgaaggtcaggggcctaccctggtcctgctcagccgatgaagtgatgcgcttcttctctgattgcaagatccaaaatggcacatcaggtattcgtttcatctacaccagagaaggcagaccaagtggtgaagcatttgttgaacttgaatctgaagaggaagtgaaattggctttgaagaaggacagagaaaccatgggacacagatacgttgaagtattcaagtctaacagtgttgaaatggattgggtgttgaagcatacaggtccgaatagccctgatactgccaacgatggcttcgtccggcttagaggactcccatttggctgtagcaaggaagagattgttcagttcttttcagggttggaaattgtgccaaatgggatgacactgccagtggactttcaggggcgaagcacaggggaagcctttgtgcagtttgcttcacaggagatagctgagaaggccttaaagaaacacaaggaaagaatagggcacaggtacattgagatcttcaagagtagccgagctgaagttcgaacccactatgatccccctcgaaagctcatggctatgcagcggccaggtccctatgataggccgggggctggcagagggtataatagcattggcagaggagctgggtttgaaaggatgaggcgtggtgcctatggtggagggtatggaggctatgatgactatggtggctataatgatggatatggctttgggtctgatagatttggaagagacctcaattactgtttttcaggaatgtctgatcatagatacggagatggtgggtccagtttccagagcaccacagggcactgtgtacacatgagggggttaccttacagagccactgagaatgatatttataatttcttctcacctcttaatcccatgagagtacatattgaaattggacccgatggcagagttaccggtgaggcagatgttgaatttgctactcatgaagatgctgtggcagctatggcaaaagacaaagctaatatgcaacacagatatgtggagctcttcttaaattctactgcaggaacaagtgggggtgcttacgatcacagctatgtagaactttttttgaattctacagcaggggcaagtggtggcgcttatggtagccaaatgatgggagggatgggcttatccaaccagtctagttatggaggtcctgctagccagcagctgagtggtggttatggaggtggttatggtggtcagagcagtatgagtggatatgaccaagttctgcaggaaaactccagtgactatcagtcaaaccttgcttaggtagagaaggagcactaaatagctactccagatataaaagctgtacatttgtgggagttgaatagaatgggagggatgtttagtatatccagtatgattggtaaatgggaaatataattgattctgatcactcttggtcagcttctctttctttatctttctttctccttttttaagaaaacgagttaagtttaacagttttgcattacaggcttgtgattcatgcttactgtaaagtggaagttgagattattttaaaacttcaagctcagtaattttgaacactgaaacattcatctaggacataataacaaagttcagtattgaccataactgttaaaacaatttttagctttcctcaagttagttatgttgtaggagtgtacctaagcagtaagcgtatttaggttaatgcagtttcacttatgttaaatgttgctcttataccacaaatacattgaaaacttcggatgcatgttgagaaacatgcctttctgtaaaactcaaatataggagctgtgtctacgattcaaagtgaaaacatttggcatgtttgttaattctagctttttggtttaatatcctgtaaggcacgtgagtgtacactttttttttttttaaggatacgggacaattttaagatgtaataccaatactttagaagtttggtcgtgtcgtttgtatgaaaatctgaggctttggtttaaatctttccttgtattgtgatttccatttagatgtattgtactaagtgaaacttgttaaataaatcttccttttaaaaactggaaaaaa

SEQ ID NO: 30290 - DNA, 1350 bp, Artificial Sequence
  derived and/or modified sequence
atgatgctgagcaccgagggcagagagggcttcgtggtgaaggtgagaggcctgccctggagctgcagcgccgacgaggtgatgagattcttcagcgactgcaagatccagaacggcaccagcggcatcagattcatctacaccagagagggcagacccagcggcgaggccttcgtggagctggagagcgaggaggaggtgaagctggccctgaagaaggacagagagaccatgggccacagatacgtggaggtgttcaagagcaacagcgtggagatggactgggtgctgaagcacaccggccccaacagccccgacaccgccaacgacggcttcgtgagactgagaggcctgcccttcggctgcagcaaggaggagatcgtgcagttcttcagcggcctggagatcgtgcccaacggcatgaccctgcccgtggacttccagggcagaagcaccggcgaggccttcgtgcagttcgccagccaggagatcgccgagaaggccctgaagaagcacaaggagagaatcggccacagatacatcgagatcttcaagagcagcagagccgaggtgagaacccactacgacccccccagaaagctgatggccatgcagagacccggcccctacgacagacccggcgccggcagaggctacaacagcatcggcagaggcgccggcttcgagagaatgagaagaggcgcctacggcggcggctacggcggctacgacgactacggcggctacaacgacggctacggcttcggcagcgacagattcggcagagacctgaactactgcttcagcggcatgagcgaccacagatacggcgacggcggcagcagcttccagagcaccaccggccactgcgtgcacatgagaggcctgccctacagagccaccgagaacgacatctacaacttcttcagccccctgaaccccatgagagtgcacatcgagatcggccccgacggcagagtgaccggcgaggccgacgtggagttcgccacccacgaggacgccgtggccgccatggccaaggacaaggccaacatgcagcacagatacgtggagctgttcctgaacagcaccgccggcaccagcggcggcgcctacgaccacagctacgtggagctgttcctgaacagcaccgccggcgccagcggcggcgcctacggcagccagatgatgggcggcatgggcctgagcaaccagagcagctacggcggccccgccagccagcagctgagcggcggctacggcggcggctacggcggccagagcagcatgagcggctacgaccaggtgctgcaggagaacagcagcgactaccagagcaacctggcctag

SEQ ID NO: 30291 - DNA, 1350 bp, Artificial Sequence
  derived and/or modified sequence
atgatgctgtccactgaaggtcgggagggatttgtcgtcaaggtgagaggattgccctggtcatgctccgctgatgaagtaatgaggttcttctcagattgcaagattcaaaatggaacaagcgggattaggtttatttacactagagagggaagaccatctggagaagccttcgtggagctagagagtgaggaggaagtcaagctggccctaaagaaagacagggagactatgggacacaggtacgtcgaagtcttcaagagcaattcggtagagatggattgggtactaaaacacaccggacctaactcccccgataccgccaacgatggattcgtcaggctccggggcttgccctttgggtgtagtaaggaggaaattgtgcagttcttttccggactggagatcgtgcctaacggtatgactctgccagtggattttcagggcaggagcacaggtgaggcgtttgtgcagttcgcgtcacaggagatcgcagaaaaggcactcaagaagcataaagagaggatcgggcaccgatatatcgagatctttaaatctagcagagccgaagttaggacacattacgatccccctcggaaactgatggctatgcagcgcccaggcccctacgacagaccaggagccggccggggttacaactctatcggtcgcggagccggattcgagcggatgagaagaggggcgtatggtggcggttacggaggttatgacgactatggtgggtacaatgatgggtacggctttgggtccgatcgcttcggcagggacctcaattattgcttcagtggaatgtcggaccatagatatggagacggcggatcctcctttcaatccactaccgggcattgtgttcacatgcgcggtctcccatacagagctaccgaaaacgatatctacaactttttcagtcctctcaatccaatgcgagtgcacatcgagatcggccctgacggtcgcgtcactggcgaggctgacgtagaatttgctactcacgaggacgcagtggctgccatggctaaagataaggctaatatgcagcacaggtatgtcgagttgttccttaacagtacggccgggaccagtggcggggcttacgaccactcatatgtcgaactatttctcaattccaccgccggagcctcgggtggggcttacgggtctcagatgatgggtggaatgggcctctcaaaccagtcttcctacggcggcccagcatcccagcagttgagtgggggttatggcgggggatatggtggccagtcatctatgtctggttatgaccaggtcttgcaggagaactccagtgattaccaaagcaacctagcctag

SEQ ID NO: 30292 - DNA, 1350 bp, Artificial Sequence
  derived and/or modified sequence
atgatgctgagcaccgagggccgggagggcttcgtggtgaaggtgcgaggtttgccttggagttgttctgcggacgaagtgatgaggtttttttctgactgcaagatccagaacggcacaagtggaattcgcttcatatatactcgggaaggacgcccatctggagaagccttcgtggagctcgagtcagaggaggaggtgaagctagcacttaagaaggatcgagagacaatgggccacaggtacgtggaagtatttaagagcaatagtgtagagatggactgggttctgaagcacacaggtccaaacagcccagatacagctaatgatggtttcgtgcgtttgcgaggattgcccttcgggtgctctaaggaggaaatcgtgcaattcttttccggcttggaaatcgtcccaaacggcatgactttacctgttgacttccagggcagaagcacaggggaggcattcgtacagttcgcatctcaggagatcgcggaaaaagctttgaaaaagcataaggagcgcatcggacaccgttatatcgagattttcaagtcctcacgggcagaggttcgaacccactacgaccctccgcggaagctgatggccatgcaacggccgggcccctacgaccggcctggcgccggcagagggtacaatagcattggtaggggggcgggctttgagaggatgagaagaggagcatacggaggcggctacggaggatacgatgattacggcggctacaatgacgggtacggcttcggttccgacagattcggtcgcgatttaaactactgcttttcgggcatgagcgatcatcggtacggggacggcggcagttcctttcagtctactacaggtcattgcgttcacatgaggggcctcccttaccgcgccacggaaaacgatatctacaatttttttagtccgttgaaccccatgcgtgtccatatagaaattggcccagatggtagagtgactggtgaagcggacgtggaatttgctacacatgaagacgccgtcgccgccatggctaaagacaaggccaacatgcagcacagatatgttgagcttttcttgaactccactgcaggtacaagcggaggcgcctacgatcactcctacgtggaactcttccttaactctaccgctggcgcctcaggaggggcctatggatcgcagatgatgggcggaatgggtctgtcgaaccagtctagctatgggggccccgcctctcagcaactgagtggtggatatggtggcggatacggagggcagagctccatgtccgggtacgaccaagtactccaggagaattcatccgattaccagtcaaacctggcatag

SEQ ID NO: 30293 - DNA, 1350 bp, Artificial Sequence
  derived and/or modified sequence
atgatgctgtcgacagagggcagggagggattcgtcgtaaaggtccggggtcttccttggtcatgctcagcagatgaagtgatgcgcttcttctcggattgtaaaatccagaacgggacttccggaatccggtttatttacactcgggaagggaggcccagcggcgaggccttcgtcgagctcgaatccgaggaggaagtgaagcttgctttaaaaaaagatcgcgagacaatgggacacaggtatgtcgaggtttttaagagtaatagtgtggagatggactgggtactaaaacacaccggtccaaatagtcccgacacagcaaatgatggctttgtgcgtctcaggggcctacccttcggttgcagcaaggaagagatcgtgcagttcttttccggactcgagatcgttcccaacggtatgacactgcctgtagacttccaaggtaggagcaccggtgaggccttcgtccagttcgcttcccaagagattgccgaaaaggccctcaaaaaacacaaggagaggattgggcaccggtacatcgaaatctttaagagcagcagagcggaagtgcgtacgcactatgaccccccaaggaagttgatggcaatgcagcgtcccggaccgtacgaccgccctggcgcagggagaggttacaactccattggcagaggggctggatttgaacggatgcgaaggggagcctacggcggaggctacggaggttatgatgactacgggggttacaatgacggctacggcttcggatcggacagattcggcagagatttgaactactgtttcagtggcatgtccgaccatagatacggggacggcggatcatccttccagtccactactgggcattgcgtgcacatgcgcggactaccttaccgcgctactgagaatgacatctacaattttttttcacctttaaaccctatgcgcgtgcacatcgaaatcgggccagacggcagagtgactggtgaggcggatgttgagttcgcaacccatgaagatgctgtggcagctatggctaaagataaagccaatatgcaacaccgatacgttgagctgtttttgaacagtaccgcgggaacgagtggaggggcatatgaccactcctacgttgaattgtttctcaactctacggcaggggcttctggaggcgcttatgggagccagatgatgggcggtatgggactgtccaatcagtcctcctatggcggtccagcaagtcaacagctttccggaggatatggcggaggatacggtgggcaatcctcgatgtcaggctacgatcaagtgttgcaagagaactcttccgactaccagtctaacctggcttag

SEQ ID NO: 30294 - protein, 1193 aa, Artificial Sequence
  derived and/or modified sequence
MMFRSDRMWSCHWKWKPSPLLFLFALYIMCVPHSVWGCANCRVVLSNPSGTFTSPCYPNDYPNSQACMWTLRAPTGYIIQITFNDFDIEEAPNCIYDSLSLDNGESQTKFCGATAKGLSFNSSANEMHVSFSSDFSIQKKGFNASYIRVAVSLRNQKVILPQTSDAYQVSVAKSISIPELSAFTLCFEATKVGHEDSDWTAFSYSNASFTQLLSFGKAKSGYFLSISDSKCLLNNALPVKEKEDIFAESFEQLCLVWNNSLGSIGVNFKRNYETVPCDSTISKVIPGNGKLLLGSNQNEIVSLKGDIYNFRLWNFTMNAKILSNLSCNVKGNVVDWQNDFWNIPNLALKAESNLSCGSYLIPLPAAELASCADLGTLCQDGIIYRISVVIQNILRHPEVKVQSKVAEWLNSTFQNWNYTVYVVNISFHLSAGEDKIKVKRSLEDEPRLVLWALLVYNATNNTNLEGKIIQQKLLKNNESLDEGLRLHTVNVRQLGHCLAMEEPKGYYWPSIQPSEYVLPCPDKPGFSASRICFYNATNPLVTYWGPVDISNCLKEANEVANQILNLTADGQNLTSANITNIVEQVKRIVNKEENIDITLGSTLMNIFSNILSSSDSDLLESSSEALKTIDELAFKIDLNSTSHVNITTRNLALSVSSLLPGTNAISNFSIGLPSNNESYFQMDFESGQVDPLASVILPPNLLENLSPEDSVLVRRAQFTFFNKTGLFQDVGPQRKTLVSYVMACSIGNITIQNLKDPVQIKIKHTRTQEVHHPICAFWDLNKNKSFGGWNTSGCVAHRDSDASETVCLCNHFTHFGVLMDLPRSASQLDARNTKVLTFISYIGCGISAIFSAATLLTYVAFEKLRRDYPSKILMNLSTALLFLNLLFLLDGWITSFNVDGLCIAVAVLLHFFLLATFTWMGLEAIHMYIALVKVFNTYIRRYILKFCIIGWGLPALVVSVVLASRNNNEVYGKESYGKEKGDEFCWIQDPVIFYVTCAGYFGVMFFLNIAMFIVVMVQICGRNGKRSNRTLREEVLRNLRSVVSLTFLLGMTWGFAFFAWGPLNIPFMYLFSIFNSLQGLFIFIFHCAMKENVQKQWRQHLCCGRFRLADNSDWSKTATNIIKKSSDNLGKSLSSSSIGSNSTYLTSKSKSSSTTYFKRNSHTDNVSYEHSFNKSGSLRQCFHGQVLVKTGPC

SEQ ID NO: 30295 - DNA, 6849 bp, Artificial Sequence
  derived and/or modified sequence
ccaagtacctagggtggtggccgagtcccgcctcccgccagcgggggcgaggacctgcgacgcgcacccctgcctggcccggtctcctcagcaccagccccacgcacaccctacttcctcagcttctcgccctcaccctgccaacttccctgcgaggagggacctgccgccagcctgcttcctcgtccgcaggccctgcgctgaacgctgccgcgcccagggttcaccttgcgccgtcgggaaagcccatgaactctccagaaacggcgtaaaggagggtcccgccgcggcgcagggctggggcgcctgggttccccctgggtggagcagcggcagcagagcgggaaagtggtggaggatgatcttgcggccaaaggggacctcggcgcagtaatgtcaacatgatgtttcgctcagatcgaatgtggagctgccattggaaatggaagcccagtcctctcctgttcttatttgctttatatatcatgtgtgttcctcactcagtgtggggatgtgccaactgccgagtggttttgtccaacccttctgggacctttacttctccatgctaccctaacgactacccaaacagccaggcttgcatgtggacgctccgagcccccaccggttatatcattcagataacatttaacgactttgacattgaagaagctcccaattgcatttatgactcattatcccttgataatggagagagccagactaaattttgtggagcaactgccaaaggcctatcatttaactcaagtgcgaatgagatgcatgtgtccttttcaagtgactttagcatccagaagaaaggtttcaatgccagctacatcagagttgccgtgtccttaaggaatcaaaaggtcattttaccccagacatcagatgcttaccaggtatctgttgcaaaaagcatctctattccagagctcagtgctttcacactctgctttgaagcaaccaaagttggccatgaagacagtgattggacagctttctcctactcaaatgcatccttcacacaattgctcagttttggaaaggccaagagtggctactttctatccatttctgattcaaaatgtttgttgaataatgcattacctgtcaaagaaaaagaagacatttttgcagaaagctttgaacagctctgccttgtttggaataattctttgggctctattggtgtaaatttcaaaagaaactatgaaacagttccatgtgattctaccattagtaaagttattcctgggaatgggaaattgttgttgggctccaatcaaaatgaaattgtctctctaaaaggggacatttataactttcgactttggaattttaccatgaatgccaaaatcctctccaacctcagctgtaatgtgaaagggaatgtagtcgactggcaaaatgacttctggaatatcccaaacctagctctgaaagctgaaagcaacctaagctgtggttcctacctgatcccgctcccagcagcagaactggccagctgtgcagacctggggaccctctgtcaagatggaattatctatagaatatccgtagtgattcagaacatccttcgtcaccctgaggtaaaagtacagagcaaggtggcagaatggctcaattcaaccttccaaaattggaactacacggtttatgtcgttaatatcagttttcacctgagtgctggagaggacaagattaaagtcaagagaagccttgaggatgagccaaggttggtgctttgggcccttctagtttacaatgctaccaacaatactaatttggaaggaaaaatcattcagcagaagctcctaaaaaataatgagtccttggatgaaggcttgaggctacatacagtgaatgtgagacaactgggtcattgtcttgccatggaggaacccaaaggctactactggccatctatccaaccttctgaatacgttcttccttgtccagacaagcctggcttttctgcttctcggatatgtttttacaatgctaccaacccattggtaacctactggggacctgttgatatctccaactgtttaaaagaagcaaatgaagttgctaaccagattttaaatttaactgctgatgggcagaacttaacctcagccaatattaccaacattgtggaacaggtcaaaagaattgtgaataaagaagaaaacattgatataacacttggctcaactctaatgaatatattttctaatatcttaagcagttcagacagtgacttgcttgagtcatcttctgaagctttaaaaacaattgatgaattggccttcaagatagacctaaatagcacatcacatgtgaatattacaactcggaacttggctctcagcgtatcatccctgttaccagggacaaatgcaatttcaaattttagcattggtcttccaagcaataatgaatcgtatttccagatggattttgagagtggacaagtggatccactggcatctgtaattttgcctccaaacttacttgagaatttaagtccagaagattctgtattagttagaagagcacagtttactttcttcaacaaaactggacttttccaggatgtaggaccccaaagaaaaactttagtgagttatgtgatggcgtgcagtattggaaacattactatccagaatctgaaggatcctgttcaaataaaaatcaaacatacaagaactcaggaagtgcatcatcccatctgtgccttctgggatctgaacaaaaacaaaagttttggaggatggaacacgtcaggatgtgttgcacacagagattcagatgcaagtgagacagtctgcctgtgtaaccacttcacacactttggagttctgatggaccttccaagaagtgcctcacagttagatgcaagaaacactaaagtcctcactttcatcagctatattgggtgtggaatatctgctattttttcagcagcaactctcctgacatatgttgcttttgagaaattgcgaagggattatccctccaaaatcttgatgaacctgagcacagccctgctgttcctgaatctcctcttcctcctagatggctggatcacctccttcaatgtggatggactttgcattgctgttgcagtcctgttgcatttcttccttctggcaacctttacctggatggggctagaagcaattcacatgtacattgctctagttaaagtatttaacacttacattcgccgatacattctaaaattctgcatcattggctggggtttgcctgccttagtggtgtcagttgttctagcgagcagaaacaacaatgaagtctatggaaaagaaagttatgggaaagaaaaaggtgatgaattctgttggattcaagatccagtcatattttatgtgacctgtgctgggtattttggagtcatgttttttctgaacattgccatgttcattgtggtaatggtgcagatctgtgggaggaatggcaagagaagcaaccggaccctgagagaagaagtgttaaggaacctgcgcagtgtggttagcttgacctttctgttgggcatgacatggggttttgcattctttgcctggggacccttaaatatccccttcatgtacctcttctccatcttcaattcattacaaggcttatttatattcatcttccactgtgctatgaaggagaatgttcagaaacagtggcggcagcatctctgctgtggtagatttcggttagcagataactcagattggagtaagacagctaccaatatcatcaagaaaagttctgataatctaggaaaatctttgtcttcaagctccattggttccaactcaacctatcttacatccaaatctaaatccagctctaccacctatttcaaaaggaatagccacacagataatgtctcctatgagcattccttcaacaaaagtggatcactcagacagtgcttccatggacaagtccttgtcaaaactggcccatgctgatggagatcaaacatcaatcatccctgtccatcaggtcattgataaggtcaagggttattgcaatgctcattcagacaacttctataaaaatattatcatgtcagacaccttcagccacagcacaaagttttaatgtctttaagaaaaagaaatcaatctgcagaaatgtgaagatttgcaagcagtgtaaactgcaactagtgatgtaaatgtgctattacctaggtaactgcatatatataaggaatgtattttgttaagaaggcttttgtgaaattcagaatttttctttttaatatatttcttccatggaagagttgtcatcactaaaacttcagtactgagagtaacatgactcagtagccacagaagctatgatttgtaaaatatataattgaatcagagtaatcataatgcaggggagacattcaaattagagacaagggagaagcaatgctgaggaagaccctagatagagctcattttactccacctaatcgttatatctggatatacccattttctgcatcttctttctcaacaataaaaaatgtaactattttgaatgcccacaaatcccattccagtgttactttctgtgaatgcagtaccatattctcattttcaatgacatttcaaccacaggcagaaaagactgtttactccttgacccaaagattaaaaaggattttttattattttaaatattacaccttcagaaccataacatgcttaagaaaactttcccaaaatgttgacctagttaaatgaggctatataaatttctaatattttacttattctattcaaggcatagggccaaagcattaagtataatttaatcccatacattcgagttaagtttagtgttgatgttccatcattctggacctcccaggagttgtttaagaatgaatctcttacacctctacttttgcccctctactgtatattaagcccataggcttgtgggaggaaggagaatttccattaggcaagctgtatgcagtggaattttccttttaggagacacacaattaagactctctggttctgtccttgctttggagactttaagacatttcctaaagcacaaataaaagcctcgtatttccccattgagagttttgttccaaggaatatgaagtgagacatatgggtgagtcataataatcaaaataatttatgaagagctgggtctgcaatagctagtctaaaaactacttgtgtgtcagtcctctggttatagtatataagagcctgaggaggtctggcaagatagatggtgtattatttatggatcaggctgctgcatacaaaccttgcatactattatgcagcttacctaactctcagactattctgagtaatgcttgcttgctaatgaatgtataggagaccacattgtaattgttcttagatgatggagtccatgcagtttcttagaaatcggtctcagtgcatgctgtgctttttcacatttgctctgggttatctgggaagtatcaggttctgggaggcaacagcattaagtgataagaaaaggagacattctggcaaagccaatctgcttaaaggcaaagtccagaacctggaacctagaggcctttctctctgcacgaaaaacaggtagtttgcagtctgagatatgggagagcttttaggctacacagcaacccaagggacctctcaccttttgctgagcttcaatcaggaagctatttgcctggctccagcagatgatgagataatgaggtagtgggttttttattactgttccattttgcaacatcctgcaacaccatcctgggagacaagagcattacccagcttggctttcacgggggagggttgtattcagtaaaaaagaatagtaaatataaggtcactgagattctaagtaagatagtaaatctaaggtcactgagccaaatccttttcaataggcatatattaacaggctgcttattttggcggaggttacatatggatgaaaatgaatcttagtcactgaatattcatatacatttcccccaaaaccttagacattcatagtagattttaattagttagctttctaactagtcagatttctgcccaaagtgcttagtcaatagtaattaagatatagcttcaaaaatggctttgcttttgatttctactcatattcgtatggctccagaaaaatatttttttcatatttgacaatgtcagctccactttagaaattttcaataaccagatgagaaaaaaattaagaaattgctcaagggaaacatttgtaaatggatttgaaagattgagccaaattctgttgtcagttctaagcatgcagttctcacctccatttagtcccccatcagaacagaggtcaggaatttagctggggagcctaaatttagttcagcttacctttgagaatagcatcaattcagactctcttttcattatgttttcttttctttttccctctttttaaactacattgtgttagagtcatagtctaggatcctgagagattttccattcttgtcaccattcacttgcattgtaaagattttctttgtctgttgttggcatagattcttttgtacatatttatttatttgtgtttatatatgtcaattggtttcctttcttagcttgatattgcctagctttgttgttttaattaactttctattagagagactgtatatattttttctaaatactttgtgaaatcatttttggtagcaatatctttgaatatgatgaataaaagtgactgtgagtgcaaatagaattagcagtaagaagctactctagctaatttgccattttacttaaatggaaaatgtttttcaaataaatacttatgttgttc

SEQ ID NO: 30296 - DNA, 3582 bp, Artificial Sequence
  derived and/or modified sequence
atgatgttccgtagtgatagaatgtggtcctgtcattggaaatggaaacccagccccctgctttttctgttcgcactctacatcatgtgtgtgccacactccgtttggggatgtgcaaactgccgagttgttctcagcaatccatccggtacattcacatcaccgtgttatccaaacgactatcccaatagccaggcttgtatgtggacccttcgggctcccaccgggtatataatacagatcaccttcaacgacttcgatatcgaggaagcaccgaactgtatctatgatagcctgagcctagataacggggaaagtcagacaaaattctgtggggctacagctaagggtttgagtttcaatagttcagcaaatgagatgcatgttagcttcagctctgactttagtatccagaaaaaaggatttaacgccagttacatcagggttgctgtcagtctgaggaaccaaaaagtcatcctgccgcagacatcagacgcttaccaagtaagcgtagccaaatccatttctatacccgagctctctgcgtttactctgtgtttcgaggccacaaaggtaggccacgaggactcagattggactgccttttcatatagcaacgcaagcttcacacaactgctgtcatttggcaaggcgaaaagtggctatttcctctccatttcagacagtaagtgtctattaaacaacgccttacctgtaaaagaaaaagaggacattttcgcagagtcctttgagcagctgtgcctggtctggaacaattcgctagggtcaataggagtaaactttaaacggaactatgagactgtcccgtgtgattccacaataagcaaagttatcccgggcaacgggaagctcttgcttgggtccaatcagaacgagatcgtatcactgaagggagacatctacaacttcagactgtggaacttcacaatgaatgctaagattttgtccaacttgagttgcaacgttaaaggcaacgtggtggattggcagaacgacttctggaatatccccaatttggccttgaaggccgagtctaacctgagttgtggcagttacctgatacctcttcctgccgccgaattagccagctgcgccgacttgggcaccctgtgtcaggatgggatcatctaccggatctccgtggtcatacaaaacattctgaggcaccctgaagtcaaagtccagagcaaggtggccgaatggctgaatagtacatttcaaaattggaactatacagtgtacgttgtgaatatttcgttccacttgagcgctggggaggataagattaaggtcaaaagatccctcgaggatgagccacgcctggttctgtgggccctcctggtttataatgctaccaacaataccaatctggaaggtaagatcatccagcaaaagctgttaaaaaataacgagagtctggatgaaggtctgcggctccatacagtaaatgttcggcagctgggtcactgcctcgctatggaggagccaaagggttattactggccgagtatacagccatcagagtacgttttgccttgtcccgataagccaggcttttcagcatccagaatatgcttctacaacgcgacaaaccctctggtgacttattggggccccgtagatatctctaattgtctcaaagaagccaatgaggtggccaaccaaattctcaatctgacagcggacggccaaaaccttaccagcgctaacataaccaacatcgtcgagcaggtgaaacggattgtgaacaaggaggagaatatcgatattacactgggaagcacgttgatgaacatattctcaaatatcttaagcagctctgacagcgatttgctggagtcgagctcagaggcccttaaaaccattgacgaactcgcattcaagatcgacctgaattcgacctcccatgtgaacataaccactagaaatctggccttgtccgtcagtagcctgctccctggcacaaacgccatctcaaatttctctattgggttaccatcaaacaatgagtcatatttccaaatggatttcgagtctggacaagtcgaccccctcgcctctgtaatcctgccccccaatcttcttgagaatttgtcgccagaggattccgtactagtgaggcgggctcagttcactttctttaataaaaccggattatttcaggacgtaggccctcaacgcaaaactctcgtcagctacgtgatggcatgctccataggaaatataaccattcagaaccttaaggacccagtgcagattaagattaaacatacaagaacccaagaagttcatcaccctatttgtgctttttgggatctaaacaaaaacaaatcctttggcggctggaacacttctgggtgcgtggctcacagagactcagacgcctccgagaccgtgtgtctttgtaatcatttcacccactttggcgtgcttatggacctccctcggtccgcatctcaactagatgcccgaaacaccaaagtgttgacgtttatcagctacatcgggtgcggaatctccgctatcttttccgccgcaacattgctcacatacgtagcttttgagaaacttcgccgcgactaccccagcaaaatcctgatgaatctcagcacggcactactgttcttgaacctccttttccttctggacggctggataacatccttcaacgttgatggcctgtgcatcgccgtcgccgttctgctgcacttttttttattggccactttcacctggatgggcctcgaagctattcatatgtacatcgcattggtcaaagtattcaatacctacattcgcaggtatatcctcaaattttgcatcatcggctggggattgcctgcgttagttgtgtctgtggtgctcgcctcaaggaataataacgaggtatacggtaaagagtcttatggtaaagagaaaggtgacgagttctgttggatccaggatcccgtgattttctacgttacatgtgctggctactttggggtgatgttcttcttaaacatcgctatgtttattgtcgtcatggttcagatctgcggacggaacggtaagcgatcaaatcgtacattgagagaggaggtgttgaggaatttgcggagcgtggtctctctgactttcctacttggcatgacatggggttttgccttcttcgcctgggggcccctaaatatcccattcatgtatctgttttcaatctttaacagcttacaggggctgtttatctttatcttccactgtgccatgaaggaaaatgtgcagaagcaatggagacagcatttatgttgtggaaggtttaggctggcggacaattctgactggagcaaaaccgccaccaacatcatcaaaaaatcttcagataatttgggtaagtcattgtcatcatcaagcattggatcaaatagcacatacctgacgtctaaaagtaaaagctcctcaacgacgtattttaaacgaaacagccacaccgacaatgtttcctacgaacatagctttaacaagagtggtagcctacggcaatgtttccacgggcaggttttggtgaaaacaggaccctgctag

SEQ ID NO: 30297 - DNA, 3582 bp, Artificial Sequence
  derived and/or modified sequence
atgatgttcagaagtgacaggatgtggagctgccactggaagtggaagcccagccccctgctcttcctgtttgccctgtacatcatgtgtgtgccccacagcgtgtggggctgtgccaactgccgggtggtgctgagcaaccccagcggcaccttcaccagcccctgctacccaaatgactaccccaacagccaggcctgcatgtggaccctgcgggcccccaccggctacatcatccagatcaccttcaatgactttgacatcgaggaggcccccaactgcatctatgacagcctgagcctggacaatggagagagccagaccaagttctgtggggccacagccaagggcctgtccttcaacagcagcgccaatgagatgcacgtgtccttcagcagtgacttcagcatccagaagaagggcttcaatgccagctacatccgggtggccgtgtccctgaggaaccagaaggtgatcctgccccagaccagtgatgcctaccaggtgtctgtggccaagagcatcagcatccctgagctgagcgccttcaccctgtgctttgaggccaccaaggtgggccatgaagattctgactggacagccttctcctacagcaatgccagcttcacccagctgctgagctttgggaaggccaagagcggctacttcctgagcatcagtgacagcaagtgcctgctgaacaatgccctgcctgtgaaggagaaggaggacatctttgctgagagctttgagcagctgtgcctggtgtggaacaacagcctgggcagcattggagtgaacttcaagaggaactatgagaccgtgccctgtgacagcaccatcagcaaggtgattcctggaaatggcaagctgctgctgggcagcaaccagaatgagatcgtgtccctgaagggggacatctacaacttccggctgtggaacttcaccatgaatgccaagatcctgagcaacctgagctgcaatgtgaagggaaatgtggtggactggcagaatgacttctggaacatccccaacctggccctgaaggccgagagcaacctgagctgtggcagctacctgatccccctgcctgctgctgagctggccagctgtgccgacctgggcaccctgtgccaggacggcatcatctaccgcatctctgtggtgatccagaacatcctgcggcaccctgaggtgaaggtgcagagcaaggtggccgagtggctgaacagcaccttccagaactggaactacacagtgtatgtggtgaacatctccttccacctgtctgctggggaggacaagatcaaggtgaagaggagcctggaggatgagccccggctggtgctgtgggccctgctggtgtacaatgccaccaacaacaccaacctggagggcaagatcatccagcagaagctgctgaagaacaatgaaagcctggatgagggcctgcggctgcacacagtgaatgtgcggcagctgggccactgcctggccatggaggagcccaagggctactactggcccagcatccagcccagtgaatatgtgctgccctgcccagacaagccaggcttcagcgccagccgcatctgcttctacaatgccaccaaccccctggtgacctactggggccctgtggacatcagcaactgcctgaaggaggccaatgaggtggccaaccagatcctgaacctgacagcagatggccagaacctgaccagcgccaacatcaccaacatcgtggagcaggtgaagagaattgtgaacaaggaggagaacatcgacatcaccctgggcagcaccctgatgaacatcttcagcaacatcctgagcagcagtgacagcgacctgctggagagcagcagcgaggccctgaagaccattgatgagctggccttcaagattgacctgaacagcaccagccacgtgaacatcaccaccaggaacctggccctgtctgtgagcagcctgctgcccggcaccaatgccatcagcaacttcagcatcggcctgcccagcaacaatgaaagctacttccagatggactttgagagcggccaggtggaccccctggccagcgtcatcctgccccccaacctgctggagaacctgagccctgaggacagcgtgctggtgcggcgggcccagttcaccttcttcaacaagacaggcctcttccaggatgtgggcccccagaggaagaccctggtgtcctatgtgatggcctgcagcatcggcaacatcaccatccagaacctgaaggaccctgtgcagatcaagatcaagcacaccaggacccaggaggtgcaccaccccatctgtgccttctgggacctgaacaagaacaagagctttggaggctggaacaccagcggctgtgtggcccaccgggacagtgatgccagcgagaccgtgtgcctgtgcaaccacttcacccactttggagtgctgatggacctgcccaggtctgccagccagctggatgccaggaacaccaaggtgctgaccttcatctcctacatcggctgcggcatcagcgccatcttctctgctgccaccctgctgacctacgtggcctttgagaagctgcggcgggactaccccagcaagatcctgatgaacctgagcacagccctgctcttcctgaacctgctcttcctgctggatggctggatcaccagcttcaacgtggatggcctgtgcatcgctgtggccgtgctgctgcacttcttcctgctggccaccttcacctggatgggcctggaggccatccacatgtacatcgccctggtgaaggtgttcaacacctacatccgccgctacatcctgaagttctgcatcatcggctggggcctgcctgccctggtggtgtctgtggtgctggccagcaggaacaacaatgaggtgtatggcaaggagagctatggcaaggagaagggagatgagttctgctggatccaggaccccgtcatcttctacgtgacctgtgccggctactttggagtgatgttcttcctgaacatcgccatgtttattgtggtgatggtgcagatctgtggcagaaatggcaagaggagcaacagaaccctgcgggaggaggtgctgaggaacctgcggtctgtggtgtccctgaccttcctgctgggcatgacctggggctttgccttctttgcctggggccccctgaacatccccttcatgtacctgttcagcatcttcaacagcctgcagggcctcttcatcttcatcttccactgtgccatgaaggaaaatgtgcagaagcagtggaggcagcacctgtgctgcggccgcttccggctggccgacaacagcgactggagcaagacagccaccaacatcatcaagaagagcagtgacaacctgggcaagagcctgagcagcagcagcatcggcagcaacagcacctacctgaccagcaagagcaagagcagcagcaccacctacttcaagaggaacagccacacagacaacgtgtcctatgagcacagcttcaacaagagcggcagcctgcggcagtgcttccacggccaggtgctggtgaagacaggcccctgctag

SEQ ID NO: 30298 - DNA, 3582 bp, Artificial Sequence
  derived and/or modified sequence
atgatgttccggagcgaccggatgtggagctgccactggaagtggaagccatctccactgttgttcctgttcgcactatacatcatgtgtgtcccccacagtgtgtgggggtgcgccaattgcagggtggtgctgagcaacccgtccggaacgtttacttctccatgctatcccaacgactatcccaacagccaggcctgtatgtggaccctgagagccccgacagggtacattatacagattacattcaatgattttgacatcgaggaagcacccaattgcatctacgatagcttatctctcgataacggtgagagccagacaaaattctgtggggccacagctaagggattgtcattcaacagcagcgcaaatgagatgcacgtgtcgttttcttctgatttcagtatccagaaaaaaggctttaacgccagctacattcgagttgcggtgtcgctaaggaatcagaaagtcattctgccacagacttccgacgcataccaggtctcggtggccaaaagcatttctatccctgagcttagcgccttcacactttgctttgaggcgaccaaggtcggtcatgaggattccgactggacagccttctcctactcaaatgccagcttcactcagcttcttagttttgggaaggccaaaagcggatattttctcagcatcagtgattccaagtgcttgttaaacaatgccctgccagtgaaggagaaggaggacatattcgcagaaagcttcgaacagttgtgtctggtctggaataattctctggggtcaataggcgtgaacttcaaacggaactacgaaactgtgccctgcgactcaacaatcagcaaggtgatccctggcaatggtaagcttcttctcggtagcaaccagaatgaaatagtctctctgaaaggcgatatatacaactttcgcctgtggaatttcaccatgaacgccaaaatcctgagcaacctgagctgcaatgtcaaaggcaatgtagtggattggcagaacgacttctggaatattcctaacttggcccttaaggcggagtcaaatctctcctgtggaagctacctgatccctctccccgccgccgagctagcctcgtgcgcagacctaggcaccctgtgccaggatggcatcatctatcgtattagtgtagtcatacagaacatcctccgtcacccagaggtcaaggtccaaagcaaagttgccgaatggctgaattccacattccagaattggaactatacagtctatgtcgttaatatatcatttcacttgtccgctggtgaggacaaaatcaaggtcaagagaagtctcgaggacgaaccccggttggttttatgggcacttctcgtatacaatgctaccaataacacaaacctggaaggcaaaattatccagcaaaagcttctcaagaataacgaatcactggacgaggggctgcggctccacacggtcaacgttcggcagctcggacattgtctggctatggaagaacctaagggatactactggccaagcatccagccgtccgagtatgtgctcccctgccccgataagcctggatttagtgcaagtagaatttgtttctacaacgcaaccaatcccctcgttacgtactggggacctgtagacatatccaactgtctcaaagaggctaacgaggtggcaaaccagatcctgaacctgaccgcggacgggcagaacctgacatctgctaacataacaaacatcgtggaacaggtcaaacgtatcgtgaataaggaagaaaatatcgacattaccctcggtagcacactgatgaatatttttagcaacatcctatctagtagcgatagcgatctcctggaaagctcctccgaggcactcaaaaccatcgatgagctcgcgttcaagatcgatctgaattctaccagtcatgtgaatattactacaaggaacctcgccctctccgtgagctcccttctgccaggtactaatgccattagcaatttctctataggactcccatctaacaacgaaagctactttcaaatggacttcgagagcgggcaggtggaccccctcgcctctgtgatcctacctcccaatctcctcgagaatctgagtcctgaagattcggtgctagtgcggagagcccagtttacatttttcaataagaccggtctgttccaggacgtggggccccagagaaagacactcgtgagctatgttatggcatgttctattggaaacattacaattcagaacttaaaggaccctgtacagatcaaaattaagcatacgaggactcaagaagtgcaccatcctatctgcgcattctgggatttgaataagaataagtcttttggtggctggaatacctcgggctgcgtcgcccatcgagattccgacgcctcagagacagtctgcctgtgcaatcactttacacactttggggtcctcatggacctgccacggtctgccagccagttggacgcccggaatacaaaggtgctcactttcatttcttatatcgggtgcggcatcagcgccatcttcagtgctgcaaccctgctcacttacgtggccttcgagaagcttagaagggattatcctagcaagatcttgatgaacctgtccactgccctgctcttcctgaatctgctgtttctgctagacggctggatcacatctttcaatgtggacggcctgtgtatcgctgttgccgtgctgctccactttttcctcctggctaccttcacatggatggggttggaagcaattcatatgtacattgccttagtgaaggtattcaacacttatatccggcggtacattctgaagttttgtattatcggttggggactgcccgccctggtggtgtccgtggttctggcctcacggaacaataatgaggtctatggcaaggaatcttatggaaaggagaagggtgatgagttttgctggatccaagaccccgtcattttttacgtaacatgcgccgggtattttggcgtgatgttcttcctcaatattgccatgtttattgtggtgatggtacagatctgtgggcgtaacgggaagaggtctaaccgaaccctacgtgaggaggtgttaagaaacctgcgctcggtagtttcgttaaccttcttactgggtatgacctggggttttgcattttttgcctggggacctctcaacattccatttatgtatctgttctcaatattcaacagcctgcaggggttgtttatttttatcttccactgcgcaatgaaggagaacgtgcagaaacagtggcgccaacatctctgctgtggtcgatttaggttagctgacaactccgattggtcgaagacagctacaaacatcatcaaaaagagttcagacaatttaggcaagagtctgagtagcagcagcatcggcagcaattcaacgtatctcacgagtaagagcaaaagctcaagtactacatatttcaagcgaaactcgcacaccgacaatgtctcttatgagcactcattcaacaaaagcggatctctgcgccagtgtttccatggccaggtgctggttaagactggaccgtgttag

SEQ ID NO: 30299 - DNA, 3582 bp, Artificial Sequence
  derived and/or modified sequence
atgatgttcagatctgataggatgtggtcctgtcactggaagtggaaaccatctcctctgctttttctgtttgccctctacataatgtgcgtacctcacagtgtttggggatgcgccaattgtcgggtagtgctctcaaacccttccggcacattcacaagcccctgctacccaaatgattatcctaactcccaggcctgcatgtggacactgagggcgcctacaggctacatcattcagatcacgttcaacgattttgacatcgaagaggctcccaactgcatctatgacagtctctcgttagacaacggggaaagtcaaactaagttttgtggggctaccgcgaaaggactgagctttaatagctctgctaacgagatgcacgtcagtttcagtagcgatttctctatccagaagaaaggatttaacgccagctatattcgcgtagcggtaagtctgaggaaccagaaagtcattctcccccagacgagcgacgcttaccaggtaagtgtggctaaaagcattagtatcccagagctttcagcctttacgctatgctttgaggcgaccaaggtgggccatgaggactctgattggactgctttcagctactctaatgcaagtttcacccagttactgagcttcggaaaggccaagagcggttacttcctttccatctcggactcaaagtgcctattgaataacgccttacccgtcaaagaaaaagaggacatctttgcagagagctttgagcagttgtgcttagtctggaacaatagtctcggatccatcggcgtcaatttcaagaggaattatgaaacagtgccatgcgacagcaccatcagtaaagttatccctgggaacgggaagctgcttttgggctctaaccagaacgagatcgtaagcctgaagggggatatttacaactttcggctgtggaactttacaatgaatgccaaaattttgtctaatctgagctgtaatgtaaaaggaaacgtcgttgattggcagaatgacttttggaacataccaaacctggccttgaaagccgaatctaacctgtcgtgtggcagttatctaattcccctgcccgcagcagagttagcttcctgtgccgaccttggcacactgtgccaggatggtataatctacaggattagcgtagtcatccagaatatcttgcgccaccctgaggtgaaagtccagagtaaggtggctgagtggctgaactccacgttccagaattggaactacaccgtatacgtagttaacatctcattccatctgtccgccggtgaggacaagatcaaagtgaagaggtcactcgaggacgaacctagactagtgttatgggctttgctggtctataatgctacaaataacaccaatttggaagggaaaatcattcagcagaagctcctaaagaacaatgagtcactggacgagggcctcaggctccatacggtgaatgttaggcaactgggccactgcctggccatggaagagccaaagggttactactggcccagcattcagcccagcgagtatgtcttgccatgtcctgacaagcccggtttctccgcttcccggatttgtttttacaatgccacaaacccgctggttacttattggggtcctgttgatatcagcaattgcctgaaggaagccaacgaggttgccaaccagatcttgaatttgactgcggatggccagaatctcacttccgccaatattacaaatatagtggaacaagtgaagcgcattgtcaataaggaagagaacatcgacatcacacttggaagcaccctgatgaatatcttcagcaacattctaagcagttcagattccgatctcctggaaagctcgagcgaagcactgaagacaatcgatgagttagccttcaagattgatctcaactctacatcacacgtcaacatcaccactcgcaatctggccctgagtgtgagctccctgttgcctgggacaaacgcaatctcaaactttagtattggtctgccttccaataatgaatcctattttcagatggacttcgagagcggccaggttgatccccttgccagcgtgattcttccaccaaatttgcttgagaacctgtcaccagaggactctgtgcttgtgcgacgcgcacagttcacattctttaataaaacgggattatttcaggacgtgggcccacaaaggaaaactctggtttcctacgtgatggcgtgttctatcggaaatatcacgatccaaaacttgaaagatcccgtacaaataaagataaaacatactaggactcaggaagtgcaccacccgatttgcgcattttgggacttgaataaaaacaagtcctttggcggttggaatacctcaggttgtgtcgctcaccgagatagtgatgcatcagaaaccgtttgcctatgtaatcacttcacccatttcggtgttctgatggatctccccagaagtgcttcacagttagatgctcgcaacacgaaggtcttaacttttattagttacatcgggtgtggcatcagcgctatcttctccgctgcgacgctgcttacctacgtggcttttgaaaagctgcggagggattaccctagtaaaattctgatgaacctgtcaaccgcattgctgtttttgaatcttttgttcctattagatggctggatcacctcatttaacgtggacggcctctgtatcgcagttgccgtgctcctgcactttttccttctggctacttttacttggatgggtttagaagccatacatatgtatatagcgctcgtcaaagtcttcaatacatacatccggcgatacatcctgaaattctgtatcataggatggggtctacctgctttggtggtaagcgtcgtgctggcgtcgcggaacaataacgaggtgtacggaaaagagtcttatggcaaagagaagggtgatgagttctgttggatccaggatcccgttattttctacgtaacgtgcgccggatacttcggcgtaatgttcttcttgaatattgcgatgttcatcgttgttatggtgcagatttgtggcagaaatggaaaaaggagtaacagaactctgcgggaggaagtactccgaaacctccggtccgtggtgtcattgacgttcctgctcggcatgacctggggctttgccttctttgcctggggcccactcaacatccccttcatgtatctgttctcgatatttaattctctccaggggttattcatcttcattttccattgcgctatgaaagagaatgtgcagaagcagtggcggcagcacctgtgctgcggacgctttaggctcgctgacaactccgactggtccaagacagctactaacatcatcaaaaagagttccgacaatctaggaaaaagtttgagtagtagttcaataggcagcaactcaacatacctcacctctaagtcaaagtcgagctcgacaacctacttcaagcgcaactcccatacagacaacgtctcatacgagcattcctttaacaaatctggcagtttaaggcagtgtttccatggccaagtgctcgtaaaaaccggcccatgttag

SEQ ID NO: 30300 - DNA, 3582 bp, Artificial Sequence
  derived and/or modified sequence
atgatgttcagaagcgacagaatgtggagctgccactggaagtggaagcccagccccctgctgttcctgttcgccctgtacatcatgtgcgtgccccacagcgtgtggggctgcgccaactgcagagtggtgctgagcaaccccagcggcaccttcaccagcccctgctaccccaacgactaccccaacagccaggcctgcatgtggaccctgagagcccccaccggctacatcatccagatcaccttcaacgacttcgacatcgaggaggcccccaactgcatctacgacagcctgagcctggacaacggcgagagccagaccaagttctgcggcgccaccgccaagggcctgagcttcaacagcagcgccaacgagatgcacgtgagcttcagcagcgacttcagcatccagaagaagggcttcaacgccagctacatcagagtggccgtgagcctgagaaaccagaaggtgatcctgccccagaccagcgacgcctaccaggtgagcgtggccaagagcatcagcatccccgagctgagcgccttcaccctgtgcttcgaggccaccaaggtgggccacgaggacagcgactggaccgccttcagctacagcaacgccagcttcacccagctgctgagcttcggcaaggccaagagcggctacttcctgagcatcagcgacagcaagtgcctgctgaacaacgccctgcccgtgaaggagaaggaggacatcttcgccgagagcttcgagcagctgtgcctggtgtggaacaacagcctgggcagcatcggcgtgaacttcaagagaaactacgagaccgtgccctgcgacagcaccatcagcaaggtgatccccggcaacggcaagctgctgctgggcagcaaccagaacgagatcgtgagcctgaagggcgacatctacaacttcagactgtggaacttcaccatgaacgccaagatcctgagcaacctgagctgcaacgtgaagggcaacgtggtggactggcagaacgacttctggaacatccccaacctggccctgaaggccgagagcaacctgagctgcggcagctacctgatccccctgcccgccgccgagctggccagctgcgccgacctgggcaccctgtgccaggacggcatcatctacagaatcagcgtggtgatccagaacatcctgagacaccccgaggtgaaggtgcagagcaaggtggccgagtggctgaacagcaccttccagaactggaactacaccgtgtacgtggtgaacatcagcttccacctgagcgccggcgaggacaagatcaaggtgaagagaagcctggaggacgagcccagactggtgctgtgggccctgctggtgtacaacgccaccaacaacaccaacctggagggcaagatcatccagcagaagctgctgaagaacaacgagagcctggacgagggcctgagactgcacaccgtgaacgtgagacagctgggccactgcctggccatggaggagcccaagggctactactggcccagcatccagcccagcgagtacgtgctgccctgccccgacaagcccggcttcagcgccagcagaatctgcttctacaacgccaccaaccccctggtgacctactggggccccgtggacatcagcaactgcctgaaggaggccaacgaggtggccaaccagatcctgaacctgaccgccgacggccagaacctgaccagcgccaacatcaccaacatcgtggagcaggtgaagagaatcgtgaacaaggaggagaacatcgacatcaccctgggcagcaccctgatgaacatcttcagcaacatcctgagcagcagcgacagcgacctgctggagagcagcagcgaggccctgaagaccatcgacgagctggccttcaagatcgacctgaacagcaccagccacgtgaacatcaccaccagaaacctggccctgagcgtgagcagcctgctgcccggcaccaacgccatcagcaacttcagcatcggcctgcccagcaacaacgagagctacttccagatggacttcgagagcggccaggtggaccccctggccagcgtgatcctgccccccaacctgctggagaacctgagccccgaggacagcgtgctggtgagaagagcccagttcaccttcttcaacaagaccggcctgttccaggacgtgggcccccagagaaagaccctggtgagctacgtgatggcctgcagcatcggcaacatcaccatccagaacctgaaggaccccgtgcagatcaagatcaagcacaccagaacccaggaggtgcaccaccccatctgcgccttctgggacctgaacaagaacaagagcttcggcggctggaacaccagcggctgcgtggcccacagagacagcgacgccagcgagaccgtgtgcctgtgcaaccacttcacccacttcggcgtgctgatggacctgcccagaagcgccagccagctggacgccagaaacaccaaggtgctgaccttcatcagctacatcggctgcggcatcagcgccatcttcagcgccgccaccctgctgacctacgtggccttcgagaagctgagaagagactaccccagcaagatcctgatgaacctgagcaccgccctgctgttcctgaacctgctgttcctgctggacggctggatcaccagcttcaacgtggacggcctgtgcatcgccgtggccgtgctgctgcacttcttcctgctggccaccttcacctggatgggcctggaggccatccacatgtacatcgccctggtgaaggtgttcaacacctacatcagaagatacatcctgaagttctgcatcatcggctggggcctgcccgccctggtggtgagcgtggtgctggccagcagaaacaacaacgaggtgtacggcaaggagagctacggcaaggagaagggcgacgagttctgctggatccaggaccccgtgatcttctacgtgacctgcgccggctacttcggcgtgatgttcttcctgaacatcgccatgttcatcgtggtgatggtgcagatctgcggcagaaacggcaagagaagcaacagaaccctgagagaggaggtgctgagaaacctgagaagcgtggtgagcctgaccttcctgctgggcatgacctggggcttcgccttcttcgcctggggccccctgaacatccccttcatgtacctgttcagcatcttcaacagcctgcagggcctgttcatcttcatcttccactgcgccatgaaggagaacgtgcagaagcagtggagacagcacctgtgctgcggcagattcagactggccgacaacagcgactggagcaagaccgccaccaacatcatcaagaagagcagcgacaacctgggcaagagcctgagcagcagcagcatcggcagcaacagcacctacctgaccagcaagagcaagagcagcagcaccacctacttcaagagaaacagccacaccgacaacgtgagctacgagcacagcttcaacaagagcggcagcctgagacagtgcttccacggccaggtgctggtgaagaccggcccctgctag

SEQ ID NO: 30301 - protein, 1222 aa, Artificial Sequence
  derived and/or modified sequence
MMFRSDRMWSCHWKWKPSPLLFLFALYIMCVPHSVWGCANCRVVLSNPSGTFTSPCYPNDYPNSQACMWTLRAPTGYIIQITFNDFDIEEAPNCIYDSLSLDNGESQTKFCGATAKGLSFNSSANEMHVSFSSDFSIQKKGFNASYIRVAVSLRNQKVILPQTSDAYQVSVAKSISIPELSAFTLCFEATKVGHEDSDWTAFSYSNASFTQLLSFGKAKSGYFLSISDSKCLLNNALPVKEKEDIFAESFEQLCLVWNNSLGSIGVNFKRNYETVPCDSTISKVIPGNGKLLLGSNQNEIVSLKGDIYNFRLWNFTMNAKILSNLSCNVKGNVVDWQNDFWNIPNLALKAESNLSCGSYLIPLPAAELASCADLGTLCQDGIIYRISVVIQNILRHPEVKVQSKVAEWLNSTFQNWNYTVYVVNISFHLSAGEDKIKVKRSLEDEPRLVLWALLVYNATNNTNLEGKIIQQKLLKNNESLDEGLRLHTVNVRQLGHCLAMEEPKGYYWPSIQPSEYVLPCPDKPGFSASRICFYNATNPLVTYWGPVDISNCLKEANEVANQILNLTADGQNLTSANITNIVEQVKRIVNKEENIDITLGSTLMNIFSNILSSSDSDLLESSSEALKTIDELAFKIDLNSTSHVNITTRNLALSVSSLLPGTNAISNFSIGLPSNNESYFQMDFESGQVDPLASVILPPNLLENLSPEDSVLVRRAQFTFFNKTGLFQDVGPQRKTLVSYVMACSIGNITIQNLKDPVQIKIKHTRTQEVHHPICAFWDLNKNKSFGGWNTSGCVAHRDSDASETVCLCNHFTHFGVLMDLPRSASQLDARNTKVLTFISYIGCGISAIFSAATLLTYVAFEKLRRDYPSKILMNLSTALLFLNLLFLLDGWITSFNVDGLCIAVAVLLHFFLLATFTWMGLEAIHMYIALVKVFNTYIRRYILKFCIIGWGLPALVVSVVLASRNNNEVYGKESYGKEKGDEFCWIQDPVIFYVTCAGYFGVMFFLNIAMFIVVMVQICGRNGKRSNRTLREEVLRNLRSVVSLTFLLGMTWGFAFFAWGPLNIPFMYLFSIFNSLQGLFIFIFHCAMKENVQKQWRQHLCCGRFRLADNSDWSKTATNIIKKSSDNLGKSLSSSSIGSNSTYLTSKSKSSSTTYFKRNSHTDSASMDKSLSKLAHADGDQTSIIPVHQVIDKVKGYCNAHSDNFYKNIIMSDTFSHSTKF

SEQ ID NO: 30302 - DNA, 6879 bp, Artificial Sequence
  derived and/or modified sequence
tccagtcacgccggaagcgcgggcggagcgcacgggtccggggagagtcgcctgcgcccgcgagggggacccaagtacctagggtggtggccgagtcccgcctcccgccagcgggggcgaggacctgcgacgcgcacccctgcctggcccggtctcctcagcaccagccccacgcacaccctacttcctcagcttctcgccctcaccctgccaacttccctgcgaggagggacctgccgccagcctgcttcctcgtccgcaggccctgcgctgaacgctgccgcgcccagggttcaccttgcgccgtcgggaaagcccatgaactctccagaaacggcgtaaaggagggtcccgccgcggcgcagggctggggcgcctgggttccccctgggtggagcagcggcagcagagcgggaaagtggtggaggatgatcttgcggccaaaggggacctcggcgcagtaatgtcaacatgatgtttcgctcagatcgaatgtggagctgccattggaaatggaagcccagtcctctcctgttcttatttgctttatatatcatgtgtgttcctcactcagtgtggggatgtgccaactgccgagtggttttgtccaacccttctgggacctttacttctccatgctaccctaacgactacccaaacagccaggcttgcatgtggacgctccgagcccccaccggttatatcattcagataacatttaacgactttgacattgaagaagctcccaattgcatttatgactcattatcccttgataatggagagagccagactaaattttgtggagcaactgccaaaggcctatcatttaactcaagtgcgaatgagatgcatgtgtccttttcaagtgactttagcatccagaagaaaggtttcaatgccagctacatcagagttgccgtgtccttaaggaatcaaaaggtcattttaccccagacatcagatgcttaccaggtatctgttgcaaaaagcatctctattccagagctcagtgctttcacactctgctttgaagcaaccaaagttggccatgaagacagtgattggacagctttctcctactcaaatgcatccttcacacaattgctcagttttggaaaggccaagagtggctactttctatccatttctgattcaaaatgtttgttgaataatgcattacctgtcaaagaaaaagaagacatttttgcagaaagctttgaacagctctgccttgtttggaataattctttgggctctattggtgtaaatttcaaaagaaactatgaaacagttccatgtgattctaccattagtaaagttattcctgggaatgggaaattgttgttgggctccaatcaaaatgaaattgtctctctaaaaggggacatttataactttcgactttggaattttaccatgaatgccaaaatcctctccaacctcagctgtaatgtgaaagggaatgtagtcgactggcaaaatgacttctggaatatcccaaacctagctctgaaagctgaaagcaacctaagctgtggttcctacctgatcccgctcccagcagcagaactggccagctgtgcagacctggggaccctctgtcaagatggaattatctatagaatatccgtagtgattcagaacatccttcgtcaccctgaggtaaaagtacagagcaaggtggcagaatggctcaattcaaccttccaaaattggaactacacggtttatgtcgttaatatcagttttcacctgagtgctggagaggacaagattaaagtcaagagaagccttgaggatgagccaaggttggtgctttgggcccttctagtttacaatgctaccaacaatactaatttggaaggaaaaatcattcagcagaagctcctaaaaaataatgagtccttggatgaaggcttgaggctacatacagtgaatgtgagacaactgggtcattgtcttgccatggaggaacccaaaggctactactggccatctatccaaccttctgaatacgttcttccttgtccagacaagcctggcttttctgcttctcggatatgtttttacaatgctaccaacccattggtaacctactggggacctgttgatatctccaactgtttaaaagaagcaaatgaagttgctaaccagattttaaatttaactgctgatgggcagaacttaacctcagccaatattaccaacattgtggaacaggtcaaaagaattgtgaataaagaagaaaacattgatataacacttggctcaactctaatgaatatattttctaatatcttaagcagttcagacagtgacttgcttgagtcatcttctgaagctttaaaaacaattgatgaattggccttcaagatagacctaaatagcacatcacatgtgaatattacaactcggaacttggctctcagcgtatcatccctgttaccagggacaaatgcaatttcaaattttagcattggtcttccaagcaataatgaatcgtatttccagatggattttgagagtggacaagtggatccactggcatctgtaattttgcctccaaacttacttgagaatttaagtccagaagattctgtattagttagaagagcacagtttactttcttcaacaaaactggacttttccaggatgtaggaccccaaagaaaaactttagtgagttatgtgatggcgtgcagtattggaaacattactatccagaatctgaaggatcctgttcaaataaaaatcaaacatacaagaactcaggaagtgcatcatcccatctgtgccttctgggatctgaacaaaaacaaaagttttggaggatggaacacgtcaggatgtgttgcacacagagattcagatgcaagtgagacagtctgcctgtgtaaccacttcacacactttggagttctgatggaccttccaagaagtgcctcacagttagatgcaagaaacactaaagtcctcactttcatcagctatattgggtgtggaatatctgctattttttcagcagcaactctcctgacatatgttgcttttgagaaattgcgaagggattatccctccaaaatcttgatgaacctgagcacagccctgctgttcctgaatctcctcttcctcctagatggctggatcacctccttcaatgtggatggactttgcattgctgttgcagtcctgttgcatttcttccttctggcaacctttacctggatggggctagaagcaattcacatgtacattgctctagttaaagtatttaacacttacattcgccgatacattctaaaattctgcatcattggctggggtttgcctgccttagtggtgtcagttgttctagcgagcagaaacaacaatgaagtctatggaaaagaaagttatgggaaagaaaaaggtgatgaattctgttggattcaagatccagtcatattttatgtgacctgtgctgggtattttggagtcatgttttttctgaacattgccatgttcattgtggtaatggtgcagatctgtgggaggaatggcaagagaagcaaccggaccctgagagaagaagtgttaaggaacctgcgcagtgtggttagcttgacctttctgttgggcatgacatggggttttgcattctttgcctggggacccttaaatatccccttcatgtacctcttctccatcttcaattcattacaaggcttatttatattcatcttccactgtgctatgaaggagaatgttcagaaacagtggcggcagcatctctgctgtggtagatttcggttagcagataactcagattggagtaagacagctaccaatatcatcaagaaaagttctgataatctaggaaaatctttgtcttcaagctccattggttccaactcaacctatcttacatccaaatctaaatccagctctaccacctatttcaaaaggaatagccacacagacagtgcttccatggacaagtccttgtcaaaactggcccatgctgatggagatcaaacatcaatcatccctgtccatcaggtcattgataaggtcaagggttattgcaatgctcattcagacaacttctataaaaatattatcatgtcagacaccttcagccacagcacaaagttttaatgtctttaagaaaaagaaatcaatctgcagaaatgtgaagatttgcaagcagtgtaaactgcaactagtgatgtaaatgtgctattacctaggtaactgcatatatataaggaatgtattttgttaagaaggcttttgtgaaattcagaatttttctttttaatatatttcttccatggaagagttgtcatcactaaaacttcagtactgagagtaacatgactcagtagccacagaagctatgatttgtaaaatatataattgaatcagagtaatcataatgcaggggagacattcaaattagagacaagggagaagcaatgctgaggaagaccctagatagagctcattttactccacctaatcgttatatctggatatacccattttctgcatcttctttctcaacaataaaaaatgtaactattttgaatgcccacaaatcccattccagtgttactttctgtgaatgcagtaccatattctcattttcaatgacatttcaaccacaggcagaaaagactgtttactccttgacccaaagattaaaaaggattttttattattttaaatattacaccttcagaaccataacatgcttaagaaaactttcccaaaatgttgacctagttaaatgaggctatataaatttctaatattttacttattctattcaaggcatagggccaaagcattaagtataatttaatcccatacattcgagttaagtttagtgttgatgttccatcattctggacctcccaggagttgtttaagaatgaatctcttacacctctacttttgcccctctactgtatattaagcccataggcttgtgggaggaaggagaatttccattaggcaagctgtatgcagtggaattttccttttaggagacacacaattaagactctctggttctgtccttgctttggagactttaagacatttcctaaagcacaaataaaagcctcgtatttccccattgagagttttgttccaaggaatatgaagtgagacatatgggtgagtcataataatcaaaataatttatgaagagctgggtctgcaatagctagtctaaaaactacttgtgtgtcagtcctctggttatagtatataagagcctgaggaggtctggcaagatagatggtgtattatttatggatcaggctgctgcatacaaaccttgcatactattatgcagcttacctaactctcagactattctgagtaatgcttgcttgctaatgaatgtataggagaccacattgtaattgttcttagatgatggagtccatgcagtttcttagaaatcggtctcagtgcatgctgtgctttttcacatttgctctgggttatctgggaagtatcaggttctgggaggcaacagcattaagtgataagaaaaggagacattctggcaaagccaatctgcttaaaggcaaagtccagaacctggaacctagaggcctttctctctgcacgaaaaacaggtagtttgcagtctgagatatgggagagcttttaggctacacagcaacccaagggacctctcaccttttgctgagcttcaatcaggaagctatttgcctggctccagcagatgatgagataatgaggtagtgggttttttattactgttccattttgcaacatcctgcaacaccatcctgggagacaagagcattacccagcttggctttcacgggggagggttgtattcagtaaaaaagaatagtaaatataaggtcactgagattctaagtaagatagtaaatctaaggtcactgagccaaatccttttcaataggcatatattaacaggctgcttattttggcggaggttacatatggatgaaaatgaatcttagtcactgaatattcatatacatttcccccaaaaccttagacattcatagtagattttaattagttagctttctaactagtcagatttctgcccaaagtgcttagtcaatagtaattaagatatagcttcaaaaatggctttgcttttgatttctactcatattcgtatggctccagaaaaatatttttttcatatttgacaatgtcagctccactttagaaattttcaataaccagatgagaaaaaaattaagaaattgctcaagggaaacatttgtaaatggatttgaaagattgagccaaattctgttgtcagttctaagcatgcagttctcacctccatttagtcccccatcagaacagaggtcaggaatttagctggggagcctaaatttagttcagcttacctttgagaatagcatcaattcagactctcttttcattatgttttcttttctttttccctctttttaaactacattgtgttagagtcatagtctaggatcctgagagattttccattcttgtcaccattcacttgcattgtaaagattttctttgtctgttgttggcatagattcttttgtacatatttatttatttgtgtttatatatgtcaattggtttcctttcttagcttgatattgcctagctttgttgttttaattaactttctattagagagactgtatatattttttctaaatactttgtgaaatcatttttggtagcaatatctttgaatatgatgaataaaagtgactgtgagtgcaaatagaattagcagtaagaagctactctagctaatttgccattttacttaaatggaaaatgtttttcaaataaatacttatgttgttcatgttc

SEQ ID NO: 30303 - DNA, 3669 bp, Artificial Sequence
  derived and/or modified sequence
atgatgttcaggtctgatagaatgtggagttgtcattggaaatggaaaccatctccactccttttcttatttgcgctctatatcatgtgcgtccctcattccgtgtgggggtgcgccaactgtcgagtcgtgctctccaatccaagtgggacatttacatcgccttgctatcccaacgactaccctaatagtcaggcctgtatgtggaccttgcgcgcccccactggttacatcatccaaattaccttcaacgactttgatatcgaagaagcccctaactgtatttatgatagtctgagcctggacaacggcgaatcccagactaagttttgtggagccacagcgaaaggactgtctttcaactccagcgccaacgaaatgcatgtgagtttctctagtgactttagtattcaaaaaaagggcttcaatgcatcctatatccgcgtggccgtgagcctgcgaaatcaaaaggttatcctgccccaaacatctgatgcctaccaggtgagcgttgcaaaatctatatctatacctgagctgtcagcatttacgctgtgttttgaggccaccaaggtcggacatgaggattccgattggacagctttcagttactctaatgcctcatttacccagctgttaagttttggaaaggccaagtccggctatttcctgtctatcagtgacagcaagtgtcttctgaataacgcactgccagttaaggagaaagaggacatctttgctgagtcattcgagcagctgtgcttggtctggaataactccctaggatccattggcgttaactttaaaaggaactacgaaacggttccttgtgatagcactatcagcaaagtgatccctggtaatggcaaactgctcctcggcagtaatcagaacgagattgtgagcctgaagggcgacatctacaacttcagattatggaacttcacaatgaacgctaagatcttgtctaacctatcctgtaacgtgaaagggaacgtggtggattggcagaacgacttctggaatatacctaacctggctctgaaagctgaatcaaacctctcttgcggttcttatttgattccactccctgccgccgagcttgcctcctgtgcagatctggggaccctgtgccaggacggcataatatatagaatatccgtcgtgatccaaaacatactccgccaccctgaagtgaaagttcagagcaaggtggcggaatggctgaatagcacatttcagaattggaactacactgtctacgtggtgaatataagcttccatctatccgctggggaggacaaaattaaggtcaaacgctctctggaagatgaaccacggctggttctgtgggctctgctggtatacaatgctactaataatacaaatctggaaggcaagatcattcagcagaagcttctgaaaaacaacgagtcgcttgatgagggactcaggctccatacagtaaacgtccggcagttgggccactgccttgccatggaggagcctaagggatattactggccatctattcagccctcggagtatgtcctcccttgtcccgataaacccggtttcagcgcatcacggatctgcttctacaatgcaactaatcctttggtcacatactggggtcctgtggatatttccaactgtcttaaggaggccaacgaggtggcgaatcagatcttgaacctgaccgctgacgggcagaatctgacgtctgccaacataacaaatatcgttgagcaagtaaagcggatcgtcaacaaagaggagaacatcgacataacgctgggcagcaccctgatgaacatctttagcaacattctgagcagttccgacagcgatctgctcgaatcttcaagtgaggctctgaagaccattgacgaactggcttttaagattgacctgaactccacgtctcatgttaacataactactcggaatctagccctgagcgtgagtagcctcctgccagggacaaatgccatcagtaacttctcaatcggactgccttccaataatgagagctacttccagatggattttgaaagtggtcaagtcgacccacttgcctccgttattttacctccaaatctcctggaaaacttgtccccggaagacagcgtgctggtgcgacgcgctcagtttacattctttaacaagaccggattgtttcaggatgttggacctcagagaaagactctggtgagttatgtgatggcttgtagtatcgggaatataaccattcagaacctcaaggacccagtccagataaaaattaagcacacccgaactcaagaggtccaccaccctatctgcgccttttgggatctcaacaaaaacaagagttttggcggttggaacacttccgggtgcgtcgcgcatagggatagtgacgcatcagaaacagtgtgcctatgcaatcactttacccactttggcgtgctaatggacctgcctcgtagtgcatcccaactggacgctagaaatacgaaggtgctcacatttatctcatatataggctgcgggatcagcgccatcttttccgcagccaccctgctgacttatgtggcctttgagaagctgaggagggattatccaagtaagattctgatgaacctgtccacggccctgttgttcctgaatctgctgttcctcttggacgggtggattacatcctttaacgttgatggcctgtgcattgcagtcgccgttctgctccacttcttcctgcttgctacatttacttggatggggttggaggccatacacatgtacattgccctggtaaaagtcttcaacacatatatccgtcgttacattctcaagttctgcataattgggtggggactgcctgcactagttgtttctgttgttttggcttcacggaataataacgaggtgtatgggaaggagtcttacggcaaagagaagggcgacgaattctgttggatacaggatcccgtgattttttatgtgacttgtgccggctatttcggggtaatgttctttctcaacatcgccatgtttatcgtggtgatggtgcagatttgtggccgaaacggcaaacgtagcaaccgaaccttgagggaagaggtgttgcgcaacctgcgcagtgtggtttctttaaccttcctcttaggcatgacctggggcttcgcattttttgcctgggggcctctgaacatcccattcatgtatcttttttctatcttcaactcattgcaaggactgttcattttcattttccattgcgctatgaaagaaaacgtccagaagcaatggcgccaacatttgtgctgtgggcgatttaggctcgcagataactctgactggtctaaaaccgctacaaacattatcaaaaaatccagcgacaacctggggaaaagcttatcctcaagcagcattggttccaacagtacatatttgacatccaagtcgaaatcctcttccacgacgtacttcaaaaggaacagtcatacagattcagcctccatggataagtcactgtctaagctggcacacgctgatggtgatcagacttcgataattcccgtccaccaggtgatcgataaagtcaagggatattgtaacgcgcatagcgacaacttttataagaatatcataatgtcagatacattcagtcatagtaccaagttctag

SEQ ID NO: 30304 - DNA, 3669 bp, Artificial Sequence
  derived and/or modified sequence
atgatgttcagaagtgacaggatgtggagctgccactggaagtggaagcccagccccctgctcttcctgtttgccctgtacatcatgtgtgtgccccacagcgtgtggggctgtgccaactgccgggtggtgctgagcaaccccagcggcaccttcaccagcccctgctacccaaatgactaccccaacagccaggcctgcatgtggaccctgcgggcccccaccggctacatcatccagatcaccttcaatgactttgacatcgaggaggcccccaactgcatctatgacagcctgagcctggacaatggagagagccagaccaagttctgtggggccacagccaagggcctgtccttcaacagcagcgccaatgagatgcacgtgtccttcagcagtgacttcagcatccagaagaagggcttcaatgccagctacatccgggtggccgtgtccctgaggaaccagaaggtgatcctgccccagaccagtgatgcctaccaggtgtctgtggccaagagcatcagcatccctgagctgagcgccttcaccctgtgctttgaggccaccaaggtgggccatgaagattctgactggacagccttctcctacagcaatgccagcttcacccagctgctgagctttgggaaggccaagagcggctacttcctgagcatcagtgacagcaagtgcctgctgaacaatgccctgcctgtgaaggagaaggaggacatctttgctgagagctttgagcagctgtgcctggtgtggaacaacagcctgggcagcattggagtgaacttcaagaggaactatgagaccgtgccctgtgacagcaccatcagcaaggtgattcctggaaatggcaagctgctgctgggcagcaaccagaatgagatcgtgtccctgaagggggacatctacaacttccggctgtggaacttcaccatgaatgccaagatcctgagcaacctgagctgcaatgtgaagggaaatgtggtggactggcagaatgacttctggaacatccccaacctggccctgaaggccgagagcaacctgagctgtggcagctacctgatccccctgcctgctgctgagctggccagctgtgccgacctgggcaccctgtgccaggacggcatcatctaccgcatctctgtggtgatccagaacatcctgcggcaccctgaggtgaaggtgcagagcaaggtggccgagtggctgaacagcaccttccagaactggaactacacagtgtatgtggtgaacatctccttccacctgtctgctggggaggacaagatcaaggtgaagaggagcctggaggatgagccccggctggtgctgtgggccctgctggtgtacaatgccaccaacaacaccaacctggagggcaagatcatccagcagaagctgctgaagaacaatgaaagcctggatgagggcctgcggctgcacacagtgaatgtgcggcagctgggccactgcctggccatggaggagcccaagggctactactggcccagcatccagcccagtgaatatgtgctgccctgcccagacaagccaggcttcagcgccagccgcatctgcttctacaatgccaccaaccccctggtgacctactggggccctgtggacatcagcaactgcctgaaggaggccaatgaggtggccaaccagatcctgaacctgacagcagatggccagaacctgaccagcgccaacatcaccaacatcgtggagcaggtgaagagaattgtgaacaaggaggagaacatcgacatcaccctgggcagcaccctgatgaacatcttcagcaacatcctgagcagcagtgacagcgacctgctggagagcagcagcgaggccctgaagaccattgatgagctggccttcaagattgacctgaacagcaccagccacgtgaacatcaccaccaggaacctggccctgtctgtgagcagcctgctgcccggcaccaatgccatcagcaacttcagcatcggcctgcccagcaacaatgaaagctacttccagatggactttgagagcggccaggtggaccccctggccagcgtcatcctgccccccaacctgctggagaacctgagccctgaggacagcgtgctggtgcggcgggcccagttcaccttcttcaacaagacaggcctcttccaggatgtgggcccccagaggaagaccctggtgtcctatgtgatggcctgcagcatcggcaacatcaccatccagaacctgaaggaccctgtgcagatcaagatcaagcacaccaggacccaggaggtgcaccaccccatctgtgccttctgggacctgaacaagaacaagagctttggaggctggaacaccagcggctgtgtggcccaccgggacagtgatgccagcgagaccgtgtgcctgtgcaaccacttcacccactttggagtgctgatggacctgcccaggtctgccagccagctggatgccaggaacaccaaggtgctgaccttcatctcctacatcggctgcggcatcagcgccatcttctctgctgccaccctgctgacctacgtggcctttgagaagctgcggcgggactaccccagcaagatcctgatgaacctgagcacagccctgctcttcctgaacctgctcttcctgctggatggctggatcaccagcttcaacgtggatggcctgtgcatcgctgtggccgtgctgctgcacttcttcctgctggccaccttcacctggatgggcctggaggccatccacatgtacatcgccctggtgaaggtgttcaacacctacatccgccgctacatcctgaagttctgcatcatcggctggggcctgcctgccctggtggtgtctgtggtgctggccagcaggaacaacaatgaggtgtatggcaaggagagctatggcaaggagaagggagatgagttctgctggatccaggaccccgtcatcttctacgtgacctgtgccggctactttggagtgatgttcttcctgaacatcgccatgtttattgtggtgatggtgcagatctgtggcagaaatggcaagaggagcaacagaaccctgcgggaggaggtgctgaggaacctgcggtctgtggtgtccctgaccttcctgctgggcatgacctggggctttgccttctttgcctggggccccctgaacatccccttcatgtacctgttcagcatcttcaacagcctgcagggcctcttcatcttcatcttccactgtgccatgaaggaaaatgtgcagaagcagtggaggcagcacctgtgctgcggccgcttccggctggccgacaacagcgactggagcaagacagccaccaacatcatcaagaagagcagtgacaacctgggcaagagcctgagcagcagcagcatcggcagcaacagcacctacctgaccagcaagagcaagagcagcagcaccacctacttcaagaggaacagccacacagattctgcctccatggacaagagcctgagcaagctggcccacgcagatggagaccagaccagcatcatccctgtgcaccaggtgattgacaaggtgaagggctactgcaatgcccacagcgacaacttctacaagaacatcatcatgtctgacaccttcagccacagcaccaagttctag

SEQ ID NO: 30305 - DNA, 3669 bp, Artificial Sequence
  derived and/or modified sequence
atgatgttccggagcgaccggatgtggagctgccactggaagtggaaaccctctcccttgctgttcctgtttgcgttatatatcatgtgcgtgccgcactctgtgtggggctgtgccaactgtagggtggtgctcagcaatcccagcggcacattcacaagcccgtgctacccaaatgattaccctaatagccaggcctgtatgtggactctaagggcaccaactgggtatattattcagatcacgttcaacgattttgacatcgaagaagcccccaactgcatatatgatagtctttcgctcgacaacggcgagtctcagactaaattctgtggagctacggccaaaggactaagtttcaactcctcagccaatgagatgcacgtgtccttctcttctgacttcagcatacagaagaagggattcaatgcctcatacattcgcgtggcagtgtccttaagaaatcaaaaggtgatacttccgcagaccagcgacgcctaccaggtgagcgttgccaaaagtatctccatccccgagctgtctgcgtttaccctctgttttgaagcaactaaagtaggccatgaggactcagactggaccgcgttttcctacagtaacgcttccttcacccagttactgtcattcgggaaggcaaagagcggttatttcttgtcgatttcagattcgaagtgtctgcttaacaacgcgttgcccgtgaaggagaaggaggacatctttgctgagtcattcgaacagctgtgcctcgtctggaataatagcctgggttcaatcggcgtgaactttaaacggaactacgaaaccgtgccttgtgactcgactatctcgaaggtaatccccggcaatggtaagctcctgcttgggagcaatcagaatgaaatcgtctcattaaagggggacatttataattttaggctgtggaacttcactatgaacgcgaagatcttatctaacctcagttgtaacgtcaaggggaatgttgtggattggcagaacgacttctggaacattcccaacctcgcccttaaggctgagtcaaacctctcatgcgggagctatctgattccactccctgcagccgagttggcgtcttgcgctgatcttggaactctctgccaagacggcattatctatcggatctctgtcgttatccagaacattttgcgacaccccgaagtaaaagttcagtccaaggtggctgagtggctaaacagtacattccagaactggaactacaccgtttacgttgtcaacataagttttcacctgtctgcaggcgaggacaaaatcaaggttaaacgcagcctcgaggatgagccaagattggtgctgtgggcgctgctggtgtataatgccaccaataatactaatttagagggaaaaatcattcagcagaagttgctgaagaacaacgaaagcctggatgaaggacttaggctccataccgtgaacgttaggcaactaggccattgcctggccatggaagaacctaagggatactactggccaagcattcaaccctctgagtacgtgcttccgtgtcccgacaaacccggcttctccgcctccagaatctgtttctacaatgcaacaaaccccttggttacgtattggggtcctgtggacatatccaattgcctgaaggaggctaatgaggtggcaaatcagatactgaatctgaccgccgacgggcagaacctaacttctgccaatattaccaacatcgtggagcaggtcaagcgaatcgtcaataaagaggagaacattgacatcacactgggaagcactctaatgaatatcttcagtaacattttgtcctccagtgacagcgatttgctggaatcctcttccgaggcactgaaaaccatagatgaactggctttcaaaatagatctcaacagtacatcccatgtcaacataaccacacgcaacctcgccctttcagtttcaagtttattgcctggaacaaacgccatctctaacttttctattggtctgccatctaacaatgagtcttacttccagatggattttgagagcggacaggtggaccccttggcctcagtgatcctgcctcccaatctcctggagaacctctcccctgaggactccgtactggtcagaagagcccagtttacgttctttaacaagacaggattgtttcaggacgttggcccccagcgaaaaacccttgtttcttacgttatggcctgctcaatcggaaatattacgatccagaatttgaaagacccagtccaaattaaaattaagcatacgagaacacaggaggttcaccaccccatctgtgctttttgggacctgaacaagaataaatcttttggcggatggaacacctcagggtgcgttgctcatcgcgattccgatgcatctgaaacagtgtgtctgtgtaatcatttcactcatttcggggtgttgatggacctgcctcgaagcgcctcccagttggacgcccgtaatacgaaggttctgaccttcatctcctacattggctgcggaattagcgcaatattctctgcagcgacattgctcacctacgttgcttttgagaagctccgaagggattatccgtccaagatcttgatgaatctcagtacagcgttgctgttcttgaatctgctgttcttactggatggctggattaccagttttaatgtcgatggtctgtgcattgctgtggccgttctgttacactttttcctgctggctactttcacttggatgggcctcgaagcaattcacatgtacattgccctggtcaaggtgtttaatacatatatccgccgctacatcctcaaattttgtataataggatggggccttcccgcactggtagtgagtgtggttctggcatctcggaacaataatgaagtgtacggcaaggaaagttacggtaaggaaaaaggcgatgagttctgttggatccaagatcccgtcatcttctacgtaacttgtgcaggttattttggagtcatgtttttccttaacattgctatgttcatcgtggtaatggttcagatctgcgggcgaaatggcaagcggtctaacaggaccctacgggaagaggtgctccgaaacctgcggtctgtcgtaagtctcacctttctgctgggcatgacctggggcttcgctttcttcgcatggggtccactaaacattccctttatgtacctcttctcaatcttcaattctctccagggtcttttcatatttatatttcactgcgcgatgaaagagaacgttcagaaacaatggcgtcagcatctgtgttgtgggagatttagactagccgacaatagtgactggagtaaaaccgcaacaaacatcatcaaaaagtcaagtgacaatttagggaagagtctgtcaagctcgtctattggatccaactcgacgtacttgacttctaagagtaagtctagctccacaacctattttaagcgcaactctcacacagatagcgcaagcatggataagagtctgagtaaactcgctcacgctgacggggaccagacgtccattattccagtgcatcaagtcattgataaggtcaagggatattgtaatgcacacagtgacaatttttataaaaatattataatgtcggacactttttcccattcaaccaagttttag

SEQ ID NO: 30306 - DNA, 3669 bp, Artificial Sequence
  derived and/or modified sequence
atgatgttccgatccgacagaatgtggtcttgccactggaagtggaagccaagtccacttctgtttctgttcgctctatacatcatgtgcgtgccccattccgtgtggggctgcgccaactgccgcgttgttctttcaaaccctagcggcacgttcacctctccatgctacccaaatgactatccgaatagtcaagcctgcatgtggaccctgcgcgctcccacagggtatattattcagatcacttttaacgattttgacatagaggaagctcccaactgcatatacgactcactatcgttggacaacggagagtcacagactaagttctgtggagccaccgctaagggcctgtcattcaacagttcagccaacgaaatgcacgtgagtttctcctccgacttctccatacaaaagaagggcttcaacgccagctacatccgggttgctgtatccctgcgcaaccaaaaggttatccttcctcaaacctccgacgcctaccaagtatcagtagccaagagcatctcaatccctgaactctcggcatttaccctgtgcttcgaggctacaaaagtggggcatgaggacagtgactggacagcctttagttacagcaacgcatccttcactcagctgctgagtttcgggaaggcgaaatctgggtacttcctgtctatttctgactccaagtgcctcctgaataatgcgcttccggtgaaggagaaggaggacatctttgccgagagcttcgagcaactgtgtttggtgtggaacaactcacttggttcaattggcgtgaatttcaagcgaaactatgagacagtgccctgtgactcaacaatctcaaaggttatccctggcaatggcaagctgctgcttggaagtaatcagaacgagatagtctcgctcaagggagatatatataatttccgcctgtggaattttacaatgaacgctaagattctttcgaacctaagctgcaatgttaaaggaaatgtagtggattggcagaatgacttctggaatatccccaacttagccctgaaagctgagagcaacctgtcctgtggaagctacctgatcccacttccagctgccgaattggcgagttgtgcagatcttggaactctgtgtcaagacggaataatttaccgtattagcgtggtgatccagaacatactccgccaccccgaagtgaaggttcagtccaaggtagctgagtggctgaactctactttccaaaactggaattataccgtttatgtggtgaacatttctttccacctgagcgccggagaggataagatcaaggtgaagagatccctggaggacgagcctcgcctggtcctctgggccttgcttgtctacaatgcaacgaataacaccaacctggagggtaagattattcagcaaaaacttcttaagaacaacgaaagtcttgacgaaggtctgaggcttcatacagtaaacgttcgccagctggggcattgtcttgctatggaggaaccaaagggctactactggcccagcatccagccctctgagtacgtattaccatgtcccgataagcctggatttagcgctagtcggatttgcttctacaatgctaccaaccccttagttacctattggggtccagtcgacatatcaaattgtctcaaggaggcaaacgaagtggccaaccagattctgaaccttacggctgacggacagaaccttaccagtgccaacattactaacattgtcgagcaggtgaagaggatcgtgaacaaggaggagaacattgacatcaccctgggtagcactctgatgaatattttttctaacattctgtcctcctcagacagcgaccttctggagtctagctcagaggcccttaagacgatcgatgagcttgcttttaagattgatttgaacagcactagccacgtaaatattaccacacgcaacctggccctatccgtgtcctccctgctcccaggtacgaatgcaattagtaacttttctataggattgccttctaacaatgaatcatatttccagatggatttcgagtccggacaagtcgaccctctggcttctgttatcctgcctcctaacctcctcgagaatctctcccccgaagattctgttcttgtcagacgggctcagtttaccttctttaataaaactggcctgtttcaggacgtaggccctcagcggaaaaccctggtgagttacgttatggcttgctcgataggcaatatcaccatccaaaacctcaaagatccagtccagatcaagatcaaacacacacgcacccaggaggtccaccatccgatctgcgccttctgggacctaaacaaaaataagagcttcggtggttggaatactagcggttgcgtggcacatagggattcagacgcttcggaaaccgtgtgtttatgcaatcactttacccactttggcgtcttgatggacctgccgcgtagcgcctcacaactcgatgcacggaataccaaggtcctcacgttcatttcctatattggttgcggaatcagcgccatcttttcagcagcaaccctgcttacttatgtagcctttgagaagcttaggagagattatcccagtaagatcctcatgaatctttccaccgctctcctgttcctgaatttgcttttcctgctggatggttggatcacatccttcaacgtagatggcctttgtattgccgtcgccgttctcctgcacttctttcttcttgcaactttcacatggatggggctcgaggccatccatatgtatattgctctggtgaaagtgtttaatacctatattaggcgatatatcctcaagttctgtatcataggatggggactgccagccctggtggtctctgtcgttctggcaagcaggaataacaatgaggtgtacggaaaggaatcctacggaaaggaaaagggagacgaattctgctggatccaagaccctgtcatcttctatgtgacttgtgcaggatatttcggggtgatgttcttccttaacatcgcgatgtttatcgttgtcatggtgcagatctgtggacggaacgggaagaggtctaaccggaccctgcgggaagaagtgcttcggaacctaagaagcgttgtatctctcacattcctgctcggtatgacttggggcttcgcattcttcgcctgggggccattaaacattcccttcatgtacctctttagcatcttcaattcactgcagggactctttatattcatctttcattgtgccatgaaagagaacgttcaaaaacaatggcgtcagcatctatgctgtgggaggtttcgtctggccgataacagcgactggtcaaaaaccgctacgaatattatcaagaaatcctcagataatttggggaaatcactgtcgtcttcctccatcggtagcaacagcacataccttacttctaagtctaagtcttcctcaaccacgtattttaagaggaattcacacaccgattctgcctccatggacaagtctctctccaagctcgcccacgccgacggggaccaaacaagcattatacctgtacatcaggtgatcgataaagtgaagggatactgtaacgcacatagcgacaacttctacaaaaacatcattatgagcgacacgttcagccatagtacaaagttctag

SEQ ID NO: 30307 - DNA, 3669 bp, Artificial Sequence
  derived and/or modified sequence
atgatgttcagaagcgacagaatgtggagctgccactggaagtggaagcccagccccctgctgttcctgttcgccctgtacatcatgtgcgtgccccacagcgtgtggggctgcgccaactgcagagtggtgctgagcaaccccagcggcaccttcaccagcccctgctaccccaacgactaccccaacagccaggcctgcatgtggaccctgagagcccccaccggctacatcatccagatcaccttcaacgacttcgacatcgaggaggcccccaactgcatctacgacagcctgagcctggacaacggcgagagccagaccaagttctgcggcgccaccgccaagggcctgagcttcaacagcagcgccaacgagatgcacgtgagcttcagcagcgacttcagcatccagaagaagggcttcaacgccagctacatcagagtggccgtgagcctgagaaaccagaaggtgatcctgccccagaccagcgacgcctaccaggtgagcgtggccaagagcatcagcatccccgagctgagcgccttcaccctgtgcttcgaggccaccaaggtgggccacgaggacagcgactggaccgccttcagctacagcaacgccagcttcacccagctgctgagcttcggcaaggccaagagcggctacttcctgagcatcagcgacagcaagtgcctgctgaacaacgccctgcccgtgaaggagaaggaggacatcttcgccgagagcttcgagcagctgtgcctggtgtggaacaacagcctgggcagcatcggcgtgaacttcaagagaaactacgagaccgtgccctgcgacagcaccatcagcaaggtgatccccggcaacggcaagctgctgctgggcagcaaccagaacgagatcgtgagcctgaagggcgacatctacaacttcagactgtggaacttcaccatgaacgccaagatcctgagcaacctgagctgcaacgtgaagggcaacgtggtggactggcagaacgacttctggaacatccccaacctggccctgaaggccgagagcaacctgagctgcggcagctacctgatccccctgcccgccgccgagctggccagctgcgccgacctgggcaccctgtgccaggacggcatcatctacagaatcagcgtggtgatccagaacatcctgagacaccccgaggtgaaggtgcagagcaaggtggccgagtggctgaacagcaccttccagaactggaactacaccgtgtacgtggtgaacatcagcttccacctgagcgccggcgaggacaagatcaaggtgaagagaagcctggaggacgagcccagactggtgctgtgggccctgctggtgtacaacgccaccaacaacaccaacctggagggcaagatcatccagcagaagctgctgaagaacaacgagagcctggacgagggcctgagactgcacaccgtgaacgtgagacagctgggccactgcctggccatggaggagcccaagggctactactggcccagcatccagcccagcgagtacgtgctgccctgccccgacaagcccggcttcagcgccagcagaatctgcttctacaacgccaccaaccccctggtgacctactggggccccgtggacatcagcaactgcctgaaggaggccaacgaggtggccaaccagatcctgaacctgaccgccgacggccagaacctgaccagcgccaacatcaccaacatcgtggagcaggtgaagagaatcgtgaacaaggaggagaacatcgacatcaccctgggcagcaccctgatgaacatcttcagcaacatcctgagcagcagcgacagcgacctgctggagagcagcagcgaggccctgaagaccatcgacgagctggccttcaagatcgacctgaacagcaccagccacgtgaacatcaccaccagaaacctggccctgagcgtgagcagcctgctgcccggcaccaacgccatcagcaacttcagcatcggcctgcccagcaacaacgagagctacttccagatggacttcgagagcggccaggtggaccccctggccagcgtgatcctgccccccaacctgctggagaacctgagccccgaggacagcgtgctggtgagaagagcccagttcaccttcttcaacaagaccggcctgttccaggacgtgggcccccagagaaagaccctggtgagctacgtgatggcctgcagcatcggcaacatcaccatccagaacctgaaggaccccgtgcagatcaagatcaagcacaccagaacccaggaggtgcaccaccccatctgcgccttctgggacctgaacaagaacaagagcttcggcggctggaacaccagcggctgcgtggcccacagagacagcgacgccagcgagaccgtgtgcctgtgcaaccacttcacccacttcggcgtgctgatggacctgcccagaagcgccagccagctggacgccagaaacaccaaggtgctgaccttcatcagctacatcggctgcggcatcagcgccatcttcagcgccgccaccctgctgacctacgtggccttcgagaagctgagaagagactaccccagcaagatcctgatgaacctgagcaccgccctgctgttcctgaacctgctgttcctgctggacggctggatcaccagcttcaacgtggacggcctgtgcatcgccgtggccgtgctgctgcacttcttcctgctggccaccttcacctggatgggcctggaggccatccacatgtacatcgccctggtgaaggtgttcaacacctacatcagaagatacatcctgaagttctgcatcatcggctggggcctgcccgccctggtggtgagcgtggtgctggccagcagaaacaacaacgaggtgtacggcaaggagagctacggcaaggagaagggcgacgagttctgctggatccaggaccccgtgatcttctacgtgacctgcgccggctacttcggcgtgatgttcttcctgaacatcgccatgttcatcgtggtgatggtgcagatctgcggcagaaacggcaagagaagcaacagaaccctgagagaggaggtgctgagaaacctgagaagcgtggtgagcctgaccttcctgctgggcatgacctggggcttcgccttcttcgcctggggccccctgaacatccccttcatgtacctgttcagcatcttcaacagcctgcagggcctgttcatcttcatcttccactgcgccatgaaggagaacgtgcagaagcagtggagacagcacctgtgctgcggcagattcagactggccgacaacagcgactggagcaagaccgccaccaacatcatcaagaagagcagcgacaacctgggcaagagcctgagcagcagcagcatcggcagcaacagcacctacctgaccagcaagagcaagagcagcagcaccacctacttcaagagaaacagccacaccgacagcgccagcatggacaagagcctgagcaagctggcccacgccgacggcgaccagaccagcatcatccccgtgcaccaggtgatcgacaaggtgaagggctactgcaacgcccacagcgacaacttctacaagaacatcatcatgagcgacaccttcagccacagcaccaagttctag

SEQ ID NO: 30308 - protein, 414 aa, Artificial Sequence
  derived and/or modified sequence
MMDLRNTPAKSLDKFIEDYLLPDTCFRMQINHAIDIICGFLKERCFRGSSYPVCVSKVVKGGSSGKGTTLRGRSDADLVVFLSPLTTFQDQLNRRGEFIQEIRRQLEACQRERAFSVKFEVQAPRWGNPRALSFVLSSLQLGEGVEFDVLPAFDALGQLTGGYKPNPQIYVKLIEECTDLQKEGEFSTCFTELQRDFLKQRPTKLKSLIRLVKHWYQNCKKKLGKLPPQYALELLTVYAWERGSMKTHFNTAQGFRTVLELVINYQQLCIYWTKYYDFKNPIIEKYLRRQLTKPRPVILDPADPTGNLGGGDPKGWRQLAQEAEAWLNYPCFKNWDGSPVSSWILLTQHTPGSIHPTGRRGLDLHHPLNASASWGKGLQCYLDQFLHFQVGLLIQRGQSSSVSWCIIQDRTQVS

SEQ ID NO: 30309 - DNA, 1245 bp, Artificial Sequence
  derived and/or modified sequence
atgatggatcttagaaacacacctgcgaaaagtctggacaagttcatcgaagactacctgctcccagacacgtgctttcgcatgcagataaaccacgcgatcgacatcatctgtggctttctgaaggaacgctgcttccgcggctctagctatccggtatgtgtgtccaaagtggtgaaggggggcagttcaggaaaaggaaccactctgaggggaagaagcgacgcagatctggtcgtgtttttgtctccgttaactaccttccaggaccagctgaatcgtcggggagaatttattcaggaaatccgtcgccagctggaggcctgccagagagaacgtgcgttcagcgtgaagttcgaggttcaagctccccggtgggggaacccccgagctctgagttttgtactgtccagtctgcaacttggagagggcgtggagttcgatgtgctccctgcattcgacgcacttgggcaactgacaggtgggtacaagcccaacccacagatttacgtgaaactaatagaggaatgtactgacctccagaaagagggcgagtttagcacgtgcttcactgaactgcagcgagatttcctaaagcaacggcctacgaaactcaagtccctgattagactggtgaagcactggtatcaaaactgtaaaaaaaagctcgggaagttacctccacagtacgccctggaactgctgacggtgtatgcttgggaacgtggcagcatgaaaacgcatttcaatacggcacaggggttccgcactgtgctcgagctggtcatcaattaccaacagttatgtatttattggaccaaatactatgatttcaaaaacccgataatcgagaagtacctgaggcggcagctgaccaagccaagacctgtgatattggaccctgccgatccaaccgggaacctgggcgggggtgaccctaaaggctggcgccagctggctcaggaggccgaggcctggctgaactacccttgttttaagaattgggatggcagtccagtctcaagctggatattgcttacccagcacaccccaggtagcatccatcccaccggccggaggggtctggacctgcatcacccactgaacgcctccgctagctggggcaaggggcttcagtgctacctcgaccagtttttacattttcaggtggggcttctgattcagcgaggccagtcgtcttccgtgagctggtgtattattcaggatcgcactcaggtttcttag

SEQ ID NO: 30310 - DNA, 1245 bp, Artificial Sequence
  derived and/or modified sequence
atgatggacctgaggaacaccccagccaagagcctggacaagttcatcgaggactacctgctgcctgacacctgcttcaggatgcagatcaaccacgccatcgacatcatctgtggcttcctgaaggagcgctgcttccggggcagcagctaccctgtgtgtgtgtccaaggtggtgaagggcggcagcagcggcaagggcaccaccctgcggggccgcagtgatgctgacctggtggtgttcctgagccccctgaccaccttccaggaccagctgaacagaagaggagagttcatccaggagatccggcggcagctggaggcctgccagcgggagcgggccttctctgtgaagtttgaggtgcaggccccccgctggggcaacccccgggccctgagctttgtgctgagcagcctgcagctgggggagggcgtggagtttgatgtgctgcctgcctttgatgccctgggccagctgaccggcggctacaagcccaacccccagatctacgtgaagctgattgaggagtgcacagacctgcagaaggagggggagttcagcacctgcttcacagagctgcagagggacttcctgaagcagaggcccaccaagctgaagagcctcatccggctggtgaagcactggtaccagaactgcaagaagaagctgggcaagctgcccccccagtatgccctggagctgctgactgtgtatgcctgggagcggggctccatgaagacccacttcaacacagcccagggcttcagaacagtgctggagctggtgatcaactaccagcagctgtgcatctactggaccaagtactatgacttcaagaaccccatcatcgagaagtacctgcggcggcagctgaccaagcccaggcctgtgatcctggaccctgctgaccccactggaaacctgggcggcggggaccccaagggctggaggcagctggcccaggaggccgaggcctggctgaactacccctgcttcaagaactgggatggcagccctgtgtcctcctggatcctgctgacccagcacaccccaggcagcatccaccccactggaagaagaggcctggacctgcaccaccccctgaatgccagcgcctcctggggcaagggcctgcagtgctacctggaccagttcctgcacttccaggtgggcctgctgatccagaggggccagagcagctctgtgtcctggtgcatcatccaggacaggacccaggtgtcctag

SEQ ID NO: 30311 - DNA, 1245 bp, Artificial Sequence
  derived and/or modified sequence
atgatggacctgcggaacacccccgccaagagcctggacaagttcatagaagattatctgctgcccgacacctgctttcgtatgcagattaaccatgccattgatatcatttgcggtttcctaaaggaaaggtgctttcgcggctcatcttacccagtgtgtgtctctaaagttgtcaaagggggcagcagtggaaaaggaaccaccttgaggggcagaagcgacgctgatctcgtggtgtttttgtcccccctcaccacatttcaggatcaacttaacaggagaggcgaattcatacaggaaattcgcaggcagctcgaagcttgccagagagagcgggccttctcagtcaagttcgaggtccaggctccacgatggggaaatcctagagctctatccttcgtcctgtcgagcctgcagctgggggagggggtcgagtttgacgtacttcccgcctttgatgccctggggcagttaacgggtggttataagcccaacccccagatctacgtgaaactcatcgaagaatgtaccgacctgcagaaagagggagagttctcaacatgctttacggaactgcaacgtgactttctgaagcaaaggcctactaagctgaagagcttgattaggcttgttaagcattggtatcagaactgcaaaaaaaaactcgggaagctgcctccccagtacgctttggagctgctcacggtgtacgcctgggaaagaggaagtatgaaaacccactttaacactgcgcagggtttcagaaccgttctggaacttgttataaactaccagcagctgtgcatctattggaccaagtattacgacttcaagaatcctatcattgaaaaatatttacggagacagttgacaaaacctcgcccagtgatcctggacccagccgatcccaccgggaacctcggaggtggtgatcctaaagggtggaggcaactcgctcaggaagcagaggcttggctcaactacccctgctttaagaactgggatggtagcccggtctctagctggatcctgctcacacagcatacaccgggctccatccatcccaccggcagacggggactggatcttcatcacccccttaacgcatcggctagctggggcaaaggtctgcagtgttatttagaccaattcctacatttccaagtgggcctcttgatccagcgaggccagtctagctccgtatcatggtgtattatccaggatcgaactcaggtgtcctag

SEQ ID NO: 30312 - DNA, 1245 bp, Artificial Sequence
  derived and/or modified sequence
atgatggacctgaggaataccccggcaaagtccttggacaagtttatcgaggattatttgctcccagatacatgttttaggatgcagattaatcatgccatcgacattatttgcgggtttctgaaagaacgctgtttcagaggatcttcctacccagtgtgtgtcagcaaggttgtaaagggtggctccagtggcaaagggactaccctgagaggccgaagcgacgccgatttggtggtgtttctgtccccactcactactttccaggaccaattaaatagaaggggggagttcatacaagagatacgcaggcaattggaagcctgccagcgagagcgcgctttttcagtcaagtttgaggtccaggcacctcgctgggggaaccctagagccctgagcttcgtcctctcttcacttcagctgggagagggggtcgaattcgacgtactgcctgctttcgacgcgctggggcaattaactgggggatataaacctaaccctcagatctatgttaagctgatcgaagagtgcaccgatttgcagaaagaaggggagttcagcacctgttttacagagctccaaagggacttcctaaaacagcgcccaacaaagcttaaatctctcatccggctcgtcaaacactggtatcaaaactgtaaaaaaaaattaggcaagctcccccctcagtacgcactcgagctgctgaccgtttacgcatgggagaggggaagtatgaagacccatttcaataccgcccagggattccgcaccgtgctggagttggttatcaattatcagcagctctgcatttactggaccaaatattacgatttcaagaaccctataattgaaaagtatttgcgccgacagctcactaaacccagaccagtgatactcgacccagcagatcccacggggaacttaggtggtggagatccgaagggctggaggcaactcgctcaggaggctgaagcctggttaaattacccttgttttaagaactgggatgggagcccggtgtctagctggatcctattgacccagcacactccaggtagcatccacccaactggcaggcgtggccttgacctgcaccacccactcaatgctagtgcaagctggggcaaaggactgcagtgctacctggaccagtttctccacttccaggtcggactgctcatccaacgcggtcagtccagtagcgtatcctggtgcattatccaggatagaactcaggtctcttag

SEQ ID NO: 30313 - DNA, 1684 bp, Artificial Sequence
  derived and/or modified sequence
ccagagcagagttcagagaaaggctgggctgcttgttgctggctaaaggacaaagggtaagtttcaggaagcagaagagtgagcagatgaaattcagcactgggatcaggggagtgtctgatttgcaaaaggaaagtgcaaagacagctcctcccttctgaggaaacgaaaccaacagcagtccaagctcagtcagcagaagagataaaagcaaacaggtctgggaggcagttctgttgccactctctctcctgtcaatgatggatctcagaaataccccagccaaatctctggacaagttcattgaagactatctcttgccagacacgtgtttccgcatgcaaatcaaccatgccattgacatcatctgtgggttcctgaaggaaaggtgcttccgaggtagctcctaccctgtgtgtgtgtccaaggtggtaaagggtggctcctcaggcaagggcaccaccctcagaggccgatctgacgctgacctggttgtcttcctcagtcctctcaccacttttcaggatcagttaaatcgccggggagagttcatccaggaaattaggagacagctggaagcctgtcaaagagagagagcattttccgtgaagtttgaggtccaggctccacgctggggcaacccccgtgcgctcagcttcgtactgagttcgctccagctcggggagggggtggagttcgatgtgctgcctgcctttgatgccctgggtcagttgactggcggctataaacctaacccccaaatctatgtcaagctcatcgaggagtgcaccgacctgcagaaagagggcgagttctccacctgcttcacagaactacagagagacttcctgaagcagcgccccaccaagctcaagagcctcatccgcctagtcaagcactggtaccaaaattgtaagaagaagcttgggaagctgccacctcagtatgccctggagctcctgacggtctatgcttgggagcgagggagcatgaaaacacatttcaacacagcccagggatttcggacggtcttggaattagtcataaactaccagcaactctgcatctactggacaaagtattatgactttaaaaaccccattattgaaaagtacctgagaaggcagctcacgaaacccaggcctgtgatcctggacccggcggaccctacaggaaacttgggtggtggagacccaaagggttggaggcagctggcacaagaggctgaggcctggctgaattacccatgctttaagaattgggatgggtccccagtgagctcctggattctgctgacccagcacactccaggcagcatccaccccacaggcagaagaggactggacctgcaccatcctctgaatgccagtgcatcttgggggaaagggctccagtgttatctggaccagttccttcattttcaggtgggactcttgatccagagaggacaaagctcctcagtgagctggtgtataatccaggacagaacccaggtctcctgactcctggccttctatgccctctatcctatcatagataacattctccacagcctcacttcattccacctattctctgaaaatattccctgagagagaacagagagatttagataagagaatgaaattccagccttgactttcttctgtgcacctgatgggagggtaatgtctaatgtattatc

SEQ ID NO: 30314 - DNA, 1245 bp, Artificial Sequence
  derived and/or modified sequence
atgatggacctgagaaacacccccgccaagagcctggacaagttcatcgaggactacctgctgcccgacacctgcttcagaatgcagatcaaccacgccatcgacatcatctgcggcttcctgaaggagagatgcttcagaggcagcagctaccccgtgtgcgtgagcaaggtggtgaagggcggcagcagcggcaagggcaccaccctgagaggcagaagcgacgccgacctggtggtgttcctgagccccctgaccaccttccaggaccagctgaacagaagaggcgagttcatccaggagatcagaagacagctggaggcctgccagagagagagagccttcagcgtgaagttcgaggtgcaggcccccagatggggcaaccccagagccctgagcttcgtgctgagcagcctgcagctgggcgagggcgtggagttcgacgtgctgcccgccttcgacgccctgggccagctgaccggcggctacaagcccaacccccagatctacgtgaagctgatcgaggagtgcaccgacctgcagaaggagggcgagttcagcacctgcttcaccgagctgcagagagacttcctgaagcagagacccaccaagctgaagagcctgatcagactggtgaagcactggtaccagaactgcaagaagaagctgggcaagctgcccccccagtacgccctggagctgctgaccgtgtacgcctgggagagaggcagcatgaagacccacttcaacaccgcccagggcttcagaaccgtgctggagctggtgatcaactaccagcagctgtgcatctactggaccaagtactacgacttcaagaaccccatcatcgagaagtacctgagaagacagctgaccaagcccagacccgtgatcctggaccccgccgaccccaccggcaacctgggcggcggcgaccccaagggctggagacagctggcccaggaggccgaggcctggctgaactacccctgcttcaagaactgggacggcagccccgtgagcagctggatcctgctgacccagcacacccccggcagcatccaccccaccggcagaagaggcctggacctgcaccaccccctgaacgccagcgccagctggggcaagggcctgcagtgctacctggaccagttcctgcacttccaggtgggcctgctgatccagagaggccagagcagcagcgtgagctggtgcatcatccaggacagaacccaggtgagctag

SEQ ID NO: 30315 - protein, 172 aa, Artificial Sequence
  derived and/or modified sequence
MGNGESQLSSVPAQKLGWFIQEYLKPYEECQTLIDEMVNTICDVLQEPEQFPLVQGVAIGGSYGRKTVLRGNSDGTLVLFFSDLKQFQDQKRSQRDILDKTGDKLKFCLFTKWLKNNFEIQKSLDGFTIQVFTKNQRISFEVLAAFNALSKHCWVSGEKSQRSGCQTALCNL

SEQ ID NO: 30316 - DNA, 519 bp, Artificial Sequence
  derived and/or modified sequence
atgggtaacggggaaagtcagttgtcaagtgtccccgcccagaagctgggttggtttatccaggagtacctaaagccctacgaggagtgccagactcttatcgatgaaatggtgaacacaatttgtgatgtgctgcaggagcccgagcaattcccacttgtgcagggggtcgcaattggggggagctatggccggaagacagttctgagggggaactcggatggtacactggtgttgttcttctctgatcttaaacagtttcaagaccagaaacgcagtcagagagatattctggacaagacaggggataaactgaaattctgcctgtttactaagtggctgaaaaataacttcgaaatccagaaaagtctcgacgggttcaccattcaagtctttactaaaaaccaacgcatttccttcgaggtgttggcagcttttaacgccctgtccaaacactgttgggtctctggagaaaagagccagcggagtggatgtcagaccgctctctgcaacctgtag

SEQ ID NO: 30317 - DNA, 519 bp, Artificial Sequence
  derived and/or modified sequence
atgggaaatggagagagccagctgagctctgtgcctgcccagaagctgggctggttcatccaggagtacctgaagccctatgaggagtgccagaccctgattgatgagatggtgaacaccatctgtgatgtgctgcaggagcctgagcagttccccctggtgcagggcgtggccatcggcggcagctatggcaggaagacagtgctgcggggcaacagtgatggcaccctggtgctcttcttcagtgacctgaagcagttccaggaccagaagaggagccagagggacatcctggacaagacaggagacaagctgaagttctgcctcttcaccaagtggctgaagaacaactttgagatccagaagagcctggatggcttcaccatccaggtgttcaccaagaaccagaggatcagctttgaggtgctggccgccttcaatgccctgagcaagcactgctgggtgtctggagagaagagccagaggagcggctgccagacagccctgtgcaacctgtag

SEQ ID NO: 30318 - DNA, 519 bp, Artificial Sequence
  derived and/or modified sequence
atgggcaacggcgagagccagctgagcagcgtgcccgcccagaagcttggctggttcatccaggaatacctgaaaccgtacgaagaatgccaaaccctgatcgacgaaatggtgaacaccatttgcgatgtgttgcaagaacccgaacagtttccgcttgtccaaggagtcgccattggcggttcttatggccgtaaaaccgtgttaagaggcaattctgacggaacactggttttattcttctcagatttgaagcagtttcaggaccaaaagaggagccaaagagacatcctcgacaaaaccggggacaagctcaagttctgcttattcaccaagtggctaaagaataacttcgagattcagaagtctcttgatgggttcactatccaggtttttactaaaaaccagaggatcagctttgaagtgttagccgctttcaacgctcttagcaagcactgctgggtcagcggcgaaaagagccagcggtctggatgccagactgcattatgtaatttgtag

SEQ ID NO: 30319 - DNA, 519 bp, Artificial Sequence
  derived and/or modified sequence
atgggcaacggagaatctcagcttagtagcgtgccagcccagaagttgggttggtttatccaggaatatctgaagccttatgaagagtgccagacccttattgatgagatggttaataccatatgtgacgtactccaggagccagagcagttcccactcgtccaaggcgttgccatcggaggctcttacgggaggaagacagtgctccgagggaacagcgacggcaccctagtgctgtttttctctgacctgaaacagttccaggaccaaaaaagatcacaacgggacatactggataagacgggagacaagcttaagttttgcctgtttacgaaatggctgaagaacaacttcgagattcaaaagagcctggatggcttcacaatccaggtctttaccaagaaccagaggatctcctttgaggtgcttgccgcatttaacgcattgtccaaacattgctgggtctcgggcgagaaatcacagcgctcaggatgtcagaccgcgttatgcaatctttag

SEQ ID NO: 30320 - DNA, 2072 bp, Artificial Sequence
  derived and/or modified sequence
gctcgctgcagtgggtggagagaggcctctagacttcagtttcagtttcctggctctgggcagcagcaagaattcctctgcctcccatcctaccattcactgtcttgccggcagccagctgagagcaatgggaaatggggagtcccagctgtcctcggtgcctgctcagaagctgggttggtttatccaggaatacctgaagccctacgaagaatgtcagacactgatcgacgagatggtgaacaccatctgtgacgtcctgcaggaacccgaacagttccccctggtgcagggagtggccataggtggctcctatggacggaaaacagtcttaagaggcaactccgatggtacccttgtcctcttcttcagtgacttaaaacaattccaggatcagaagagaagccaacgtgacatcctcgataaaactggggataagctgaagttctgtctgttcacgaagtggttgaaaaacaatttcgagatccagaagtcccttgatgggttcaccatccaggtgttcacaaaaaatcagagaatctctttcgaggtgctggccgccttcaacgctctgagtaagcattgctgggtgtcaggagagaaaagccaaagaagcgggtgccagacagctctgtgcaacctctaggccatgagtgggatagataccactgctgctttaaaaaatgggagaccatagaccctcaggagagaagaatcccttctaccctggactcgctctcttctctggaactaacttctcccccataccctgattgtctttggagaaaatgttctggattctagaatctaaggcagagccttttaagccatactgtacacataaatcacctggaaccttgttaaaatgcagatcctgactcaggaggtctgagttagagcccaggatttcatatttctagccagctccatgatgagctgctggtccgcagatcatgcttgcaggttttgaccagagtcagtgttggttagagtaagaggatgaggcagacatctgggaaaagtccagctggggcaagcatttgaagtctgccttcctaccaggtcaaaatcaaggcaacgaccttccatagataactatcaaagcttgagggggtgccttgaacccaactcctaaatccctaagacctgcccacctcttgtgtctcctgtctcagcaaacattcccacactcttgcatattgttaaagtaacctctgcttaccaggcttctggtttaataaaagatggctagagtgactccatcttaaagcaagtagctaggcactcaaaaggaacctacaggcttaatacttgggtctgaaaatagccacagtctaagctgaccaccaattataattgcagaatatttaaggccatacaaaacatctcccactaagcctacaaaatgtccaggtgtcctaaaagttcagcccacttaaaggcagcattaatgagcaggtttaggttgaaggattaatggtcatcaataccactgttaagaagaaaattcttggccaaattgaatttaatggagtttaactgagcagacaattcacaaatctagaagcctcctgagccagagtaggttcagagagtcttgaacacagccacgtggtggaagaagatttatggacaggaaaaggaaaatgatgtactgaaaatgaaagtgaggtacagaaacagccagactggttatagctcagcattggccttatttgaacgagatttgaacagttggccacctttgattggccgaaactcagtgattggcacaagagtaggttgcagtctgtttacacatccttttaggttatagttcaccatgtacagagaaattttaggccaaacttaaaatatgtaaggaggcagctttaggctaaacttgatttaacagcaccaataccccctacctttagtgagcacatctgcacattccaattttaatgacagctccttagaatttcttatcaacgaagacactaacaaagaatggcgcattcctccttctcctttctgaggatgccctaccctgtaacaaagtcgtttctaataaatttgcttctttcaccata

SEQ ID NO: 30321 - DNA, 519 bp, Artificial Sequence
  derived and/or modified sequence
atgggcaacggcgagagccagctgagcagcgtgcccgcccagaagctgggctggttcatccaggagtacctgaagccctacgaggagtgccagaccctgatcgacgagatggtgaacaccatctgcgacgtgctgcaggagcccgagcagttccccctggtgcagggcgtggccatcggcggcagctacggcagaaagaccgtgctgagaggcaacagcgacggcaccctggtgctgttcttcagcgacctgaagcagttccaggaccagaagagaagccagagagacatcctggacaagaccggcgacaagctgaagttctgcctgttcaccaagtggctgaagaacaacttcgagatccagaagagcctggacggcttcaccatccaggtgttcaccaagaaccagagaatcagcttcgaggtgctggccgccttcaacgccctgagcaagcactgctgggtgagcggcgagaagagccagagaagcggctgccagaccgccctgtgcaacctgtag

SEQ ID NO: 30322 - protein, 4870 aa, Artificial Sequence
  derived and/or modified sequence
MAEGGEGGEDEIQFLRTEDEVVLQCIATIHKEQRKFCLAAEGLGNRLCFLEPTSEAKYIPPDLCVCNFVLEQSLSVRALQEMLANTGENGGEGAAQGGGHRTLLYGHAVLLRHSFSGMYLTCLTTSRSQTDKLAFDVGLREHATGEACWWTIHPASKQRSEGEKVRIGDDLILVSVSSERYLHLSVSNGNIQVDASFMQTLWNVHPTCSGSSIEEGYLLGGHVVRLFHGHDECLTIPSTDQNDSQHRRIFYEAGGAGTRARSLWRVEPLRISWSGSNIRWGQAFRLRHLTTGHYLALTEDQGLILQDRAKSDTKSTAFSFRASKELKEKLDSSHKRDIEGMGVPEIKYGDSVCFVQHIASGLWVTYKAQDAKTSRLGPLKRKVILHQEGHMDDGLTLQRCQREESQAARIIRNTTALFSQFVSGNNRTAAPITLPIEEVLQTLQDLIAYFQPPEEEMRHEDKQNKLRSLKNRQNLFKEEGMLALVLNCIDRLNVYNSVAHFAGIAREESGMAWKEILNLLYKLLAALIRGNRNNCAQFSNNLDWLISKLDRLESSSGILEVLHCILTESPEALNLIAEGHIKSIISLLDKHGRNHKVLDILCSLCLCNGVAVRANQNLICDNLLPRRNLLLQTRLINDVTSIRPNIFLGVAEGSAQYKKWYFELIIDQVDPFLTAEPTHLRVGWASSSGYAPYPGGGEGWGGNGVGDDLYSYGFDGLHLWSGRIPRAVASINQHLLRSDDVVSCCLDLGVPSISFRINGQPVQGMFENFNTDGLFFPVMSFSAGVKVRFLMGGRHGEFKFLPPSGYAPCYEALLPKEKMRLEPVKEYKRDADGIRDLLGTTQFLSQASFIPCPVDTSQVILPPHLEKIRDRLAENIHELWGMNKIELGWTFGKIRDDNKRQHPCLVEFSKLPETEKNYNLQMSTETLKTLLALGCHIAHVNPAAEEDLKKVKLPKNYMMSNGYKPAPLDLSDVKLLPPQEILVDKLAENAHNVWAKDRIKQGWTYGIQQDLKNKRNPRLVPYALLDERTKKSNRDSLREAVRTFVGYGYNIEPSDQELADSAVEKVSIDKIRFFRVERSYAVRSGKWYFEFEVVTGGDMRVGWARPGCRPDVELGADDQAFVFEGNRGQRWHQGSGYFGRTWQPGDVVGCMINLDDASMIFTLNGELLITNKGSELAFADYEIENGFVPICCLGLSQIGRMNLGTDASTFKFYTMCGLQEGFEPFAVNMNRDVAMWFSKRLPTFVNVPKDHPHIEVMRIDGTMDSPPCLKVTHKTFGTQNSNADMIYCRLSMPVECHSSFSHSPCLDSEAFQKRKQMQEILSHTTTQCYYAIRIFAGQDPSCVWVGWVTPDYHLYSEKFDLNKNCTVTVTLGDERGRVHESVKRSNCYMVWGGDIVASSQRSNRSNVDLEIGCLVDLAMGMLSFSANGKELGTCYQVEPNTKVFPAVFLQPTSTSLFQFELGKLKNAMPLSAAIFRSEEKNPVPQCPPRLDVQTIQPVLWSRMPNSFLKVETERVSERHGWVVQCLEPLQMMALHIPEENRCVDILELCEQEDLMRFHYHTLRLYSAVCALGNSRVAYALCSHVDLSQLFYAIDNKYLPGLLRSGFYDLLISIHLASAKERKLMMKNEYIIPITSTTRNIRLFPDESKRHGLPGVGLRTCLKPGFRFSTPCFVVTGEDHQKQSPEIPLESLRTKALSMLTEAVQCSGAHIRDPVGGSVEFQFVPVLKLIGTLLVMGVFDDDDVRQILLLIDPSVFGEHSAGTEEGAEKEEVTQVEEKAVEAGEKAGKEAPVKGLLQTRLPESVKLQMCELLSYLCDCELQHRVEAIVAFGDIYVSKLQANQKFRYNELMQALNMSAALTARKTKEFRSPPQEQINMLLNFQLGENCPCPEEIREELYDFHEDLLLHCGVPLEEEEEEEEDTSWTGKLCALVYKIKGPPKPEKEQPTEEEERCPTTLKELISQTMICWAQEDQIQDSELVRMMFNLLRRQYDSIGELLQALRKTYTISHTSVSDTINLLAALGQIRSLLSVRMGKEEELLMINGLGDIMNNKVFYQHPNLMRVLGMHETVMEVMVNVLGTEKSQIAFPKMVASCCRFLCYFCRISRQNQKAMFEHLSYLLENSSVGLASPSMRGSTPLDVAASSVMDNNELALSLEEPDLEKVVTYLAGCGLQSCPMLLAKGYPDVGWNPIEGERYLSFLRFAVFVNSESVEENASVVVKLLIRRPECFGPALRGEGGNGLLAAMQGAIKISENPALDLPSQGYKREVSTGDDEEEEEIVHMGNAIMSFYSALIDLLGRCAPEMHLIQTGKGEAIRIRSILRSLVPTEDLVGIISIPLKLPSLNKDGSVSEPDMAANFCPDHKAPMVLFLDRVYGIKDQTFLLHLLEVGFLPDLRASASLDTVSLSTTEAALALNRYICSAVLPLLTRCAPLFAGTEHCTSLIDSTLQTIYRLSKGRSLTKAQRDTIEECLLAICNHLRPSMLQQLLRRLVFDVPQLNEYCKMPLKLLTNHYEQCWKYYCLPSGWGSYGLAVEEELHLTEKLFWGIFDSLSHKKYDPDLFRMALPCLSAIAGALPPDYLDTRITATLEKQISVDADGNFDPKPINTMNFSLPEKLEYIVTKYAEHSHDKWACDKSQSGWKYGISLDENVKTHPLIRPFKTLTEKEKEIYRWPARESLKTMLAVGWTVERTKEGEALVQQRENEKLRSVSQANQGNSYSPAPLDLSNVVLSRELQGMVEVVAENYHNIWAKKKKLELESKGGGSHPLLVPYDTLTAKEKFKDREKAQDLFKFLQVNGIIVSRGMKDMELDASSMEKRFAYKFLKKILKYVDSAQEFIAHLEAIVSSGKTEKSPRDQEIKFFAKVLLPLVDQYFTSHCLYFLSSPLKPLSSSGYASHKEKEMVAGLFCKLAALVRHRISLFGSDSTTMVSCLHILAQTLDTRTVMKSGSELVKAGLRAFFENAAEDLEKTSENLKLGKFTHSRTQIKGVSQNINYTTVALLPILTSIFEHVTQHQFGMDLLLGDVQISCYHILCSLYSLGTGKNIYVERQRPALGECLASLAAAIPVAFLEPTLNRYNPLSVFNTKTPRERSILGMPDTVEDMCPDIPQLEGLMKEINDLAESGARYTEMPHVIEVILPMLCNYLSYWWERGPENLPPSTGPCCTKVTSEHLSLILGNILKIINNNLGIDEASWMKRIAVYAQPIISKARPDLLRSHFIPTLEKLKKKAVKTVQEEEQLKADGKGDTQEAELLILDEFAVLCRDLYAFYPMLIRYVDNNRSNWLKSPDADSDQLFRMVAEVFILWCKSHNFKREEQNFVIQNEINNLAFLTGDSKSKMSKAMQVKSGGQDQERKKTKRRGDLYSIQTSLIVAALKKMLPIGLNMCTPGDQELISLAKSRYSHRDTDEEVREHLRNNLHLQEKSDDPAVKWQLNLYKDVLKSEEPFNPEKTVERVQRISAAVFHLEQVEQPLRSKKAVWHKLLSKQRKRAVVACFRMAPLYNLPRHRSINLFLHGYQRFWIETEEYSFEEKLVQDLAKSPKVEEEEEEETEKQPDPLHQIILYFSRNALTERSKLEDDPLYTSYSSMMAKSCQSGEDEEEDEDKEKTFEEKEMEKQKTLYQQARLHERGAAEMVLQMISASKGEMSPMVVETLKLGIAILNGGNAGVQQKMLDYLKEKKDAGFFQSLSGLMQSCSVLDLNAFERQNKAEGLGMVTEEGTLIVRERGEKVLQNDEFTRDLFRFLQLLCEGHNSDFQNFLRTQMGNTTTVNVIISTVDYLLRLQESISDFYWYYSGKDIIDESGQHNFSKALAVTKQIFNSLTEYIQGPCIGNQQSLAHSRLWDAVVGFLHVFANMQMKLSQDSSQIELLKELLDLLQDMVVMLLSLLEGNVVNGTIGKQMVDTLVESSTNVEMILKFFDMFLKLKDLTSSDTFKEYDPDGKGIISKKEFQKAMEGQKQYTQSEIDFLLSCAEADENDMFNYVDFVDRFHEPAKDIGFNVAVLLTNLSEHMPNDSRLKCLLDPAESVLNYFEPYLGRIEIMGGAKKIERVYFEISESSRTQWEKPQVKESKRQFIFDVVNEGGEQEKMELFVNFCEDTIFEMQLASQISESDSADRPEEEEEDEDSSYVLEIAGEEEEDGSLEPASAFAMACASVKRNVTDFLKRATLKNLRKQYRNVKKMTAKELVKVLFSFFWMLFVGLFQLLFTILGGIFQILWSTVFGGGLVEGAKNIRVTKILGDMPDPTQFGIHDDTMEAERAEVMEPGITTELVHFIKGEKGDTDIMSDLFGLHPKKEGSLKHGPEVGLGDLSEIIGKDEPPTLESTVQKKRKAQAAEMKAANEAEGKVESEKADMEDGEKEDKDKEEEQAEYLWTEVTKKKKRRCGQKVEKPEAFTANFFKGLEIYQTKLLHYLARNFYNLRFLALFVAFAINFILLFYKVTEEPLEEETEDVANLWNSFNDEEEEEAMVFFVLQESTGYMAPTLRALAIIHTIISLVCVVGYYCLKVPLVVFKREKEIARKLEFDGLYITEQPSEDDIKGQWDRLVINTPSFPNNYWDKFVKRKVINKYGDLYGAERIAELLGLDKNALDFSPVEETKAEAASLVSWLSSIDMKYHIWKLGVVFTDNSFLYLAWYTTMSVLGHYNNFFFAAHLLDIAMGFKTLRTILSSVTHNGKQLVLTVGLLAVVVYLYTVVAFNFFRKFYNKSEDDDEPDMKCDDMMTCYLFHMYVGVRAGGGIGDEIEDPAGDPYEMYRIVFDITFFFFVIVILLAIIQGLIIDAFGELRDQQEQVREDMETKCFICGIGNDYFDTTPHGFETHTLQEHNLANYLFFLMYLINKDETEHTGQESYVWKMYQERCWDFFPAGDCFRKQYEDQLG

SEQ ID NO: 30323 - protein, 307 aa, Artificial Sequence
  derived and/or modified sequence
MEPSSLELPADTVQRIAAELKCHPTDERVALHLDEEDKLRHFRECFYIPKIQDLPPVDLSLVNKDENAIYFLGNSLGLQPKMVKTYLEEELDKWAKIAAYGHEVGKRPWITGDESIVGLMKDIVGANEKEIALMNALTVNLHLLMLSFFKPTPKRYKILLEAKAFPSDHYAIESQLQLHGLNIEESMRMIKPREGEETLRIEDILEVIEKEGDSIAVILFSGVHFYTGQHFNIPAITKAGQAKGCYVGFDLAHAVGNVELYLHDWGVDFACWCSYKYLNAGAGGIAGAFIHEKHAHTIKPARSEFFN

SEQ ID NO: 30324 - DNA, 924 bp, Artificial Sequence
  derived and/or modified sequence
atggagcccagcagcctggagctgcccgccgacaccgtgcagagaatcgccgccgagctgaagtgccaccccaccgacgagagagtggccctgcacctggacgaggaggacaagctgagacacttcagagagtgcttctacatccccaagatccaggacctgccccccgtggacctgagcctggtgaacaaggacgagaacgccatctacttcctgggcaacagcctgggcctgcagcccaagatggtgaagacctacctggaggaggagctggacaagtgggccaagatcgccgcctacggccacgaggtgggcaagagaccctggatcaccggcgacgagagcatcgtgggcctgatgaaggacatcgtgggcgccaacgagaaggagatcgccctgatgaacgccctgaccgtgaacctgcacctgctgatgctgagcttcttcaagcccacccccaagagatacaagatcctgctggaggccaaggccttccccagcgaccactacgccatcgagagccagctgcagctgcacggcctgaacatcgaggagagcatgagaatgatcaagcccagagagggcgaggagaccctgagaatcgaggacatcctggaggtgatcgagaaggagggcgacagcatcgccgtgatcctgttcagcggcgtgcacttctacaccggccagcacttcaacatccccgccatcaccaaggccggccaggccaagggctgctacgtgggcttcgacctggcccacgccgtgggcaacgtggagctgtacctgcacgactggggcgtggacttcgcctgctggtgcagctacaagtacctgaacgccggcgccggcggcatcgccggcgccttcatccacgagaagcacgcccacaccatcaagcccgccagaagcgagttcttcaactag

SEQ ID NO: 30325 - DNA, 924 bp, Artificial Sequence
  derived and/or modified sequence
atggagcccagctctctcgaactacccgccgacactgtccagcggattgccgccgagctcaaatgtcatcctactgacgagcgggtcgcccttcatcttgatgaggaggacaaactacgccactttagagaatgtttttatatcccgaagattcaggatcttcccccagtggacttgagtttggtcaataaagatgagaatgctatctattttctcggcaattcgctaggactgcagccaaagatggtgaagacctacctcgaggaagagttagacaagtgggcaaagattgccgcctacgggcacgaggttggaaaacgcccctggatcaccggagatgaatcaattgtggggctgatgaaggacattgtgggcgcaaatgaaaaagagatcgccctgatgaatgcccttacagtcaatctccacctgctgatgctgtcatttttcaagcccacgcccaaacgctataaaatccttctggaagctaaggccttcccgagtgaccactacgcaattgagtcccagctgcagctgcatggattgaatatcgaagaatctatgcggatgataaagcctcgagaaggagaggagacgcttcggattgaggacattctggaagtaatcgagaaggagggcgactccatcgcagtcatcttgttttcaggcgtccacttctacacaggacaacacttcaatattcctgctattactaaggcaggtcaagccaaaggatgctacgtcggttttgatctggcccacgctgtcggaaacgtggaactctacctccatgactggggagtggactttgcatgctggtgctcgtacaaatatttgaacgcaggtgctggaggaattgctggcgcttttatccacgaaaagcatgcccacaccatcaaaccggcccgctcagaatttttcaactag

SEQ ID NO: 30326 - DNA, 1257 bp, Artificial Sequence
  derived and/or modified sequence
ggcctgtacattttcaaggaattcttgagaggttcttggagagattctgggagccaaacactccattgggatcctagctgttttagagaacaacttgtaatggagccttcatctcttgagctgccggctgacacagtgcagcgcattgcggctgaactcaaatgccacccaacggatgagagggtggctctccacctagatgaggaagataagctgaggcacttcagggagtgcttttatattcccaaaatacaggatctgcctccagttgatttatcattagtgaataaagatgaaaatgccatctatttcttgggaaattctcttggccttcaaccaaaaatggttaaaacatatcttgaagaagaactagataagtgggccaaaatagcagcctatggtcatgaagtggggaagcgtccttggattacaggagatgagagtattgtaggccttatgaaggacattgtaggagccaatgagaaagaaatagccctaatgaatgctttgactgtaaatttacatcttctaatgttatcattttttaagcctacgccaaaacgatataaaattcttctagaagccaaagccttcccttctgatcattatgctattgagtcacaactacaacttcacggacttaacattgaagaaagtatgcggatgataaagccaagagagggggaagaaaccttaagaatagaggatatccttgaagtaattgagaaggaaggagactcaattgcagtgatcctgttcagtggggtgcatttttacactggacagcactttaatattcctgccatcacaaaagctggacaagcgaagggttgttatgttggctttgatctagcacatgcagttggaaatgttgaactctacttacatgactggggagttgattttgcctgctggtgttcctacaagtatttaaatgcaggagcaggaggaattgctggtgccttcattcatgaaaagcatgcccatacgattaaacctgcgagatcggagttctttaattaggaatggaatgcaacagatttggacaagtcaaggacaagagctttagagagaccaaagagtttttcactgttaaagtgtccagtatgtagccgagaaccatatggagaacatcaaatacagtggaacaaatgtaactgctattgatgtcacactttgtgaagtagtctttgttgcttaaaaagggtgacatctagtggctaaacatgttatttcaaataaataatatcgaaataa

SEQ ID NO: 30327 - DNA, 924 bp, Artificial Sequence
  derived and/or modified sequence
atggagcccagcagcctggagctgcctgctgacacagtgcagagaattgctgctgagctgaagtgccaccccacagatgagcgggtggccctgcacctggatgaggaggacaagctgcggcacttccgggagtgcttctacatccccaagatccaggacctgccccctgtggacctgagcctggtgaacaaggatgaaaatgccatctacttcctgggcaacagcctgggcctgcagcccaagatggtgaagacctacctggaggaggagctggacaagtgggccaagattgctgcctacggccacgaggtgggcaagaggccctggatcactggagatgagagcatcgtgggcctgatgaaggacatcgtgggcgccaatgagaaggagatcgccctgatgaatgccctgactgtgaacctgcacctgctgatgctgtccttcttcaagcccacccccaagcgctacaagatcctgctggaggccaaggccttccccagcgaccactacgccatcgagagccagctgcagctgcacggcctgaacatcgaggagagcatgaggatgatcaagccccgggagggggaggagaccctgagaattgaggacatcctggaggtgattgagaaggagggggacagcattgctgtgatcctcttctctggagtgcacttctacacaggccagcacttcaacatcccagccatcaccaaggccggccaggccaagggctgctacgtgggctttgacctggcccatgctgtgggcaatgtggagctgtacctgcatgactggggcgtggactttgcctgctggtgcagctacaagtacctgaatgctggggccggcggcattgctggggccttcatccacgagaagcacgcccacaccatcaagccagcccggtctgagttcttcaactag

SEQ ID NO: 30328 - DNA, 924 bp, Artificial Sequence
  derived and/or modified sequence
atggagcccagcagcctggagctgcccgccgacaccgtgcagcggatcgctgctgagctgaagtgccaccccactgacgagcgggtggcgcttcatttggatgaagaagataagctaaggcattttagggagtgtttttacatccccaagatccaggatctgcctcccgttgacctgtcactggtgaataaagatgaaaatgctatttatttcttgggtaacagccttgggcttcagccgaaaatggtgaagacttacctcgaggaagagttggataaatgggcgaaaatcgccgcgtatggccatgaggtgggcaaaaggccttggatcactggtgatgaaagtattgtggggctgatgaaggacatcgtaggtgcgaatgaaaaagagattgccctgatgaacgctttgaccgtcaatctgcacctcctgatgctttctttcttcaaaccgacgccaaaacggtacaaaatcttacttgaggcaaaggcttttccgtcagatcactacgcaatagagtcccagctgcagctgcacgggctaaatatcgaggaatcaatgcgcatgatcaaaccgcgtgagggcgaggagacactgcggatcgaagacatactcgaggtgatcgagaaagaaggcgacagcatagcagtgatcctgttcagcggggtgcatttttacaccggccagcatttcaacatcccagccatcacaaaggctgggcaagctaaggggtgttacgtagggttcgacttagcccacgctgttggcaatgtcgaattgtacctccacgactggggtgtggatttcgcctgttggtgtagctataagtatctaaacgcaggtgcgggcggcatcgccggcgcgtttattcacgagaagcatgctcacacaatcaaacctgcgcgtagtgaatttttcaactag

SEQ ID NO: 30329 - DNA, 924 bp, Artificial Sequence
  derived and/or modified sequence
atggagccctcaagtctggagctgccagcggacacggtacagagaattgccgcagagcttaaatgtcaccccacagacgagcgtgtggcactacacctggatgaagaggacaaattgagacattttcgtgagtgcttttatatacctaaaatccaggatttgccacctgttgacctgtctctggtgaacaaagatgaaaacgccatctatttcctgggcaactctctcgggctgcagccgaagatggtgaagacctacctggaagaagaactggacaaatgggctaaaatcgctgcatacggtcacgaagtgggtaaaaggccttggataaccggagacgagtccatagttggcttgatgaaggatatagtcggcgcaaatgagaaagagatagctctcatgaatgctctcacggtcaatctccatctcctgatgttgagcttctttaagccaactcccaagcgatataagattttgctggaggctaaggcctttccatctgatcactatgccattgaaagtcaactgcaactgcacggcctcaacattgaggaatccatgaggatgatcaagcctcgtgaaggcgaggaaactttgcgcattgaagatattctcgaggtcatcgagaaggagggtgatagcatagccgtgatcctgttcagtggggtccacttctatacagggcagcattttaatatccctgccattacaaaagcaggacaggccaaaggctgttacgtcggctttgatctcgcgcatgcggtgggtaatgttgaactttatctccacgattggggcgtggacttcgcctgttggtgctcgtacaaatatctcaatgcgggagcgggtgggatagcaggcgcatttatccacgagaaacacgcccacacaattaaacctgcgagatccgaatttttcaattag

SEQ ID NO: 30330 - protein, 595 aa, Artificial Sequence
  derived and/or modified sequence
MVGVPGAAAFQLGPEKRVPAMPGSPVEVKIQSRSSPPTMPPLPPINPGGPRPVSFTPTALSNGINHSPPTLNGAPSPPQRFSNGPASSTSSALTNQQLPATCGARQLSKLKRFLTTLQQFGNDISPEIGEKVRTLVLALVNSTVTIEEFHCKLQEATNFPLRPFVIPFLKANLPLLQRELLHCARAAKQTPSQYLAQHEHLLLNTSIASPADSSELLMEVHGNGKRPSPERREENSFDRDTIAPEPPAKRVCTISPAPRHSPALTVPLMNPGGQFHPTPPPLQHYTLEDIATSHLYREPNKMLEHREVRDRHHSLGLNGGYQDELVDHRLTEREWADEWKHLDHALNCIMEMVEKTRRSMAVLRRCQESDREELNYWKRRYNENTELRKTGTELVSRQHSPGSADSLSNDSQREFNSRPGTGYVPVEFWKKTEEAVNKVKIQAMSEVQKAVAEAEQKAFEVIATERARMEQTIADVKRQAAEDAFLVINEQEESTENCWNCGRKASETCSGCNIARYCGSFCQHKDWERHHRLCGQNLHGQSPHGQGRPLLPVGRGSSARSADCSVPSPALDKTSATTSRSSTPASVTAIDTNGL

SEQ ID NO: 30331 - protein, 181 aa, Artificial Sequence
  derived and/or modified sequence
MVGVPGAAAFQLGPEKRVPAMPGSPVEVKIQSRSSPPTMPPLPPINPGGPRPVSFTPTALSNGINHSPPTLNGAPSPPQRFSNGPASSTSSALTNQQLPATCGARQLSKLKRFLTTLQQFGNDISPEIGEKVRTLVLALVNSTVTIEEFHCKLQEATNFPLRPFVIPFLKANLPLLQRELL

SEQ ID NO: 30332 - DNA, 1788 bp, Artificial Sequence
  derived and/or modified sequence
atggtcggggtgccaggcgccgcagccttccagctgggccctgagaagagagtgccagctatgcccggctctcctgtagaggtgaaaatccaaagtcgcagtagccccccgaccatgccaccccttccccccatcaaccctggtggcccccgacccgtgtccttcacgcccaccgccctgtccaatggtatcaaccatagccctcctactctgaacggcgctccttctccaccacaacggttcagcaatggacctgctagctccacctcctcagctcttacaaaccagcagttgcccgctacatgcggtgcgcgccagttgtctaaactgaaaagatttcttaccacactgcaacagtttgggaatgatatctctcctgagataggcgaaaaggtccgcacactagttctcgctcttgtcaactcaaccgtgacaatagaggagtttcattgcaaactacaagaggccacgaactttccccttaggccctttgtgatccctttcctcaaagctaacctgccccttctacaacgtgaacttttgcattgcgctagggctgccaagcagaccccatcacagtatcttgctcaacatgaacacttgctgttaaatactagcattgcatctccagctgatagctcagagctgctaatggaggtgcatgggaatggcaagaggccctcacccgaaaggcgggaggagaattctttcgaccgggacaccatagctcccgagcctcccgcaaagcgagtctgcaccatcagcccagcccctcgccactcccctgcactgacagtgccattaatgaaccccggtgggcagttccaccctacacccccacctctgcagcactacacactggaagatatagccacctcacacctgtatagggagcctaataaaatgctcgaacaccgagaggtgagagatagacaccattccttaggtttgaatggcggataccaggacgagcttgtcgaccacagacttacagagagagagtgggcagacgaatggaagcatttggatcatgcactgaactgtattatggaaatggtggagaagaccaggagatccatggccgtcttacgaagatgtcaagagagcgaccgagaggagcttaactactggaagcgacgatataacgagaacaccgaactccggaaaacgggtactgaactagtgtcgcggcaacattcgccaggcagcgcagactccttatccaacgatagtcaaagggagtttaatagcagaccagggaccggatacgtaccagtggagttctggaagaaaaccgaggaggctgtcaacaaagttaagatccaagctatgagtgaggtgcagaaagcggttgccgaggccgagcagaaggccttcgaggtcatagccaccgaacgtgcccgcatggaacagacgatagctgacgtcaaacggcaggccgccgaagacgcgtttctggtgatcaacgaacaagaggaaagcacagagaactgctggaattgtgggcggaaggcctccgagacttgttcagggtgcaatattgcaaggtattgcgggtccttctgtcaacacaaagattgggagaggcatcataggctgtgcggacagaaccttcatggacagagccctcacggccagggtaggcccctgttgcctgtcggacgaggcagctcggcccgaagtgcagattgttcagtgccttcaccggccctggataagacgagcgccaccacctctcgttcatccactcccgcctcagtgaccgccatcgataccaatggcctgtag

SEQ ID NO: 30333 - DNA, 546 bp, Artificial Sequence
  derived and/or modified sequence
atggtgggggtgcccggtgcagcagcgttccagctggggcctgagaagcgagttccggccatgcctgggagccctgtagaagtaaaaatacagagtagatcatctcctcccacaatgcctcctttgccaccgataaaccccggtggcccacggcccgtttcttttacgcccaccgcgcttagcaatggcatcaatcactctccccctacgctgaatggcgcgccgagtccgccccaacgctttagcaatggtccagctagctccactagcagcgccttaaccaaccaacagctgcctgctacatgcggagcacggcagctttcaaaactcaagcgttttttaacgaccctccaacagttcggaaacgacattagccctgagattggagaaaaggtaaggaccctggttctggctctggtgaatagcaccgtcaccattgaggagtttcactgtaaattgcaagaagctacgaacttccctcttcgccctttcgtcattccattcctgaaagctaacctcccacttctgcaacgcgagctactctag

SEQ ID NO: 30334 - DNA, 1788 bp, Artificial Sequence
  derived and/or modified sequence
atggtgggcgtgcctggagctgctgccttccagctgggccctgagaagagggtgcctgccatgcctggcagccctgtggaggtgaagatccagagccgcagcagcccccccaccatgccacccctgccccccatcaaccctgggggccccaggcctgtgtccttcacccccacagccctgagcaatggcatcaaccacagcccccccaccctgaatggagcccccagccccccccagcgcttcagcaatggacctgccagcagcaccagcagcgccctgaccaaccagcagctgcctgccacctgtggggcccggcagctgagcaagctgaagcgcttcctgaccaccctgcagcagtttggaaatgacatcagccctgagatcggggagaaggtgaggaccctggtgctggccctggtgaacagcacagtgaccatcgaggagttccactgcaagctgcaggaggccaccaacttccccctgcggcccttcgtcatccccttcctgaaggccaacctgcccctgctgcagcgggagctgctgcactgtgcccgggccgccaagcagacccccagccagtacctggcccagcacgagcacctgctgctgaacaccagcatcgccagccctgctgacagcagcgagctgctgatggaggtgcatggaaatggcaagaggcccagccctgagcggcgggaggagaacagctttgaccgggacaccatcgcccctgagcccccagccaagagggtgtgcaccatcagccctgcccccaggcacagccctgccctgactgtgcccctgatgaaccctgggggccagttccaccccaccccaccacccctgcagcactacaccctggaggacatcgccaccagccacctgtaccgggagcccaacaagatgctggagcaccgggaggtgcgggacagacaccacagcctgggcctgaatggaggctaccaggatgagctggtggaccaccggctgacagagcgggagtgggcagatgagtggaagcacctggaccacgccctgaactgcatcatggagatggtggagaagaccaggaggtccatggctgtgctgcggcgctgccaggagagtgaccgggaggagctgaactactggaagaggcgctacaatgaaaatacagagctgaggaagacaggaacagagctggtgtcccggcagcacagccctggcagcgctgacagcctgagcaatgacagccagcgggagttcaacagcaggcctggcaccggctacgtgcctgtggagttctggaagaagacagaggaggccgtgaacaaggtgaagatccaggccatgtctgaggtgcagaaggctgtggccgaggccgagcagaaggcctttgaagtcatcgccacagagcgggccaggatggagcagaccatcgcagatgtgaagaggcaggccgcagaagatgccttcctggtgatcaatgagcaggaggagagcacagagaactgctggaactgtggcaggaaggccagcgagacctgcagcggctgcaacatcgcccgctactgcggcagcttctgccagcacaaggactgggagcggcaccaccggctgtgtggccagaacctgcacggccagagcccccacggccagggccggcccctgctgcctgtgggccggggcagcagcgcccggtctgctgactgcagcgtgcccagccctgccctggacaagaccagcgccaccaccagccgcagcagcaccccagcctctgtgacagccatcgacaccaacggcctgtag

SEQ ID NO: 30335 - DNA, 546 bp, Artificial Sequence
  derived and/or modified sequence
atggtgggcgtgcctggagctgctgccttccagctgggccctgagaagagggtgcctgccatgcctggcagccctgtggaggtgaagatccagagccgcagcagcccccccaccatgccacccctgccccccatcaaccctgggggccccaggcctgtgtccttcacccccacagccctgagcaatggcatcaaccacagcccccccaccctgaatggagcccccagccccccccagcgcttcagcaatggacctgccagcagcaccagcagcgccctgaccaaccagcagctgcctgccacctgtggggcccggcagctgagcaagctgaagcgcttcctgaccaccctgcagcagtttggaaatgacatcagccctgagatcggggagaaggtgaggaccctggtgctggccctggtgaacagcacagtgaccatcgaggagttccactgcaagctgcaggaggccaccaacttccccctgcggcccttcgtcatccccttcctgaaggccaacctgcccctgctgcagcgggagctgctgtag

SEQ ID NO: 30336 - DNA, 1788 bp, Artificial Sequence
  derived and/or modified sequence
atggtgggcgtgcccggcgccgccgccttccagctgggccccgagaaacgcgtgccagcaatgcctggctcgcctgtcgaagtcaagattcagtctcgtagttccccaccgacaatgcctccacttcctccaatcaacccgggaggacctcgacccgtaagtttcacacctacagccctttcaaacggcatcaaccacagtcctcctacgctcaatggagcgccctctccccctcagcgatttagtaatggcccggcctccagcacgagcagcgccctgacaaaccagcagctccctgccacttgcggcgccagacagctatcaaagctgaagaggtttctgactaccctgcagcaattcggtaacgatatttctcctgaaatcggagaaaaggttcggaccctggtgttggccctggtcaacagcactgtaaccattgaagagttccactgtaagctccaggaagccacaaatttcccattgcgccccttcgtgatcccttttctaaaggccaatctgccattgctacagcgggagttgctgcattgcgccagagccgcaaagcagaccccaagccagtatctggcacaacatgagcatttattgcttaacactagtattgcctcaccagccgactccagcgagctgctgatggaggtccatggcaatgggaagagaccatccccggagcggcgcgaggaaaattcatttgaccgagatactattgccccagaaccacctgctaagcgcgtgtgcacaatcagtcctgctccccgccattcccccgcactgactgttccattgatgaaccctggagggcagttccatcctacacctcctccactgcagcactacaccttagaagacatcgctacgagtcacctctatcgggagccgaacaagatgttggagcatcgcgaagtgagagataggcaccacagtttgggcctgaatggagggtaccaggacgagttggtggaccaccggttaacggagagagaatgggcggatgagtggaagcatctggatcacgcgctgaattgcatcatggaaatggttgagaagaccagaagaagtatggccgtgctgaggagatgccaggaatcagacagagaggaattgaattactggaagcgccgatacaatgagaataccgaactgcggaaaacagggacagaactggtcagtaggcagcactcccctggatccgctgactccttatccaacgatagtcagagggagttcaactcacgacccggaacaggatacgtccccgtcgagttttggaagaaaaccgaagaggctgtcaataaagtcaaaatccaggccatgagcgaggttcagaaggccgtggccgaagcggaacagaaggcatttgaagtgattgccactgagcgagctaggatggaacagacaattgccgatgtgaagaggcaggcggccgaagatgcatttcttgttatcaatgagcaagaggagagcaccgagaattgctggaattgtggacgcaaggcaagcgaaacatgcagcggttgtaacattgctagatattgcggctccttttgtcagcacaaagattgggagcgccatcaccgtctgtgtggacagaacttacacggacaatctccccacgggcaaggccgcccacttctaccagtgggccgcggcagctctgcccggagcgctgactgtagcgtgcccagtcctgcactagataaaaccagcgctaccaccagtcggtcaagtacaccagcatccgtaaccgcgattgacacaaatggcctgtag

SEQ ID NO: 30337 - DNA, 546 bp, Artificial Sequence
  derived and/or modified sequence
atggtgggcgtgcccggcgccgccgccttccagctgggccccgagaagagggtgccagctatgcctggctccccagtggaagttaagattcagtcccggagcagccccccaacaatgccccccctgccgcccataaaccccggtggtccacggcctgtgtctttcacacctaccgctctgtcgaacggcattaaccacagtcctcctactttaaacggagcgcctagccccccccagcgcttctccaatgggcctgcctctagcacctcttctgctctgaccaaccagcagctgcccgccacctgtggggcccgacaattgagcaaactgaagcggttcttaacaacgttgcagcaatttggaaacgatatatccccagagataggagaaaaggtacggacattggtgcttgctttggttaatagcaccgtgacaatcgaagagtttcactgcaagctccaggaggcaacaaattttccgctccgccccttcgtgatcccattcctgaaggctaaccttcctttactgcaacgcgagctgctgtag

SEQ ID NO: 30338 - DNA, 1788 bp, Artificial Sequence
  derived and/or modified sequence
atggtcggagttcctggcgctgcagccttccagctgggtccagagaaacgcgttccagccatgccgggttccccagtagaggtgaagatacagagcaggagcagtccacccaccatgccaccactcccccctatcaaccccggtggtcctagacctgtttcttttactcctaccgccctgtctaatggcattaaccacagtccccctaccctcaacggagctcctagccctcctcaaaggttctcgaacggtcctgcctctagcacctcatcagcattaacaaatcaacagctccccgcaacctgcggggctcgacagctatcaaagttgaagcggtttctcaccactttacaacagtttggcaatgacatctcccctgagatcggagagaaggtgcgcactctcgtactggcccttgtcaatagtactgtgacgattgaggaattccactgcaagctgcaagaagccaccaatttccccctgcgcccatttgttattccatttctcaaagccaacctccctctgctgcaacgcgagcttctgcactgcgctagggccgctaaacaaactccaagtcaatacctcgcacagcacgagcatttattgctgaacacctctatagcctctccagctgattcatccgaactgctgatggaggtgcatggtaatggtaaacgcccaagcccagagcggagggaggagaactcctttgatcgggatacaatcgcccctgaaccccctgctaagcgcgtgtgtaccatttccccagcacctaggcattcacccgctctgaccgtgcctctgatgaacccagggggacagttccacccaacccctcccccacttcagcattataccctagaggacattgccaccagccacttatatcgcgaaccaaacaagatgctggaacatcgggaggtgagagaccgacaccattccttgggtcttaacgggggttaccaggacgagcttgtagaccataggttaacggaaagggagtgggcagacgagtggaagcacctggaccatgctctgaattgcattatggagatggtggagaagaccagacgaagcatggcggtcctgcgccgttgccaggagtcggacagggaggaactgaattactggaagcgcagatataacgagaataccgaactgaggaaaaccgggaccgagttggtgtcacgccagcactcacccggttcagcggactctctcagtaatgacagccagcgcgagtttaattcgcgccctggaaccgggtacgtccctgtggaattttggaaaaagacggaggaggccgtgaacaaggtgaagatccaggctatgagcgaagtgcagaaagccgtagccgaggcagagcagaaggcattcgaagtgatagctacagagcgcgctcgcatggaacaaacaatagcagacgtaaagcggcaagcagctgaagatgccttcctcgtcataaatgagcaggaagaatctacagagaattgttggaattgtggaaggaaagccagtgaaacatgttcaggatgtaatatagcccgttactgcggcagcttctgtcagcataaagactgggagcgtcatcatcgcctctgtggacagaatttacacgggcaatcccctcacggacaaggtaggcctctccttcctgtgggccgaggctcttcggctcgatcggctgattgttctgtgccatcacctgctttggacaagacttctgcaacgactagcagatcgtcaacaccagcatctgtcactgctatcgacaccaacggtttgtag

SEQ ID NO: 30339 - DNA, 546 bp, Artificial Sequence
  derived and/or modified sequence
atggtaggggtgcctggggcagcagccttccagctgggccctgaaaaacgtgtgccggcaatgccaggaagccctgttgaggtgaagatacaaagccggtctagccctccaacaatgccgccactccctcctatcaatcctggtggccctcggccagttagttttaccccaacagctttgtccaatgggataaatcatagcccaccaactctcaacggtgccccaagccctccccagcgatttagtaatggccctgccagctcaacttcttccgcgttgaccaaccaacagttgccggcaacttgcggagcaaggcagctatccaaactaaaaaggttcctaaccacattacagcaattcggaaacgatatctcaccagagatcggggagaaggtgagaacactggtgctggccctggtgaactctactgtcacaatcgaagagtttcattgcaaattgcaagaagctacgaacttccccttgcgaccctttgtaataccttttctaaaagcaaaccttccactgctgcagagagagctgctgtag

SEQ ID NO: 30340 - DNA, 7319 bp, Artificial Sequence
  derived and/or modified sequence
cggtggtggtgtctggttagctcggcggctgcagatctcgcggcgacgcctgcgagggacccgggccgcgggtcgaggcgggcggcgcctgcgagggacccgtgtcgcgggtagaggcgggcggcgcgcggcggcggcgctcggcgatggtaggcgtccctggagcggccgccttccagcttggtcctgagaaaagggtgccagcgatgcctggatcgcctgtggaagtgaagatacagtccagatcctcacctcccaccatgccacccctcccaccaataaatcctggaggaccgaggccagtgtccttcactcctactgcattaagcaatggcatcaaccattctcctcctaccctgaatggtgccccatcaccgccacagagattcagcaatggtcctgcctcctccacatcatctgcactcacaaatcagcaattgccagccacttgtggtgctcgacaactcagcaagttgaaacgctttcttaccactctgcaacagtttggcaatgacatctcccctgagattggggagaaggtgcggactcttgttcttgcactggtgaactcaacagtgacaattgaggaattccactgtaagctccaagaagccacaaactttccccttcgtccttttgtgattccatttctcaaggccaacctgcccctgctgcagcgggaactgctgcactgcgctcgggcggccaagcagaccccatcccagtacctggctcagcacgaacaccttctgctcaacacaagcattgcatcgcctgctgactcgtcagagttgctcatggaggtgcacggaaatgggaagaggcccagtccagagaggagagaagagaatagttttgatagagacacaattgctcctgagcctcctgccaagagagtatgtaccatcagccctgctcctcggcacagtcctgctctcactgtgcccctcatgaatcccgggggccaattccatcctacccctccacctcttcagcattacaccttagaggatattgcaacttctcacctgtatcgggaacccaacaagatgctagagcatcgagaagttcgtgatagacaccacagtcttggtctaaatggaggctatcaagatgagttggtagatcatcgtttgacagaaagggaatgggctgatgaatggaaacatcttgaccatgcgctgaattgcattatggaaatggtagagaaaacaaggcgctctatggcagttctgcggcgctgtcaggaatcagatcgtgaagaactcaactactggaaaagacggtacaatgaaaacacagagctgaggaaaacggggaccgagttggtctccaggcagcacagccctgggagtgcagattctctcagcaatgattctcagagagagttcaacagcaggccaggtacaggatacgtacctgtggagttttggaaaaaaacagaagaagctgtgaataaggtgaaaattcaggccatgtcagaagtacagaaggccgtcgctgaggcagagcagaaagcctttgaagtgattgcaacagagagagcacgaatggagcaaaccatagcggatgtcaagcggcaggccgcagaggatgctttcctcgtcatcaatgagcaagaggagtccacggagaactgctggaactgtggccgcaaagccagcgagacatgcagtggctgcaatatcgcgcgatactgtggctctttctgccagcacaaggactgggagcggcaccaccgcctctgtggtcagaacctgcatggccagagcccccacggccagggccggccgctgcttcctgtaggcaggggctcctctgccaggtccgccgactgcagcgtgcccagcccagccctcgacaagacctcggcaaccacatcgcgttcctcaacacctgcttctgtgacagctatcgacaccaacggactctgagccccggactctgcttaccctgatggctgctcagcaccacagagtgcttgggctgagggactgactgttggaacccgtgcatgtagctgccgggtcatcagcaagaaatgaattggaggcaggaagagtccaagcctgaataataacaccccacagcctctctgtgcacttgctgtctgcggagccagtgtgccattctctgcacatgggcagccagcctgagctgcctcctccatggctttcctggtttgttcctctctccactgaagctgacttagccggccccttttcagtgtagaccaccagctcccctccccatctccttgagtcagcagactgtccaatgtgctcagccaggctggaggcggcaggcggcaggcagcaggctgtggaggaggcccctcggtcagggagcggcctgcctcacccctgaatagctccttcggccccatctccatcctcagcagatgacactgattggcctcacggggacttgggtaagcaacaggcggcattcaggactcttctcaaccctgctgttcagacttgataagatctcagagtccacaggaaagaagtcactgttgcaataaaagcacccgtagtagcaaaaacataaaacaaataaaacttcccccacatcacagatgattttggacaagattttccaaccttgctggctactttagtttgggacctgttttttttctcatttgattttgcttgtgcagaaaatagtttccagcacatggattgatctgagagagaatgaggctcagttgtggatagtctgttttctctgagcatgttggccaactagtatcgtcaaattattgagtggatcatctcttggaaatgcagaacttctgccaccacttggctatttgcacagtcatcttgttctgtgtccttttatctctcagaccacacacatctggaacgctgtgggcatcttctgcccatgggctccatttggcacctgctgagccacagttgtcctgctggatgtgctgtgcaggttggtaggacttgcccccactgtcaaggcctggtctcatctgaaaagccctcctggacctcaaagaattcttcagacctcatagttacaggtcattatatctactatgttgatttatcatcaggcacacaacttctgtttccttctcttgtgttatctgatagcgtccctccttgagctcatcagaaaggttttatgaaatgtgaaccattttgggaaaagctgatcaatttttcttcctagcttcccattttcaaatgggacatcactcatatccctttcagaatgttaggaactgcctcccacattcttccctgtctttttgggttttgttttttgttgttgtggtggttttttaacacaaagtctcactctgttgcccaggctggagtgcagtggcatgatcttggctcactgcaacctctgccttccaggttcaagcaattctcctgcctcagcctcccgagtagctgagattacaggcgcccaccaccacgcccagctaatttttgtatttttagtagagacagggtttcaccatgttggccaggctgatctcgaactcctgacctcaggtgacctgccttggcctcccaaagtgcagggattacaagcgtgagccaccatgcccggcctgtctttttggttttgatgggagtctgaggaccccgacccctcctgctctccatctttgagcctctggcatcctctcacacccagaaatcagttggagtaagtttaattggccctgctccagctggcctttgaagcacaagtttaaatctccaccttctgtgcactgaccagagtctaaaataaaagttgtcagtaccataaaggaaaagggatccacacaggtagccttctccttggatacaggtacatcttactgtaagaatttcaagtcctggctgggcgcagtggctcactcctgtaatcccagcactttgagagaccgaggcaggcagatcacttgaggtcaggaattcaagaccaacctggccaacatggtgaaaccctgtctctaataaaaaaaaaatagaaaaatcagccgggtgtggtggcacacacctgtaatcctagctactcaggaggctgaggcaagagaatctcttgaacctgtgagccagaggttgcagtgagccgagattccaccactgcactccagcctgggcaacagagcaaaactctgtctcaaaaaaaaaaaaaaaaaggcaaaattaaagaatttcaagtccctaatttactctaaccaagcattttcagtcttacaaagaaatctagtgcacgacacctttaaaatgcctagatttccattgcctaaagtaaggtgtgaccagtgaaacaacagcagagaatcatgttcctttgctgtggaacacataagccccacagttttccagtcagcctaatacatgggtatcccccgaccccatctgcctccttaagccacagtccttggtggggaactctaagggggacggagtcagtaccccggacagggccacatttgcatgagacatggctgtctcacaggtcacagagccattacaacagcttactagtttttcatggatttgttggattaacaccttaagcaggttttttattgttattttgtttgtttgtttgttttgagacgggagtttctctcttgtctcccaggctggagtgcaatcgcgcaatctcggctcacggtaacctctgcctcccaggttcaagcgagtctcctgcctcagccttctgagtagctgggattacaggcatgcgccaccacgcccaactaattttgtatttttagtagagacggggtttctccttgttggtcaggctggtctcaaaccccggacctcaggtgatccccccaccttggcctcccaaagtgccaggattacaggcatgagccactgtgtccggtcttgagcaggtttttaaaatctccagtggccataaaactagccagggtagctcatgcttttactggttggaataaggagccaaaaccaacaaaataatatttattagggctcgatgcccatttctgtggctaaggcttaggtttggtgtgcagagcctggcctgctcttgtgggctgtggttgctgtgacagtttcgttttctgaatctttgtaatgctcttccaccctgctcgtgctgcccagaggctgatctgcaaacctgggcagtattccacactgaagctcagtttgcaaaccttctgctgtgttaattctggtcagtttcacacagaagtcacgagggcctctgcccaggaccttctattcacatttcaagaatccctttctgaaattctccaactctctggtcaggaggaggagcaccattggggcggggtaggcagctagaggcgcaggagcgaatccaggttccttgcgtggttcccagcctctgctgacagcacctcagctaccaggtggggagtggaaattcagcctgcttagaggactgacctctacagttcatatttgcagtgacataaaaggcaaagaggagctggcatggtggtacagaaggtatcagtcaagcgcaggctcttcagaaacctagaaactaaaaagagatgcaacatgtgactggccatcagccagacatgtctagggtgagaccagtgctcagcaccacccgccaaggaacactgatgagttgtgggacattatggtcggccaagtgaggaatgattgcagggaccagagaagaccaaagatgccagatgtccccagagtttcttgagggctgggtttcacgtctttgcttgtcctttttgtccccacttgcctgcaccgtgcctgactcatccagtggggaaggtgactcaagaagttgtttaagcctaggcctaggcagtccacttcgggaggtgggggcactccacactggggggccctgcagctccagggctggtgctctagcagatccgctcaggcacggttgggtgaccgtggggtcaccgattgcgtagattatttctagggcagtgctgggttagaaatgtctgtctggaaacaggacacatcttgccaccacaagtccacacctggccttggctgctgcccgctctctgcagcgtggatttcctttgcccatttgggccagaaggtcaccaggagttcatcactgcttagtgtcaacttgacatcttcagcttccagacagaaaacccatgctttactttgtacagccctgtcccagagttagtaagcctcggcttgtcacctgcttgcaaagggtatagacatcattctgggtagttctagaggatatcgcaacaagtgcgtttgaaggttcagcacagctggaattgtacggtagtgagctcttcaaaatgaaaacagaatgaccggatggccatctgtcctggaaactgtagaattgaataaatcactgaaaatagaacacttcttggaggctttcttcagaactgaactagaaacaaggtttccaggctcccaggtcagtagaccaaaccaacttccttagatttttttttttaagctgtttgcagaaaactgggtggtagcgtgtctgaaccaaacggaagaatagccagcggagcatggactgttccagcacgggccagatggccagctgtcgagagcagccctgcccagattgcggtgggggctgtgccagcggctccgcagggcccttccaactctggagtgtctgtagttcttgtgaaaccaaaacgttgactacctgcctctttcctcgggcatcgacgtgctcatttccaaagatgatggtgcaggtgaccttttccatcgtgagctaagagaaggttaggaggcctgaggggcgggccttgtgtcccctcctccccctccacagcccctgaggtggagcttccctcacagaccccatctggtcgagcctacggctgcccagtgtacactcagtgatgcttataccaaatagggcatgtgcgctggtgtctgttggggacagccccatccctaccttggagtcggcagagaagcagcaataagcattaggcgaatgattgaaagggctgctgcgccaagaggccttcagtccccttaacgtggctttccaacttcctgacgaggctacaaaggctccgctcacaaaagaaagccaataatgtaaataaatagaaaacgaagcctccacgcgtggtttttaaagggggatgatgaatgtgacaccacccacagaatgcattagaatctggtttttctgtgctttgtcattttactctgataggaatttttgttacctaactctgtgcataacttatttaatgtactgtataaatgaaccaaaactgttaaatatgtatttagtttgttctacttaaagtagtcaataaaaaggctatattcctt

SEQ ID NO: 30341 - DNA, 677 bp, Artificial Sequence
  derived and/or modified sequence
tctggttagctcggcggctgcagatctcgcggcgacgcctgcgagggacccgggccgcgggtcgaggcgggcggcgcctgcgagggacccgtgtcgcgggtagaggcgggcggcgcgcggcggcggcgctcggcgatggtaggcgtccctggagcggccgccttccagcttggtcctgagaaaagggtgccagcgatgcctggatcgcctgtggaagtgaagatacagtccagatcctcacctcccaccatgccacccctcccaccaataaatcctggaggaccgaggccagtgtccttcactcctactgcattaagcaatggcatcaaccattctcctcctaccctgaatggtgccccatcaccgccacagagattcagcaatggtcctgcctcctccacatcatctgcactcacaaatcagcaattgccagccacttgtggtgctcgacaactcagcaagttgaaacgctttcttaccactctgcaacagtttggcaatgacatctcccctgagattggggagaaggtgcggactcttgttcttgcactggtgaactcaacagtgacaattgaggaattccactgtaagctccaagaagccacaaactttccccttcgtccttttgtgattccatttctcaaggccaacctgcccctgctgcagcgggaactgct

SEQ ID NO: 30342 - DNA, 1788 bp, Artificial Sequence
  derived and/or modified sequence
atggtgggcgtgcccggcgccgccgccttccagctgggccccgagaagagagtgcccgccatgcccggcagccccgtggaggtgaagatccagagcagaagcagcccccccaccatgccccccctgccccccatcaaccccggcggccccagacccgtgagcttcacccccaccgccctgagcaacggcatcaaccacagcccccccaccctgaacggcgcccccagccccccccagagattcagcaacggccccgccagcagcaccagcagcgccctgaccaaccagcagctgcccgccacctgcggcgccagacagctgagcaagctgaagagattcctgaccaccctgcagcagttcggcaacgacatcagccccgagatcggcgagaaggtgagaaccctggtgctggccctggtgaacagcaccgtgaccatcgaggagttccactgcaagctgcaggaggccaccaacttccccctgagacccttcgtgatccccttcctgaaggccaacctgcccctgctgcagagagagctgctgcactgcgccagagccgccaagcagacccccagccagtacctggcccagcacgagcacctgctgctgaacaccagcatcgccagccccgccgacagcagcgagctgctgatggaggtgcacggcaacggcaagagacccagccccgagagaagagaggagaacagcttcgacagagacaccatcgcccccgagccccccgccaagagagtgtgcaccatcagccccgcccccagacacagccccgccctgaccgtgcccctgatgaaccccggcggccagttccaccccacccccccccccctgcagcactacaccctggaggacatcgccaccagccacctgtacagagagcccaacaagatgctggagcacagagaggtgagagacagacaccacagcctgggcctgaacggcggctaccaggacgagctggtggaccacagactgaccgagagagagtgggccgacgagtggaagcacctggaccacgccctgaactgcatcatggagatggtggagaagaccagaagaagcatggccgtgctgagaagatgccaggagagcgacagagaggagctgaactactggaagagaagatacaacgagaacaccgagctgagaaagaccggcaccgagctggtgagcagacagcacagccccggcagcgccgacagcctgagcaacgacagccagagagagttcaacagcagacccggcaccggctacgtgcccgtggagttctggaagaagaccgaggaggccgtgaacaaggtgaagatccaggccatgagcgaggtgcagaaggccgtggccgaggccgagcagaaggccttcgaggtgatcgccaccgagagagccagaatggagcagaccatcgccgacgtgaagagacaggccgccgaggacgccttcctggtgatcaacgagcaggaggagagcaccgagaactgctggaactgcggcagaaaggccagcgagacctgcagcggctgcaacatcgccagatactgcggcagcttctgccagcacaaggactgggagagacaccacagactgtgcggccagaacctgcacggccagagcccccacggccagggcagacccctgctgcccgtgggcagaggcagcagcgccagaagcgccgactgcagcgtgcccagccccgccctggacaagaccagcgccaccaccagcagaagcagcacccccgccagcgtgaccgccatcgacaccaacggcctgtag

SEQ ID NO: 30343 - DNA, 546 bp, Artificial Sequence
  derived and/or modified sequence
atggtgggcgtgcccggcgccgccgccttccagctgggccccgagaagagagtgcccgccatgcccggcagccccgtggaggtgaagatccagagcagaagcagcccccccaccatgccccccctgccccccatcaaccccggcggccccagacccgtgagcttcacccccaccgccctgagcaacggcatcaaccacagcccccccaccctgaacggcgcccccagccccccccagagattcagcaacggccccgccagcagcaccagcagcgccctgaccaaccagcagctgcccgccacctgcggcgccagacagctgagcaagctgaagagattcctgaccaccctgcagcagttcggcaacgacatcagccccgagatcggcgagaaggtgagaaccctggtgctggccctggtgaacagcaccgtgaccatcgaggagttccactgcaagctgcaggaggccaccaacttccccctgagacccttcgtgatccccttcctgaaggccaacctgcccctgctgcagagagagctgctgtag

SEQ ID NO: 30344 - protein, 145 aa, Artificial Sequence
  derived and/or modified sequence
MAESLRSPRRSLYKLVGSPPWKEAFRQRCLERMRNSRDRLLNRYRQAGSSGPGNSQNSFLVQEVMEEEWNALQSVENCPEDLAQLEELIDMAVLEEIQQELINQEQSIISEYEKSLQFDEKCLSIMLAEWEANPLICPVCTNLLS

SEQ ID NO: 30345 - protein, 219 aa, Artificial Sequence
  derived and/or modified sequence
MAESLRSPRRSLYKLVGSPPWKEAFRQRCLERMRNSRDRLLNRYRQAGSSGPGNSQNSFLVQEVMEEEWNALQSVENCPEDLAQLEELIDMAVLEEIQQELINQEQSIISEYEKSLQFDEKCLSIMLAEWEANPLICPVCTKYNLRITSGVVVCQCGLSIPSHSSELTEQKLRACLEGSINEHSAHCPHTPEFSVTGGTEEKSSLLMSCLACDTWAVIL

SEQ ID NO: 30346 - protein, 106 aa, Artificial Sequence
  derived and/or modified sequence
MAESLRSPRRSLYKLVGSPPWKEAFRQRCLERMRNSRDRLLNRYRQAGSSGPGNSQNSFLVQEVMEEEWNALQSVENCPEDLAQLEELIDMAVLEEIQQELINQVF

SEQ ID NO: 30347 - DNA, 660 bp, Artificial Sequence
  derived and/or modified sequence
atggccgagagcctgagaagccccagaagaagcctgtacaagctggtgggcagccccccctggaaggaggccttcagacagagatgcctggagagaatgagaaacagcagagacagactgctgaacagatacagacaggccggcagcagcggccccggcaacagccagaacagcttcctggtgcaggaggtgatggaggaggagtggaacgccctgcagagcgtggagaactgccccgaggacctggcccagctggaggagctgatcgacatggccgtgctggaggagatccagcaggagctgatcaaccaggagcagagcatcatcagcgagtacgagaagagcctgcagttcgacgagaagtgcctgagcatcatgctggccgagtgggaggccaaccccctgatctgccccgtgtgcaccaagtacaacctgagaatcaccagcggcgtggtggtgtgccagtgcggcctgagcatccccagccacagcagcgagctgaccgagcagaagctgagagcctgcctggagggcagcatcaacgagcacagcgcccactgcccccacacccccgagttcagcgtgaccggcggcaccgaggagaagagcagcctgctgatgagctgcctggcctgcgacacctgggccgtgatcctgtag

SEQ ID NO: 30348 - DNA, 660 bp, Artificial Sequence
  derived and/or modified sequence
atggcagaatcactacgctcacctcgtcggtccctgtataaactggtggggagcccgccttggaaggaagcatttcgtcagagatgtttggagcgcatgagaaactcaagggaccgactgctgaaccgctatagacaggcagggtcttctgggcctggaaactcccagaattcttttcttgtgcaagaggtgatggaagaggaatggaacgctctgcagtctgtcgaaaactgccctgaggatctagcgcagctggaggagcttattgacatggcagttctcgaggaaatccagcaagagttgatcaaccaagaacagagcataatctctgaatacgaaaaatccttgcagttcgacgaaaaatgtttgtccatcatgcttgccgagtgggaggcaaacccgctcatatgccccgtctgcacaaagtacaatttacgaattacctctggagtagttgtatgtcagtgcggactcagtatcccctcacacagctccgagctaactgaacagaagctcagagcctgcctggagggtagcattaacgagcattccgcccattgcccccacacaccagagttcagcgtcacagggggcactgaagagaagagttcactgctgatgtcctgcctcgcctgtgacacttgggctgtgatcctgtag

SEQ ID NO: 30349 - DNA, 660 bp, Artificial Sequence
  derived and/or modified sequence
atggccgagagcctgcggagccccaggaggagcctgtacaagctggtgggcagccccccctggaaggaggccttccggcagcgctgcctggagaggatgaggaacagccgggaccggctgctgaaccgctaccggcaggccggcagcagcggccctggcaacagccagaacagcttcctggtgcaggaggtgatggaggaggagtggaatgccctgcagagcgtggagaactgcccagaggacctggcccagctggaggagctgattgacatggctgtgctggaggagatccagcaggagctgatcaaccaggagcagagcatcatcagtgaatatgagaagagcctgcagtttgatgagaagtgcctgagcatcatgctggccgagtgggaggccaaccccctcatctgccctgtgtgcaccaagtacaacctgcgcatcaccagcggcgtggtggtgtgccagtgtggcctgagcatccccagccacagcagcgagctgacagagcagaagctgcgggcctgcctggagggcagcatcaatgagcacagcgcccactgcccccacaccccagagttctctgtgactggaggaacagaggagaagagcagcctgctgatgagctgcctggcctgtgacacctgggccgtcatcctgtag

SEQ ID NO: 30350 - DNA, 660 bp, Artificial Sequence
  derived and/or modified sequence
atggccgagagcctgcggagcccccggcggagcctgtacaagctggtgggctccccaccctggaaggaagctttccgccagcggtgtttagagcggatgcgcaatagtcgggataggctcctaaacaggtatcgacaggcaggcagctcaggaccgggtaattcccagaatagcttcctggtacaggaagttatggaagaggaatggaacgctttgcaatccgtggaaaattgtcctgaggaccttgctcagctggaagaactgattgatatggcagtcctcgaagagatccaacaagagctgattaatcaagagcaatcaattatttccgagtatgagaagagcctacagtttgacgagaaatgtctgtcaattatgctggccgagtgggaagccaacccattgatctgtccagtctgcactaaatacaatttacggatcaccagcggggtcgtcgtgtgtcagtgtgggctcagcattccctcccactcatccgagctgacggagcagaagctgcgtgcctgcctcgagggcagcatcaacgagcattcggcccactgtccacatacccccgagttctcagtaaccgggggaaccgaagagaagagcagcctgctcatgagctgcctcgcttgtgatacctgggctgttatcttgtag

SEQ ID NO: 30351 - DNA, 660 bp, Artificial Sequence
  derived and/or modified sequence
atggccgagagcctgaggtccccaaggaggagcctctacaagttagtcggctcccccccatggaaggaagcgttcaggcagaggtgcctggagcgcatgagaaacagccgggatcgcctactgaaccgctaccggcaagccggtagcagcggtcccggaaattcccagaattccttcctagtccaggaagtgatggaggaggagtggaatgctctgcagagcgtcgagaactgccctgaggatcttgcacaactagaggaactgatagacatggcagtccttgaagagatacagcaggaattaatcaaccaggaacagagcataatatccgagtacgaaaaaagtcttcaattcgatgagaagtgtctgagcatcatgctcgccgagtgggaggcaaacccacttatatgtccagtatgcacgaaatacaaccttcgtatcacttcaggggtggttgtatgccagtgtggcctgagcattcctagtcattcatcggaactgactgaacagaagttgagggcttgcttggaggggagcatcaacgaacactcagcgcactgtccccacacgcctgagtttagtgtgactgggggaactgaggaaaagtcatctctgttgatgagctgtctggcttgtgacacatgggccgtcatactttag

SEQ ID NO: 30352 - DNA, 1679 bp, Artificial Sequence
  derived and/or modified sequence
cggccgccatcttggcccaactgctcccctcactccagttgctcagcccgccgctgagcacagccaatccgcggccgtccactcactgtttcggccaatcaccgagcagacggcccggaagctcgagaggctcgtgccaggtcggggggcgaaggcgaggccagcccaccaagcaggggcgtcaccaagggaaagccaatcaccattatttctgaagcccaagggggcgggacgagaagtcaacataatggtggtgctgctggaaatctagcacctggggagagcctgagacttgtgtatctaattgcctattggacacctccatctgggtaaacccaggcatccagaactttccctcaagacttacctccctcagtgcaggtcgggctggcctcacgcatttcgcttggatgcctaaatctgtctccacgtggggccggtcgataaaacaacacttcccagaatacgctgcgatccattcgcggtctgcacccggaaagtacacctcccaggggtctgtgcgcgcctccagggaacgggtcttgtggctttgtctcccgcgaagaggagatggcggagtcgttgaggtctccgcgccgctccctgtacaaactggtgggctcgccgccttggaaagaggctttccggcagagatgcctggagagaatgagaaacagccgggacaggctcctaaacaggtaccgccaggctggaagcagtgggccagggaattctcagaacagctttctagttcaagaggtgatggaagaagagtggaatgctttgcagtcagtggagaattgtccagaagacttggctcagctggaggagctgatagacatggctgtgctggaggaaattcaacaggagctgatcaaccaagagcagtccatcatcagcgagtatgagaagagcttgcagtttgatgaaaagtgtctcagcatcatgctggctgagtgggaggcaaacccactcatctgtcctgtatgtacaaagtacaacctgagaatcacaagcggtgtggtggtgtgtcagtgtggcctgtccatcccatctcattcttctgagttgacagagcagaagcttcgtgcctgtttagagggtagtataaatgagcacagtgcacattgtccccacacacctgaattttcagtcactggaggaacagaagaaaagtccagtcttctcatgagctgtctggcctgtgatacttgggctgtgatcctctagagccagcttggactcacatcattctatggggttgaagacaactcattccctctgaggagccttgtacatacaagccttttatttataacttattttgtattgaaacttttaaacaatactgaagaaaaaaaaacttttccgacatctgttcttggtcttttgtgacgcaggttgaagggggaggaatagaaaaagacaaactgccttggaggagataaaccaattttatgtctatcatgttatacaaaaatctagaaataatagatttgtacagaaaaaaatgataataaatgagaacacaaaacatataatttaaatttggtattttttcccccatgatattaggatgataatcatttcaaagcacatgtctagcttcagagtaggatttgttcactggccaaagcctgccatgaaactatggctttcagcatctgtctgctctactg

SEQ ID NO: 30353 - protein, 443 aa, Artificial Sequence
  derived and/or modified sequence
MARPPGGSGPLLDSEHSSLQNNEQPSLATSSNQTSMQDEQPSDSFQGQAAQSGVWNDDSMLGPSQNFEAESIQDNAHMAEGTGFYPSEPMLCSESVEGQVPHSLETLYQSADCSDANDALIVLIHLLMLESGYIPQGTEAKALSMPEKWKLSGVYKLQYMHPLCEGSSATLTCVPLGNLIVVNATLKINNEIRSVKRLQLLPESFICKEKLGENVANIYKDLQKLSRLFKDQLVYPLLAFTRQALNLPDVFGLVVLPLELKLRIFRLLDVRSVLSLSAVCRDLFTASNDPLLWRFLYLRDFRDNTVRVQDTDWKELYRKRHIQRKESPKGRFVMLLPSSTHTIPFYPNPLHPRPFPSSRLPPGIIGGEYDQRPTLPYVGDPISSLIPGPGETPSQFPPLRPRFDPVGPLPGPNPILPGRGGPNDRFPFRPSRGRPTDGRLSFM

SEQ ID NO: 30354 - DNA, 1758 bp, Artificial Sequence
  derived and/or modified sequence
ggccaagtgcggggacgccgggggggccttcacgggaggcccgggctcttccgggcgtcgcggagccggagggtgcaggcgacgggaagcgcgggtggtcggctggggtccggctcctggagaacatggcccggcctcccgggggctctggtcccctcctcgattcagagcattcttcactccagaataatgagcaaccctctttggccaccagctccaatcagactagcatgcaggatgaacaaccaagtgattcattccaaggacaggcagcccagtctggtgtttggaatgacgacagtatgttagggcctagtcaaaattttgaagctgagtcaattcaagataatgcgcatatggcagagggcacaggtttctatccctcagaacccatgctctgtagtgaatcggtggaagggcaagtgccacattcattagagaccttgtatcaatcagctgactgttctgatgccaatgatgccttgatagtgttgatacatcttctcatgttggagtcaggttacatacctcagggcaccgaagccaaagcactgtccatgccggagaagtggaagttgagcggggtgtataagctgcagtacatgcatcctctctgcgagggcagctccgctactctcacctgtgtgcctttgggaaacctgattgttgtaaatgctacactaaaaatcaacaatgagattagaagtgtgaaaagattgcagctgctaccagaatcttttatttgcaaagagaaactaggggaaaatgtagccaacatatacaaagatcttcagaaactctctcgcctctttaaagaccagctggtgtatcctcttctggcttttacccgacaagcactgaacctaccagatgtatttgggttggtcgtcctcccattggaactgaaactacggatcttccgacttctggatgttcgttccgtcttgtctttgtctgcggtttgtcgtgacctctttactgcttcaaatgacccactcctgtggaggtttttatatctgcgtgattttcgagacaatactgtcagagttcaagacacagattggaaagaactgtacaggaagaggcacatacaaagaaaagaatccccgaaagggcggtttgtgatgctcctgccatcgtcaactcacaccattccattctatcccaaccccttgcaccctaggccatttcctagctcccgccttcctccaggaattatcgggggtgaatatgaccaaagaccaacacttccctatgttggagacccaatcagttcactcattcctggtcctggggagacgcccagccagtttcctccactgagaccacgctttgatccagttggcccacttccaggacctaaccccatcttgccagggcgaggcggccccaatgacagatttccctttagacccagcaggggtcggccaactgatggccggctgtcattcatgtgattgatttgtaatttcatttctggagctccatttgtttttgtttctaaactacagatgtcaactccttggggtgctgatctcgagtgttattttctgattgtggtgttgagagttgcactcccagaaaccttttaagagatacatttatagccctaggggtggtatgacccaaaggttcctctgtgacaaggttggccttgggaatagttggctgccaatctccctgctcttggttctcctctagattgaagtttgttttctgatgctgttcttaccagattaaaaaaaagtgtaaattaca

SEQ ID NO: 30355 - DNA, 1332 bp, Artificial Sequence
  derived and/or modified sequence
atggctcggcccccaggcggcagcggccctctactcgacagcgagcactccagcctccagaataatgagcaacctagcctcgccacgtcctctaatcagactagcatgcaggacgaacagcctagtgatagttttcaagggcaggcagctcagtccggcgtttggaatgacgacagtatgctcggaccctcgcagaatttcgaggctgaatctatccaggataacgcacacatggccgagggaaccggattctacccctcagagcctatgttatgcagcgagtccgtcgaagggcaggtgcctcactctctggaaaccttgtatcagtcagcagactgctctgatgcaaacgacgcccttatagttctcattcacctgctgatgcttgagtccggctacatcccccaagggaccgaggctaaggcactcagtatgccggagaaatggaaactgagcggggtttataaacttcagtatatgcaccctctgtgtgaaggttccagcgcaactctgacatgcgtgcctcttggaaatttgattgttgtgaacgctaccctcaagattaacaatgagattagaagtgttaaacgcctgcagctgttgccagagagttttatctgcaaggagaagttgggagaaaatgtcgcgaacatttataaagacttgcagaagctttcacggctttttaaagatcagctcgtgtacccactgttggcttttacaaggcaggctttgaatcttccagacgtgtttgggttggtcgtgctccccctcgagctgaagttacgaatctttcgcctgctcgacgttcgatcagtgttgagcttaagcgctgtgtgcagggatctgttcaccgcctctaatgacccactgctgtggcgattcctttacctgcgcgattttcgcgataacacagtgagagtacaggatacagattggaaagagttatatcgcaagcgccacattcagcggaaagagtctcctaaaggtcgctttgtaatgctcctgccaagctcaacgcacaccatcccattttaccctaatcccttgcacccgaggccattccccagtagtcgcctgccacccgggattataggcggggaatacgaccagagaccgacgctcccatacgttggtgaccccatctcatcccttatacctgggccaggagagacgcctagtcagttcccaccactgcgacctcgattcgatccagtgggcccactccctggtccgaaccctatcctgccgggtcgggggggccccaatgatcgatttccctttcgcccatcacgaggccgacctacggacggaagactctcattcatgtag

SEQ ID NO: 30356 - DNA, 1332 bp, Artificial Sequence
  derived and/or modified sequence
atggcccggcccccaggcggcagcggccccctgctggacagcgagcacagcagcctgcagaacaatgagcagcccagcctggccaccagcagcaaccagacctccatgcaggatgagcagcccagcgacagcttccagggccaggccgcccagagcggcgtgtggaatgatgacagcatgctgggccccagccagaactttgaagctgagagcatccaggacaatgcccacatggccgagggcaccggcttctaccccagcgagcccatgctgtgcagcgagagcgtggagggccaggtgccccacagcctggagaccctgtaccagagcgctgactgcagtgatgccaatgatgccctgattgtgctgatccacctgctgatgctggagagcggctacatcccccagggcacagaggccaaggccctgtccatgcctgagaagtggaagctgagcggcgtgtacaagctgcagtacatgcaccccctgtgtgagggcagcagcgccaccctgacctgtgtgcccctgggcaacctgattgtggtgaatgccaccctgaagatcaacaatgagatccgctctgtgaagaggctgcagctgctgcctgagagcttcatctgcaaggagaagctgggagaaaatgtggccaacatctacaaggacctgcagaagctgagccgcctcttcaaggaccagctggtgtaccccctgctggccttcacccggcaggccctgaacctgcctgatgtgtttggcctggtggtgctgcccctggagctgaagctgcgcatcttccggctgctggatgtgcgctctgtgctgagcctgtctgctgtgtgccgggacctcttcaccgccagcaatgaccccctgctgtggaggttcctgtacctgcgggacttccgggacaacacagtgcgggtgcaggacacagactggaaggagctgtacaggaagaggcacatccagaggaaggagagccccaagggccgctttgtgatgctgctgcccagcagcacccacaccatccccttctaccccaaccccctgcacccccggcccttccccagcagccggctgcccccaggcatcattggaggagaatatgaccagaggcccaccctgccctacgtgggggaccccatcagcagcctcatccctggccctggagagacccccagccagtttcctcccctgcggcccaggtttgatcctgtgggccccctgcccggccccaaccccatcctgcccggccggggcggccccaatgaccgcttccccttccggcccagccggggccggcccacagatggccgcctgtccttcatgtag

SEQ ID NO: 30357 - DNA, 1332 bp, Artificial Sequence
  derived and/or modified sequence
atggcccggccccccggcggcagcggccccctgctggacagcgagcattcctctcttcagaacaacgaacagccaagcctcgcgacctcgtcaaaccaaactagcatgcaggatgaacagccgtctgacagttttcaggggcaggcagcccaatctggagtctggaatgatgactcaatgctgggtccgagtcagaactttgaggctgagtccattcaggataacgcccatatggcagagggaacgggcttttacccttctgaaccgatgttatgttcagaatcagtggagggtcaggtgccacactccctcgaaactctctatcaatccgcagattgttctgatgccaacgatgccctcattgttctcattcacctgctgatgttggagagcgggtacatcccccaaggcacagaggccaaagcactgagcatgcctgagaagtggaaattgtcgggagtgtacaaactacaatatatgcacccactgtgcgagggcagtagtgccacgctgacgtgcgttccattgggaaaccttatagtggtgaacgccacgctcaaaattaataacgaaataaggtctgtcaagcgactccaattgctacctgagtcattcatttgtaaagagaaactaggcgagaatgtcgcaaatatctataaggacctacagaagttgagcaggctctttaaggaccaactcgtgtatccactgctagcctttaccaggcaagctctcaacctgcctgatgtcttcgggctcgtcgtgctcccattggagctgaagttgagaattttcagactgctggatgtgcgctctgtgctgtctctgtctgccgtttgtcgcgatttgtttacggccagtaatgatccgctgctgtggcgcttcctgtatctgcgagactttagggacaacactgtccgggtccaggatactgactggaaggaactgtaccgaaagcgccatatccagagaaaggagtcccctaagggcagattcgtaatgctgctgccatccagcacacatacaatccctttctacccaaatcctctgcaccctcggccattccctagctctcgcttaccccctggaattattgggggggagtatgaccaaaggccaacactcccctacgtcggcgaccccatctcgagtctgattcctgggccaggggagaccccatcacagtttcctcccctccggcctcggtttgaccccgtgggtccccttccaggccctaacccgattttacccggacgtgggggacctaacgaccgcttccctttcagaccatcccggggtcggccaacagacgggagactgtccttcatgtag

SEQ ID NO: 30358 - DNA, 1332 bp, Artificial Sequence
  derived and/or modified sequence
atggctcgccctcctggcggaagcggacccctgctcgatagtgaacattctagtctacagaacaatgagcagccaagcttggccaccagctccaaccaaacctctatgcaggacgagcagccatccgactcctttcagggacaggcggcacagtctggtgtgtggaatgacgatagcatgctggggcctagtcagaacttcgaggccgagagcattcaggataacgcccacatggccgagggcacagggttctacccctcggaacctatgctgtgctctgagtcggtggaaggccaagtgcctcactcgctggagacactctaccagtccgccgattgctccgacgcaaacgatgcacttatcgtgcttatccatctgctaatgctagaaagtggatacattcctcaggggactgaggcgaaagcactgagcatgcctgaaaaatggaaattgtctggtgtgtataaattacagtacatgcacccactctgcgagggtagttccgctacattaacctgtgtacctctgggtaacttgatcgtggtcaacgcaaccctgaagatcaataacgaaattcggtcggtgaaacgactgcagctgctgcctgagtcattcatctgtaaggaaaaactgggagagaacgtggccaatatctacaaagacctgcagaagttaagtcgtctctttaaggaccagctggtgtaccccctgttggccttcacccggcaggccctgaacctaccggacgtgtttggtcttgtggtgctgccccttgaactgaagctgagaatcttcaggcttctggacgtgcgttcagttctcagtctctcagcggtctgtagggatctcttcaccgcttcgaatgatcctttgctctggcgcttcctgtatctgcgcgactttcgcgacaacacagtgcgcgtgcaggacaccgattggaaggaactctataggaaacgccacatccagaggaaagagtccccaaaaggcagattcgtgatgctattaccttctagtactcataccattcccttctatcccaaccctctccacccaaggccatttccttcgtccaggctgccccctggaatcataggtggggagtatgatcagcggccaacactgccctacgtgggggaccctatcagctcactcatccccggaccaggcgaaacaccgtcccagtttccccctcttcgccctaggttcgaccccgttggcccactgccaggcccaaacccaattctacccggaagagggggaccaaacgatagattccctttccgaccctcacgtggtcggcctacagacggcaggctgtcatttatgtag

SEQ ID NO: 30359 - DNA, 1332 bp, Artificial Sequence
  derived and/or modified sequence
atggccagaccccccggcggcagcggccccctgctggacagcgagcacagcagcctgcagaacaacgagcagcccagcctggccaccagcagcaaccagaccagcatgcaggacgagcagcccagcgacagcttccagggccaggccgcccagagcggcgtgtggaacgacgacagcatgctgggccccagccagaacttcgaggccgagagcatccaggacaacgcccacatggccgagggcaccggcttctaccccagcgagcccatgctgtgcagcgagagcgtggagggccaggtgccccacagcctggagaccctgtaccagagcgccgactgcagcgacgccaacgacgccctgatcgtgctgatccacctgctgatgctggagagcggctacatcccccagggcaccgaggccaaggccctgagcatgcccgagaagtggaagctgagcggcgtgtacaagctgcagtacatgcaccccctgtgcgagggcagcagcgccaccctgacctgcgtgcccctgggcaacctgatcgtggtgaacgccaccctgaagatcaacaacgagatcagaagcgtgaagagactgcagctgctgcccgagagcttcatctgcaaggagaagctgggcgagaacgtggccaacatctacaaggacctgcagaagctgagcagactgttcaaggaccagctggtgtaccccctgctggccttcaccagacaggccctgaacctgcccgacgtgttcggcctggtggtgctgcccctggagctgaagctgagaatcttcagactgctggacgtgagaagcgtgctgagcctgagcgccgtgtgcagagacctgttcaccgccagcaacgaccccctgctgtggagattcctgtacctgagagacttcagagacaacaccgtgagagtgcaggacaccgactggaaggagctgtacagaaagagacacatccagagaaaggagagccccaagggcagattcgtgatgctgctgcccagcagcacccacaccatccccttctaccccaaccccctgcaccccagacccttccccagcagcagactgccccccggcatcatcggcggcgagtacgaccagagacccaccctgccctacgtgggcgaccccatcagcagcctgatccccggccccggcgagacccccagccagttcccccccctgagacccagattcgaccccgtgggccccctgcccggccccaaccccatcctgcccggcagaggcggccccaacgacagattccccttcagacccagcagaggcagacccaccgacggcagactgagcttcatgtag

SEQ ID NO: 30360 - protein, 620 aa, Artificial Sequence
  derived and/or modified sequence
MSEHVEPAAPGPGPNGGGGGPAPARGPRTPNLNPNPLINVRDRLFHALFFKMAVTYSRLFPPAFRRLFEFFVLLKALFVLFVLAYIHIVFSRSPINCLEHVRDKWPREGILRVEVRHNSSRAPVFLQFCDSGGRGSFPGLAVEPGSNLDMEDEEEEELTMEMFGNSSIKFELDIEPKVFKPPSSTEALNDSQEFPFPETPTKVWPQDEYIVEYSLEYGFLRLSQATRQRLSIPVMVVTLDPTRDQCFGDRFSRLLLDEFLGYDDILMSSVKGLAENEENKGFLRNVVSGEHYRFVSMWMARTSYLAAFAIMVIFTLSVSMLLRYSHHQIFVFIVDLLQMLEMNMAIAFPAAPLLTVILALVGMEAIMSEFFNDTTTAFYIILIVWLADQYDAICCHTSTSKRHWLRFFYLYHFAFYAYHYRFNGQYSSLALVTSWLFIQHSMIYFFHHYELPAILQQVRIQEMLLQAPPLGPGTPTALPDDMNNNSGAPATAPDSAGQPPALGPVSPGASGSPGPVAAAPSSLVAAAASVAAAAGGDLGWMAETAAIITDASFLSGLSASLLERRPASPLGPAGGLPHAPQDSVPPSDSAASDTTPLGAAVGGPSPASMAPTEAPSEVGS

SEQ ID NO: 30361 - DNA, 1863 bp, Artificial Sequence
  derived and/or modified sequence
atgtccgaacacgttgaaccggccgcccctgggccaggcccaaatggcggcggaggcggtccagcacctgcccgcgggccccggacacccaatctcaaccccaatcctctgattaacgtgagagaccgtctgtttcatgcgctgttttttaagatggcagttacgtacagccggttgttcccaccagccttccgaagactgttcgagttcttcgtcctcctcaaggctctattcgtactcttcgtattggcttatattcatatcgtcttttcacgctcacccatcaactgtcttgaacacgtgcgcgacaaatggccccgggagggcattctgagggtggaggtgcgccacaattcaagccgagctcctgtgttcctgcagttctgtgacagcggcggacgtgggtcatttccgggcttagctgtcgagcctggatcaaatttggacatggaagacgaagaagaggaggaactgacaatggagatgtttgggaactccagtatcaagttcgaactggacatagaacctaaagtcttcaagcctccaagctctacagaagcgttgaatgatagccaagagttcccatttcctgagactcccacaaaagtttggcctcaagacgagtacatcgtggaatatagcttggaatatggcttcctgcgcctgtctcaggccaccaggcagaggctgtcaatccctgttatggtggttacactagacccgactcgcgatcagtgcttcggcgatcgattttcacgacttttattagacgagtttctcggctatgacgatatcttgatgtctagcgtgaaaggactggctgaaaatgaggaaaataaaggctttctacgtaatgtcgtgagcggagagcattacagatttgtgtccatgtggatggcgagaaccagttacctggccgccttcgcaattatggtgatctttactcttagcgtcagtatgcttctacgatacagccaccaccagattttcgttttcatcgtggacctgcttcagatgctcgagatgaacatggctattgcctttcctgctgcaccgctgctgacagtgattctggcactggttggcatggaagctataatgtccgaattcttcaacgacactaccaccgccttctacattatcctgatcgtatggctggccgatcagtacgatgcaatttgctgccatacatccacctccaagcgtcactggctgcgattcttttacctgtaccacttcgccttctatgcttatcactaccgatttaatggccagtatagctcgctagctctggtgacaagttggctattcatacagcattccatgatctactttttccaccattacgaactgcctgccattctgcagcaagtgagaatacaagaaatgctgttacaggcccctccactcggacctgggactccaacagcgttacctgacgacatgaacaacaattccggggcacccgcgacagccccagactccgcaggccaacccccagctctaggtccagtgtcccccggcgcatctggcagcccaggacctgtagccgctgccccgagcagtcttgtggcagctgcagccagtgtggccgcagccgccggcggagaccttgggtggatggccgagacagcagccataattacagacgcatcctttctgagcggtttatccgcctccctcttagaacgccgaccagctagtccactggggcctgccggggggctgcctcacgctccccaggacagcgtcccgccctccgactctgctgcctctgatactacgcctctcggtgccgccgttggtgggccatcgccagcctctatggctccaactgaggccccatccgaggttggtagctag

SEQ ID NO: 30362 - DNA, 1863 bp, Artificial Sequence
  derived and/or modified sequence
atgtctgagcacgtggagcctgctgcccctggccctggccccaatggaggcggcggcggccctgccccagcccggggccccaggacccccaacctgaaccccaaccccctcatcaacgtgcgggacaggctcttccacgccctcttcttcaagatggctgtgacctacagccgcctcttccccccagccttcagaagactctttgagttctttgtgctgctgaaggccctgtttgtgctgtttgtgctggcctacatccacatcgtgttcagccgcagccccatcaactgcctggagcacgtgcgggacaagtggccccgggagggcatcctgcgggtggaggtgcgccacaacagcagccgggcccctgtgttcctgcagttctgtgacagcggcggccggggcagcttccctggcctggccgtggagcccggcagcaacctggacatggaggatgaggaggaggaggagctgaccatggagatgtttggaaacagcagcatcaagtttgagctggacatcgagcccaaggtgttcaagccacccagcagcacagaggccctgaatgacagccaggagttccccttccctgagacccccaccaaggtgtggccccaggatgagtacatcgtggagtacagcctggagtatggcttcctgcggctgagccaggccacccggcagaggctgagcatccctgtgatggtggtgaccctggaccccacccgggaccagtgctttggagaccgcttcagccggctgctgctggatgagttcctgggctatgatgacatcctgatgagctctgtgaagggcctggctgaaaatgaggagaacaagggcttcctgagaaatgtggtgtctggagagcactacagatttgtgtccatgtggatggcccggaccagctacctggccgcctttgccatcatggtgatcttcaccctgtctgtgtccatgctgctgcgctacagccaccaccagatctttgtgttcatcgtggacctgctgcagatgctggagatgaacatggccatcgccttccctgctgcccccctgctgaccgtcatcctggccctggtgggcatggaggccatcatgtctgagttcttcaatgacaccaccacagccttctacatcatcctgattgtgtggctggccgaccagtatgatgccatctgctgccacaccagcaccagcaagaggcactggctgcgcttcttctacctgtaccactttgccttctacgcctaccactaccgcttcaacggccagtacagcagcctggccctggtgacctcctggctgttcatccagcacagcatgatctacttcttccaccactatgagctgcctgccatcctgcagcaggtgcgcatccaggagatgctgctgcaggccccacccctgggccctggcacccccacagccctgcctgatgacatgaacaacaacagcggggccccagccacagccccagattctgctggccagcccccagccctgggccctgtgtcccctggggccagcggcagccctggccctgtggccgccgcccccagcagcctggtggccgctgctgcctctgtggccgctgctgctggaggagacctgggctggatggccgagacagctgccatcatcacagatgccagcttcctgagcggcctgagcgccagcctgctggagcggcggcctgccagccccctgggccctgctgggggcctgccccacgccccccaggacagcgtgcccccaagtgacagcgctgccagtgacaccacccccctgggcgctgctgtgggcggccccagccctgcctccatggcccccacagaggcccccagcgaggtgggcagctag

SEQ ID NO: 30363 - DNA, 1863 bp, Artificial Sequence
  derived and/or modified sequence
atgagcgagcacgtggagcccgccgcccccggccccggccccaacggcggcgggggcggccctgcccccgccagaggtcctaggacccctaacttgaacccaaatccactgatcaacgtgagagatcgcctctttcatgcccttttctttaagatggctgttacatatagtagattgttcccccccgcttttcgtcgccttttcgaattttttgtactgttgaaggctctattcgttctgttcgttcttgcctatatccacattgtgttctctaggagccccattaactgcctagagcatgtcagagataagtggccacgagagggtattctgagggttgaggtccggcacaattcttcaagagccccagtgttccttcagttttgtgattcaggcggtcgtggctccttcccaggactcgccgttgaaccaggctctaacctggacatggaggatgaagaggaagaggaactgacaatggaaatgttcggaaacagcagcatcaaattcgaattggatatcgagcctaaggtgttcaagccaccctcctcaacggaagctctcaacgattcccaagagtttcctttccccgagacccctacgaaagtgtggccccaggacgagtatatcgtcgagtacagcctagagtatggattcttgcggctaagccaagccactcggcagcggttgagcattccggtgatggtagtgactctcgatccaacgcgggaccagtgttttggtgacaggttttcacgcttgttacttgacgagttcctggggtatgacgatatactgatgtctagtgttaaaggcctggctgagaatgaggagaacaaaggatttctcagaaacgtggtctctggtgaacattataggttcgtgtcaatgtggatggcgcgcacctcctacttagctgccttcgccattatggtcatcttcaccctgagcgtgtccatgctgctccgctatagccatcatcagatttttgtcttcatagtggatcttctacagatgctggaaatgaacatggccatcgcgtttccggccgctcccctgctaaccgtcatcctagcactcgttggcatggaagccataatgagtgagttttttaacgatacaactaccgcattctatattatcttaattgtatggctggcagaccaatacgacgcaatctgttgtcataccagcacatcgaagcgccattggctgagattcttttatctctaccacttcgccttctacgcttaccactatagatttaatgggcagtattcctccctcgcactggtgacatcctggttgttcattcaacactcaatgatctacttttttcatcactacgagcttccagccatcctccaacaggtgcggatccaggaaatgttgctccaagcccccccgctaggccctggaacccccactgcactgccagacgacatgaataataactccggcgcgcccgctaccgcccctgactccgctggccagccacctgcactgggacccgtgtccccaggcgcctctggcagcccggggccagtggcggctgcaccaagttctctggtcgcggccgcagcgtccgttgctgccgccgctgggggcgatctgggatggatggccgaaactgccgcgattattaccgacgcctcctttctcagcggactatctgcttctctgctggagagacgtccagccagccctctggggcccgctggggggctgcctcacgcaccccaggattcagttcctccttcagactccgccgctagcgatacaactcccctcggcgctgcagtgggcggtccctcgccagcatcaatggcaccaaccgaggcaccttccgaagtcggcagctag

SEQ ID NO: 30364 - DNA, 1863 bp, Artificial Sequence
  derived and/or modified sequence
atgagcgaacatgtcgagccagcagctcctggccctggacctaacggaggaggaggcggaccagcccctgctagaggacctcgcactcctaatctaaaccccaacccccttatcaacgtgcgagaccgcctgtttcatgccctcttcttcaagatggccgtgacatacagcagactgttcccgccagcctttaggcggctgttcgaattctttgtcctgctgaaagcattattcgttctctttgttctcgcgtatatccacattgtctttagccgatcacccataaactgtctcgagcacgtgcgagataaatggccacgggagggaattcttcgtgtagaggtgcgccacaattccagtagagccccagtatttctgcagttctgtgacagcggtggcaggggatctttccctgggctggcggtagaacccggtagtaatctcgacatggaagatgaagaggaagaagaactgacaatggaaatgtttggaaattccagcattaaatttgagctggacattgagccgaaggtattcaaaccacctagctccactgaagcgctcaacgactctcaagaattccccttccctgagacccctacaaaggtatggcctcaagacgaatatatcgtcgagtattccctggagtacggcttcctacggctatcgcaagccacaaggcaacggcttagtatcccggtaatggtggtgaccttagacccaactagggaccagtgtttcggggacaggttcagcagactgctgttagacgagttccttggctacgatgacattcttatgagcagtgtcaagggcctggctgagaacgaggaaaacaaagggttcttaaggaatgtggtatccggcgagcattacaggtttgtatcgatgtggatggccaggacctcttatctcgccgcatttgccatcatggtcatcttcacattgtcagtgtcgatgctgctgaggtattcccatcaccagatcttcgtgttcatagtggacttattgcagatgctggaaatgaacatggctatcgcattccccgcagcacccctgcttaccgtcatactggccttggtgggaatggaagccattatgagcgaatttttcaacgacactactactgccttctatatcattctcattgtgtggctggccgatcagtacgacgcaatatgctgccacacatctacctctaagcgtcactggctgaggtttttctacctgtatcatttcgccttttatgcctatcactacagattcaacgggcagtattcttctctggcgctggtcacatcatggctctttatacaacattccatgatttactttttccatcactacgagctccccgcaatcctgcaacaggttaggattcaggaaatgcttctgcaagcccctccgcttggtccaggcaccccaaccgcgttgcctgatgacatgaataataactctggtgccccagctaccgcccctgactctgccggtcaacctcctgccctagggccagtgtctccaggcgcaagcgggagtccaggtccagttgccgctgctccttcctccctggtggccgcagccgcttccgtggccgctgctgctggcggagacctcggttggatggccgagaccgccgctatcatcaccgatgcatcctttttgtccggcctatctgcttcgcttctggaacggagacccgctagccctctcggccctgcgggaggactcccccatgcccctcaggatagtgtgccaccaagcgattcagcagcctctgacactacaccccttggagctgccgtgggtggcccttccccagctagtatggcccctactgaggccccatctgaggtcggaagttag

SEQ ID NO: 30365 - DNA, 2708 bp, Artificial Sequence
  derived and/or modified sequence
agcagcgccgcagccggacgagaaagcggaagatggcggcggcggccgggaggccgtgaggagagcggcggctgcgagggcggccgatggcggccgggaggcgccctcggacacttgcgggtcgttagggcgcgacgctgggaggcatgtcggagcacgtggagcccgcagctccggggcccgggcccaacggcggcggcggcggcccggcccccgcgcgcgggcctcgcacccccaatctcaaccccaaccccctcatcaacgtgcgcgaccggctcttccacgcgctgttcttcaagatggctgtcacctattcgcggctcttcccgcccgccttccgccgtctcttcgagttcttcgtgctgctcaaggccctgtttgtgctcttcgtcctggcctacatccacatcgtcttctcccgctcgcccatcaactgcctggagcatgtgcgtgacaagtggccgcgtgagggcatcctgcgtgtggaagtgcggcacaactcgagccgcgcgcccgtcttcctacagttctgtgacagcggcggccgcgggagcttcccgggcctggccgtggaaccaggcagcaacctggacatggaagatgaggaggaggaagagctgaccatggagatgtttgggaacagctccatcaagtttgagctggacatcgagcccaaggtgttcaagccgccgagtagcacagaggccctgaatgacagccaggagttccccttccccgagacgcccaccaaagtgtggccgcaggacgagtacatcgtggagtactcactagagtatggcttccttcgcctgtcgcaggccacccgccagcgcctgagcatccccgtcatggtggtcaccctggaccccacgcgggaccagtgcttcggggaccgcttcagccgcctgctgctggatgagttcctgggctacgatgacatcctcatgtccagcgtgaagggcctggccgagaacgaggagaacaagggcttcctgcggaatgtggtgtcgggcgagcactaccgctttgtgagcatgtggatggcgcggacgtcctacctggccgccttcgccatcatggtcatcttcacgctgagcgtgtccatgctgctgcggtactcacaccaccagatcttcgtcttcatcgtggacctgctgcagatgctggagatgaacatggccatcgccttccccgcagcgcccctgctgaccgtcatcctggccctcgtcgggatggaggccatcatgtcggagttcttcaacgacaccaccaccgccttctacatcatcctcatcgtgtggctcgcggaccagtatgacgccatctgctgccacaccagcaccagcaagcggcattggctgcggttcttctatctctaccacttcgccttctatgcctatcactaccgcttcaatgggcagtatagcagcctggccctggtcacctcctggctcttcatccagcattccatgatctacttcttccaccactacgagctgcctgccatcctgcagcaggtccgcatccaggagatgctgcttcaggcgccgccactgggccccgggacccccacggcgctgcccgatgacatgaacaacaactcgggcgccccggctacagcccctgactctgccggccagccccccgccctgggccccgtctcgcctggggccagcgggagtcccgggcctgtggcagcggcgcccagctccctggtggccgcggcagcctcagtggcagcagctgccggtggtgacctgggttggatggcagagaccgctgccatcatcacagacgcctccttcctgtccggcctgagcgcctccctcctggagcggcgtccagccagcccgctgggccctgctgggggcctcccccacgccccccaggacagtgtccccccgagtgactccgcagcttctgacacaactcccctgggggctgcggtaggcgggcctagcccggcctccatggccccaacggaggcgccctcggaggtggggtcctgagccgcacagctgagccgcctctgacccctgctggctgggcctgaccttcccgagcccgtgggggtgggggaggccagccacctccttcctctgggactgcccagcctgtgtcgggggctttcagggtttcgtggggtttgcccggaaggcggctttcctccccctggtgtgaggtcgcgcccgaggcttgtacccgctagtgaggtgtttgagctggtcagcaaggagagggggtggggttccgcggaaggttctggaggggtcttggtaggtctgcagtgaaccgtcctgaggatggagtggggtcccatggtgcaggtctctgagcaaggcggaggtgtggaggagaggccggcttggggtggggcctcgcgccctagtgccggccggcctcagcccggctctgcctggtgctccctgcagtgccttctccatggccccgccctccccgcgtgtgcgccaggcttggggtccccgggagagcagagcttgcgcctcgggcatagggacgtggggtgcaggcgccaacatcagtggcagcagccagggccgtggtccagtcccactcggggatggagtgggccggcggccaaaccagtcactcggggaggaatgcggaggagcgctcattccattctatttaattgcagtgtacaaaattgtgtttgtatatagaataaactgtctgttgacagcggc

SEQ ID NO: 30366 - DNA, 1863 bp, Artificial Sequence
  derived and/or modified sequence
atgagcgagcacgtggagcccgccgcccccggccccggccccaacggcggcggcggcggccccgcccccgccagaggccccagaacccccaacctgaaccccaaccccctgatcaacgtgagagacagactgttccacgccctgttcttcaagatggccgtgacctacagcagactgttcccccccgccttcagaagactgttcgagttcttcgtgctgctgaaggccctgttcgtgctgttcgtgctggcctacatccacatcgtgttcagcagaagccccatcaactgcctggagcacgtgagagacaagtggcccagagagggcatcctgagagtggaggtgagacacaacagcagcagagcccccgtgttcctgcagttctgcgacagcggcggcagaggcagcttccccggcctggccgtggagcccggcagcaacctggacatggaggacgaggaggaggaggagctgaccatggagatgttcggcaacagcagcatcaagttcgagctggacatcgagcccaaggtgttcaagccccccagcagcaccgaggccctgaacgacagccaggagttccccttccccgagacccccaccaaggtgtggccccaggacgagtacatcgtggagtacagcctggagtacggcttcctgagactgagccaggccaccagacagagactgagcatccccgtgatggtggtgaccctggaccccaccagagaccagtgcttcggcgacagattcagcagactgctgctggacgagttcctgggctacgacgacatcctgatgagcagcgtgaagggcctggccgagaacgaggagaacaagggcttcctgagaaacgtggtgagcggcgagcactacagattcgtgagcatgtggatggccagaaccagctacctggccgccttcgccatcatggtgatcttcaccctgagcgtgagcatgctgctgagatacagccaccaccagatcttcgtgttcatcgtggacctgctgcagatgctggagatgaacatggccatcgccttccccgccgcccccctgctgaccgtgatcctggccctggtgggcatggaggccatcatgagcgagttcttcaacgacaccaccaccgccttctacatcatcctgatcgtgtggctggccgaccagtacgacgccatctgctgccacaccagcaccagcaagagacactggctgagattcttctacctgtaccacttcgccttctacgcctaccactacagattcaacggccagtacagcagcctggccctggtgaccagctggctgttcatccagcacagcatgatctacttcttccaccactacgagctgcccgccatcctgcagcaggtgagaatccaggagatgctgctgcaggccccccccctgggccccggcacccccaccgccctgcccgacgacatgaacaacaacagcggcgcccccgccaccgcccccgacagcgccggccagccccccgccctgggccccgtgagccccggcgccagcggcagccccggccccgtggccgccgcccccagcagcctggtggccgccgccgccagcgtggccgccgccgccggcggcgacctgggctggatggccgagaccgccgccatcatcaccgacgccagcttcctgagcggcctgagcgccagcctgctggagagaagacccgccagccccctgggccccgccggcggcctgccccacgccccccaggacagcgtgccccccagcgacagcgccgccagcgacaccacccccctgggcgccgccgtgggcggccccagccccgccagcatggcccccaccgaggcccccagcgaggtgggcagctag

SEQ ID NO: 30367 - protein, 565 aa, Artificial Sequence
  derived and/or modified sequence
MDFLLALVLVSSLYLQAAAEFDGRWPRQIVSSIGLCRYGGRIDCCWGWARQSWGQCQPVCQPRCKHGECIGPNKCKCHPGYAGKTCNQDLNECGLKPRPCKHRCMNTYGSYKCYCLNGYMLMPDGSCSSALTCSMANCQYGCDVVKGQIRCQCPSPGLQLAPDGRTCVDVDECATGRASCPRFRQCVNTFGSYICKCHKGFDLMYIGGKYQCHDIDECSLGQYQCSSFARCYNIRGSYKCKCKEGYQGDGLTCVYIPKVMIEPSGPIHVPKGNGTILKGDTGNNNWIPDVGSTWWPPKTPYIPPIITNRPTSKPTTRPTPKPTPIPTPPPPPPLPTELRTPLPPTTPERPTTGLTTIAPAASTPPGGITVDNRVQTDPQKPRGDVFIPRQPSNDLFEIFEIERGVSADDEAKDDPGVLVHSCNFDHGLCGWIREKDNDLHWEPIRDPAGGQYLTVSAAKAPGGKAARLVLPLGRLMHSGDLCLSFRHKVTGLHSGTLQVFVRKHGAHGAALWGRNGGHGWRQTQITLRGADIKSVVFKGEKRRGHTGEIGLDDVSLKKGHCSEER

SEQ ID NO: 30368 - DNA, 1698 bp, Artificial Sequence
  derived and/or modified sequence
atggacttcctcctagcgctagtattggtctctagcctctatttgcaagcagccgctgagttcgacggcaggtggcccagacaaatagttagctctatcggcctgtgcaggtacgggggtcgaattgactgctgctggggatgggcacgacaatcctggggccagtgtcaaccggtgtgtcagcctagatgtaaacatggagagtgcatcgggccaaataagtgcaaatgtcaccccggatatgcaggtaaaacctgcaaccaggatctgaacgagtgtggcctaaaacctcgaccctgtaagcatcgctgtatgaacacctatggatcttacaagtgttattgtctgaacggctacatgttgatgccagatggctcctgtagtagcgcgctgacatgtagtatggcgaattgtcaatacgggtgtgacgttgtgaagggtcagattcgttgtcagtgtccatctcccggactgcagttggctcccgacggaaggacctgcgtggatgtggatgaatgcgctacaggccgagcatcttgtcccaggttccgtcagtgcgtaaatacctttggaagctatatctgtaagtgtcacaagggctttgatctgatgtatattggtgggaaataccagtgtcacgatatcgatgagtgctcgctggggcagtatcagtgtagtagcttcgcccgatgctacaatattcgcggtagctataaatgtaaatgtaaagagggctatcagggagacggactgacatgcgtttatattcctaaagtaatgatcgaaccttctgggcctattcatgtgcccaaggggaacgggacaatcctcaagggcgatactggcaacaataactggataccggatgtgggctccacctggtggcctccaaagaccccatacatcccacctattatcactaaccgacctacaagtaaacccaccaccagaccgacaccaaaaccaaccccaatccccacccctccacccccaccgcctctcccaacggagctgaggactcctcttcccccaacaactcccgaacggccaacaacgggactgacgacaatagcccctgccgcaagcactccccctgggggtatcacagtggacaacagggtgcaaactgacccccagaaacccagaggcgatgtgttcattccacgtcagccaagcaatgacctgttcgagatcttcgagatcgagcgcggtgtgtcagctgatgatgaggccaaagacgacccgggagtactggtccattcatgcaactttgatcacgggctctgcggatggatcagagagaaggataatgatctgcactgggaacccatccgggatcccgctggagggcagtaccttaccgtgagtgcagccaaggcaccgggtggtaaagcagctcggctagtcctgcccttgggccgactcatgcatagtggggatctgtgcctgtcatttaggcacaaagtcacagggttgcacagtggaactctgcaagtgttcgttagaaagcatggcgcacatggcgctgccctctggggaagaaacgggggacatggctggcgtcagacgcagatcacgttgcggggtgccgacatcaaatccgtcgtgttcaaaggtgaaaagcgacgcggtcataccggggaaatcggtttggacgacgtcagtctaaagaaggggcattgctcagaggagagatag

SEQ ID NO: 30369 - DNA, 1698 bp, Artificial Sequence
  derived and/or modified sequence
atggatttcctactggctttagtgctcgtatccagcctttatttgcaggcggcagcggagttcgacggcaggtggcccagacagatcgtgtcgagtatcggactctgccgctacggaggccggattgattgttgttggggctgggctcgtcagtcttggggccagtgccagcccgtctgtcagccgagatgcaaacatggagaatgtattggtcccaacaaatgtaaatgtcaccccggatacgctggaaaaacctgcaaccaggatctgaacgagtgcggattgaaaccaagaccctgtaaacacagatgtatgaacacctatggaagttataaatgctattgcctcaacggttacatgctcatgcctgacgggtcttgtagctctgctctgacatgcagtatggctaactgtcagtacggatgcgatgtggtcaaaggacagattagatgtcaatgtccgagccccggcctgcagctagctcctgatggaagaacctgcgtcgatgtagacgaatgtgcaacaggaagggcgtcctgtccccgctttcgccagtgcgtcaacacctttggatcgtatatctgcaagtgccataaaggctttgaccttatgtacatcggggggaaatatcagtgtcacgatatcgacgagtgttctctgggccagtaccagtgcagttctttcgcccggtgctacaacatccggggatcttacaagtgtaaatgcaaagagggataccagggggatgggttgacttgcgtatatattcccaaggtgatgatcgagcctagtggccccatccatgtcccaaagggtaacggtactattctgaaaggcgatactgggaacaacaattggattcctgacgtgggctctacgtggtggcctcccaaaacaccatacattcctcctatcataacgaaccgtcccacatctaaacccacgacaaggcccacccctaaaccaacacccatccccacaccccctcccccaccacccttacccacggaactgcgtacgcctcttcctccaactactcccgaacgcccaactactgggctgacgaccattgctcctgctgcgagcactccgccgggcggtattacggttgacaacagagttcaaacagacccacagaaacctagaggtgacgtgttcattccgcggcagccctctaatgaccttttcgaaatctttgagatcgaaagaggcgtgtctgctgatgacgaggccaaggacgatccaggtgtgctcgtacattcatgtaacttcgaccacggcctgtgtggctggattagggagaaggataacgaccttcattgggaacccatccgtgaccctgctggcgggcagtatctgacggtaagtgccgccaaggccccaggtggaaaagccgcacgtctcgtgctgccactcgggcgattgatgcacagtggggacctctgcttaagttttcgacacaaggtgactggcttgcacagtggaacactgcaggtgtttgttagaaagcacggtgctcatggagcagctttgtggggacggaacggtggacacgggtggcggcaaacccaaatcacactgaggggagctgacataaagagcgtcgtcttcaaaggcgagaagcggcgggggcacaccggggaaatcggccttgacgacgtaagtctgaaaaaggggcactgctcagaagagaggtag

SEQ ID NO: 30370 - DNA, 1698 bp, Artificial Sequence
  derived and/or modified sequence
atggatttcttgttggcactggttctggtaagtagcctgtatttacaggcagcagctgagtttgacggccgatggccgagacagatcgtctcatctatagggttgtgcagatatgggggccgtatcgattgttgttgggggtgggcaaggcagtcatggggtcaatgtcagccagtgtgtcagcctaggtgcaaacacggcgagtgcatcgggcctaacaagtgcaaatgtcacccagggtacgccggtaagacatgtaatcaagaccttaacgaatgcggactgaagcctagaccatgcaagcacagatgtatgaacacttatggcagctacaaatgttactgcctcaacggatatatgctgatgcccgatggttcatgtagtagcgccttaacttgttcgatggccaactgtcagtacggatgcgatgtcgtgaagggtcagattcgatgccaatgtccatctccaggcctgcaactcgcacctgacggaaggacatgcgtagatgttgatgaatgtgcaaccgggagagccagctgccctcgctttaggcagtgtgtgaataccttcgggagctatatctgtaaatgccacaagggatttgacctcatgtatataggcggaaaatatcagtgccacgacatcgacgagtgcagcctggggcagtaccagtgtagttcctttgcaagatgctataatattcggggtagctataaatgcaaatgcaaagagggataccagggggatggcctgacttgcgtatacatcccgaaagttatgatagaaccttcaggccccatacatgttcccaaaggtaacgggacaatcctgaaaggagataccggcaataacaattggattcctgacgtgggcagtacgtggtggcctccaaaaactccctacattcctccaattatcaccaatcgacctaccagcaaaccaacaaccagacccacccctaagcccactcccatacccacaccacccccaccccctccactccccacagaacttagaacacctttgccccctaccactccggaaagacccaccaccggactgacaaccatcgccccagccgcatccactccaccaggggggatcacagtagataaccgcgtgcaaaccgaccctcagaaacctcgcggggatgtcttcatacctagacagcctagcaacgacttgtttgaaatttttgagatcgagaggggtgttagtgcagacgacgaggcaaaagatgaccccggggtattggtccattcttgcaactttgaccacggcttgtgcgggtggatccgcgaaaaggacaatgacttacactgggaaccaatccgggaccccgcaggaggccaatatctgacagtttcagcagcaaaagcaccaggaggcaaggccgccagattagtcctccctctcggaaggctcatgcactccggggatctctgcttaagcttccgccataaagtgacaggactccatagcggcacattgcaagtgttcgtcagaaaacatggagctcacggtgctgcgttatggggccggaatggaggacatggctggagacagacacagattacactgcggggagctgatattaagtctgtcgtcttcaagggggaaaagaggagagggcacacgggagaaattggacttgatgacgtgtctcttaaaaaagggcactgttcagaagaaaggtag

SEQ ID NO: 30371 - DNA, 1698 bp, Artificial Sequence
  derived and/or modified sequence
atggacttcctgctggccctggtgctggtgagcagcctgtacctgcaggccgccgccgagttcgacggcagatggcccagacagatcgtgagcagcatcggcctgtgcagatacggcggcagaatcgactgctgctggggctgggccagacagagctggggccagtgccagcccgtgtgccagcccagatgcaagcacggcgagtgcatcggccccaacaagtgcaagtgccaccccggctacgccggcaagacctgcaaccaggacctgaacgagtgcggcctgaagcccagaccctgcaagcacagatgcatgaacacctacggcagctacaagtgctactgcctgaacggctacatgctgatgcccgacggcagctgcagcagcgccctgacctgcagcatggccaactgccagtacggctgcgacgtggtgaagggccagatcagatgccagtgccccagccccggcctgcagctggcccccgacggcagaacctgcgtggacgtggacgagtgcgccaccggcagagccagctgccccagattcagacagtgcgtgaacaccttcggcagctacatctgcaagtgccacaagggcttcgacctgatgtacatcggcggcaagtaccagtgccacgacatcgacgagtgcagcctgggccagtaccagtgcagcagcttcgccagatgctacaacatcagaggcagctacaagtgcaagtgcaaggagggctaccagggcgacggcctgacctgcgtgtacatccccaaggtgatgatcgagcccagcggccccatccacgtgcccaagggcaacggcaccatcctgaagggcgacaccggcaacaacaactggatccccgacgtgggcagcacctggtggccccccaagaccccctacatcccccccatcatcaccaacagacccaccagcaagcccaccaccagacccacccccaagcccacccccatccccaccccccccccccccccccccctgcccaccgagctgagaacccccctgccccccaccacccccgagagacccaccaccggcctgaccaccatcgcccccgccgccagcaccccccccggcggcatcaccgtggacaacagagtgcagaccgacccccagaagcccagaggcgacgtgttcatccccagacagcccagcaacgacctgttcgagatcttcgagatcgagagaggcgtgagcgccgacgacgaggccaaggacgaccccggcgtgctggtgcacagctgcaacttcgaccacggcctgtgcggctggatcagagagaaggacaacgacctgcactgggagcccatcagagaccccgccggcggccagtacctgaccgtgagcgccgccaaggcccccggcggcaaggccgccagactggtgctgcccctgggcagactgatgcacagcggcgacctgtgcctgagcttcagacacaaggtgaccggcctgcacagcggcaccctgcaggtgttcgtgagaaagcacggcgcccacggcgccgccctgtggggcagaaacggcggccacggctggagacagacccagatcaccctgagaggcgccgacatcaagagcgtggtgttcaagggcgagaagagaagaggccacaccggcgagatcggcctggacgacgtgagcctgaagaagggccactgcagcgaggagagatag

SEQ ID NO: 30372 - DNA, 1698 bp, Artificial Sequence
  derived and/or modified sequence
atggactttctgctcgctctggttctggtgtcatccctgtacctacaggctgccgccgagttcgatggccgctggcccagacagattgtgtcctcgatcggcctgtgccggtacggaggtcggattgattgctgttggggatgggcccgccagagttggggacagtgtcaacctgtctgccagccaaggtgtaaacatggggaatgtattggaccaaataagtgtaagtgccatcctggttacgccgggaagacatgtaatcaagacctgaatgagtgcgggttgaaaccgaggccctgtaagcaccggtgtatgaacacctacggctcttataagtgctactgccttaatggatacatgctgatgccagacggttcatgctcaagcgccctcacatgcagcatggccaattgtcagtacgggtgtgatgttgtgaagggacaaatccggtgccagtgtccttccccaggactgcagctagcacctgacgggagaacatgtgtggatgttgatgaatgtgccacagggagggcatcttgccctcgctttcgccagtgtgtcaataccttcggtagctatatatgtaaatgccacaaggggttcgacctaatgtatatcgggggcaaatatcagtgccacgacattgatgagtgttctctgggacagtatcaatgctcttccttcgcgcgctgctacaacattagaggaagctacaagtgtaaatgcaaggagggttatcagggagatggcctcacctgcgtatacattcctaaggtcatgatcgagccatctgggcctatacatgtgcccaaagggaatgggacaatcttgaagggtgataccgggaacaacaactggatccctgacgttggcagcacttggtggccccccaaaacaccatacatccccccgatcataaccaacaggccgacttccaaaccgactacaagacctactcctaagcctacacctattcccacccctccgccacccccaccactgcctactgaactgcggacccctttgccacccactaccccggagcgccccaccactggcctaacaaccattgcccctgcagcttcgacaccccccggcggtatcacagtggacaatcgagttcagacagatccacagaaaccccggggtgatgtgtttatcccaagacaaccttcaaacgacctgtttgagatctttgaaatcgagagaggagtcagcgctgatgatgaagctaaagatgacccgggagtgcttgtgcactcctgtaattttgaccacggactgtgtgggtggattcgcgaaaaggacaatgacctccattgggagccgatcagggatcccgccggcggacagtacctcactgtaagcgccgcaaaagcacctggtggaaaggccgctcgactggtcctccccttgggccgactgatgcacagcggagacttgtgcctcagctttaggcacaaggtgactggactccacagcggcactctgcaggttttcgtcagaaagcacggcgctcacggcgctgctttatggggccggaacgggggccatgggtggcggcagacacaaatcaccctacgaggtgctgacattaagtcagtagtcttcaaaggagagaagagaagaggtcatacaggggaaattggtctcgacgacgtcagcctaaaaaagggtcattgcagtgaggaaaggtag

SEQ ID NO: 30373 - DNA, 1698 bp, Artificial Sequence
  derived and/or modified sequence
atggacttcctgctggccctggtgctggtgagcagcctgtacctgcaggccgctgctgagtttgatggccgctggccccggcagatcgtgagcagcatcggcctgtgccgctatggaggaagaattgactgctgctggggctgggcccggcagagctggggccagtgccagcctgtgtgccagccccgctgcaagcacggggagtgcatcggccccaacaagtgcaagtgccaccctggctacgccggcaagacctgcaaccaggacctgaatgaatgtggcctgaagccccggccctgcaagcaccgctgcatgaacacctacggcagctacaagtgctactgcctgaatggctacatgctgatgccagatggcagctgcagcagcgccctgacctgcagcatggccaactgccagtatggctgtgatgtggtgaagggccagatccgctgccagtgccccagccctggcctgcagctggccccagatggccgcacctgtgtggatgtggatgaatgtgccaccggccgggccagctgcccccgcttccggcagtgtgtgaacaccttcggcagctacatctgcaagtgccacaagggctttgacctgatgtacatcggcggcaagtaccagtgccacgacattgatgaatgttccctgggccagtaccagtgcagcagctttgcccgctgctacaacatccggggcagctacaagtgcaagtgcaaggagggctaccagggagatggcctgacctgtgtgtacatccccaaggtgatgattgagcccagcggccccatccacgtgcccaagggaaatggcaccatcctgaagggggacaccggcaacaacaactggatcccagatgtgggcagcacctggtggccacccaagaccccctacatcccccccatcatcaccaaccggcccaccagcaagcccaccacccggcccacccccaagcccacccccatccccaccccacctcctcctccacccctgcccacagagctgcggacccccctgccccccaccaccccagagcggcccaccaccggcctgaccaccatcgccccagctgccagcaccccacctgggggcatcaccgtggacaacagagtgcagacagacccccagaagcccagaggagatgtgttcatcccccggcagcccagcaatgacctgtttgagatctttgaaattgagcggggcgtgtctgcagatgatgaggccaaggatgatcctggggtgctggtgcacagctgcaactttgaccacggcctgtgtggctggatccgggagaaggacaatgacctgcactgggagcccatccgggaccctgctgggggccagtacctgactgtgtctgctgccaaggcccctgggggcaaggccgcccggctggtgctgcccctgggccgcctgatgcacagcggggacctgtgcctgtccttccgccacaaggtgacaggcctgcacagcggcaccctgcaggtgtttgtgaggaagcacggggcccatggagctgccctgtggggcagaaatggaggccacggctggaggcagacccagatcaccctgcggggagctgacatcaagtctgtggtgttcaagggggagaagaggcggggccacactggagaaattggcctggatgatgtgtccctgaagaagggccactgcagcgaggagaggtag

SEQ ID NO: 30374 - DNA, 4598 bp, Artificial Sequence
  derived and/or modified sequence
agctagaagggagcgggagggggctccgggcgccgcgcagcagacctgctccggccgcgcgcctcgccgctgtcctccgggagcggcagcagtagcccgggcggcgagggctgggggttcctcgagactctcagaggggcgcctcccatcggcgcccaccaccccaacctgttcctcgcgcgccactgcgctgcgccccaggacccgctgcccaacatggattttctcctggcgctggtgctggtatcctcgctctacctgcaggcggccgccgagttcgacgggaggtggcccaggcaaatagtgtcatcgattggcctatgtcgttatggtgggaggattgactgctgctggggctgggctcgccagtcttggggacagtgtcagcctgtgtgccaaccacgatgcaaacatggtgaatgtatcgggccaaacaagtgcaagtgtcatcctggttatgctggaaaaacctgtaatcaagatctaaatgagtgtggcctgaagccccggccctgtaagcacaggtgcatgaacacttacggcagctacaagtgctactgtctcaacggatatatgctcatgccggatggttcctgctcaagtgccctgacctgctccatggcaaactgtcagtatggctgtgatgttgttaaaggacaaatacggtgccagtgcccatcccctggcctgcagctggctcctgatgggaggacctgtgtagatgttgatgaatgtgctacaggaagagcctcctgccctagatttaggcaatgtgtcaacacttttgggagctacatctgcaagtgtcataaaggcttcgatctcatgtatattggaggcaaatatcaatgtcatgacatagacgaatgctcacttggtcagtatcagtgcagcagctttgctcgatgttataacatacgtgggtcctacaagtgcaaatgtaaagaaggataccagggtgatggactgacttgtgtgtatatcccaaaagttatgattgaaccttcaggtccaattcatgtaccaaagggaaatggtaccattttaaagggtgacacaggaaataataattggattcctgatgttggaagtacttggtggcctccgaagacaccatatattcctcctatcattaccaacaggcctacttctaagccaacaacaagacctacaccaaagccaacaccaattcctactccaccaccaccaccacccctgccaacagagctcagaacacctctaccacctacaaccccagaaaggccaaccaccggactgacaactatagcaccagctgccagtacacctccaggagggattacagttgacaacagggtacagacagaccctcagaaacccagaggagatgtgttcattccacggcaaccttcaaatgacttgtttgaaatatttgaaatagaaagaggagtcagtgcagacgatgaagcaaaggatgatccaggtgttctggtacacagttgtaattttgaccatggactttgtggatggatcagggagaaagacaatgacttgcactgggaaccaatcagggacccagcaggtggacaatatctgacagtgtcggcagccaaagccccagggggaaaagctgcacgcttggtgctacctctcggccgcctcatgcattcaggggacctgtgcctgtcattcaggcacaaggtgacggggctgcactctggcacactccaggtgtttgtgagaaaacacggtgcccacggagcagccctgtggggaagaaatggtggccatggctggaggcaaacacagatcaccttgcgaggggctgacatcaagagcgtcgtcttcaaaggtgaaaaaaggcgtggtcacactggggagattggattagatgatgtgagcttgaaaaaaggccactgctctgaagaacgctaacaactccagaactaacaatgaactcctatgttgctctatcctctttttccaattctcatcttctctcctcttctcccttttatcaggcctaggagaagagtgggtcagtgggtcagaaggaagtctatttggtgacccaggtttttctggcctgcttttgtgcaatcccaatgaacagtgataccctccttgaaatacaggggcatcgcagacacatcaaagccatctgtgggtgttgccttccatcctgtgtctctttcaggaaggcattcagcatgcgtgagccataccatcctccatcctgattacaaggtgctccttgtagcaaattatgagagtgagttacgggagcagtttttaaaagaaatctttgcagatggctatgatgttatgtgttcggtgttgtaccatgagtagtattgacttcccttgagatatgatgtacaatgtgcttgtgaaattgacttaccctcttcacttaagttagttctggcctgacctgaactctgacttttactgccattcactttataaaataagggtgtgtaacatatcaagatacatttatttttatctgttttttttttcctgttaaagacaattatgtagagtgggcacgtaatccctccttagtagtattgtgttttgtgtaaatgtgctattgatattaagtatttacatgttccaaatatttacagactctagttgcaaggtaaagggcagcttgtgatctcaaaaaaatacatggtgaaatgtcatccagttccatgaccttatattggcagcagtaggaaattggcagaagtgttgggttgtggtaacggagtgatgaatttttttttaatggccttgagtttgatctctgcaaaggataggaaacctttaggaagacaagaaactgcagttaatttagaactgtcactgtttcaagttacactttaaaaccacagcttttaccatcataacatggctctggtaatatgtaggaagctttataaaagttttggttgattcagaaaaaggatcctgttgcagagtgagaggaagcatagggggaaactccattggaacagattttcacacaacgttttaaattgatataagtttaggcagttgtagttcataacttatgttgctcatgttgtgctgtgtcaggatgggataggaagcaagtcccatgcttagaggcatgggatgtgttggaacgggatttacacacactggaggagcagggcaagttggaattctaagatccatgaacccccaactgtatttcctccctgcatattttaccaatatattaaaaaacaatgtaacttttaaaaggcatcattcctgaggtttgtcttaatttctgattaagtaatcagaatattttctgctatttttgccaggaatcacaaagatgattaaagggttggaaaaaaagatctatgatggaaaattaaaggaactgggattattgagcctggagaagagaagactgaggggcaaaccattgatggttttcaagtatatgaagggttggcacagagagggtggcgaccagctgttctccatatgcactaagaatagaacaagaggaaactggcttagactagagtataagggagcatttcttggcaggggccattgttagaatacttcataaaaaaagaagtgtgaaaatctcagtatctctctctctttctaaaaaattagataaaaatttgtctatttaagatggttaaagatgttcttacccaaggaaaagtaacaaattatagaatttcccaaaagatgttttgatcctactagtagtatgcagtgaaaatctttagaactaaataatttggacaaggcttaatttaggcatttccctcttgacctcctaatggagagggattgaaaggggaagagcccaccaaatgctgagctcactgaaatatctctcccttatggcaatcctagcagtattaaagaaaaaaggaaactatttattccaaatgagagtatgatggacagatattttagtatctcagtaatgtcctagtgtggcggtggttttcaatgtttcttcatgttaaaggtataagcctttcatttgttcaatggatgatgtttcagatttttttttttttaagagatccttcaaggaacacagttcagagagattttcatcgggtgcattctctctgcttcgtgtgtgacaagttatcttggctgctgagaaagagtgccctgccccacaccggcagacctttccttcacctcatcagtatgattcagtttctcttatcaattggactctcccaggttccacagaacagtaatattttttgaacaataggtacaatagaaggtcttctgtcatttaacctggtaaaggcagggctggagggggaaaataaatcattaagcctttgagtaacggcagaatatatggctgtagatccatttttaatggttcatttcctttatggtcatataactgcacagctgaagatgaaaggggaaaataaatgaaaattttacttttcgatgccaatgatacattgcactaaactgatggaagaagttatccaaagtactgtataacatcttgtttattatttaatgttttctaaaataaaaaatgttagtggttttccaaatggcctaataaaaacaattatttgtaaataaaaacactgttagtaatacca

SEQ ID NO: 30375 - DNA, 1698 bp, Artificial Sequence
  derived and/or modified sequence
atggacttcctgctggccctggtgctggtgagcagcctgtacctgcaagcggctgccgaattcgacggccgctggccaagacagattgtctcttccattgggctgtgtcgatacgggggcagaatcgattgctgctggggctgggcccgccaatcctggggccagtgccagccagtctgccagccccggtgcaaacacggcgaatgcattgggccaaacaagtgtaagtgccatcctgggtatgctggcaagacatgtaaccaggacttaaacgagtgtggtctgaagccgcggccttgcaagcacaggtgtatgaatacatacgggtcgtacaagtgttattgtttaaacggatatatgctcatgcccgacggcagctgcagttcggccctcacctgtagcatggccaactgccagtacggttgtgatgtggttaagggacaaatcaggtgccaatgtccttcaccgggactgcagcttgcgcccgatgggcggacttgtgtggatgtagatgaatgtgcgacgggccgagcctcttgtccgcgcttccgccaatgcgtaaacaccttcggatcctatatctgcaaatgtcataagggcttcgacctgatgtacatcggggggaaatatcagtgtcacgatatagacgagtgcagcttgggccagtaccaatgctcctctttcgcgaggtgctataacatccgtggatcctacaaatgcaaatgtaaagaaggctaccagggcgacggactgacttgtgtctacatacctaaggtgatgattgaacccagcggccctattcacgtgcccaaagggaacgggaccatactaaagggggatacagggaacaacaactggattcctgacgtcggatccacttggtggccccctaagacaccctacattccgcccataattacgaaccgccccacctctaaaccgacgacccgcccgactccaaaacccaccccaattccaaccccccctcccccgccacctttgcctactgaactgcgaactcccctgccaccaaccactccagagagacccacgaccggacttacaaccattgcccctgcggcatccacgccccctggtgggatcacagtcgacaaccgggtgcagactgatcctcagaagccacgaggagatgtgttcataccccgtcagccatccaacgacctcttcgaaatcttcgagatcgaacggggggtgagcgcggatgacgaggcgaaagacgacccaggagtactggtgcattcctgtaatttcgaccacggtttgtgtggatggattcgggagaaggacaacgacctccactgggagccaattcgggatccagccgggggtcagtacctgacagtgtctgccgctaaggccccggggggtaaagcagccaggctcgtgcttccgctagggagattgatgcactctggggacctgtgcctgagcttccggcataaggtcaccggcttgcatagtggaacactccaggtctttgttagaaaacatggagcccacggggctgcactgtggggcagaaacggagggcatggctggagacagactcagatcactctgagaggcgcggacattaaaagcgtagttttcaaaggagagaaacgacgggggcacactggagaaatcggcctggatgacgtgtcgttgaaaaaagggcactgttctgaagagagatag

SEQ ID NO: 30376 - RNA, 1698 nt, Artificial Sequence
  derived and/or modified sequence
auggauuuccuacuggcuuuagugcucguauccagccuuuauuugcaggcggcagcggaguucgacggcagguggcccagacagaucgugucgaguaucggacucugccgcuacggaggccggauugauuguuguuggggcugggcucgucagucuuggggccagugccagcccgucugucagccgagaugcaaacauggagaauguauuggucccaacaaauguaaaugucaccccggauacgcuggaaaaaccugcaaccaggaucugaacgagugcggauugaaaccaagacccuguaaacacagauguaugaacaccuauggaaguuauaaaugcuauugccucaacgguuacaugcucaugccugacgggucuuguagcucugcucugacaugcaguauggcuaacugucaguacggaugcgauguggucaaaggacagauuagaugucaauguccgagccccggccugcagcuagcuccugauggaagaaccugcgucgauguagacgaaugugcaacaggaagggcguccuguccccgcuuucgccagugcgucaacaccuuuggaucguauaucugcaagugccauaaaggcuuugaccuuauguacaucggggggaaauaucagugucacgauaucgacgaguguucucugggccaguaccagugcaguucuuucgcccggugcuacaacauccggggaucuuacaaguguaaaugcaaagagggauaccagggggauggguugacuugcguauauauucccaaggugaugaucgagccuaguggccccauccaugucccaaaggguaacgguacuauucugaaaggcgauacugggaacaacaauuggauuccugacgugggcucuacgugguggccucccaaaacaccauacauuccuccuaucauaacgaaccgucccacaucuaaacccacgacaaggcccaccccuaaaccaacacccauccccacacccccucccccaccacccuuacccacggaacugcguacgccucuuccuccaacuacucccgaacgcccaacuacugggcugacgaccauugcuccugcugcgagcacuccgccgggcgguauuacgguugacaacagaguucaaacagacccacagaaaccuagaggugacguguucauuccgcggcagcccucuaaugaccuuuucgaaaucuuugagaucgaaagaggcgugucugcugaugacgaggccaaggacgauccaggugugcucguacauucauguaacuucgaccacggccuguguggcuggauuagggagaaggauaacgaccuucauugggaacccauccgugacccugcuggcgggcaguaucugacgguaagugccgccaaggccccagguggaaaagccgcacgucucgugcugccacucgggcgauugaugcacaguggggaccucugcuuaaguuuucgacacaaggugacuggcuugcacaguggaacacugcagguguuuguuagaaagcacggugcucauggagcagcuuuguggggacggaacgguggacacggguggcggcaaacccaaaucacacugaggggagcugacauaaagagcgucgucuucaaaggcgagaagcggcgggggcacaccggggaaaucggccuugacgacguaagucugaaaaaggggcacugcucagaagagagguag

SEQ ID NO: 30377 - RNA, 1698 nt, Artificial Sequence
  derived and/or modified sequence
auggauuucuuguuggcacugguucugguaaguagccuguauuuacaggcagcagcugaguuugacggccgauggccgagacagaucgucucaucuauaggguugugcagauaugggggccguaucgauuguuguugggggugggcaaggcagucauggggucaaugucagccagugugucagccuaggugcaaacacggcgagugcaucgggccuaacaagugcaaaugucacccaggguacgccgguaagacauguaaucaagaccuuaacgaaugcggacugaagccuagaccaugcaagcacagauguaugaacacuuauggcagcuacaaauguuacugccucaacggauauaugcugaugcccgaugguucauguaguagcgccuuaacuuguucgauggccaacugucaguacggaugcgaugucgugaagggucagauucgaugccaauguccaucuccaggccugcaacucgcaccugacggaaggacaugcguagauguugaugaaugugcaaccgggagagccagcugcccucgcuuuaggcagugugugaauaccuucgggagcuauaucuguaaaugccacaagggauuugaccucauguauauaggcggaaaauaucagugccacgacaucgacgagugcagccuggggcaguaccaguguaguuccuuugcaagaugcuauaauauucgggguagcuauaaaugcaaaugcaaagagggauaccagggggauggccugacuugcguauacaucccgaaaguuaugauagaaccuucaggccccauacauguucccaaagguaacgggacaauccugaaaggagauaccggcaauaacaauuggauuccugacgugggcaguacgugguggccuccaaaaacucccuacauuccuccaauuaucaccaaucgaccuaccagcaaaccaacaaccagacccaccccuaagcccacucccauacccacaccacccccacccccuccacuccccacagaacuuagaacaccuuugcccccuaccacuccggaaagacccaccaccggacugacaaccaucgccccagccgcauccacuccaccaggggggaucacaguagauaaccgcgugcaaaccgacccucagaaaccucgcggggaugucuucauaccuagacagccuagcaacgacuuguuugaaauuuuugagaucgagagggguguuagugcagacgacgaggcaaaagaugaccccgggguauugguccauucuugcaacuuugaccacggcuugugcggguggauccgcgaaaaggacaaugacuuacacugggaaccaauccgggaccccgcaggaggccaauaucugacaguuucagcagcaaaagcaccaggaggcaaggccgccagauuaguccucccucucggaaggcucaugcacuccggggaucucugcuuaagcuuccgccauaaagugacaggacuccauagcggcacauugcaaguguucgucagaaaacauggagcucacggugcugcguuauggggccggaauggaggacauggcuggagacagacacagauuacacugcggggagcugauauuaagucugucgucuucaagggggaaaagaggagagggcacacgggagaaauuggacuugaugacgugucucuuaaaaaagggcacuguucagaagaaagguag

SEQ ID NO: 30378 - protein, 1375 aa, Artificial Sequence
  derived and/or modified sequence
MAGGAWGRLACYLEFLKKEELKEFQLLLANKAHSRSSSGETPAQPEKTSGMEVASYLVAQYGEQRAWDLALHTWEQMGLRSLCAQAQEGAGHSPSFPYSPSEPHLGSPSQPTSTAVLMPWIHELPAGCTQGSERRVLRQLPDTSGRRWREISASLLYQALPSSPDHESPSQESPNAPTSTAVLGSWGSPPQPSLAPREQEAPGTQWPLDETSGIYYTEIREREREKSEKGRPPWAAVVGTPPQAHTSLQPHHHPWEPSVRESLCSTWPWKNEDFNQKFTQLLLLQRPHPRSQDPLVKRSWPDYVEENRGHLIEIRDLFGPGLDTQEPRIVILQGAAGIGKSTLARQVKEAWGRGQLYGDRFQHVFYFSCRELAQSKVVSLAELIGKDGTATPAPIRQILSRPERLLFILDGVDEPGWVLQEPSSELCLHWSQPQPADALLGSLLGKTILPEASFLITARTTALQNLIPSLEQARWVEVLGFSESSRKEYFYRYFTDERQAIRAFRLVKSNKELWALCLVPWVSWLACTCLMQQMKRKEKLTLTSKTTTTLCLHYLAQALQAQPLGPQLRDLCSLAAEGIWQKKTLFSPDDLRKHGLDGAIISTFLKMGILQEHPIPLSYSFIHLCFQEFFAAMSYVLEDEKGRGKHSNCIIDLEKTLEAYGIHGLFGASTTRFLLGLLSDEGEREMENIFHCRLSQGRNLMQWVPSLQLLLQPHSLESLHCLYETRNKTFLTQVMAHFEEMGMCVETDMELLVCTFCIKFSRHVKKLQLIEGRQHRSTWSPTMVVLFRWVPVTDAYWQILFSVLKVTRNLKELDLSGNSLSHSAVKSLCKTLRRPRCLLETLRLAGCGLTAEDCKDLAFGLRANQTLTELDLSFNVLTDAGAKHLCQRLRQPSCKLQRLQLVSCGLTSDCCQDLASVLSASPSLKELDLQQNNLDDVGVRLLCEGLRHPACKLIRLGLDQTTLSDEMRQELRALEQEKPQLLIFSRRKPSVMTPTEGLDTGEMSNSTSSLKRQRLGSERAASHVAQANLKLLDVSKIFPIAEIAGKSHEESSPEVVPVELLCVPSPASQGDLHTKPLGTDDDFWGPTGPVATEVVDKEKNLYRVHFPVAGSYRWPNTGLCFVMREAVTVEIEFCVWDQFLGEINPQHSWMVAGPLLDIKAEPGAVEAVHLPHFVALQGGHVDTSLFQMAHFKEEGMLLEKPARVELHHIVLENPSFSPLGVLLKMIHNALRFIPVTSVVLLYHRVHPEEVTFHLYLIPSDCSIRKAIDDLEMKFQFVRIHKPPPLTPLYMGCRYTVSGSGSGMLEILPKELELCYRSPGEDQLFSEFYVGHLGSGIRLQVKDKKDETLVWEALVKPGRNTSQPWNLRCNRDARRY

SEQ ID NO: 30379 - DNA, 4128 bp, Artificial Sequence
  derived and/or modified sequence
atggccggcggcgcctggggcagactggcctgctacctggagttcctgaagaaggaggagctgaaggagttccagctgctgctggccaacaaggcccacagcagaagcagcagcggcgagacccccgcccagcccgagaagaccagcggcatggaggtggccagctacctggtggcccagtacggcgagcagagagcctgggacctggccctgcacacctgggagcagatgggcctgagaagcctgtgcgcccaggcccaggagggcgccggccacagccccagcttcccctacagccccagcgagccccacctgggcagccccagccagcccaccagcaccgccgtgctgatgccctggatccacgagctgcccgccggctgcacccagggcagcgagagaagagtgctgagacagctgcccgacaccagcggcagaagatggagagagatcagcgccagcctgctgtaccaggccctgcccagcagccccgaccacgagagccccagccaggagagccccaacgcccccaccagcaccgccgtgctgggcagctggggcagccccccccagcccagcctggcccccagagagcaggaggcccccggcacccagtggcccctggacgagaccagcggcatctactacaccgagatcagagagagagagagagagaagagcgagaagggcagacccccctgggccgccgtggtgggcacccccccccaggcccacaccagcctgcagccccaccaccacccctgggagcccagcgtgagagagagcctgtgcagcacctggccctggaagaacgaggacttcaaccagaagttcacccagctgctgctgctgcagagaccccaccccagaagccaggaccccctggtgaagagaagctggcccgactacgtggaggagaacagaggccacctgatcgagatcagagacctgttcggccccggcctggacacccaggagcccagaatcgtgatcctgcagggcgccgccggcatcggcaagagcaccctggccagacaggtgaaggaggcctggggcagaggccagctgtacggcgacagattccagcacgtgttctacttcagctgcagagagctggcccagagcaaggtggtgagcctggccgagctgatcggcaaggacggcaccgccacccccgcccccatcagacagatcctgagcagacccgagagactgctgttcatcctggacggcgtggacgagcccggctgggtgctgcaggagcccagcagcgagctgtgcctgcactggagccagccccagcccgccgacgccctgctgggcagcctgctgggcaagaccatcctgcccgaggccagcttcctgatcaccgccagaaccaccgccctgcagaacctgatccccagcctggagcaggccagatgggtggaggtgctgggcttcagcgagagcagcagaaaggagtacttctacagatacttcaccgacgagagacaggccatcagagccttcagactggtgaagagcaacaaggagctgtgggccctgtgcctggtgccctgggtgagctggctggcctgcacctgcctgatgcagcagatgaagagaaaggagaagctgaccctgaccagcaagaccaccaccaccctgtgcctgcactacctggcccaggccctgcaggcccagcccctgggcccccagctgagagacctgtgcagcctggccgccgagggcatctggcagaagaagaccctgttcagccccgacgacctgagaaagcacggcctggacggcgccatcatcagcaccttcctgaagatgggcatcctgcaggagcaccccatccccctgagctacagcttcatccacctgtgcttccaggagttcttcgccgccatgagctacgtgctggaggacgagaagggcagaggcaagcacagcaactgcatcatcgacctggagaagaccctggaggcctacggcatccacggcctgttcggcgccagcaccaccagattcctgctgggcctgctgagcgacgagggcgagagagagatggagaacatcttccactgcagactgagccagggcagaaacctgatgcagtgggtgcccagcctgcagctgctgctgcagccccacagcctggagagcctgcactgcctgtacgagaccagaaacaagaccttcctgacccaggtgatggcccacttcgaggagatgggcatgtgcgtggagaccgacatggagctgctggtgtgcaccttctgcatcaagttcagcagacacgtgaagaagctgcagctgatcgagggcagacagcacagaagcacctggagccccaccatggtggtgctgttcagatgggtgcccgtgaccgacgcctactggcagatcctgttcagcgtgctgaaggtgaccagaaacctgaaggagctggacctgagcggcaacagcctgagccacagcgccgtgaagagcctgtgcaagaccctgagaagacccagatgcctgctggagaccctgagactggccggctgcggcctgaccgccgaggactgcaaggacctggccttcggcctgagagccaaccagaccctgaccgagctggacctgagcttcaacgtgctgaccgacgccggcgccaagcacctgtgccagagactgagacagcccagctgcaagctgcagagactgcagctggtgagctgcggcctgaccagcgactgctgccaggacctggccagcgtgctgagcgccagccccagcctgaaggagctggacctgcagcagaacaacctggacgacgtgggcgtgagactgctgtgcgagggcctgagacaccccgcctgcaagctgatcagactgggcctggaccagaccaccctgagcgacgagatgagacaggagctgagagccctggagcaggagaagccccagctgctgatcttcagcagaagaaagcccagcgtgatgacccccaccgagggcctggacaccggcgagatgagcaacagcaccagcagcctgaagagacagagactgggcagcgagagagccgccagccacgtggcccaggccaacctgaagctgctggacgtgagcaagatcttccccatcgccgagatcgccggcaagagccacgaggagagcagccccgaggtggtgcccgtggagctgctgtgcgtgcccagccccgccagccagggcgacctgcacaccaagcccctgggcaccgacgacgacttctggggccccaccggccccgtggccaccgaggtggtggacaaggagaagaacctgtacagagtgcacttccccgtggccggcagctacagatggcccaacaccggcctgtgcttcgtgatgagagaggccgtgaccgtggagatcgagttctgcgtgtgggaccagttcctgggcgagatcaacccccagcacagctggatggtggccggccccctgctggacatcaaggccgagcccggcgccgtggaggccgtgcacctgccccacttcgtggccctgcagggcggccacgtggacaccagcctgttccagatggcccacttcaaggaggagggcatgctgctggagaagcccgccagagtggagctgcaccacatcgtgctggagaaccccagcttcagccccctgggcgtgctgctgaagatgatccacaacgccctgagattcatccccgtgaccagcgtggtgctgctgtaccacagagtgcaccccgaggaggtgaccttccacctgtacctgatccccagcgactgcagcatcagaaaggccatcgacgacctggagatgaagttccagttcgtgagaatccacaagcccccccccctgacccccctgtacatgggctgcagatacaccgtgagcggcagcggcagcggcatgctggagatcctgcccaaggagctggagctgtgctacagaagccccggcgaggaccagctgttcagcgagttctacgtgggccacctgggcagcggcatcagactgcaggtgaaggacaagaaggacgagaccctggtgtgggaggccctggtgaagcccggcagaaacaccagccagccctggaacctgagatgcaacagagacgccagaagatactag

SEQ ID NO: 30380 - DNA, 4128 bp, Artificial Sequence
  derived and/or modified sequence
atggctggtggggcctgggggcggctggcctgttaccttgaattcttgaaaaaagaagagctcaaggagttccagctgctgcttgctaacaaggcccatagccgatccagctccggagagactccagcacaaccagagaagacgagcgggatggaggtcgcctcttatctcgtggcccagtatggagaacagcgggcctgggatctagctctccacacatgggagcagatgggcctccgatcactgtgtgctcaggctcaggagggcgccggccacagccccagtttcccttattctcccagtgaaccacatctgggctctccttcgcagccaacatccactgccgtcttgatgccatggattcatgagctgccagctggttgcactcagggatccgagcgccgggttctgagacagctccccgacacttctggccgacggtggagggaaattagcgcctcactgctctatcaggcgttgccctcatctcccgaccacgagtcccctagtcaagaatctcccaacgcccctactagtacagcagttctgggatcttggggcagccctcctcagccctcgcttgccccgagggaacaggaagctcccgggacccaatggcctctcgatgagacctcaggaatctactacactgagatcagggaacgcgagagagagaagagtgagaaaggccgtcccccatgggccgccgtcgtagggacaccacctcaggctcatacatccctgcagccccatcaccatccctgggaaccttccgtccgagagtcgttgtgctccacctggccgtggaagaatgaggactttaatcagaagttcacccagctgctgttgctacaacggccccatcctaggtctcaggatccccttgtgaaacgaagctggcccgattacgttgaggagaataggggccatctgatagagatccgggatttattcggcccgggcctggacactcaggagcctaggatcgtgattctgcagggggcagctggaattggtaagtccacgctggcaaggcaggtgaaggaggcctggggcaggggccagctctacggagataggttccaacacgttttctacttctcctgcagggaattagcccaatccaaggtggtgagccttgccgaactgattggaaaggatggcactgctacacccgcgcctattaggcagatcttgtcacggcctgagaggctgcttttcattttagatggcgtggacgagcccggctgggtgttgcaagaaccttcttcagagttgtgcctacattggtcccagccacagccagccgatgctctgctgggcagcttactcggcaaaactattctcccagaggcatcttttcttatcaccgcccgaaccaccgcactgcaaaatctgattccaagcctggaacaggctcggtgggtcgaggtgttgggttttagtgagagttcacgcaaggagtacttctaccgatacttcaccgatgaacgccaagcaattagggccttcagattagtgaagtcaaataaggaactgtgggccctgtgccttgtcccctgggtgtcttggctggcatgcacttgccttatgcagcagatgaaaagaaaggaaaagctgactctgacgagcaaaacgactaccactctctgcttgcactatctggcacaggctctgcaggctcagcctctgggaccccagcttagagatctatgttctctggctgcagagggtatctggcagaaaaagacactcttttcgcctgatgaccttaggaagcacggccttgatggcgccattatctctacgtttctgaagatgggcatcctgcaggagcaccctatccccttgtcctattccttcattcacctctgctttcaggaattttttgccgctatgagctacgtgttagaagacgagaaagggcggggcaagcactccaactgtattattgacttggaaaagacactcgaggcctacgggatccacggactgtttggggcctctaccacacggtttcttctgggccttctgagcgatgagggcgagagggagatggagaatattttccattgcagactctcacaaggcaggaacctaatgcagtgggtaccatccctacagctcctgctgcagccccattctctcgagtcactgcactgtttatacgagacgcggaataaaacctttctcacccaggtgatggcacattttgaggaaatggggatgtgtgtagagacagacatggagctgctggtgtgcaccttctgtatcaagttctcacggcacgtcaagaagctccagctgattgaggggcgacagcaccggtctacttggagccccaccatggtggtactgttccgttgggtacctgtcacagatgcatattggcagatactattttctgtccttaaagtgacaagaaatctgaaagaactggatctctccgggaattccctgagtcattccgcagttaaaagtctgtgcaagacactccggcgccctaggtgtctgctggagacacttagactagccggctgtgggttgacagccgaagattgtaaagacttggcttttgggctgcgtgctaaccagacgctaacggaacttgacctgtccttcaacgtgctgaccgacgcaggcgccaagcacctgtgtcagcggctgcgccagccctcatgcaagcttcagcggctgcaactggtatcgtgtggattaacaagtgactgttgtcaggacctcgcctctgtgctgagcgcctctccatccttgaaagagctagatctgcagcagaacaatttggatgacgtcggggtcaggttgctatgtgaggggctgcggcatcctgcttgcaaattaatacgcttgggccttgaccagactacactatctgacgagatgcggcaggagctgcgagcgctggagcaggagaagccccagctcttgatcttctcacgtcgcaaacctagtgtaatgactcctacggaaggtctggatacaggagagatgtcaaactccacgagttctctgaaacggcagcgcctgggaagcgaacgagccgccagccatgttgcccaggccaacctgaagctgctggacgtgtccaagattttccccatagctgaaattgccggcaaaagccacgaggagtctagccctgaagtagtgcctgtggagctattgtgtgtccctagtcccgccagccagggcgaccttcatacaaagcctcttggcactgacgacgatttttggggacccacagggcctgttgcgaccgaggtggtagataaggagaagaatctctatcgtgttcacttccctgtggccgggagttaccgatggcctaacactggcctgtgcttcgtgatgagagaggccgtgacagtggaaattgagttctgtgtgtgggaccagtttttgggcgagatcaatcctcagcattcatggatggtggccggacctttgttggatatcaaggcagagccaggagctgtagaagcagttcacttaccccatttcgtggcccttcagggcggacacgtcgacacatcactctttcagatggctcatttcaaggaggaggggatgctcctggagaaacctgcccgagttgaactccaccatatagtgctggagaacccaagctttagcccgctgggcgtcctcctgaagatgatccataatgcacttcggttcataccagttactagcgttgtcctcctgtatcaccgggtgcaccctgaagaggtgaccttccatctgtatctcatacccagcgattgcagtattcgtaaggccatcgatgatctggagatgaaattccagtttgttagaattcacaagcctccccctctgactccgctgtacatggggtgtcgatacaccgtgagcggatcaggctccgggatgctagagatcctgcccaaagagctggaactgtgctaccgctcacctggtgaagaccaactcttttctgagttttacgtggggcacctggggagtggcatccgcctgcaggtcaaagacaagaaagacgagaccctggtttgggaagcactcgtcaaacccggccggaatacgtcacagccttggaaccttcgatgtaacagagatgcaagaaggtactag

SEQ ID NO: 30381 - DNA, 4128 bp, Artificial Sequence
  derived and/or modified sequence
atggcgggcggagcgtgggggaggctcgcttgttatctcgagtttctaaagaaggaagagttgaaggagttccagctccttttggcaaacaaggcccactccagaagctccagcggcgagacgccagcccagcccgagaagacatccggcatggaggtggctagttatctagtcgcccaatacggagagcagcgggcttgggacctcgctttgcatacctgggagcagatgggactgcgatccctgtgtgcacaggcacaggagggagcaggtcattctccttctttcccatactcacctagtgaacctcacttgggatctccatcccagccaaccagcaccgccgtactgatgccctggatccacgagttaccagctggctgtacccaggggtcggaacggcgcgtgctgcgccaactacccgatacatccggtcgcagatggcgtgaaatttccgcatccctactttaccaggcactgccttcaagccccgaccatgagagcccttctcaggagtctccaaacgctccgacatcaactgctgtactgggttcttgggggtctccgcctcagcctagtttggcaccccgcgagcaggaggcaccgggcacgcagtggccactcgacgagacgtccggcatctattatacggaaatacgggaacgcgagagggagaaatcagagaagggtagacctccctgggccgccgtggtcggaactccaccgcaggcccacacctctctgcaaccccaccatcacccttgggagcctagcgtccgggaatctctgtgcagtacctggccatggaagaatgaggactttaatcaaaagttcacacagctcttgctcctgcagagaccccatcctagaagccaggatcctcttgtgaaacgcagctggccggactacgtggaagaaaatcggggccacctgatagagattcgcgatttgttcggtcccggcctagatacacaagagccaagaattgtgatactgcagggggccgccggaatcggcaaatctacactggctagacaagtgaaggaagcctggggccgagggcagctctatggcgaccgctttcagcatgttttttacttttcctgccgagagctggcccagtccaaagttgttagtcttgccgagctgataggtaaggacggaactgcaactcctgctcctatccgccagattttgtcccggcccgagcgcctgctgttcattcttgatggcgtggatgagcctgggtgggtgttgcaagagcctagctcggagctatgtctacattggtcacaacctcagccggcagacgccctgctggggtccttattgggcaagactatcctcccagaagcctcgtttctgattactgctcggaccactgcccttcaaaacctcatcccctctttagaacaggcgagatgggttgaggtgttaggatttagtgaaagctcaaggaaggagtacttttacaggtatttcaccgacgagagacaagcgatccgagccttccgcctggtaaagagtaataaggaactttgggcactgtgccttgttccttgggttagttggctggcgtgcacatgccttatgcaacagatgaagcgaaaagagaagcttacactgacgtccaagaccacaactacactgtgtctgcattatctggcgcaagccctccaggcacagcccctagggccccagctaagggacctgtgcagcctggccgcagagggaatttggcagaagaagacgttgttctctcccgacgatctccgaaagcacggtctggacggggctatcatttctaccttccttaaaatggggatactgcaggagcatcctatcccgttgtcatactccttcattcacctgtgctttcaggagtttttcgcagcgatgtcttacgtgctggaagatgagaagggacgtgggaaacacagcaactgcatcattgatctggagaaaactctggaagcctatggcatccatgggctgttcggggcctcaacaacacgttttctattgggcctactgagcgatgagggtgagcgcgaaatggagaacatctttcactgcaggctgtcccaggggcggaacctgatgcagtgggtcccttccctccaactcctgctccaaccacactctctggagtcacttcactgtctgtatgaaacacgaaacaagacttttctcacacaagtgatggcacactttgaggaaatgggaatgtgtgtggagactgatatggaactgttagtgtgtaccttctgtatcaagttcagtcgacacgtgaagaagctacagcttattgaaggccgccaacataggagtacctggagcccaactatggttgtgctgttccggtgggtaccagtgacagacgcgtactggcagattctttttagcgtcttgaaggtgacaagaaatctgaaggaattggatctaagcggaaattcattgagccatagtgctgtgaagagtctgtgcaaaacattgcgacggccaagatgcttactggaaacattgcgtttagcgggatgcgggctcaccgccgaggattgcaaagatctggcattcggcctaagagccaatcagacactcaccgagctggacctgtctttcaacgtgctgacggatgctggggccaaacacctgtgtcagcggcttcgacaaccaagctgtaaacttcagcggctacaacttgtgagctgtggattgacaagtgactgctgccaagacctggccagtgtgctttcagcctcaccctccctgaaagaactggacttgcagcagaacaacttagacgatgtgggcgtgcggcttctgtgtgaaggcctccgacacccagcctgcaaattgatcaggctcggtctggatcagacgaccctcagtgacgagatgagacaggaactgcgcgccctggaacaagaaaagccgcaactgctcatcttttcgagaaggaaaccgagcgtgatgacgcctaccgagggcctcgacaccggcgaaatgtctaatagtaccagtagtctgaaacgacagagacttggtagtgaacgcgctgcctctcacgtcgctcaggcaaacctgaagttgctggacgtgtctaaaatctttccaattgcggaaatagctgggaaatctcatgaagaaagcagcccagaggtagttcccgtggaacttctctgtgtccctagcccagcgtcccagggtgatcttcacaccaagcccctaggtacagacgacgatttttggggcccaacggggcccgtggctaccgaagtcgtggacaaggaaaagaatctctatcgggtgcattttcccgtcgccggttcctaccggtggccaaacaccggactgtgtttcgtgatgcgcgaggccgtgactgtggagatcgagttctgcgtatgggatcaattcttgggcgagatcaatccccagcatagttggatggtggccggccccctgttagatatcaaggccgaaccaggcgcggtagaggcagttcatctccctcatttcgtcgccctacaggggggccacgtcgacaccagcctcttccagatggctcacttcaaggaggaaggaatgttactggagaagcccgcccgagtagagctacaccacattgttctggagaatccatcgttttcccccttgggcgttctgttgaaaatgatacataacgctttgagatttattcctgtcacatcagttgttcttctctaccacagggtgcatcctgaggaagtcaccttccacctgtatttgattccaagtgattgtagcattagaaaagctattgacgacctcgagatgaaatttcagtttgtccgaatccacaaacctccccccctgacacccctttatatgggctgcaggtacaccgtcagtgggagcggcagcggcatgttggagattctgccaaaagaattggagttatgctataggtcccctggggaggatcagctattcagtgagttttacgtcgggcatctcggttctggcattcgcctgcaggtgaaggacaagaaagacgagacgcttgtgtgggaagccctggtcaagccagggcgcaacacctcccagccatggaatctccggtgcaatcgggatgctcggagatattag

SEQ ID NO: 30382 - DNA, 4128 bp, Artificial Sequence
  derived and/or modified sequence
atggccggcggggcctggggccgcctggcctgctacctggagttcctgaagaaggaggagctgaaggagttccagctgctgctggccaacaaggcccacagccgcagcagcagcggggagaccccagcccagcctgagaagaccagcggcatggaggtggccagctacctggtggcccagtatggagagcagagggcctgggacctggccctgcacacctgggagcagatgggcctgcggagcctgtgtgcccaggcccaggagggcgccggccacagccccagcttcccctacagccccagcgagccccacctgggcagccccagccagcccaccagcacagctgtgctgatgccctggatccacgagctgcctgctggctgcacccagggcagcgagcggcgggtgctgcggcagctgcctgacaccagcggccgccgctggagggagatcagcgccagcctgctgtaccaggccctgcccagcagcccagaccacgagagccccagccaggagagccccaatgcccccaccagcacagctgtgctgggctcctggggcagccccccccagcccagcctggccccccgggagcaggaggcccctggcacccagtggcccctggatgagaccagcggcatctactacacagagatccgggagcgggagcgggagaagtctgagaagggccggcccccctgggccgctgtggtgggcaccccaccccaggcccacaccagcctgcagccccaccaccacccctgggagcccagcgtgcgggagagcctgtgcagcacctggccctggaagaatgaagacttcaaccagaagttcacccagctgctgctgctgcagaggccccaccccaggagccaggaccccctggtgaagaggtcctggccagactatgtggaggagaacagaggccacctgattgagatccgggacctgtttggacctggcctggacacccaggagcccagaattgtcatcctgcagggcgccgccggcatcggcaagagcaccctggcccggcaggtgaaggaggcctggggccggggccagctgtatggagaccgcttccagcacgtgttctacttcagctgccgggagctggcccagagcaaggtggtgtccctggccgagctgattggcaaggatggaacagccaccccagcccccatccggcagatcctgagcaggcctgagcggctgctcttcatcctggatggagtggatgagcccggctgggtgctgcaggagcccagcagcgagctgtgcctgcactggagccagccccagcctgcagatgccctgctgggcagcctgctgggcaagaccatcctgcctgaggccagcttcctgatcacagcccggaccacagccctgcagaacctgatccccagcctggagcaggcccgctgggtggaggtgctgggcttcagcgagagcagcaggaaggagtacttctaccgctacttcacagatgagcggcaggccatccgggccttccggctggtgaagagcaacaaggagctgtgggccctgtgcctggtgccctgggtgtcctggctggcctgcacctgcctgatgcagcagatgaagaggaaggagaagctgaccctgaccagcaagaccaccaccaccctgtgcctgcactacctggcccaggccctgcaggcccagcccctgggcccccagctgcgggacctgtgcagcctggccgctgagggcatctggcagaagaagaccctcttctccccagatgacctgaggaagcacggcctggatggagccatcatcagcaccttcctgaagatgggcatcctgcaggagcaccccatccccctgagctacagcttcatccacctgtgcttccaggagttctttgctgccatgtcctatgtgctggaggatgagaagggccggggcaagcacagcaactgcatcatcgacctggagaagaccctggaggcctacggcatccacggcctgtttggagccagcaccacccgcttcctgctgggcctgctgagtgatgaaggagagcgggagatggagaacatcttccactgccgcctgagccagggcaggaacctgatgcagtgggtgcccagcctgcagctgctgctgcagccccacagcctggagagcctgcactgcctgtatgagaccaggaacaagaccttcctgacccaggtgatggcccactttgaggagatgggcatgtgtgtggagacagacatggagctgctggtgtgcaccttctgcatcaagttcagcagacatgtgaagaagctgcagctgattgagggccggcagcacaggagcacctggagccccaccatggtggtgctcttccgctgggtgcctgtgacagatgcctactggcagatcctcttctctgtgctgaaggtgaccaggaacctgaaggagctggacctgagcggcaacagcctgagccacagcgctgtgaagagcctgtgcaagaccctgcggcggccccgctgcctgctggagaccctgcggctggccggctgcggcctgacagctgaggactgcaaggacctggccttcggcctgcgggccaaccagaccctgacagagctggacctgtccttcaacgtgctgacagatgctggggccaagcacctgtgccagaggctgcggcagcccagctgcaagctgcagaggctgcagctggtgtcctgtggcctgaccagtgactgctgccaggacctggcctctgtgctgagcgccagccccagcctgaaggagctggacctgcagcagaacaacctggatgatgtgggcgtgcggctgctgtgtgagggcctgcggcacccagcctgcaagctgatccggctgggcctggaccagaccaccctgagtgatgagatgaggcaggagctgcgggccctggagcaggagaagccccagctgctgatcttcagcaggaggaagcccagcgtgatgacccccacagagggcctggacaccggggagatgagcaacagcaccagcagcctgaagaggcagaggctgggcagcgagcgggccgccagccacgtggcccaggccaacctgaagctgctggatgtgtccaagatcttccccatcgccgagattgctgggaagagccatgaggagagcagccctgaggtggtgcctgtggagctgctgtgtgtgcccagccctgccagccagggcgacctgcacaccaagcccctgggcacagatgatgacttctggggccccactggacctgtggccacagaggtggtggacaaggagaagaacctgtacagagtgcacttccctgtggccggcagctaccgctggcccaacacaggcctgtgctttgtgatgagggaggccgtgacagtggagattgagttctgtgtgtgggaccagttcctgggggagatcaacccccagcacagctggatggtggccggccccctgctggacatcaaggccgagcccggggctgtggaggccgtgcacctgccccactttgtggccctgcagggcggccacgtggacaccagcctcttccagatggcccacttcaaggaggagggcatgctgctggagaagccagcccgggtggagctgcaccacatcgtgctggagaaccccagcttcagccccctgggcgtgctgctgaagatgatccacaatgccctgcgcttcatccctgtgacctctgtggtgctgctgtaccaccgggtgcaccctgaggaggtgaccttccacctgtacctgatccccagcgactgcagcatcaggaaggccattgatgacctggagatgaagttccagtttgtgcgcatccacaagcccccacccctgacccccctgtacatgggctgccgctacacagtgtctggcagcggcagcggcatgctggagatcctgcccaaggagctggagctgtgctaccgcagccctggagaggaccagctgttcagcgagttctacgtgggccacctgggcagcggcatccggctgcaggtgaaggacaagaaggatgagaccctggtgtgggaggccctggtgaagccaggcaggaacaccagccagccctggaacctgcgctgcaacagagatgcccggcgctactag

SEQ ID NO: 30383 - DNA, 4128 bp, Artificial Sequence
  derived and/or modified sequence
atggccggcggcgcctggggccggctggcctgctacctggagttccttaaaaaagaggagctgaaggagttccagctgctgctcgctaacaaggcccacagtaggtcttcctccggagagactcctgctcaacctgagaaaactagtgggatggaagtggcaagctacctggtggcccaatatggcgaacagagagcttgggacctcgcactccacacatgggagcagatgggcttgcgctccctgtgtgctcaggctcaggagggagccggccattctccatccttcccttactctccgagcgagcctcacctaggcagcccttctcaaccaactagcaccgcggtactcatgccttggattcacgagctgccagctggctgcacacaaggaagtgaacgcagggtgctcagacagctccccgatacatcaggacgacgctggagggaaatctctgcatctttactttatcaagccttaccatcgtctcccgaccatgagagccctagccaagagtcacctaacgcgccgacaagtaccgcggttcttggcagctggggatcaccaccacagccttcccttgcccctagagaacaggaagctccggggacccagtggccattggacgagacgagcggaatctactacactgagattcgtgagagggaaagagagaaatccgagaaagggcggcccccttgggctgccgtggtcggtacgccaccacaagcccatacctccctgcagccccatcaccatccttgggagccttcagtacgggagagtctgtgctccacttggccatggaagaatgaggattttaatcagaagttcacacagctcttacttctgcagcgcccgcaccccagatcacaagacccactggtgaagcgctcctggccggattatgtcgaggaaaacaggggccatctgattgaaattcgagatctctttggccctggccttgatacccaggaacctaggatagtgattttacagggtgcagccgggataggcaagtcaactctggctcgccaggtcaaggaggcgtggggaagagggcaattatacggagataggtttcagcatgtgttctacttttcttgtagagagctggcccaatcgaaggtagtttcccttgcagagttaattggcaaagacgggacagcgacgcctgcacctataagacagatcttgtctagacccgagagattactattcatactggatggtgtagatgagccaggctgggtgttgcaggaaccatcctctgagttgtgtctgcactggtcccagcctcagcccgccgacgcactgctgggctctcttttagggaagactatactccctgaggcaagcttcttgatcaccgcacggactacggccctgcaaaacctgattccaagtctggagcaggccagatgggtcgaggtgttgggcttttccgagtctagtcgaaaggagtatttctatcggtattttactgatgagaggcaggctattagggcttttcgactcgtgaagtccaacaaagagctctgggcactgtgtctcgttccttgggtaagttggctggcctgcacatgcttaatgcagcaaatgaagcggaaagagaaactaactctcactagcaagaccaccacaactctgtgcttacactatctggctcaggccctgcaggcccagccgttgggaccccagctgagagacttatgttcccttgcagccgaagggatttggcagaagaaaaccctattctccccagacgacctaaggaagcacggtttggatggcgctattatttctaccttcctcaagatggggatccttcaggagcaccccatccccctttcctattcctttattcacctgtgcttccaagagtttttcgctgcaatgtcatacgttcttgaagacgagaaagggcgcgggaaacactccaattgtatcattgatctagagaaaactctcgaggcctacggaattcatggcctctttggtgcctctacaacgaggtttctgctgggcctcctgagtgatgagggcgagcgggaaatggaaaatatttttcattgccgtctgtcccagggcaggaacctgatgcagtgggttccatccctgcaactcctcctgcagccccattcactcgaaagtctgcactgcctgtacgagacacgcaacaagaccttcctgacgcaggttatggcccatttcgaggaaatgggtatgtgtgttgagaccgacatggaactactggtgtgtacattctgtatcaagttctcccggcacgtcaagaagctgcagctaatcgaggggagacagcacagatctacctggtctccgaccatggtggtgttattccggtgggttcccgtcaccgatgcatactggcaaatcctgttttcggtgttgaaggtaacacgaaatctgaaagagctggacctctccggtaattctctgtcacattctgcagtgaaaagtctttgcaagactctgcggcgaccaaggtgtctgttggagaccttacgtttagcaggttgtggactcactgccgaggactgcaaagacctcgcattcgggctgcgggctaaccagacattgaccgagcttgacctttccttcaacgtccttacagacgcgggggcaaaacacttgtgtcaacgccttcggcaaccatcatgtaaacttcaaaggctgcaacttgtaagctgcggtctgacttccgactgctgtcaggatctcgcgtcagtgctttcagcaagtcccagcctgaaggaactggacttacagcaaaacaacctggacgacgtaggggtaaggttactgtgcgagggccttcgtcaccccgcctgtaaattaataagacttggtttagaccagaccactctgagcgatgaaatgcgacaagagctgagagcattggagcaggaaaagcctcaattgctaattttttcacgccgaaagcctagcgtgatgacgccaactgaggggcttgatactggagaaatgtccaatagtacttcttccctaaagcgccagcgccttggatctgagcgcgccgcttcacacgtagcacaggctaacttaaagctgctggatgtctccaaaattttccccatcgccgaaattgccgggaagtcacacgaggagtcgtcccctgaggtggtgccagtcgagctcctttgcgtaccaagtcccgcgtctcagggtgacctgcatactaagcccttgggcactgacgacgatttttgggggcccaccggccctgtggctactgaagtggtagacaaggagaaaaacctgtatcgagttcactttcctgttgccggtagctatagatggcccaacacagggctctgttttgtgatgagagaggccgtgacagtcgaaattgagttttgcgtgtgggaccagttcttgggcgagatcaatccacagcactcgtggatggtagctggccctctcctcgacataaaagctgaaccgggagccgtggaagccgtgcaccttccgcattttgtggcgttgcagggagggcatgttgacaccagcctgtttcaaatggcgcactttaaggaggagggtatgctgctggagaaacccgctcgggtggagctccatcatatagtactggagaatccatctttttctccactgggcgtcctgctcaagatgattcataacgccctcaggttcattcctgtgacatctgtggtactcctctaccacagagttcaccccgaggaagtgacgttccatctatacctcatcccgtccgattgttctatccgcaaggccattgacgacttggaaatgaagttccagttcgtgagaattcataaacctcctccattgacccccttatacatgggctgtcgctataccgtaagtggctccggttcaggtatgctggaaatcctgccaaaggagctcgaactgtgttatcgctctcctggcgaagatcagctgttctccgaattttatgtggggcacctgggctcggggattcggctgcaggttaaggacaagaaagatgagacactggtctgggaagctttggtgaaacctggtcgtaacacatcacaaccttggaatctgaggtgcaaccgcgatgcgaggagatactag

SEQ ID NO: 30384 - DNA, 4128 bp, Artificial Sequence
  derived and/or modified sequence
atggccggcggcgcctggggccggctggcctgctacctggagttcttaaaaaaggaggagttgaaagaattccagttactcctcgcaaacaaggcccactctagaagctcctccggcgagacgccagcacagccggaaaagacttctgggatggaagtggcaagctacctggtggcacagtatggtgagcagcgcgcttgggaccttgcgctgcacacttgggagcagatgggactcaggtcactttgtgcccaagcacaagagggcgccggacactccccctcgtttccttattccccaagcgaaccacatctggggagccccagtcagcccacaagcaccgccgttctgatgccctggattcatgagctcccagcgggatgcacacagggctctgagaggcgagtcctaaggcagttacccgacacatccggtcgcagatggagagagattagtgccagcctcctgtaccaggcgctgccatcatcacctgaccatgagtctccctctcaggaatccccgaatgcccctacatctacggctgttcttggcagctggggatcaccccctcaaccctccctggcccccagagaacaggaggcgcccggcacacaatggcctctggatgaaacatcaggcatttactacacagaaattagggaacgagagcgcgaaaagtccgaaaaggggaggcccccttgggctgccgtggtgggcacccctcctcaggcccatacatccctgcagccacatcatcacccgtgggaaccgtctgtgcgcgagagcttatgctccacttggccctggaagaatgaggactttaatcagaagtttactcagttactgctcctacaaagacctcaccctcgatcgcaggacccgctggtcaagagaagttggccagactatgtggaagagaaccggggacatttaatcgagattagggatctgttcggtccgggtcttgacacgcaggagccaagaatcgtaatcttgcaaggagccgcagggattgggaaatccacactggcgagacaggttaaagaagcttggggccgcggacagctttatggtgaccgcttccaacatgtgttttatttcagctgccgtgagctcgcgcagtccaaggtcgtgagcttagccgagctcatcggcaaggatggtaccgctacccctgcgcccatcagacagatattgagccgccctgaacgcttgctgtttatcttggacggtgtggacgaacctggctgggtgctgcaagagccgagctctgaactatgcctacattggtctcaaccccagcccgccgatgcgctgctgggcagtctccttggcaagaccatattgccagaagcatccttccttatcaccgccagaactacggctttgcagaatttgatccccagtctggagcaagcccgttgggtcgaggtcttagggtttagcgaatcatcacggaaagagtacttctatcggtactttaccgacgaaagacaggccatccgggcctttaggctggttaaatctaacaaagagctctgggctttgtgcctagttccatgggtgtcctggttggcatgtacatgtctgatgcagcaaatgaagcgtaaagagaagttgacacttacttctaagactacgacaacgttgtgtctgcattatctggctcaggccttgcaggcacaacctctgggccctcagttaagggacctgtgtagcctggccgctgaaggaatctggcagaagaagactctcttctctccagacgacctgcggaaacatggcctggatggcgccattataagcacgttcttgaaaatgggaatactacaggaacatcccatcccgctaagctattcattcatccatctgtgctttcaagaatttttcgccgctatgtcatacgtacttgaggatgagaagggcaggggaaagcattccaattgcattattgacctagagaaaaccttagaggcctatggcatacatggactgtttggagcctcgacaaccaggttcttgcttggacttctgtctgacgagggcgaacgggaaatggaaaacatttttcattgcaggctttcacagggaaggaatctgatgcagtgggtgcctagcttgcagcttttactccagcctcactcactggagtccctgcactgcctttatgagacccgaaataagactttcctcactcaagttatggcgcactttgaagaaatgggcatgtgtgtggagaccgacatggagctcctcgtgtgcacattctgcattaaatttagcaggcacgttaagaaacttcagcttatcgagggacgacagcacagaagtacctggtcccctacaatggtggtgctgttcagatgggttccagtgacagatgcttattggcagatcctattttctgttcttaaagtaacccggaacctaaaagagctggatctgtcagggaatagcttatcccatagcgcagttaagtccctatgtaagacccttaggcggccccgctgcttacttgaaacactgaggctcgccggatgtgggctcacagcggaagactgcaaagacctggcgttcgggctgagagccaaccagacactcaccgagctcgatctgtctttcaacgtactgacggacgccggggctaagcacctgtgtcagaggttgcggcagccatcatgcaaactccagcgcctgcagctcgtctcctgtgggttaacatcagattgctgtcaggatctagcctcggtattaagcgcttcacctagcctgaaagagttggacctgcagcaaaacaatctcgatgatgtcggggtgaggctgttgtgcgagggattaagacatccagcctgtaagctgatccgcctaggcttagatcaaaccaccctgagtgatgagatgagacaggaacttcgggctctcgagcaagagaaacctcagctgctcatttttagccggcgaaagccaagtgtgatgacaccgaccgagggcttagacaccggtgagatgtctaacagcaccagctcactgaagagacaaagattgggatctgagcgcgcggcctcccacgtggctcaggctaatcttaagctgctcgacgtgagcaaaatctttcctatcgctgaaattgctggcaaaagccatgaagagtcttctcccgaggttgtgccggtcgagcttttatgcgtgcctagcccagccagccagggcgacctccatacgaaacctcttgggacggacgatgatttttggggacccacaggccctgtcgctacagaagtggtggacaaggagaagaacctgtaccgcgttcacttcccagttgcaggatcctatcgatggcccaacacaggcctatgcttcgttatgagagaggccgttactgtggagattgagttctgtgtctgggatcagttcctgggcgagatcaatccgcagcactcttggatggtagccggcccactgttggatatcaaggctgagcccggcgccgttgaagccgttcatctgccacacttcgtcgcgcttcagggcggccacgtggacacttctctctttcagatggcccactttaaagaagaggggatgcttttggaaaaaccagccagagtcgagcttcatcatatcgtgttggagaacccttcttttagtcccctgggggtgctcctcaaaatgattcataatgccctgaggtttataccagtcacctcggtggtgctgctgtatcatcgcgttcaccctgaggaggtgaccttccacctctacttgattccctcagattgttccattcgaaaggccatagacgatctggaaatgaagtttcaatttgttcgcattcataaacccccccctctaacaccgctctatatggggtgtcgatatacagtgtcgggcagcggctctgggatgctggagatcctacccaaggaacttgagctctgctaccgcagccccggggaggaccaactgttctccgagttttacgtgggccatctgggttcaggaattaggcttcaggtgaaagataagaaggatgaaactctggtgtgggaggcacttgttaagccagggcgaaacacgagtcagccttggaacctacggtgcaaccgggacgccaggagatactag

SEQ ID NO: 30385 - DNA, 4128 bp, Artificial Sequence
  derived and/or modified sequence
atggctggcggtgcttggggacggctggcctgctacctagaatttcttaagaaagaggaactgaaagagttccagctacttctggctaacaaagctcatagccgcagcagctccggtgaaacccctgcccagccagagaaaaccagcggcatggaagtggcctcatacctggtggcacagtatggagaacagcgcgcttgggatctggctctgcatacctgggagcagatgggactgcgctctctctgcgctcaggcgcaggagggcgctggtcatagcccctcttttccgtattcaccgagcgaaccacatctgggctcgccaagtcagcccacttcgactgccgttctgatgccttggatccatgaactcccggctgggtgtacccaggggtctgagcgcagagtgttaagacagctgcccgatacttcagggcgtcgctggagagagatcagtgccagcctcctatatcaggcactgccgtcaagccctgaccatgagtctccgagccaggagtctcccaacgccccaacaagcactgcagtcctgggctcatggggcagtcctcctcagccctctctcgcaccccgtgagcaggaggccccaggcacccagtggccactggacgagacctccggcatctactacactgaaatcagagaacgggaacgcgagaaaagtgagaagggcaggcctccatgggccgctgttgtgggcacaccacctcaggcccacactagcctacaaccccatcaccatccgtgggaaccctctgtgagggaaagcttgtgttcaacctggccatggaaaaacgaagatttcaaccaaaaatttacacagctgcttcttctacagcgcccacaccctaggtctcaggatcccctggtgaagagaagctggcccgattatgtggaggaaaaccgtggccatctcatcgaaatcagggacctgtttggtcctgggctggacacgcaggaaccgaggatcgtgattctccagggtgctgctggcattgggaagtcaacactggcaagacaggtgaaggaggcgtggggtaggggccagctttacggtgacagatttcagcatgtgttttattttagctgtagggagctggcacagagcaaagtggtgtccctcgcagagctgatcggtaaggacggaacggccaccccagcacctattcgccaaattttatctcgccctgaacggctgcttttcatactggacggggtcgatgagccagggtgggttctccaggagccttctagcgagctgtgcctccactggtcgcagccacagcccgctgacgctctgctgggatcactcctaggaaagacaatcttaccagaggccagtttcctaattacggcaagaacaaccgcactacagaatttgattccatcactagaacaggcacggtgggttgaagtgttgggcttttctgagagctcacgtaaggaatatttttatcgatacttcaccgacgaacgacaggctatcagagcattcagacttgtgaagtccaacaaagagctatgggcactctgcctagtaccatgggtgtcatggctggcttgcacctgcttaatgcagcagatgaagcgcaaggagaagctcactttgactagtaaaacaaccaccaccctgtgtcttcattatcttgcacaggcattacaggcccagcccctcggccctcaattacgggatttatgcagtctggccgctgagggcatctggcagaagaagacactgttttcccctgatgatctgcgcaagcatgggctggatggagctattatcagtacctttctgaaaatgggcattctgcaagagcacccgattcctctgtcctactcctttattcacctgtgttttcaggagttcttcgccgcaatgagctacgttctcgaggatgagaaaggacgaggaaaacatagcaattgcattatcgatctcgaaaagactctggaggcatatggcattcacggcctcttcggcgctagcaccactaggtttctcttgggtctgctcagcgacgaaggcgagcgagaaatggagaacatattccattgtcgactcagccagggacggaacctgatgcagtgggtgcccagcttgcagctactcctccagcctcattcactggaatccttgcattgcctctacgagactcggaataagacgtttcttacccaggtgatggcccattttgaggaaatgggtatgtgcgtggagacggatatggaactgctggtatgcactttctgcataaagttctcccgccatgtcaagaagctgcagctgattgagggaagacagcatagatctacatggtcacccactatggtggtactcttccgctgggttccagtgacggacgcttattggcagattttatttagcgtactgaaggtgactaggaatctgaaggagcttgacctgtcaggtaattcgctctctcattccgcagtgaaatccctctgcaagaccttaagacgccctcggtgcctccttgagactttaagattagctgggtgcggtctcacagccgaggactgcaaagatctcgcgttcggtttacgagccaatcagacactgaccgaactcgatctgtcctttaacgttctcacggatgctggagcgaagcatctctgccagagactccgccagccatcttgtaagttgcaaaggttgcagttggtctcctgtggattgacgtctgattgttgtcaggatctggcctctgtgttatcagcatcaccatccctgaaggaattggatctccagcaaaacaacctcgacgatgtgggagttcgactcctgtgcgagggactgagacatcctgcctgtaagcttatccgcctcggattggatcagaccacattgagtgacgagatgagacaggagctccgcgctctggagcaagaaaagccccagctcctcatattttccaggagaaaaccctctgtgatgactccaacagaaggcctggacacaggagagatgagcaacagcacatcttcactcaaacgtcagaggttggggtctgaaagggcagcgagccacgttgcccaagccaacctgaaattgctggatgtcagtaaaatttttcctatcgccgaaatcgcagggaagagccatgaggagagctctcccgaggtcgttcccgtggagctcctgtgcgtaccttcccccgcttcacagggtgacctgcataccaagcccctaggaaccgatgacgatttctggggaccaactggaccagtcgcaactgaggtcgtagacaaggaaaaaaacctgtaccgggtccactttccggtggcaggaagctatagatggccaaatacaggactgtgctttgtgatgcgtgaagcggtcactgtggagattgaattttgcgtgtgggatcagttcctcggggaaataaaccctcagcattcctggatggtggccggaccactccttgatatcaaggcagagcccggagccgtagaagcggtacacctgccccacttcgtggcgcttcaggggggtcatgtggacacatcactgttccagatggcccatttcaaggaggagggcatgcttttagaaaagccagccagggtggagcttcatcacatcgtgctagagaatccaagtttttctcccctgggggtcctgttgaaaatgatccacaacgccctacggtttatacctgtgaccagcgtggtgctcctgtatcatcgcgtacatccagaagaggtgacattccatttgtatctcatcccatctgactgtagcatacgtaaggcaatcgacgacttggaaatgaagttccagttcgttcgcatacataagcccccaccccttacccccttgtatatggggtgcaggtatactgtgtctggttcaggatcaggcatgttggagattctccctaaagaactggagctctgttacaggtcgcctggcgaggaccaactatttagtgagttttatgttggacaccttggcagcggaatacgcttacaggtgaaggacaaaaaagacgagactctcgtttgggaggcactagtcaaaccagggagaaatacgagtcagccctggaatctacgttgcaatcgggacgccagaaggtactag

SEQ ID NO: 30386 - DNA, 4128 bp, Artificial Sequence
  derived and/or modified sequence
atggcagggggagcttggggccgtttagcgtgctacctggaattcctgaaaaaagaggagctcaaagaatttcagcttctgctggcgaacaaagcccactcaagaagctctagtggagaaacaccggcacagcccgaaaagacgtcaggcatggaggtcgcttcttatcttgtggcacagtacggcgagcagagagcctgggacctagcactccacacttgggaacaaatgggactccgttctttgtgtgctcaggcccaagagggggcaggccatagtccatcttttccttatagccccagcgagcctcacttgggctctccttcccaaccgacatccacagctgtactcatgccctggatccacgagctgcctgccggatgcacacaggggtctgagagacgggtgctcaggcagttacccgacacatcggggagacgctggcgcgagattagcgcctcactgttataccaggcccttccttcatcccctgatcacgaatctccttctcaggaaagccccaacgctccaacatccactgcggtattaggctcttggggcagccctccacagcccagtcttgcacctcgtgagcaggaggcgcctgggacccagtggcctttggacgagacatctggcatctactacactgaaatacgcgagcgcgagcgggagaagtctgagaaggggaggccaccatgggccgcagttgtgggaacaccgcctcaggcccatacctcactgcagcctcaccatcacccctgggaacccagtgttagagagagcctgtgctccacctggccatggaagaatgaggattttaatcagaagttcacacagttgttgctccttcagaggccgcatcccagaagccaagaccctttggttaagaggagttggccggattatgttgaagagaaccgtggccatcttattgagattcgtgatctgtttggccctggactggatacccaagaaccaaggatagtcatcctacaaggagcagcaggcatcgggaaaagcacgctggccaggcaagtcaaggaggcttggggacggggacaactgtacggtgatcgcttccagcacgtgttctatttttcgtgtagggagctagctcagtctaaagtcgtctcacttgcagaattaatagggaaagatggaaccgccacccctgcaccaatccggcaaattttaagcaggcctgaacggctgctcttcatcctcgacggcgtagacgagccaggatgggtcctccaggagccgtctagcgagctgtgtttgcactggtcacaaccccagccggctgatgccctgctggggtctttactgggaaagaccatactcccagaagcatcatttttaatcaccgcacggaccacagcgctacaaaaccttattccctctctggaacaagctaggtgggtcgaagttctggggtttagcgagtcaagccggaaggagtacttctatagatattttactgacgaaaggcaggcaatccgcgctttccgcctggttaagtctaataaggaactatgggctttgtgcctcgtcccttgggtgtcctggcttgcttgcacctgcctaatgcagcaaatgaaaagaaaggagaaactgactttaactagcaaaacaacaaccaccctctgtctccactatttggcccaagctcttcaggcgcagcccctgggccctcagctgcgagacttatgctccctcgccgcagagggtatttggcagaagaaaactcttttctctcctgatgatcttagaaagcacggactggacggcgctatcatttctacattcctgaagatgggaattctgcaggaacacccaatccccctcagttactcttttattcacctgtgctttcaggagttctttgcagccatgagctatgtgctggaggatgagaaaggacgcggtaagcacagtaattgtattatagatctagagaaaacactcgaggcttacgggatacatggcctctttggtgctagcaccacgagattcctcttagggttgttgtccgacgaaggcgagagggagatggaaaacatcttccactgtaggctctctcagggaagaaacctcatgcagtgggtgccctctctccaacttcttcttcaaccccattcactggaaagcttgcactgtctgtacgaaactcgaaacaagactttcttgacccaagtaatggcgcatttcgaagagatgggtatgtgtgttgagaccgacatggagttgcttgtgtgcactttctgcatcaagtttagtcggcatgtgaaaaaacttcagctgatcgagggtcgacaacatcgcagcacatggagtccaaccatggtggttctgttcaggtgggtgccagtcaccgatgcctattggcaaattttattctccgtgttgaaggttactaggaacctgaaggaattagacttatccggcaatagccttagtcattccgcagttaaatccctgtgcaaaactttgcggagaccacgttgcctgctggagaccctgcgcctagcagggtgcggccttactgcagaggattgcaaggatctcgccttcggcttgcgcgcaaatcagacacttaccgagttggatttgtcctttaacgtgctaaccgatgccggtgccaagcacttgtgccagaggctgagacagccgagttgcaagctgcaaagactccagctggtgagctgcggtctgacatcagactgttgtcaggacctggcatctgtgctgtccgcatcgcctagccttaaggaactcgatctgcagcagaacaatctagatgacgtgggagtacggttactctgcgaaggtcttcgacaccccgcttgcaagctgattcggcttggcctcgatcagacaacattaagcgatgaaatgaggcaggaactgagggctctggagcaggagaagcctcagctgctgatattctcaaggcgtaaacccagcgtgatgaccccaactgaggggctggataccggggaaatgtccaattccacatcctcgctgaaaagacagcggctgggctcagaaagggccgcatctcacgttgcgcaggcaaacctgaagctcctggatgtgtccaaaatcttcccaatcgcggagatcgcgggaaagtcacacgaagaatctagcccagaagtggtcccagttgagttgctctgtgtcccttctccagcttctcaaggggatctgcatactaagcccctgggaacagatgacgacttttggggtcccaccggccctgtggctacagaagtggtggataaggagaaaaacctgtatcgggtgcacttccctgtggcaggaagctaccgttggccgaacactgggctgtgttttgttatgcgggaggccgtgacagtggaaatcgagttctgcgtgtgggatcagtttcttggggagatcaacccgcaacattcctggatggtggcaggacctcttctggatattaaagccgaaccgggtgcagtcgaagcagtacacctgcctcactttgtagcactccaggggggtcatgtagacacaagtctctttcagatggcccactttaaggaagaagggatgttgctggagaaacccgctcgagtcgaactgcatcacatcgtgctggagaacccaagttttagccccttaggagtcctcctgaaaatgatacacaatgctctgaggttcatccccgttacaagcgtcgtgctactctatcacagagttcaccccgaggaggtgacttttcacctatatctgatcccatccgactgctccatcaggaaggccatcgatgacctagaaatgaagtttcagtttgttagaattcacaagccaccaccacttacacccctgtatatgggctgtcggtataccgttagtgggtccggctccggcatgctggagatcctgcctaaggagcttgaactgtgttatagatccccaggtgaggaccagctgttttccgagttctatgtgggtcacctgggcagcggcattaggctccaggttaaagacaaaaaggacgagaccttagtttgggaggccctggttaagcccggacggaacacatctcagccatggaatctgcgctgtaacagagacgctagacgctattag

SEQ ID NO: 30387 - DNA, 5098 bp, Artificial Sequence
  derived and/or modified sequence
cttgttgactaggcgctgttcttgctggctggtgccccagggcctggagaggtctgaagaaacctgggagccagcagcccggggctccactctgggttctgaaagcccattccctgctctgcggctcctcccaccccacctcttctcagccttgcagctcaagggttgatctcaggagtccaggacccaggagagggaagaatctgaggaacacagaacagtgagcgttgcccacaccccatctcccgtcaccacatctcccctcaccctcaccctccctgcctggccctggaccccatcccaggacctccctatcagctgacttcttccagtgtcttgcaggcccctctgggctcctccctcccctggcttttcctaccactccccctctatcggcgtctatctgtaggtgccctgggatttataaaactgggttccgaatgctgaataagagacggtaagagccaaggcaaaggacagcactgttctctgcctgcctgataccctcaccacctgggaacatcccccagacaccctcttaactccgggacagagatggctggcggagcctggggccgcctggcctgttacttggagttcctgaagaaggaggagctgaaggagttccagcttctgctcgccaataaagcgcactccaggagctcttcgggtgagacacccgctcagccagagaagacgagtggcatggaggtggcctcgtacctggtggctcagtatggggagcagcgggcctgggacctagccctccatacctgggagcagatggggctgaggtcactgtgcgcccaagcccaggaaggggcaggccactctccctcattcccctacagcccaagtgaaccccacctggggtctcccagccaacccacctccaccgcagtgctaatgccctggatccatgaattgccggcggggtgcacccagggctcagagagaagggttttgagacagctgcctgacacatctggacgccgctggagagaaatctctgcctcactcctctaccaagctcttccaagctccccagaccatgagtctccaagccaggagtcacccaacgcccccacatccacagcagtgctggggagctggggatccccacctcagcccagcctagcacccagagagcaggaggctcctgggacccaatggcctctggatgaaacgtcaggaatttactacacagaaatcagagaaagagagagagagaaatcagagaaaggcaggcccccatgggcagcggtggtaggaacgcccccacaggcgcacaccagcctacagccccaccaccacccatgggagccttctgtgagagagagcctctgttccacatggccctggaaaaatgaggattttaaccaaaaattcacacagctgctacttctacaaagacctcaccccagaagccaagatcccctggtcaagagaagctggcctgattatgtggaggagaatcgaggacatttaattgagatcagagacttatttggcccaggcctggatacccaagaacctcgcatagtcatactgcagggggctgctggaattgggaagtcaacactggccaggcaggtgaaggaagcctgggggagaggccagctgtatggggaccgcttccagcatgtcttctacttcagctgcagagagctggcccagtccaaggtggtgagtctcgctgagctcatcggaaaagatgggacagccactccggctcccattagacagatcctgtctaggccagagcggctgctcttcatcctcgatggtgtagatgagccaggatgggtcttgcaggagccgagttctgagctctgtctgcactggagccagccacagccggcggatgcactgctgggcagtttgctggggaaaactatacttcccgaggcatccttcctgatcacggctcggaccacagctctgcagaacctcattccttctttggagcaggcacgttgggtagaggtcctggggttctctgagtccagcaggaaggaatatttctacagatatttcacagatgaaaggcaagcaattagagcctttaggttggtcaaatcaaacaaagagctctgggccctgtgtcttgtgccctgggtgtcctggctggcctgcacttgcctgatgcagcagatgaagcggaaggaaaaactcacactgacttccaagaccaccacaaccctctgtctacattaccttgcccaggctctccaagctcagccattgggaccccagctcagagacctctgctctctggctgctgagggcatctggcaaaaaaagacccttttcagtccagatgacctcaggaagcatgggttagatggggccatcatctccaccttcttgaagatgggtattcttcaagagcaccccatccctctgagctacagcttcattcacctctgtttccaagagttctttgcagcaatgtcctatgtcttggaggatgagaaggggagaggtaaacattctaattgcatcatagatttggaaaagacgctagaagcatatggaatacatggcctgtttggggcatcaaccacacgtttcctattgggcctgttaagtgatgagggggagagagagatggagaacatctttcactgccggctgtctcaggggaggaacctgatgcagtgggtcccgtccctgcagctgctgctgcagccacactctctggagtccctccactgcttgtacgagactcggaacaaaacgttcctgacacaagtgatggcccatttcgaagaaatgggcatgtgtgtagaaacagacatggagctcttagtgtgcactttctgcattaaattcagccgccacgtgaagaagcttcagctgattgagggcaggcagcacagatcaacatggagccccaccatggtagtcctgttcaggtgggtcccagtcacagatgcctattggcagattctcttctccgtcctcaaggtcaccagaaacctgaaggagctggacctaagtggaaactcgctgagccactctgcagtgaagagtctttgtaagaccctgagacgccctcgctgcctcctggagaccctgcggttggctggctgtggcctcacagctgaggactgcaaggaccttgcctttgggctgagagccaaccagaccctgaccgagctggacctgagcttcaatgtgctcacggatgctggagccaaacacctttgccagagactgagacagccgagctgcaagctacagcgactgcagctggtcagctgtggcctcacgtctgactgctgccaggacctggcctctgtgcttagtgccagccccagcctgaaggagctagacctgcagcagaacaacctggatgacgttggcgtgcgactgctctgtgaggggctcaggcatcctgcctgcaaactcatacgcctggggctggaccagacaactctgagtgatgagatgaggcaggaactgagggccctggagcaggagaaacctcagctgctcatcttcagcagacggaaaccaagtgtgatgacccctactgagggcctggatacgggagagatgagtaatagcacatcctcactcaagcggcagagactcggatcagagagggcggcttcccatgttgctcaggctaatctcaaactcctggacgtgagcaagatcttcccaattgctgagattgcaggcaagagccacgaggaaagctccccagaggtagtaccggtggaactcttgtgcgtgccttctcctgcctctcaaggggacctgcatacgaagcctttggggactgacgatgacttctggggccccacggggcctgtggctactgaggtagttgacaaagaaaagaacttgtaccgagttcacttccctgtagctggctcctaccgctggcccaacacgggtctctgctttgtgatgagagaagcggtgaccgttgagattgaattctgtgtgtgggaccagttcctgggtgagatcaacccacagcacagctggatggtggcagggcctctgctggacatcaaggctgagcctggagctgtggaagctgtgcacctccctcactttgtggctctccaagggggccatgtggacacatccctgttccaaatggcccactttaaagaggaggggatgctcctggagaagccagccagggtggagctgcatcacatagttctggaaaaccccagcttctcccccttgggagtcctcctgaaaatgatccataatgccctgcgcttcattcccgtcacctctgtggtgttgctttaccaccgcgtccatcctgaggaagtcaccttccacctctacctgatcccaagtgactgctccattcggaaggccatagatgatctagaaatgaaattccagtttgtgcgaatccacaagccacccccgctgaccccactttatatgggctgtcgttacactgtgtctgggtctggttcagggatgctggaaatactccccaaggaactggagctctgctatcgaagccctggagaagaccagctgttctcggagttctacgttggccacttgggatcagggatcaggctgcaagtgaaagacaagaaagatgagactctggtgtgggaggccttggtgaaaccaggaaggaacaccagccagccgtggaacctcaggtgcaacagagacgccaggagatactagtgcccagcagcctgcggcagtaccaatgaagccagagagggcttggtggatgacaaggaggcctgagtagaccgcaggtgggtctgagaaatgggcttaggtgaggcaggtctttgaaggatttgttcttaatcatatgcgagatgctcaaaaggctggatgcctgcttttgtgggtgaagagcaagaagagaaaacaggttgtacacatacagatgcagatggagagacagagaaaaaaaaggaagaaggcagagaaatgcaccaattcttgagctgtattatctctggaccttgggattgtgggaggctttattttactactgattttgcctacactgttttctcaatttctagttttctacaaagatgatgtgttagctttttcacgcattaagattaaaatttaaaacaga

SEQ ID NO: 30388 - DNA, 5280 bp, Artificial Sequence
  derived and/or modified sequence
gttgactaggcgctgttcttgctggctggtgccccagggcctggagaggtctgaagaaacctgggagccagcagcccggggctccactctgggttctgaaagcccattccctgctctgcggctcctcccaccccacctcttctcagccttgcagctcaagggttgatctcaggagtccaggacccaggagagggaagaatctgaggaacacagaacagtgagcgttgcccacaccccatctcccgtcaccacatctcccctcaccctcaccctccctgcctggccctggaccccatcccaggacctccctatcagctgacttcttccagtgtcttgcaggcccctctgggctcctccctcccctggcttttcctaccactccccctctatcggcgtctatctgtaggtgccctgggatttataaaactgggttccgaatgctgaataagagacggtaagagccaaggcaaaggacagcactgttctctgcctgcctgataccctcaccacctgggaacatcccccagacaccctcttaactccgggacagagatggctggcggagcctggggccgcctggcctgttacttggagttcctgaagaaggaggagctgaaggagttccagcttctgctcgccaataaagcgcactccaggagctcttcgggtgagacacccgctcagccagagaagacgagtggcatggaggtggcctcgtacctggtggctcagtatggggagcagcgggcctgggacctagccctccatacctgggagcagatggggctgaggtcactgtgcgcccaagcccaggaaggggcaggccactctccctcattcccctacagcccaagtgaaccccacctggggtctcccagccaacccacctccaccgcagtgctaatgccctggatccatgaattgccggcggggtgcacccagggctcagagagaagggttttgagacagctgcctgacacatctggacgccgctggagagaaatctctgcctcactcctctaccaagctcttccaagctccccagaccatgagtctccaagccaggagtcacccaacgcccccacatccacagcagtgctggggagctggggatccccacctcagcccagcctagcacccagagagcaggaggctcctgggacccaatggcctctggatgaaacgtcaggaatttactacacagaaatcagagaaagagagagagagaaatcagagaaaggcaggcccccatgggcagcggtggtaggaacgcccccacaggcgcacaccagcctacagccccaccaccacccatgggagccttctgtgagagagagcctctgttccacatggccctggaaaaatgaggattttaaccaaaaattcacacagctgctacttctacaaagacctcaccccagaagccaagatcccctggtcaagagaagctggcctgattatgtggaggagaatcgaggacatttaattgagatcagagacttatttggcccaggcctggatacccaagaacctcgcatagtcatactgcagggggctgctggaattgggaagtcaacactggccaggcaggtgaaggaagcctgggggagaggccagctgtatggggaccgcttccagcatgtcttctacttcagctgcagagagctggcccagtccaaggtggtgagtctcgctgagctcatcggaaaagatgggacagccactccggctcccattagacagatcctgtctaggccagagcggctgctcttcatcctcgatggtgtagatgagccaggatgggtcttgcaggagccgagttctgagctctgtctgcactggagccagccacagccggcggatgcactgctgggcagtttgctggggaaaactatacttcccgaggcatccttcctgatcacggctcggaccacagctctgcagaacctcattccttctttggagcaggcacgttgggtagaggtcctggggttctctgagtccagcaggaaggaatatttctacagatatttcacagatgaaaggcaagcaattagagcctttaggttggtcaaatcaaacaaagagctctgggccctgtgtcttgtgccctgggtgtcctggctggcctgcacttgcctgatgcagcagatgaagcggaaggaaaaactcacactgacttccaagaccaccacaaccctctgtctacattaccttgcccaggctctccaagctcagccattgggaccccagctcagagacctctgctctctggctgctgagggcatctggcaaaaaaagacccttttcagtccagatgacctcaggaagcatgggttagatggggccatcatctccaccttcttgaagatgggtattcttcaagagcaccccatccctctgagctacagcttcattcacctctgtttccaagagttctttgcagcaatgtcctatgtcttggaggatgagaaggggagaggtaaacattctaattgcatcatagatttggaaaagacgctagaagcatatggaatacatggcctgtttggggcatcaaccacacgtttcctattgggcctgttaagtgatgagggggagagagagatggagaacatctttcactgccggctgtctcaggggaggaacctgatgcagtgggtcccgtccctgcagctgctgctgcagccacactctctggagtccctccactgcttgtacgagactcggaacaaaacgttcctgacacaagtgatggcccatttcgaagaaatgggcatgtgtgtagaaacagacatggagctcttagtgtgcactttctgcattaaattcagccgccacgtgaagaagcttcagctgattgagggcaggcagcacagatcaacatggagccccaccatggtagtcctgttcaggtgggtcccagtcacagatgcctattggcagattctcttctccgtcctcaaggtcaccagaaacctgaaggagctggacctaagtggaaactcgctgagccactctgcagtgaagagtctttgtaagaccctgagacgccctcgctgcctcctggagaccctgcggttggctggctgtggcctcacagctgaggactgcaaggaccttgcctttgggctgagagccaaccagaccctgaccgagctggacctgagcttcaatgtgctcacggatgctggagccaaacacctttgccagagactgagacagccgagctgcaagctacagcgactgcagctggtcagctgtggcctcacgtctgactgctgccaggacctggcctctgtgcttagtgccagccccagcctgaaggagctagacctgcagcagaacaacctggatgacgttggcgtgcgactgctctgtgaggggctcaggcatcctgcctgcaaactcatacgcctggggctggaccagacaactctgagtgatgagatgaggcaggaactgagggccctggagcaggagaaacctcagctgctcatcttcagcagacggaaaccaagtgtgatgacccctactgagggcctggatacgggagagatgagtaatagcacatcctcactcaagcggcagagactcggatcagagagggcggcttcccatgttgctcaggctaatctcaaactcctggacgtgagcaagatcttcccaattgctgagattgcaggcaagagccacgaggaaagctccccagaggtagtaccggtggaactcttgtgcgtgccttctcctgcctctcaaggggacctgcatacgaagcctttggggactgacgatgacttctggggccccacggggcctgtggctactgaggtagttgacaaagaaaagaacttgtaccgagttcacttccctgtagctggctcctaccgctggcccaacacgggtctctgctttgtgatgagagaagcggtgaccgttgagattgaattctgtgtgtgggaccagttcctgggtgagatcaacccacagcacagctggatggtggcagggcctctgctggacatcaaggctgagcctggagctgtggaagctgtgcacctccctcactttgtggctctccaagggggccatgtggacacatccctgttccaaatggcccactttaaagaggaggggatgctcctggagaagccagccagggtggagctgcatcacatagttctggaaaaccccagcttctcccccttgggagtcctcctgaaaatgatccataatgccctgcgcttcattcccgtcacctctgtggtgttgctttaccaccgcgtccatcctgaggaagtcaccttccacctctacctgatcccaagtgactgctccattcggaaggccatagatgatctagaaatgaaattccagtttgtgcgaatccacaagccacccccgctgaccccactttatatgggctgtcgttacactgtgtctgggtctggttcagggatgctggaaatactccccaaggaactggagctctgctatcgaagccctggagaagaccagctgttctcggagttctacgttggccacttgggatcagggatcaggctgcaagtgaaagacaagaaagatgagactctggtgtgggaggccttggtgaaaccaggaaggaacaccagccagccgtggaacctcaggtgcaacagagacgccaggagatactagtgcccagcagcctgcggcagtaccaatgaagccagagagggcttggtggatgacaaggaggcctgagtagaccgcagactttgttgtcgctgcccggaggagtcgagactggtacccggaggagctgtctcaccaggagaccacgtcctggaagtgtccgggactcgcgggacctgtggctgcagaccccgccggcacgcaggcccagagctggcgcactcctgaggatgagactctgggggccctagccggggtccacgggagggctgtccttggggactctaggatggcttcgttctggcccggctcacttctggagctgtgagacccaagacaaaaggggctgagggatttctcattgacaagagttcgtgcgggaaaaccacctgatccctagggatttgtcatcttaagactcaaaaggcttaataccaggaaccaccttggcaagatatttacccaccggccatctctgtttactcatgaatgttaaatgttaaaacgcagcgctctaaccctgcatattatttacttgcaaatgtctgtaatctgtaattgtgatgcctctgatggaataaattatctttttcagtctcctct

SEQ ID NO: 30389 - protein, 321 aa, Artificial Sequence
  derived and/or modified sequence
MDAALLLNVEGVKKTILHGGTGELPNFITGSRVIFHFRTMKCDEERTVIDDSRQVGQPMHIIIGNMFKLEVWEILLTSMRVHEVAEFWCDTIVDAPSDYQRETWNLSNHEKMKAVPVLHGEGNRLFKLGRYEEASSKYQEAIICLRNLQTKEKPWEVQWLKLEKMINTLILNYCQCLLKKEEYYEVLEHTSDILRHHPGIVKAYYVRARAHAEVWNEAEAKADLQKVLELEPSMQKAVRRELRLLENRMAEKQEEERLRCRNMLSQGATQPPAEPPTEPPAQSSTEPPAEPPTAPSAELSAGPPAEPATEPPPSPGHSLQH

SEQ ID NO: 30390 - DNA, 966 bp, Artificial Sequence
  derived and/or modified sequence
atggatgcagccctcctcctgaatgtggagggtgtcaagaagacgattttacatggcgggactggcgagctcccgaacttcataactggcagccgtgtaatttttcactttagaacaatgaagtgtgacgaggagcgcaccgtcattgatgactcccgccaggtgggacaaccaatgcacatcattattggcaacatgtttaagctcgaggtttgggagatattgcttacaagcatgcgggtgcatgaggtggccgagttctggtgtgatactatcgtggacgctccgtccgactaccagagggaaacttggaatctgtcgaatcacgagaagatgaaggccgtaccggttctgcacggcgagggcaaccggctatttaagctgggccgctatgaggaagctagcagcaagtatcaggaggcaattatttgtctgaggaatttgcaaaccaaagagaagccctgggaagtccagtggctgaagctggaaaaaatgataaataccctgatactgaactactgccaatgccttctgaagaaggaagagtactatgaagtgctcgaacataccagtgacatcctgaggcatcatcctggcatcgtgaaggcttattacgttcgcgcccgagcacatgcagaggtatggaacgaggcagaagcaaaggccgatctgcagaaggtgttagagcttgaaccctccatgcagaaagctgtgcgaagggaacttcgactccttgagaaccgtatggccgaaaagcaggaagaagagcgcctgcgttgtcgtaacatgctcagtcagggggccacacagcctcccgctgagccccccacagagcctccagcgcagtccagcactgagccacccgctgagccccccacagcaccgagcgcagaactttcagctggacctcccgcagagcccgccactgaaccaccaccgagcccaggtcactccctccagcactag

SEQ ID NO: 30391 - DNA, 966 bp, Artificial Sequence
  derived and/or modified sequence
atggatgctgccctgctgctgaatgtggagggcgtgaagaagaccatcctgcacggcggcactggagagctgcccaacttcatcaccggcagcagggtcatcttccacttccgcaccatgaagtgtgatgaggagaggacagtgattgatgacagccggcaggtgggccagcccatgcacatcatcatcggcaacatgttcaagctggaggtgtgggagatcctgctgacctccatgagggtgcatgaggtggccgagttctggtgtgacaccatcgtggatgcccccagcgactaccagcgggagacctggaacctgagcaaccacgagaagatgaaggctgtgcctgtgctgcatggagagggcaacagactcttcaagctgggccgctatgaggaggccagcagcaagtaccaggaggccatcatctgcctgaggaacctgcagaccaaggagaagccctgggaggtgcagtggctgaagctggagaagatgatcaacaccctcatcctgaactactgccagtgcctgctgaagaaggaggagtactatgaggtgctggagcacaccagtgacatcctgcggcaccaccctggcatcgtgaaggcctactacgtgcgggcccgggcccacgccgaggtgtggaatgaggccgaggccaaggctgacctgcagaaggtgctggagctggagcccagcatgcagaaggctgtgagaagagagctgcggctgctggagaacaggatggccgagaagcaggaggaggagcggctgcgctgcaggaacatgctgagccagggcgccacccagcccccagctgagcccccaacagagcccccagcccagagcagcacagagcccccagctgagcccccaacagcccccagcgctgagctgtctgctggccccccagctgagcccgccacagagcccccacccagccctggccacagcctgcagcactag

SEQ ID NO: 30392 - DNA, 966 bp, Artificial Sequence
  derived and/or modified sequence
atggacgccgccctgctgctgaacgtggagggcgtgaagaagaccatcctccatggtggaaccggtgagttacctaatttcatcaccgggtctcgggtgatcttccactttagaaccatgaaatgtgatgaagaacgaacggtgatagatgattcacggcaagtagggcagccgatgcacattatcatcggtaatatgttcaaactggaagtgtgggagatactgctgacaagcatgcgagttcatgaggtcgctgagttctggtgtgataccattgtggacgccccctcagattaccaacgtgagacctggaacctgagtaaccatgaaaagatgaaggccgttcctgtgctccatggggaaggcaatcgtctctttaaactgggtaggtatgaggaggcctctagcaaatatcaagaagccatcatctgcctgcgaaacctgcagaccaaggagaagccttgggaagtccagtggttgaaattagaaaagatgattaatacacttatcctaaactattgccaatgtctgctgaaaaaagaggaatactacgaagtgcttgagcacacaagtgatatcttgagacatcatcccggaatcgtgaaggcctattacgttcgcgcccgggcgcatgccgaggtctggaatgaagccgaggccaaggctgacttgcaaaaagtcctggaacttgaaccaagcatgcaaaaagctgtccgcagagaattgcgcctactggagaatcgcatggcagagaagcaggaggaggagcggctccgctgtaggaacatgctgtcgcagggcgccactcagccccctgcggaacctcccaccgaaccaccggcccagtccagtacggagcccccagccgaaccacccactgccccgtccgcagagttaagcgctgggcctcctgccgagccagctaccgaaccccctccttcccctggccactccttacagcactag

SEQ ID NO: 30393 - DNA, 966 bp, Artificial Sequence
  derived and/or modified sequence
atggacgctgccctgctgctgaatgtagaaggggtgaaaaagacgatcctacacgggggaacaggcgagttacctaattttatcactggtagtcgcgtcatatttcattttcggactatgaaatgcgatgaggagaggacagtcattgatgactctagacaggtggggcagcccatgcatattattatcggcaacatgttcaaactggaggtctgggagatcctccttacatccatgcgcgtacacgaggtggccgagttctggtgcgacacgatcgtggacgccccttcagattatcaacgggagacttggaatctgagcaaccacgagaagatgaaggctgttcccgttctgcatggcgagggaaatcgcttgtttaaactcggaaggtatgaagaggcctccagtaaatatcaagaggctatcatctgtctcaggaatctgcaaaccaaagagaagccctgggaggtgcagtggctgaagctggaaaaaatgatcaatacgcttatcctgaactactgccaatgtctgctgaaaaaggaagagtactacgaagtgttagagcacacatctgacattctcaggcatcatcctggaatcgttaaagcctattacgtgagggcaagagcccacgccgaggtctggaacgaggctgaagctaaagctgatcttcagaaggtgctcgagcttgagccgagtatgcaaaaagctgttagaagagaattgagactgctagagaaccgtatggcagagaaacaggaggaagagcgtttgagatgtaggaatatgttgtcacaaggtgccacgcagcctccggctgaacctcccacagaaccgcctgcacaaagctccactgagccacccgctgagcctcccactgcaccgtcagcagagttatccgcaggccctccagcagaacccgcaactgagccccctccctcgcctgggcatagtctccagcactag

SEQ ID NO: 30394 - DNA, 2781 bp, Artificial Sequence
  derived and/or modified sequence
gctgggtaaatcccagagtctcagccgcctaagtgtcttccccggaggtgagattatctccgcctgtgctggacacctccctttctcctgcagccatggatgccgctctgctcctgaacgtggaaggggtcaagaaaaccattctgcacgggggcacgggcgagctcccaaacttcatcaccggatcccgagtgatctttcatttccgcaccatgaaatgtgatgaggagcggacagtcattgacgacagtcggcaggtgggccagcccatgcacatcatcatcggaaacatgttcaagctcgaggtctgggagatcctgcttacctccatgcgggtgcacgaggtggccgagttctggtgcgacaccatcgttgatgccccgagtgattaccagagggagacctggaacctgagcaatcatgagaagatgaaggcggtgcccgtcctccacggagagggaaatcggctcttcaagctgggccgctacgaggaggcctcttccaagtaccaggaggccatcatctgcctaaggaacctgcagaccaaggagaagccatgggaggtgcagtggctgaagctggagaagatgatcaatactctgatcctcaactactgccagtgcctgctgaagaaggaggagtactatgaggtgctggagcacaccagtgatattctccggcaccacccaggcatcgtgaaggcctactacgtgcgtgcccgggctcacgcagaggtgtggaatgaggccgaggccaaggcggacctccagaaagtgctggagctggagccgtccatgcagaaggcggtgcgcagggagctgaggctgctggagaaccgcatggcggagaagcaggaggaggagcggctgcgctgccggaacatgctgagccagggtgccacgcagcctcccgcagagccacccacagagccacccgcacagtcatccacagagccacctgcagagccacccacagcaccatctgcagagctgtccgcagggccccctgcagagccagccacagagccacccccgtccccagggcactcgctgcagcactgagccccctgaggcccacagccacccaggcagggagcaagtggcctggtcacttctggttcgattgaccaggatcgtggtgtcactttttaaaatttaaaattaatttttgaaatcaaagtcagacacacccatggtaaaaaaaaaaaaaaaaacaatcccaagggtacagaagagcttatgaataaaagtagttttctcctctacccctctcattccttccgtgccatggttttaattgaccctgtttttaattcttctggtagttttctctatttccaagtaatctgtttaaatcagtttctagattttaccccatgtcaatgacaaatgaggatttgatgctctgatcctttctcatgcctgatacccctccctgtctccccattttggatagttacatttgggggtcatctcggtgatttttgtaactttacgcaggacacttagagctctctagaatcccactgactttagtgggtcttgatgtagggtgggcaagccccgacactggagcttagcctgagagggttcttggcctcccccaggaaagatttcaaaggcaagcgccagtggtagggtagaagaaaacagctgtggtcgggcacggtggctcacgcctataatcccagcactttgggaggccgaggcgggtggatcacctgaggtcaggagttccagaccagcctggccaacatggtgaaacctcatctctactaaaaatacaaaaaaactagctgggcgtggtggcgggcgcctataatcccagctacttgggaggctgaggcaggagaattgattgaacctgggaggcggaggttgcagtgagccaagatcacgtcattgcactccagcctggtcaacaagagtaaaacttcatctcaaaaaacaaaacaaaacaaaaacaacaacaaaaaacaaaagaaaaacaaacaaaaccaaaaccaaaacagctgtattgaagctgcagtgttgcagctctgtgactgccctgcagagcagggctaccccataggcagcgagcagcagctcagggcagttctgcagtcagatttatacccacttttaattacatgtagattaaggagctgcatatacaaagatttctagggaaggagtagtaacttctgggtcctggggtctttgccacggaacagggcagtatgccagggtgttgccacggcaatggtaaactgacatggcaccctgggggtcatgccttagggaaagccgcttccactcgcccctgttttagctcatcttcaagttagtctggtgtccaagctccaccgcctgcctcagtctggtgacctccttctgtgtctgatgagcatggcagcgttgggaccttccccttccaactctctccctcctcttcgtcctccctaaaggacgggtacgaggaggggctatcacgccagcgacatcctctagcaccacccaggtgtgtggggtggggcaggggggcgacgaagtatccagcccagggccacgtagtcaactgccaagggcttcctgggcttctcttctgccccagagcttgtctccacccagcaggggttcccccagcgctaactgtatccctaaagttctgatgtactttacttttccatcttccttgttgttaacatctaccttctgctctgtaagcaaaactaaatcttctgtgctttgtccataggttgattctacaatctgaaaatcaataaacagcatttgcatg

SEQ ID NO: 30395 - DNA, 966 bp, Artificial Sequence
  derived and/or modified sequence
atggacgccgccctgctgctgaacgtggagggcgtgaagaagaccatcctgcacggcggcaccggcgagctgcccaacttcatcaccggcagcagagtgatcttccacttcagaaccatgaagtgcgacgaggagagaaccgtgatcgacgacagcagacaggtgggccagcccatgcacatcatcatcggcaacatgttcaagctggaggtgtgggagatcctgctgaccagcatgagagtgcacgaggtggccgagttctggtgcgacaccatcgtggacgcccccagcgactaccagagagagacctggaacctgagcaaccacgagaagatgaaggccgtgcccgtgctgcacggcgagggcaacagactgttcaagctgggcagatacgaggaggccagcagcaagtaccaggaggccatcatctgcctgagaaacctgcagaccaaggagaagccctgggaggtgcagtggctgaagctggagaagatgatcaacaccctgatcctgaactactgccagtgcctgctgaagaaggaggagtactacgaggtgctggagcacaccagcgacatcctgagacaccaccccggcatcgtgaaggcctactacgtgagagccagagcccacgccgaggtgtggaacgaggccgaggccaaggccgacctgcagaaggtgctggagctggagcccagcatgcagaaggccgtgagaagagagctgagactgctggagaacagaatggccgagaagcaggaggaggagagactgagatgcagaaacatgctgagccagggcgccacccagccccccgccgagccccccaccgagccccccgcccagagcagcaccgagccccccgccgagccccccaccgcccccagcgccgagctgagcgccggcccccccgccgagcccgccaccgagcccccccccagccccggccacagcctgcagcactag

SEQ ID NO: 30396 - protein, 324 aa, Artificial Sequence
  derived and/or modified sequence
MDAALLLNVEGVKKTILHGGTGELPNFITGSRHTGVYPILSRSLRQMAQGKDPTEWHVHTCGLANMFAYHTLGYEDLDELQKEPQPLVFVIELLQVDAPSDYQRETWNLSNHEKMKAVPVLHGEGNRLFKLGRYEEASSKYQEAIICLRNLQTKEKPWEVQWLKLEKMINTLILNYCQCLLKKEEYYEVLEHTSDILRHHPGIVKAYYVRARAHAEVWNEAEAKADLQKVLELEPSMQKAVRRELRLLENRMAEKQEEERLRCRNMLSQGATQPPAEPPTEPPAQSSTEPPAEPPTAPSAELSAGPPAEPATEPPPSPGHSLQH

SEQ ID NO: 30397 - DNA, 975 bp, Artificial Sequence
  derived and/or modified sequence
atggacgccgctctgctgcttaatgtcgagggtgtcaagaaaacaattctacacggcggaaccggtgagctgcccaattttataacaggaagccgtcataccggcgtgtatcctatcctgagtaggtcgctgcggcagatggcacagggcaaagacccgacagaatggcacgtgcacacatgtggactagccaatatgtttgcctatcatacactgggttatgaagacctcgacgagctgcagaaggaacctcagcctctcgtgtttgtaatcgaattgctgcaggtggatgccccatccgattatcagcgagagacatggaatctctccaatcacgaaaaaatgaaagcagtacctgtcctccacggagagggaaacaggctgttcaagctgggtcgctatgaggaagcctcctccaaataccaagaggcaattatctgtctaagaaacctgcagacaaaagaaaaaccttgggaggtgcagtggctgaagctggagaaaatgattaacaccctcatcctgaattactgccagtgcctcctgaaaaaagaggagtactatgaagtgctagagcatacgagcgatattctgagacaccaccccgggatcgtaaaggcctattatgtccgggccagggcccatgccgaagtatggaacgaagctgaggctaaagcagatctacagaaagtgttggaactggagccaagcatgcagaaagccgtgaggagggaactgaggctcttggagaacagaatggctgagaagcaggaagaggaacgcttacgctgtcggaatatgttgtcccagggcgccacccaaccccccgctgagccacctacggagccgccagctcagagtagcaccgaacccccagcagaacctcctaccgcgccaagcgcggagctgtctgccggcccacctgctgaacccgccactgagccaccaccttctcctggacattccctgcagcattag

SEQ ID NO: 30398 - DNA, 975 bp, Artificial Sequence
  derived and/or modified sequence
atggatgcagcgctgttattaaacgttgaaggggtgaagaagactattcttcatggagggacaggtgaactgcctaatttcatcacgggttcacggcatactggggtataccccatccttagccgtagcttgaggcagatggcacaggggaaggaccctactgagtggcatgttcacacctgtgggctggccaatatgtttgcataccataccctggggtacgaggatcttgacgaactccagaaagaaccccagcctctggtgtttgttattgaactccttcaggtggacgcaccatccgactatcaacgagagacgtggaatctgtccaatcacgaaaagatgaaggctgtaccagtcctgcatggcgagggaaatcggctgttcaaacttggtcggtatgaagaggcatcttccaaatatcaggaggcgataatttgcctgaggaacctgcagactaaagagaaaccttgggaagtccaatggctgaagctggagaagatgattaacaccctgatcctgaactactgccagtgcctcttgaaaaaagaggaatactacgaggtcttagaacataccagtgatatattgaggcaccatcctggaattgtcaaagcatactatgtgcgagcgagagctcacgccgaggtgtggaacgaggctgaggcaaaagcagatcttcagaaggtcctggaactggaacctagtatgcagaaggctgtgcggcgcgagctgcgcttgctcgaaaacaggatggcagagaagcaagaagaggagaggctgcgctgtaggaacatgcttagtcagggagcaacgcagccaccagctgaacccccaacggagccaccggcccagtcaagtacagagcccccagccgaacctcccacggccccaagtgctgagctttcagccggaccccccgctgagcccgcaaccgaaccccccccaagccctggtcattcactgcagcactag

SEQ ID NO: 30399 - DNA, 975 bp, Artificial Sequence
  derived and/or modified sequence
atggatgctgccctgctgctgaatgtggagggcgtgaagaagaccatcctgcacggcggcactggagagctgcccaacttcatcaccggcagccgccacactggagtgtaccccatcctgagccgcagcctgcggcagatggcccagggcaaggaccccacagagtggcacgtgcacacctgtggcctggccaacatgtttgcctaccacaccctgggctatgaggacctggatgagctgcagaaggagccccagcccctggtgtttgtgattgagctgctgcaggtggatgcccccagcgactaccagcgggagacctggaacctgagcaaccacgagaagatgaaggctgtgcctgtgctgcacggggagggcaacagactcttcaagctgggccgctatgaggaggccagcagcaagtaccaggaggccatcatctgcctgaggaacctgcagaccaaggagaagccctgggaggtgcagtggctgaagctggagaagatgatcaacaccctcatcctgaactactgccagtgcctgctgaagaaggaggagtactatgaggtgctggagcacaccagtgacatcctgcggcaccaccctggcatcgtgaaggcctactacgtgcgggcccgggcccatgctgaggtgtggaatgaagctgaggccaaggctgacctgcagaaggtgctggagctggagcccagcatgcagaaggctgtgcggcgggagctgcggctgctggagaacaggatggccgagaagcaggaggaggagcggctgcgctgcaggaacatgctgagccagggcgccacccagcccccagctgagcccccaacagagcccccagcccagagcagcacagagcccccagctgagcccccaacagcccccagcgctgagctgtctgctggccccccagctgagcccgccacagagcccccacccagccctggccacagcctgcagcactag

SEQ ID NO: 30400 - DNA, 975 bp, Artificial Sequence
  derived and/or modified sequence
atggacgccgccctgctgctgaacgtggagggcgtgaagaagaccatcctccatggcggaaccggtgagctacctaattttataacggggtcaaggcacactggcgtctatcctattcttagtagatctctgaggcagatggcccaaggcaaagatcccacagagtggcacgtccatacgtgcggactggcaaatatgttcgcctaccatactctgggctatgaggacctggacgaactccagaaagaaccacagcccttagtattcgtcatcgagttattgcaggtggacgcccccagtgattatcaacgggagacttggaatctgtctaatcacgagaagatgaaggcagttccagtgttgcatggtgaaggtaacaggctgttcaagctaggccgatatgaggaagccagctcaaaataccaggaggcaattatctgcctgcgcaatttacaaacaaaagaaaaaccctgggaagttcagtggctaaaactggaaaagatgataaatacccttatactaaactactgccagtgcctactgaaaaaggaagagtattacgaggtactcgaacacacatccgacatactgagacaccacccgggcatagtgaaagcttattatgtgcgcgccagggcccacgcagaagtgtggaatgaggcagaagctaaggccgacttgcagaaggtcctagagcttgaaccttccatgcaaaaggctgtgagacgtgagctgcgcctcctggaaaatagaatggccgagaagcaagaggaagagcggctgcgctgtcggaacatgcttagccagggcgccactcagcccccagctgaaccacccaccgagccaccagcccaatctagcacggagccaccggctgaacccccaactgccccaagcgccgaacttagcgcaggtccgcccgcagagcccgcaaccgagccacccccatcccctggtcacagcttgcagcattag

SEQ ID NO: 30401 - DNA, 975 bp, Artificial Sequence
  derived and/or modified sequence
atggacgccgccctgctgctgaacgtggagggcgtgaagaagaccatcctacatggcggcacgggggaactgccaaatttcattacaggctctagacacacaggagtctacccgatcctttcccggtctttgcggcagatggcccagggcaaggacccaacagagtggcacgtgcacacgtgcggactggctaacatgtttgcttaccataccctcggttacgaagacttagatgagcttcagaaggaaccgcagccacttgtatttgtcattgagctccttcaagttgacgccccttccgattaccaaagggagacctggaacctgtcgaatcatgaaaagatgaaggccgtaccagtcctgcacggcgagggaaaccggctgttcaagctgggcagatacgaggaagcatcatcaaagtaccaagaggcgatcatctgcctgagaaatttgcagacaaaggaaaaaccttgggaagtgcaatggctaaagttggaaaagatgattaatacattgatattaaactactgccagtgcctgcttaaaaaggaggagtactacgaagtgctcgaacacacttcagatattttacggcatcacccgggcatcgtgaaagcgtactacgtccgagccagagcgcacgctgaggtctggaacgaggcggaggccaaagctgacttacagaaggtgctggaactggagccctccatgcaaaaggccgtacggcgggaactacggcttcttgaaaatcgaatggcagaaaagcaggaagaagagcgtctacgctgtagaaacatgttatcccagggagcaacgcaacctcctgcagaaccacctacagagccccccgcccagtcatcaactgaacctcccgccgaaccaccaactgctccatcagcggagctcagcgcagggccacccgcagaaccggcgaccgagcctccaccgagtccagggcatagccttcaacactag

SEQ ID NO: 30402 - DNA, 975 bp, Artificial Sequence
  derived and/or modified sequence
atggacgcagccctcttgctcaacgtagaaggtgtcaagaagacaattttacatggtggcacaggagagctgcctaatttcataacaggaagtcgccacaccggagtgtatcccattctgtctaggtcactgcgacagatggctcagggcaaagacccaaccgagtggcacgtccacacctgtggtttggcaaacatgtttgcttaccacaccttgggctacgaggatctcgacgaattgcagaaggagcctcagccattggtgttcgtcatcgagcttctccaagttgacgcaccgagtgactaccagcgggagacatggaacctttccaatcacgagaagatgaaggccgtgccggtgctgcacggggagggcaatcgcttattcaagttgggtagatacgaggaggctagctctaaatatcaggaagccatcatctgcctgcggaatttgcagactaaagagaaaccgtgggaggtacaatggttgaaacttgagaaaatgatcaatacgttgattctgaactattgccaatgtctgctgaagaaagaagaatattatgaggtgcttgaacacacgtcagatatcctgcggcatcaccccggaatcgtcaaggcatactacgtgagggcccgagcccacgctgaagtgtggaatgaggctgaagccaaagccgaccttcagaaggtgctcgagttggagccctctatgcagaaagccgtgcgcagggagcttcgtctactcgaaaaccgcatggccgagaagcaagaagaggaacgccttcggtgtcgcaacatgttatctcagggcgcaactcaacctcccgctgaaccaccaacagaacctcctgcgcagtcctctactgagccccctgccgaaccccctacagccccatctgccgagctcagcgcaggccctcccgctgaacctgctacagagccacccccatcacctggccactcactgcagcactag

SEQ ID NO: 30403 - DNA, 975 bp, Artificial Sequence
  derived and/or modified sequence
atggatgctgccctcctgctgaatgtcgaaggagtgaagaaaaccattctacacgggggaaccggggaattgccaaatttcattaccggaagccggcacactggtgtgtatcctatactctctcgctccctgagacagatggctcaaggtaaggacccaactgagtggcacgtgcacacctgcggccttgccaacatgtttgcctatcacaccctgggatatgaggaccttgatgaactgcagaaagaaccacagcctctggtcttcgtcatcgaattactgcaagtggacgcaccctcagactaccagagggagacctggaatctgtcaaatcatgagaaaatgaaagccgtgccagtcctccacggggaaggtaaccgtttgtttaagctggggaggtatgaagaggcatcatcgaagtatcaggaagcaatcatctgcctcaggaatctccaaacaaaggagaaaccgtgggaagttcaatggcttaaactggagaaaatgatcaacactctaatccttaattactgccaatgtctgctgaaaaaagaggagtactacgaagtattggagcatacatcggatatcctcaggcatcatccaggcatagtgaaggcctattatgtgagagcgagggcgcatgccgaggtatggaatgaggcagaggctaaggctgatctgcagaaagtgctggaattggaacccagtatgcaaaaagccgtgcgacgggagcttcgactactggagaaccggatggcagagaaacaggaggaagaacgcctgcgatgcaggaacatgctatctcaaggtgcaacccagccaccagccgaacctcccaccgagcctccagcccaatcgtccactgagcccccagcggagccccctaccgcgcctagtgcagagctcagtgcgggaccaccagctgagcccgctactgagccacctcccagccccggacattcgctccaacattag

SEQ ID NO: 30404 - DNA, 2790 bp, Artificial Sequence
  derived and/or modified sequence
gctgggtaaatcccagagtctcagccgcctaagtgtcttccccggaggtgagattatctccgcctgtgctggacacctccctttctcctgcagccatggatgccgctctgctcctgaacgtggaaggggtcaagaaaaccattctgcacgggggcacgggcgagctcccaaacttcatcaccggatcccgacacacgggggtctaccccatcctatcccggagcctgaggcagatggcccagggcaaggaccccacagagtggcacgtgcacacgtgcgggctggccaacatgttcgcctaccacacgctgggctacgaggacctggacgagctgcagaaggagcctcagcctctggtctttgtgatcgagctgctgcaggttgatgccccgagtgattaccagagggagacctggaacctgagcaatcatgagaagatgaaggcggtgcccgtcctccacggagagggaaatcggctcttcaagctgggccgctacgaggaggcctcttccaagtaccaggaggccatcatctgcctaaggaacctgcagaccaaggagaagccatgggaggtgcagtggctgaagctggagaagatgatcaatactctgatcctcaactactgccagtgcctgctgaagaaggaggagtactatgaggtgctggagcacaccagtgatattctccggcaccacccaggcatcgtgaaggcctactacgtgcgtgcccgggctcacgcagaggtgtggaatgaggccgaggccaaggcggacctccagaaagtgctggagctggagccgtccatgcagaaggcggtgcgcagggagctgaggctgctggagaaccgcatggcggagaagcaggaggaggagcggctgcgctgccggaacatgctgagccagggtgccacgcagcctcccgcagagccacccacagagccacccgcacagtcatccacagagccacctgcagagccacccacagcaccatctgcagagctgtccgcagggccccctgcagagccagccacagagccacccccgtccccagggcactcgctgcagcactgagccccctgaggcccacagccacccaggcagggagcaagtggcctggtcacttctggttcgattgaccaggatcgtggtgtcactttttaaaatttaaaattaatttttgaaatcaaagtcagacacacccatggtaaaaaaaaaaaaaaaaacaatcccaagggtacagaagagcttatgaataaaagtagttttctcctctacccctctcattccttccgtgccatggttttaattgaccctgtttttaattcttctggtagttttctctatttccaagtaatctgtttaaatcagtttctagattttaccccatgtcaatgacaaatgaggatttgatgctctgatcctttctcatgcctgatacccctccctgtctccccattttggatagttacatttgggggtcatctcggtgatttttgtaactttacgcaggacacttagagctctctagaatcccactgactttagtgggtcttgatgtagggtgggcaagccccgacactggagcttagcctgagagggttcttggcctcccccaggaaagatttcaaaggcaagcgccagtggtagggtagaagaaaacagctgtggtcgggcacggtggctcacgcctataatcccagcactttgggaggccgaggcgggtggatcacctgaggtcaggagttccagaccagcctggccaacatggtgaaacctcatctctactaaaaatacaaaaaaactagctgggcgtggtggcgggcgcctataatcccagctacttgggaggctgaggcaggagaattgattgaacctgggaggcggaggttgcagtgagccaagatcacgtcattgcactccagcctggtcaacaagagtaaaacttcatctcaaaaaacaaaacaaaacaaaaacaacaacaaaaaacaaaagaaaaacaaacaaaaccaaaaccaaaacagctgtattgaagctgcagtgttgcagctctgtgactgccctgcagagcagggctaccccataggcagcgagcagcagctcagggcagttctgcagtcagatttatacccacttttaattacatgtagattaaggagctgcatatacaaagatttctagggaaggagtagtaacttctgggtcctggggtctttgccacggaacagggcagtatgccagggtgttgccacggcaatggtaaactgacatggcaccctgggggtcatgccttagggaaagccgcttccactcgcccctgttttagctcatcttcaagttagtctggtgtccaagctccaccgcctgcctcagtctggtgacctccttctgtgtctgatgagcatggcagcgttgggaccttccccttccaactctctccctcctcttcgtcctccctaaaggacgggtacgaggaggggctatcacgccagcgacatcctctagcaccacccaggtgtgtggggtggggcaggggggcgacgaagtatccagcccagggccacgtagtcaactgccaagggcttcctgggcttctcttctgccccagagcttgtctccacccagcaggggttcccccagcgctaactgtatccctaaagttctgatgtactttacttttccatcttccttgttgttaacatctaccttctgctctgtaagcaaaactaaatcttctgtgctttgtccataggttgattctacaatctgaaaatcaataaacagcatttgcatg

SEQ ID NO: 30405 - DNA, 1077 bp, Artificial Sequence
  derived and/or modified sequence
gtgagattatctccgcctgtgctggacacctccctttctcctgcagccatggatgccgctctgctcctgaacgtggaaggggtcaagaaaaccattctgcacgggggcacgggcgagctcccaaacttcatcaccggatcccgacacacgggggtctaccccatcctatcccggagcctgaggcagatggcccagggcaaggaccccacagagtggcacgtgcacacgtgcgggctggccaacatgttcgcctaccacacgctgggctacgaggacctggacgagctgcagaaggagcctcagcctctggtctttgtgatcgagctgctgcaggttgatgccccgagtgattaccagagggagacctggaacctgagcaatcatgagaagatgaaggcggtgcccgtcctccacggagagggaaatcggctcttcaagctgggccgctacgaggaggcctcttccaagtaccaggaggccatcatctgcctaaggaacctgcagaccaaggagaagccatgggaggtgcagtggctgaagctggagaagatgatcaatactctgatcctcaactactgccagtgcctgctgaagaaggaggagtactatgaggtgctggagcacaccagtgatattctccggcaccacccaggcatcgtgaaggcctactacgtgcgtgcccgggctcacgcagaggtgtggaatgaggccgaggccaaggcggacctccagaaagtgctggagctggagccgtccatgcagaaggcggtgcgcagggagctgaggctgctggagaaccgcatggcggagaagcaggaggaggagcggctgcgctgccggaacatgctgagccagggtgccacgcagcctcccgcagagccacccacagagccacccgcacagtcatccacagagccacctgcagagccacccacagcaccatctgcagagctgtccgcagggccccctgcagagccagccacagagccacccccgtccccagggcactcgctgcagcactgagccccctgaggcccacagccacccaggcagggagcaagtggcctggtcacttct

SEQ ID NO: 30406 - DNA, 975 bp, Artificial Sequence
  derived and/or modified sequence
atggacgccgccctgctgctgaacgtggagggcgtgaagaagaccatcctgcacggcggcaccggcgagctgcccaacttcatcaccggcagcagacacaccggcgtgtaccccatcctgagcagaagcctgagacagatggcccagggcaaggaccccaccgagtggcacgtgcacacctgcggcctggccaacatgttcgcctaccacaccctgggctacgaggacctggacgagctgcagaaggagccccagcccctggtgttcgtgatcgagctgctgcaggtggacgcccccagcgactaccagagagagacctggaacctgagcaaccacgagaagatgaaggccgtgcccgtgctgcacggcgagggcaacagactgttcaagctgggcagatacgaggaggccagcagcaagtaccaggaggccatcatctgcctgagaaacctgcagaccaaggagaagccctgggaggtgcagtggctgaagctggagaagatgatcaacaccctgatcctgaactactgccagtgcctgctgaagaaggaggagtactacgaggtgctggagcacaccagcgacatcctgagacaccaccccggcatcgtgaaggcctactacgtgagagccagagcccacgccgaggtgtggaacgaggccgaggccaaggccgacctgcagaaggtgctggagctggagcccagcatgcagaaggccgtgagaagagagctgagactgctggagaacagaatggccgagaagcaggaggaggagagactgagatgcagaaacatgctgagccagggcgccacccagccccccgccgagccccccaccgagccccccgcccagagcagcaccgagccccccgccgagccccccaccgcccccagcgccgagctgagcgccggcccccccgccgagcccgccaccgagcccccccccagccccggccacagcctgcagcactag

SEQ ID NO: 30407 - protein, 1462 aa, Artificial Sequence
  derived and/or modified sequence
MSKVIQKKNHWTSRVHECTVKRGPQGELGVTVLGGAEHGEFPYVGAVAAVEAAGLPGGGEGPRLGEGELLLEVQGVRVSGLPRYDVLGVIDSCKEAVTFKAVRQGGRLNKDLRHFLNQRFQKGSPDHELQQTIRDNLYRHAVPCTTRSPREGEVPGVDYNFLTVKEFLDLEQSGTLLEVGTYEGNYYGTPKPPSQPVSGKVITTDALHSLQSGSKQSTPKRTKSYNDMQNAGIVHAENEEEDDVPEMNSSFTADSGEQEEHTLQETALPPVNSSIIAAPITDPSQKFPQYLPLSAEDNLGPLPENWEMAYTENGEVYFIDHNTKTTSWLDPRCLNKQQKPLEECEDDEGVHTEELDSELELPAGWEKIEDPVYGIYYVDHINRKTQYENPVLEAKRKKQLEQQQQQQQQQQQQQQQQQQQQTEEWTEDHSALVPPVIPNHPPSNPEPAREVPLQGKPFFTRNPSELKGKFIHTKLRKSSRGFGFTVVGGDEPDEFLQIKSLVLDGPAALDGKMETGDVIVSVNDTCVLGHTHAQVVKIFQSIPIGASVDLELCRGYPLPFDPDDPNTSLVTSVAILDKEPIIVNGQETYDSPASHSSKTGKVNGMKDARPSSPADVASNSSHGYPNDTVSLASSIATQPELITVHIVKGPMGFGFTIADSPGGGGQRVKQIVDSPRCRGLKEGDLIVEVNKKNVQALTHNQVVDMLVECPKGSEVTLLVQRGGLPVPKKSPKSQPLERKDSQNSSQHSVSSHRSLHTASPSHSTQVLPEFPPAEAQAPDQTDSSGQKKPDPFKIWAQSRSMYENRLPDYQEQDIFLWRKETGFGFRILGGNEPGEPIYIGHIVPLGAADTDGRLRSGDELICVDGTPVIGKSHQLVVQLMQQAAKQGHVNLTVRRKVVFAVPKTENEVPSPASSHHSSNQPASLTEEKRTPQGSQNSLNTVSSGSGSTSGIGSGGGGGSGVVSTVVQPYDVEIRRGENEGFGFVIVSSVSRPEAGTTFGNACVAMPHKIGRIIEGSPADRCGKLKVGDRILAVNGCSITNKSHSDIVNLIKEAGNTVTLRIIPGDESSNATLLTNAEKIATITTTHTPSQQGTQETRNTTKPKQESQFEFKAPQATQEQDFYTVELERGAKGFGFSLRGGREYNMDLYVLRLAEDGPAERCGKMRIGDEILEINGETTKNMKHSRAIELIKNGGRRVRLFLKRGDGSVPEYDPSSDRHGPATGPQGVPEVRAGPDRRQHPSLESSYPPDLHKSSPHGEKRAHARDPKGSREYSRQPNEHHTWNGTSRKPDSGACRPKDRAPEGRRDAQAERAAAANGPKRRSPEKRREGTRSADNTLERREKHEKRRDVSPERRRERSPTRRRDGSPSRRRRSLERLLEQRRSPERRRGGSPERRAKSTDRRRARSPERRRERSLDKRNREDRASHREREEANLKQDAGRSSRHPPEQRRRPYKECSTDLSI

SEQ ID NO: 30408 - DNA, 4389 bp, Artificial Sequence
  derived and/or modified sequence
atgtccaaggtaatccaaaagaaaaatcactggacctctagagtccacgagtgcactgtaaagcgaggccctcagggagagttaggggtgacggtgctgggtggagctgagcacggggagttcccctatgtgggcgccgtcgctgcagtcgaagccgccggattgcctggtgggggggaaggccctcgtttaggagagggggagctccttctggaggttcagggcgttagggtcagcggcctgcccagatatgacgtgctcggtgtgatcgactcatgcaaggaggccgtcacattcaaggcagtgcgacaggggggtaggttgaataaagatctgcggcatttcttgaatcagaggttccagaagggaagcccagatcatgagttacagcaaaccataagagacaatttgtatcgccacgccgtgccatgcaccaccaggtctcctcgggagggggaagtgccaggagtggactacaatttccttaccgtgaaagaattcttagacctggaacagtcaggcaccctgcttgaggtggggacgtatgagggcaattattacggcaccccaaagcctccaagtcagcccgtcagcggaaaagtgattactaccgacgccctgcatagcctacagtcaggatctaaacagagtacaccgaaacggaccaaaagttacaatgatatgcagaacgccgggatcgtgcatgcagagaatgaggaggaggacgacgtgcctgagatgaattccagttttacggctgatagcggcgagcaagaggagcatacccttcaagagacagcactgcctccggtcaactcgtcaattatcgccgcgccaattacagatcctagccaaaaattccctcagtacctcccattgagtgctgaggacaatttgggccctctacctgaaaattgggaaatggcctatacagaaaatggggaagtttacttcattgaccataacacgaaaacaacatcatggctggacccgcgctgccttaataagcagcagaaacccctcgaagagtgcgaggacgatgagggagtgcacacggaagagctcgactctgaactcgagctgcctgccgggtgggagaaaattgaggaccctgtgtatggcatctattacgtggatcacattaatcgcaaaacacagtatgagaatcccgtcttggaggcaaaacggaagaaacaactggagcagcagcaacaacagcagcaacagcagcaacaacagcaacaacagcagcaacagcagcaaactgaagagtggactgaggaccattccgcattggtgccgcccgtgatcccaaatcacccgccgtcgaaccccgagcctgccagagaggtcccactgcagggaaagcccttctttactagaaatccctccgagcttaagggaaagtttatccacaccaagctgaggaaatcttctcgaggattcggatttacagtggtcgggggagacgaaccagatgagtttctccaaataaaatctctggtgctcgatggacccgcagcattagatggaaagatggagacaggagatgttatagtttctgtcaacgacacgtgtgtcctgggtcacactcatgcacaggtggtgaaaatcttccaatcaattcccataggggctagcgtagacctggaattgtgcagaggctaccccttgccgtttgacccagatgaccccaatacctctctggtcacatccgtggccatattagacaaggagcccattatcgtaaatggtcaagagacctacgactcccccgcttcacactcttctaagactgggaaggtgaatggcatgaaggacgctcgcccctcctctccggcggacgtcgcgtccaactcaagccacggatatccaaacgatacagtttctctagccagctcaatcgctacacagcctgagctaataacagttcacattgtgaagggacccatgggattcggcttcaccatagctgacagccctggggggggcggtcagcgtgttaagcaaatagttgactctccccgttgccggggactgaaggagggagatctgatagttgaggtcaataagaaaaatgttcaagcccttacacataaccaggtggtggatatgcttgtagaatgccccaaggggtcggaagttactctgcttgtacagcgcggcggactgccggtcccaaaaaaatcaccaaagagtcagccactcgagcgaaaagatagtcagaacagctcacagcactctgtctctagccatcgctctctgcatacagccagtccgtcacattcgactcaggtcctgccagaattcccacctgctgaagcacaggcccctgatcagaccgattcttctgggcagaagaaacctgacccttttaagatttgggcacagtctagatctatgtacgagaatcgtctgcccgattaccaggagcaggacatcttcttatggcgcaaggaaaccggatttgggttcagaatcttaggcggcaacgaaccaggagaaccaatctatattggccacatcgtgcctctgggtgctgccgacacagatgggcgactccggtcaggggacgagctgatatgtgtggacgggaccccggtgattggcaagagtcaccagctcgtggttcaactcatgcagcaagccgctaagcaaggacacgtaaacttgactgttcgcagaaaggttgtgtttgctgtccccaagacagagaacgaggtaccgagcccagctagctcgcatcactctagtaaccagcccgcttcacttaccgaagagaagcgtaccccccagggcagtcaaaattcactgaacacggtatcttccggcagcggctccacttccgggattggctcaggtggggggggcggctctggcgtagtatcgactgtggtccagccttatgatgttgagattcgacgtggcgagaacgaagggttcggatttgtgatcgtttcaagtgtgtcgcgcccagaggctgggaccacctttggaaacgcatgcgttgctatgcctcacaagattggtcgaatcatcgaaggaagccccgccgaccgctgtggcaagctgaaggttggggaccggattcttgcggtgaacgggtgcagcattacaaacaaatcccacagcgacatcgtgaacttgattaaagaggctggaaacactgtgactcttcgcataatccccggggacgagtcatccaatgcgactctgctcactaacgctgaaaagatcgccactataacaaccactcatacacctagccagcaggggacgcaggaaacccggaacacaaccaagccaaagcaggaatcccaattcgaatttaaagctccccaggctacacaggagcaagacttctatactgtggagctggagaggggtgctaaaggcttcggttttagcctaaggggcgggcgagaatacaacatggacctgtatgtattgaggctggccgaggatgggccagccgagagatgcggtaaaatgaggataggagatgaaatccttgaaattaacggcgagacaacaaagaatatgaaacacagccgagccatcgagctgataaaaaacggcggtaggagagtccgattgtttcttaagaggggggacggcagcgtgcctgagtatgacccctcgtcagacaggcacggaccagcaaccggtccacagggcgtccctgaggtacgggctggtcctgacagacgacagcatccttcactcgagagttcttatccaccagacctccacaagtcctccccccatggcgagaagagggcccacgctagggaccccaaggggtcacgagagtatagtcgtcagccaaacgagcatcatacctggaatgggacatcccgaaagccagatagcggcgcatgcaggccaaaagacagagctcccgaaggacgcagagatgcacaggccgaacgagcagctgctgcaaatgggcccaaacgccgatcccccgaaaaacggagggaggggacccgctccgctgataatacactagagcgccgagaaaagcatgagaaaaggagagacgtgtctccagagcgccgtcgagaacgtagtccgaccaggaggagggatggatctccttctagacgccgccggtctctcgagagactcctcgagcagagacgcagtccggaacgccggaggggggggagtccggaaaggagggcaaaaagtactgacagaagaagagctcgtagtccggagcgtagaagagaacgcagccttgacaagagaaaccgagaggatagggcttcacaccgggagcgggaggaagctaatctgaagcaggatgctggcaggagtagccgacacccccccgaacaaagaagacggccatacaaggagtgctctactgatctctccatatag

SEQ ID NO: 30409 - DNA, 4389 bp, Artificial Sequence
  derived and/or modified sequence
atgagcaaggtgatccagaagaagaaccactggaccagccgggtgcatgaatgtactgtgaagaggggcccccagggcgagctgggcgtgacagtgctgggcggcgctgagcacggggagttcccctacgtgggcgctgtggccgctgtggaggccgccggcctgcccggcggcggggagggcccccggctgggggagggggagctgctgctggaggtgcagggcgtgcgggtgtctggcctgcccaggtatgatgtgctgggcgtcatcgacagctgcaaggaggccgtgaccttcaaggctgtgcggcagggcggccgcctgaacaaggacctgcggcacttcctgaaccagcgcttccagaagggcagcccagaccacgagctgcagcagaccatccgggacaacctgtacagacatgctgtgccctgcaccaccaggagcccccgggagggggaggtgcctggggtggactacaacttcctgactgtgaaggagttcctggacctggagcagagcggcaccctgctggaggtgggcacctatgagggcaactactacggcacccccaagccacccagccagcctgtgtctgggaaggtgatcaccacagatgccctgcacagcctgcagagcggcagcaagcagagcacccccaagaggaccaagagctacaatgacatgcagaatgccggcatcgtgcatgctgaaaatgaggaggaggatgatgtgcctgagatgaacagcagcttcaccgctgacagcggggagcaggaggagcacaccctgcaggagacagccctgccccctgtgaacagcagcatcatcgccgcccccatcacagaccccagccagaagttcccccagtacctgcccctgtctgctgaggacaacctgggccccctgcctgagaactgggagatggcctacacagaaaatggagaggtgtacttcatcgaccacaacaccaagaccacctcctggctggacccccgctgcctgaacaagcagcagaagcccctggaggagtgtgaagatgatgaaggagtgcacacagaggagctggacagcgagctggagctgcctgctggctgggagaagattgaagatcctgtgtatggcatctactacgtggaccacatcaacaggaagacccagtatgagaaccctgtgctggaggccaagaggaagaagcagctggagcagcagcagcagcagcagcagcagcagcagcagcagcagcagcagcagcagcagcagcagacagaggagtggacagaggaccacagcgccctggtgccccctgtgatccccaaccacccccccagcaaccctgagcccgcccgggaggtgcccctgcagggcaagcccttcttcaccaggaaccccagcgagctgaagggcaagttcatccacaccaagctgaggaagagcagccggggcttcggcttcaccgtggtgggcggagatgagccagatgagttcctgcagatcaagagcctggtgctggatggccctgctgccctggatggcaagatggagactggagatgtgattgtgtctgtgaatgacacctgtgtgctgggccacacccacgcccaggtggtgaagatcttccagagcatccccatcggggcctctgtggacctggagctgtgccggggctaccccctgccctttgatcctgatgaccccaacaccagcctggtgacctctgtggccatcctggacaaggagcccatcatcgtgaatggccaggagacctatgacagccctgccagccacagcagcaagacaggcaaggtgaatggcatgaaggatgcccggcccagcagccctgcagatgtggccagcaacagcagccacggctacccaaatgacacagtgtccctggccagcagcatcgccacccagcctgagctgatcaccgtgcacatcgtgaagggccccatgggcttcggcttcaccatcgctgacagccctgggggcggcggccagagggtgaagcagatcgtggacagcccccgctgccggggcctgaaggagggggacctgattgtggaggtgaacaagaagaatgtgcaggccctgacccacaaccaggtggtggacatgctggtggagtgccccaagggcagcgaggtgaccctgctggtgcagaggggcggcctgcctgtgcccaagaagagccccaagagccagcccctggagaggaaggacagccagaacagcagccagcacagcgtgagcagccacaggagcctgcacacagccagccccagccacagcacccaggtgctgcctgagttccccccagctgaggcccaggccccagaccagacagacagcagcggccagaagaagccagaccccttcaagatctgggcccagagccgctccatgtatgaaaatcggctgcctgactaccaggagcaggacatcttcctgtggaggaaggagactggatttggcttccgcatcctgggcggcaatgaacctggagagcccatctacatcggccacatcgtgcccctgggcgctgctgacacagatggccgcctgcggtctggagatgagctgatctgtgtggatggcacccctgtgattggcaagagccaccagctggtggtgcagctgatgcagcaggccgccaagcagggccacgtgaacctgactgtgcggaggaaggtggtgtttgctgtgcccaagacagaaaatgaggtgcccagccctgccagcagccaccacagcagcaaccagcctgccagcctgacagaggagaagaggaccccccagggcagccagaacagcctgaacacagtgagcagcggcagcggcagcaccagcggcatcggcagcggcggcggcggcggcagcggcgtggtgtccacagtggtgcagccctatgatgtggagatcagaagaggagaaaatgaaggatttggatttgtgattgtgtcctctgtgtccaggcctgaggccggcaccacctttggaaatgcctgtgtggccatgccccacaagattggccgcatcatcgagggcagccctgctgacagatgtgggaagctgaaggtgggggaccgcatcctggccgtgaatggctgcagcatcaccaacaagagccacagcgacatcgtgaacctgatcaaggaggccggcaacacagtgaccctgcgcatcatccctggagatgagagcagcaatgccaccctgctgaccaatgctgagaagatcgccaccatcaccaccacccacacccccagccagcagggcacccaggagaccaggaacaccaccaagcccaagcaggagagccagtttgagttcaaggccccccaggccacccaggagcaggacttctacacagtggagctggagcggggggccaagggcttcggcttcagcctgcggggcggccgggagtacaacatggacctgtatgtgctgcggctggccgaggatggccctgctgagcgctgtgggaagatgagaattggagatgagatcctggagatcaacggggagaccaccaagaacatgaagcacagccgggccatcgagctgatcaagaatggaggaagaagagtgcggctcttcctgaagagaggagatggctctgtgcctgaatatgaccccagcagtgacagacatggccctgccaccggcccccagggcgtgcctgaggtgcgggccggccctgaccggcggcagcaccccagcctggagagcagctaccccccagacctgcacaagagcagcccccacggggagaagagggcccacgcccgggaccccaagggcagccgggagtacagccggcagcccaatgagcaccacacctggaatggcaccagcaggaagccagattctggggcctgccggcccaaggaccgggcccctgagggcagaagagatgcccaggccgagagagctgctgctgccaacggccccaagaggaggagccctgagaagaggcgggagggcaccaggtctgctgacaacaccctggagcggcgggagaagcatgagaagagaagagatgtgtccccagagcggcggcgggagaggagccccaccaggagaagagatggcagccccagcagaagaagaagaagcctggagcggctgctggagcagaggaggagccctgagaggagaagaggaggcagccctgagcggcgggccaagagcacagacagaagaagagcccggagccctgagcggcggcgggagaggagcctggacaagaggaacagagaagatcgggccagccaccgggagcgggaggaggccaacctgaagcaggatgctggccgcagcagccgccaccccccagagcagaggcggcggccctacaaggaatgttccacagacctgagcatctag

SEQ ID NO: 30410 - DNA, 4389 bp, Artificial Sequence
  derived and/or modified sequence
atgtccaaagtgatccagaagaagaaccactggactagcagggttcacgaatgcaccgtgaagcggggaccccagggcgagctgggggtgacggtgctgggaggcgcggagcacggggagtttccgtacgtcggagcggtggcggcggtcgaggcagcggggcttcccggcggcggcgagggcccgaggctgggcgaaggggagctgcttctggaggtgcagggggtccgggtgtccggcttgccccgctatgacgtgctgggggtcatcgacagctgcaaggaggccgtcaccttcaaggccgtcagacaaggaggaaggctgaacaaggacctgcgacattttctcaatcagcgattccagaaggggtctcctgatcatgagctccagcagaccataagggataacctttaccgccatgctgtgccttgcacaacccgatctcccagagaaggagaagtgcctggcgtggactataactttctgactgtgaaggagttcttggacctcgagcagagtgggactcttctggaagtcggcacctatgaaggaaactattatgggacacccaagcctcctagccagccagtcagtgggaaagtgatcacgacggatgccttgcacagccttcagtctggctctaagcagtcgaccccgaagcgaaccaagtcctacaatgatatgcaaaatgctggcatagtccacgcggagaatgaggaggaggatgacgttcctgaaatgaacagcagctttacagccgattctggtgaacaagaggagcacactctccaagaaacagcattaccacctgtgaatagtagcatcatcgctgctcccatcacggacccttctcagaagttccctcaatacctacctctttctgcagaggataatttaggtcctctacctgaaaactgggagatggcctatactgaaaatggagaagtctattttatagaccataacacgaaaacaacatcttggttagaccctcggtgcctaaacaagcagcagaagccactggaagagtgtgaagatgatgaaggggtacacaccgaggagctggacagtgaactagaactgcctgctggttgggaaaagattgaagaccctgtctatggtatctactatgtagaccacatcaacaggaagacacaatatgagaacccggttctagaagccaaacggaagaagcagcttgagcagcagcagcagcagcaacagcagcagcaacagcagcagcagcagcagcagcagcagcagacagaagaatggacagaagatcactcagcccttgtgcctcctgttattccaaaccaccctccaagcaatccagagccagccagagaagttccacttcagggcaaacccttttttacacgaaacccttctgagttgaaaggcaagttcattcacacaaagctgcggaaaagcagtcgtggctttggcttcacggtggttggaggggatgaacctgatgagtttctccagatcaagagcttggtcctagatggtcctgctgcattggatggcaagatggaaacaggggatgtgattgtaagtgtgaatgacacctgtgttttgggacacacacatgctcaagttgtgaagatcttccagtccatccccattggtgccagcgtggaccttgaactctgccgaggttatccattgccttttgatccagatgaccccaatacaagtttagtgacctcggtagccattttggataaagaaccaattattgtgaatgggcaagagacctatgattcaccagctagccacagtagtaaaacaggcaaagtcaatggcatgaaggatgccaggccaagcagcccagcggacgtggcttcaaatagttctcatggttatcctaatgacactgtttctttggcttcctccatagccactcagccagaactcataactgttcatattgtcaaagggccaatgggctttggttttactatcgcagacagtcctggtgggggtggccaaagagtgaaacagattgttgacagcccaaggtgccgaggcctgaaagaaggggatctcatagtggaagttaataagaagaacgtgcaggccctaactcacaaccaagtggtggatatgctggttgagtgtcctaagggaagtgaggtcacattgttggtgcaacgaggagggctgccagttcccaagaagagcccaaagtcgcaaccactggaaaggaaagacagccagaatagttctcagcacagtgtttccagccaccgaagcctgcacacagcatccccaagccacagcacacaggtgctccccgagttcccacctgcagaggcccaagctccagatcaaactgacagctctggccagaaaaaaccagatccttttaaaatctgggcccagtccaggagcatgtatgaaaaccgacttccagattaccaggaacaggacatcttcctctggagaaaagagactggatttggatttaggattctgggtggaaatgaaccaggggaacctatttatattggtcacatcgtaccactgggtgctgctgatactgacggccgcctgaggtctggagatgaattaatctgtgtggatgggacgccagtaattggaaaatcacaccagcttgtggtccagcttatgcaacaagctgccaagcaaggccacgtcaatctcacggtgcggcgtaaagtggtttttgcggtgcccaaaaccgagaacgaggtgccctcgccagcctcctctcatcacagtagcaaccagccggcctcgctgacagaagagaagcgcactccgcagggcagccagaactcgctgaacacggtgagctcgggcagcggcagcaccagcggcatcggcagtggcggcggcgggggcagcggcgtggtcagcaccgtggtgcagccctacgacgtggagatccggcgcggggagaacgagggcttcggcttcgtcatcgtgtcctcggtgagcaggcccgaagcaggcacgacctttggcaatgcatgtgtggctatgcctcacaaaataggtcggattattgaggggagccctgctgaccgctgtggcaagctgaaagtaggagaccggatcttggcagtaaatggatgttccatcaccaacaaatcccattcagacattgtgaacctaatcaaggaagcgggaaacacagttaccctccgcatcattcctggggatgagtcctcgaatgccaccttgctgaccaatgcagagaagattgccaccatcaccaccacacacaccccttctcagcaagggacccaggagacaaggaataccaccaaaccaaagcaggaatctcaatttgagttcaaagcaccccaagcaacacaggagcaagatttttacactgtggaactggaaagaggagccaagggatttggctttagccttcgaggaggccgagagtataacatggacctctatgttctgcgcttagcagaggacggtcctgcggagaggtgtggaaagatgaggattggtgatgaaattttagagatcaatggtgagaccaccaaaaacatgaagcattctcgagctatagaactgattaagaatggtggccgcagagttcgtctgtttctgaagcggggagacggctcagtaccagaatatgaccccagcagcgaccgccacggccccgccaccggtccacaaggtgttccggaagtgagggccgggcccgaccgccggcagcatccgtcattggagtccagttacccacccgatcttcacaaatcatcaccacatggggaaaagcgggcacacgcaagggatccgaaaggcagcagagagtatagcagacaacccaatgaacaccacacctggaatgggacttcgaggaaacccgacagcggggcatgccgacccaaggaccgggcgccggagggacggagggacgcgcaggccgagcgcgcggcagccgccaacggccccaagaggcggtccccagagaagcggagggagggcacccgcagcgccgacaacactttggagaggagggagaagcacgagaagagacgagacgtctctccggagcggaggcgagagcggtcacccacccgcaggagagacggctcccccagccggcggagacggtctctggagagactcctggagcagaggaggtcccccgagcgcaggagagggggctcgcccgagcgcagggccaagtccaccgaccggaggcgcgcacgctcccccgagcgcaggagagagcggtccctggacaaaaggaacagagaggacagagccagccaccgagaaagggaagaggcgaatctgaaacaggatgccggcagaagttccagacatcccccggagcagagaaggcgaccttacaaagaatgtagcaccgacctcagtatctga

SEQ ID NO: 30411 - DNA, 4389 bp, Artificial Sequence
  derived and/or modified sequence
atgagcaaggtgatccagaagaagaaccactggaccagccgggtgcacgagtgcacagtaaagcgaggaccacaaggggaattgggtgtcactgtcctgggcggtgcggagcacggcgaattcccgtacgtgggcgctgtggccgccgttgaggcagccggcctgccaggcggtggggagggaccccgccttggggaaggggagcttttgctggaggttcagggagtccgcgtcagcggcctgccccggtacgatgtgctcggcgtaatcgacagctgtaaggaggcagtgacattcaaagcagttaggcagggcgggagactcaacaaagatcttcgccattttctaaatcagcgcttccaaaagggctctccagaccacgaactgcagcagacgattagagataacctctaccgacacgccgtgccatgcactactcggagccctagagagggagaagtgccaggtgtggactataatttcctgacagtgaaagaattcctggacctcgagcaaagcggcacactgttagaagtcgggacatacgagggaaattactacgggacaccgaagcctcccagtcagccggtctccggcaaggtgattaccacagatgcactgcatagccttcagtctggcagcaagcagtctactccgaaaaggactaagtcatataatgacatgcagaacgcaggtatcgtccatgccgaaaacgaggaagaagacgacgtcccagagatgaatagctccttcactgctgattcaggagaacaggaggagcacactctccaggagaccgccctgcctcctgttaatagctcaattattgccgcgcctattactgacccttcccagaagtttccgcagtacctgcccctgagcgcggaagacaatctagggcctttgccggaaaactgggagatggcctatactgaaaacggagaggtgtactttatcgatcacaacacaaaaaccactagctggctggacccccgctgcctcaacaaacagcaaaaaccgctggaagaatgcgaagacgacgagggcgtgcacaccgaagaactggattcggagttagaattacctgctggttgggaaaagattgaagacccggtgtatggcatctactatgttgatcacattaacaggaagacccagtatgaaaaccccgtactggaagctaagcggaagaagcagctggagcaacagcagcagcagcagcaacagcaacagcagcaacagcagcagcaacaacaacagcagacggaggagtggacagaagatcacagcgcgctggtgccccctgtgatccctaaccatcctccgtcaaatcctgagcctgcacgcgaagtaccacttcaagggaagccattctttaccaggaatccctcggaacttaaaggaaaattcatccatactaaacttcgcaaatcctctagaggcttcggtttcacagtcgtaggcggtgatgagccagatgagtttctgcagattaaatcgttggtgctggacggacctgctgccctagacgggaagatggagacaggggatgtgatcgtctcagtcaacgatacttgcgttttggggcacacccacgctcaggttgtgaaaatctttcagtcgattccaataggcgcctctgtggacctcgaactctgtcggggatatccactgccattcgatcctgacgatcctaatacttcgctggtgactagcgtggccatcctggataaagaacctattatcgtgaatggccaggaaacttacgactcaccagcaagtcatagcagcaagactggaaaggttaatgggatgaaagacgccaggccaagctcccccgccgatgtggcaagcaattccagccacggctacccaaacgacaccgtatctctggcatccagtatcgcaactcagcccgaactgattacagtgcacatagtaaagggacctatgggattcggattcactatagcggacagcccgggtggaggcggacagcgagtgaagcagatcgttgatagtcctcgctgtcgggggttaaaggagggcgacctcatcgtggaagtgaacaagaagaacgtgcaggccctcacccataatcaggtcgtagacatgttggtagagtgtcccaagggatcagaggtcacactcttggtccagcgcgggggactccccgttcccaaaaagtcccccaagtcccagccactagaacgcaaggacagccagaacagcagccagcactcagtttcatcacacaggagtctgcacaccgcatctccttctcactctactcaagtgctccccgaattcccccccgccgaggcgcaggctcctgaccagacagactctagcggtcaaaaaaagcccgaccccttcaagatttgggcgcagtccagaagcatgtacgagaatcgcttgccggactatcaggaacaagacatattcctctggagaaaggagacaggatttggctttcgaatcttaggaggcaatgaacctggggagcccatatacattggtcacatagtgcctttaggggcggccgacactgacggtcggctgcgcagcggagatgagctgatatgtgtggacggtacaccagtcattggaaaatcgcaccagctcgtcgtacaactgatgcagcaggcagctaagcagggccacgtgaaccttacagtgcgcagaaaagtcgtattcgccgtcccaaagacagaaaacgaggtcccttcccctgcctcctcccaccattcttctaaccaacctgctagcctgaccgaagaaaagcgtaccccccagggcagtcagaacagcctaaataccgtgtcttcaggaagcgggtccacaagtggaatcggctccggcggagggggcggatccggtgtggtttcaaccgtggtgcagccttacgatgttgagattcggcggggagagaacgaggggttcggattcgtcattgtgagttcagtaagccgtccagaagcgggtacaacctttggcaatgcttgcgtggctatgcctcacaagattggacgaatcatagaaggaagtcccgccgaccgatgtggtaagctgaaagtgggcgacagaatactcgccgttaacggttgttccatcactaataaaagtcatagtgacattgtgaatctcatcaaagaagcaggtaataccgtgacacttcgaattatcccaggggatgagtcgagtaacgctaccctgctcacgaatgccgagaagatagccaccataacgaccacccacaccccctcacagcagggaacgcaggagacacggaacacaacgaagccgaagcaggaaagtcaattcgaatttaaagctccccaggcaacccaggaacaggacttctacactgttgaattggaacgcggcgccaagggatttgggtttagcctccgcggaggtcgggaatacaatatggatctctacgtgctgcgactggccgaagacggcccagcagaacgctgcggcaaaatgagaattggcgacgaaattttagaaatcaacggggagacgactaagaacatgaaacactctcgggcaattgaattaatcaagaatgggggaaggcgcgttcggctgttcctgaagcgtggcgacgggagtgtgcccgaatacgaccccagctcagaccgccatggacctgccaccggtcctcaaggcgtccccgaagtgagagccggccctgataggcgccagcatccttctttggagagttcctatcctcctgatctgcacaagagttcacctcacggggaaaagcgcgctcacgcacgggatccgaagggttcgagagaatattcaaggcagccgaacgagcaccatacctggaatgggacttccaggaagcctgacagcggcgcatgcagacctaaagacagggcacccgagggaaggagggatgcccaggccgagcgagcagccgctgctaatgggccgaaacgtcggagccccgaaaagcgacgtgaaggtactagaagtgctgataacaccctcgaacgccgagaaaagcacgaaaaaagacgagacgtcagtcctgaacgtcggagagagcgcagtccgaccagacgacgagatggcagtccctctaggaggcgcaggtctctagagcgtcttctagagcagcggcgcagccccgagaggagaagaggtgggagccctgagcgccgagctaaatccaccgatcgcaggcgagctagatccccagagagaaggagagagcgaagtctggacaagagaaaccgagaagaccgtgcctcacatagagaacgcgaggaagccaacctgaagcaggatgccggccggtcctcccgccaccctcccgaacagcggcggagaccatacaaagagtgttccactgatctgagcatctag

SEQ ID NO: 30412 - DNA, 4389 bp, Artificial Sequence
  derived and/or modified sequence
atgtcgaaggtaatccagaaaaagaaccactggacctcccgggttcacgagtgtacagtaaaacggggaccccaaggagagctcggggtgaccgtcctaggcggagccgaacatggagagtttccttacgttggcgcagtggctgctgtagaagctgctggcctccctggtggaggggagggcccaaggctgggagaaggagagctgctgctagaagtccaaggagtccgcgtgtctggactccccagatacgatgtgcttggtgtgattgattcgtgtaaggaagctgttaccttcaaggcagtccggcagggaggcagacttaataaagacctgcgacactttctgaaccagcggttccaaaaaggatcccctgaccacgagcttcagcagaccattcgggataacctgtaccgacacgccgtgccgtgcaccacacggagcccgagagagggagaagttccaggcgttgattacaacttcctgacggtgaaagagttcctggacttggagcaaagcggtacccttttggaagtgggaacatatgaaggcaactactatggcacccctaagcctccgagtcaacctgtatcaggcaaggtcatcaccactgacgcccttcacagcttgcaatctgggagtaaacagtctactccaaagcgtactaagagctacaatgatatgcagaatgcaggaatagtccacgccgaaaacgaagaagaggacgatgttccggagatgaactcctcttttacggctgactcaggtgagcaagaggaacatactctgcaggaaactgccttgccccctgtgaactcaagcatcatcgccgctccaattaccgatccttcacaaaaattcccccagtacttgccactgtctgccgaggataacctcggaccattgccagagaactgggagatggcatacacggagaatggagaggtttactttatcgatcataataccaaaaccaccagctggctcgatcctcggtgtcttaataagcagcagaagccattggaagagtgtgaagacgatgagggcgtccacacagaggagctggatagcgaattagagctgcctgcaggatgggaaaaaatcgaggatccagtctacggaatatattatgtcgatcatattaataggaaaacacagtacgagaatccggttctggaagctaaaagaaaaaaacaattggagcagcaacagcagcagcagcagcagcaacagcagcaacagcagcaacagcagcagcagcagacagaggagtggaccgaagatcattccgctctggtcccacccgtaattccaaatcatcctcctagcaaccccgagcctgcgagggaggtgccgctccagggcaaaccgttcttcactaggaaccctagtgaactgaaaggcaagttcatacacacgaagcttaggaagtcctcgagaggctttggcttcacagtcgtgggtggcgacgagccggatgaattcctgcagattaaatcactggtactggatggcccagccgcactagacgggaaaatggagaccggtgacgtgatcgtttcggtgaacgacacatgcgttctgggccatacccacgctcaggtcgtcaagatttttcaatctatcccaatcggagctagcgttgatttagaactgtgtcgaggatacccactcccctttgatccggacgaccccaatacaagcctggtaacctcggtagcgatcctagataaggagccgatcatcgttaacggccaagagacttacgatagcccggcatcgcacagtagtaaaaccgggaaggttaatggaatgaaggatgctcggccaagcagcccggctgatgtggcgagcaactccagccacggttatcctaatgacactgtatctttagcctccagtattgccacccagcccgaactgattacggttcacattgtgaaggggcctatggggtttgggttcactatagctgacagtcccggtggaggaggacagcgagtaaagcaaatagtggactccccccgttgtcgcggattgaaggagggggacctgatcgtcgaggtgaacaaaaagaatgtgcaggcccttacacacaatcaggtggtggacatgttagtggagtgtcctaagggctctgaggtgacgcttctggtacagagaggaggattgcccgtccctaaaaaaagtccaaagtcccaacccctcgagcgtaaggattcacaaaactcttctcaacattcagtttccagtcacaggtcactacacacggcttccccaagccatagtacccaggtgctaccggaattccccccagccgaggcccaagcccctgaccaaaccgattcaagcggtcagaaaaagccagatccatttaaaatctgggctcagtcaaggtccatgtacgagaataggcttccagattatcaggaacaggacatcttcctttggcggaaagaaacaggctttggatttcggatactcggcggaaacgagcccggagaaccgatttacattggccacatcgtccccctgggggctgccgacacagatgggagactgcgatcgggtgacgagctgatatgcgtcgacggtacccctgtgatcggtaagagccaccaactggttgtccaactgatgcagcaagctgccaaacagggccacgtgaatctgaccgtgcgtcgcaaggttgttttcgccgtgccaaaaactgagaacgaagttccaagccccgcttcttctcaccacagttcaaatcagcctgcctccctgacggaggagaagcggacaccgcagggcagtcagaattcccttaatactgttagctcaggcagtggctcaacaagcggcatcggttcggggggtggcggaggctccggtgttgtgtccacagttgtgcagccgtatgacgtcgaaattagacgaggagagaatgagggctttggtttcgtgattgtgagttctgtcagccggcctgaagcaggtacaactttcggcaacgcgtgcgttgccatgcctcacaagatcggcagaatcatcgagggttcccctgccgataggtgcggcaagcttaaggtcggcgataggatactggccgtgaatgggtgttccatcactaataagtcacactctgatatagtaaacctgattaaggaagcaggtaacactgttaccctgaggataattccgggagatgagtcctccaatgcaacgctccttaccaacgccgagaaaattgccacaattactactacccatacaccctcccagcagggaacccaggagacccgaaataccaccaaacctaaacaggaatcccagtttgagttcaaggcccctcaggccacgcaggaacaagacttctacactgtggaattggaaaggggcgctaagggctttggctttagcctgcggggaggtagagagtataacatggacctttacgtgctgaggctggctgaggacgggccagccgaacggtgtggaaagatgcggataggggatgaaattctcgaaatcaatggcgagaccactaaaaacatgaagcacagtagggctattgaactcataaagaacggcggaagaagagtcaggttattcctgaagcgtggagatggctccgtccctgagtacgacccgtctagcgaccgccacgggcctgctaccggtcctcagggagtgcctgaagtccgggcaggcccagatcggagacagcatcctagcttagaatctagttaccccccagatttacacaagagctctcctcatggagagaagcgggctcatgctagagaccctaagggtagtagagagtacagccggcagccaaatgagcatcacacatggaatggcacaagtaggaaaccagactccggggcttgccgcccaaaggacagggcccctgagggacgccgagatgcccaggccgagcgggcagctgctgccaacggccctaaacggaggtctccagagaagcggagagaagggacccgctctgccgacaatacgcttgagagacgcgagaaacatgaaaaaagacgggacgtatcacctgaaaggagaagagagaggtcccctactaggcgtcgggacggcagcccatcacgaagacgacgcagtttagagagactcttagaacagagacgtagccctgagcggcgacgcggtggctcgcccgagcgaagagcaaaaagcaccgacaggagaagggcacgcagtccagaaaggagaagagaaaggtctcttgataaacgaaatcgagaggacagagcttctcacagagaaagggaggaggcaaacctgaagcaggacgccggtcgatctagcagacaccctcctgaacagcgcagacgaccatacaaggaatgttctactgatttgagcatatag

SEQ ID NO: 30413 - DNA, 4389 bp, Artificial Sequence
  derived and/or modified sequence
atgagcaaggtgatccagaagaagaaccactggaccagcagagtgcacgagtgcaccgtgaagagaggcccccagggcgagctgggcgtgaccgtgctgggcggcgccgagcacggcgagttcccctacgtgggcgccgtggccgccgtggaggccgccggcctgcccggcggcggcgagggccccagactgggcgagggcgagctgctgctggaggtgcagggcgtgagagtgagcggcctgcccagatacgacgtgctgggcgtgatcgacagctgcaaggaggccgtgaccttcaaggccgtgagacagggcggcagactgaacaaggacctgagacacttcctgaaccagagattccagaagggcagccccgaccacgagctgcagcagaccatcagagacaacctgtacagacacgccgtgccctgcaccaccagaagccccagagagggcgaggtgcccggcgtggactacaacttcctgaccgtgaaggagttcctggacctggagcagagcggcaccctgctggaggtgggcacctacgagggcaactactacggcacccccaagccccccagccagcccgtgagcggcaaggtgatcaccaccgacgccctgcacagcctgcagagcggcagcaagcagagcacccccaagagaaccaagagctacaacgacatgcagaacgccggcatcgtgcacgccgagaacgaggaggaggacgacgtgcccgagatgaacagcagcttcaccgccgacagcggcgagcaggaggagcacaccctgcaggagaccgccctgccccccgtgaacagcagcatcatcgccgcccccatcaccgaccccagccagaagttcccccagtacctgcccctgagcgccgaggacaacctgggccccctgcccgagaactgggagatggcctacaccgagaacggcgaggtgtacttcatcgaccacaacaccaagaccaccagctggctggaccccagatgcctgaacaagcagcagaagcccctggaggagtgcgaggacgacgagggcgtgcacaccgaggagctggacagcgagctggagctgcccgccggctgggagaagatcgaggaccccgtgtacggcatctactacgtggaccacatcaacagaaagacccagtacgagaaccccgtgctggaggccaagagaaagaagcagctggagcagcagcagcagcagcagcagcagcagcagcagcagcagcagcagcagcagcagcagcagaccgaggagtggaccgaggaccacagcgccctggtgccccccgtgatccccaaccacccccccagcaaccccgagcccgccagagaggtgcccctgcagggcaagcccttcttcaccagaaaccccagcgagctgaagggcaagttcatccacaccaagctgagaaagagcagcagaggcttcggcttcaccgtggtgggcggcgacgagcccgacgagttcctgcagatcaagagcctggtgctggacggccccgccgccctggacggcaagatggagaccggcgacgtgatcgtgagcgtgaacgacacctgcgtgctgggccacacccacgcccaggtggtgaagatcttccagagcatccccatcggcgccagcgtggacctggagctgtgcagaggctaccccctgcccttcgaccccgacgaccccaacaccagcctggtgaccagcgtggccatcctggacaaggagcccatcatcgtgaacggccaggagacctacgacagccccgccagccacagcagcaagaccggcaaggtgaacggcatgaaggacgccagacccagcagccccgccgacgtggccagcaacagcagccacggctaccccaacgacaccgtgagcctggccagcagcatcgccacccagcccgagctgatcaccgtgcacatcgtgaagggccccatgggcttcggcttcaccatcgccgacagccccggcggcggcggccagagagtgaagcagatcgtggacagccccagatgcagaggcctgaaggagggcgacctgatcgtggaggtgaacaagaagaacgtgcaggccctgacccacaaccaggtggtggacatgctggtggagtgccccaagggcagcgaggtgaccctgctggtgcagagaggcggcctgcccgtgcccaagaagagccccaagagccagcccctggagagaaaggacagccagaacagcagccagcacagcgtgagcagccacagaagcctgcacaccgccagccccagccacagcacccaggtgctgcccgagttcccccccgccgaggcccaggcccccgaccagaccgacagcagcggccagaagaagcccgaccccttcaagatctgggcccagagcagaagcatgtacgagaacagactgcccgactaccaggagcaggacatcttcctgtggagaaaggagaccggcttcggcttcagaatcctgggcggcaacgagcccggcgagcccatctacatcggccacatcgtgcccctgggcgccgccgacaccgacggcagactgagaagcggcgacgagctgatctgcgtggacggcacccccgtgatcggcaagagccaccagctggtggtgcagctgatgcagcaggccgccaagcagggccacgtgaacctgaccgtgagaagaaaggtggtgttcgccgtgcccaagaccgagaacgaggtgcccagccccgccagcagccaccacagcagcaaccagcccgccagcctgaccgaggagaagagaaccccccagggcagccagaacagcctgaacaccgtgagcagcggcagcggcagcaccagcggcatcggcagcggcggcggcggcggcagcggcgtggtgagcaccgtggtgcagccctacgacgtggagatcagaagaggcgagaacgagggcttcggcttcgtgatcgtgagcagcgtgagcagacccgaggccggcaccaccttcggcaacgcctgcgtggccatgccccacaagatcggcagaatcatcgagggcagccccgccgacagatgcggcaagctgaaggtgggcgacagaatcctggccgtgaacggctgcagcatcaccaacaagagccacagcgacatcgtgaacctgatcaaggaggccggcaacaccgtgaccctgagaatcatccccggcgacgagagcagcaacgccaccctgctgaccaacgccgagaagatcgccaccatcaccaccacccacacccccagccagcagggcacccaggagaccagaaacaccaccaagcccaagcaggagagccagttcgagttcaaggccccccaggccacccaggagcaggacttctacaccgtggagctggagagaggcgccaagggcttcggcttcagcctgagaggcggcagagagtacaacatggacctgtacgtgctgagactggccgaggacggccccgccgagagatgcggcaagatgagaatcggcgacgagatcctggagatcaacggcgagaccaccaagaacatgaagcacagcagagccatcgagctgatcaagaacggcggcagaagagtgagactgttcctgaagagaggcgacggcagcgtgcccgagtacgaccccagcagcgacagacacggccccgccaccggcccccagggcgtgcccgaggtgagagccggccccgacagaagacagcaccccagcctggagagcagctacccccccgacctgcacaagagcagcccccacggcgagaagagagcccacgccagagaccccaagggcagcagagagtacagcagacagcccaacgagcaccacacctggaacggcaccagcagaaagcccgacagcggcgcctgcagacccaaggacagagcccccgagggcagaagagacgcccaggccgagagagccgccgccgccaacggccccaagagaagaagccccgagaagagaagagagggcaccagaagcgccgacaacaccctggagagaagagagaagcacgagaagagaagagacgtgagccccgagagaagaagagagagaagccccaccagaagaagagacggcagccccagcagaagaagaagaagcctggagagactgctggagcagagaagaagccccgagagaagaagaggcggcagccccgagagaagagccaagagcaccgacagaagaagagccagaagccccgagagaagaagagagagaagcctggacaagagaaacagagaggacagagccagccacagagagagagaggaggccaacctgaagcaggacgccggcagaagcagcagacacccccccgagcagagaagaagaccctacaaggagtgcagcaccgacctgagcatctag

SEQ ID NO: 30414 - protein, 306 aa, Artificial Sequence
  derived and/or modified sequence
MYSFMAGSIFITIFGNLAMIISISYFKQLHTPTNFLILSMAITDFLLGFTIMPYSMIRSVENCWYFGLTFCKIYYSFDLMLSITSIFHLCSVAIDRFYAICYPLLYSTKITIPVIKRLLLLCWSVPGAFAFGVVFSEAYADGIEGYDILVACSSSCPVMFNKLWGTTLFMAGFFTPGSMMVGIYGKIFAVSRKHAHAINNLRENQNNQVKKDKKAAKTLGIVIGVFLLCWFPCFFTILLDPFLNFSTPVVLFDALTWFGYFNSTCNPLIYGFFYPWFRRALKYILLGKIFSSCFHNTILCMQKESE

SEQ ID NO: 30415 - protein, 351 aa, Artificial Sequence
  derived and/or modified sequence
MAVSSEQHELSHFKRTQTKKEKFNCSEYGNRSCPENERSLGVRVAMYSFMAGSIFITIFGNLAMIISISYFKQLHTPTNFLILSMAITDFLLGFTIMPYSMIRSVENCWYFGLTFCKIYYSFDLMLSITSIFHLCSVAIDRFYAICYPLLYSTKITIPVIKRLLLLCWSVPGAFAFGVVFSEAYADGIEGYDILVACSSSCPVMFNKLWGTTLFMAGFFTPGSMMVGIYGKIFAVSRKHAHAINNLRENQNNQVKKDKKAAKTLGIVIGVFLLCWFPCFFTILLDPFLNFSTPVVLFDALTWFGYFNSTCNPLIYGFFYPWFRRALKYILLGKIFSSCFHNTILCMQKESE

SEQ ID NO: 30416 - DNA, 1056 bp, Artificial Sequence
  derived and/or modified sequence
atggccgtgagcagcgagcagcacgagctgagccacttcaagagaacccagaccaagaaggagaagttcaactgcagcgagtacggcaacagaagctgccccgagaacgagagaagcctgggcgtgagagtggccatgtacagcttcatggccggcagcatcttcatcaccatcttcggcaacctggccatgatcatcagcatcagctacttcaagcagctgcacacccccaccaacttcctgatcctgagcatggccatcaccgacttcctgctgggcttcaccatcatgccctacagcatgatcagaagcgtggagaactgctggtacttcggcctgaccttctgcaagatctactacagcttcgacctgatgctgagcatcaccagcatcttccacctgtgcagcgtggccatcgacagattctacgccatctgctaccccctgctgtacagcaccaagatcaccatccccgtgatcaagagactgctgctgctgtgctggagcgtgcccggcgccttcgccttcggcgtggtgttcagcgaggcctacgccgacggcatcgagggctacgacatcctggtggcctgcagcagcagctgccccgtgatgttcaacaagctgtggggcaccaccctgttcatggccggcttcttcacccccggcagcatgatggtgggcatctacggcaagatcttcgccgtgagcagaaagcacgcccacgccatcaacaacctgagagagaaccagaacaaccaggtgaagaaggacaagaaggccgccaagaccctgggcatcgtgatcggcgtgttcctgctgtgctggttcccctgcttcttcaccatcctgctggaccccttcctgaacttcagcacccccgtggtgctgttcgacgccctgacctggttcggctacttcaacagcacctgcaaccccctgatctacggcttcttctacccctggttcagaagagccctgaagtacatcctgctgggcaagatcttcagcagctgcttccacaacaccatcctgtgcatgcagaaggagagcgagtag

SEQ ID NO: 30417 - DNA, 1056 bp, Artificial Sequence
  derived and/or modified sequence
atggctgtgtcaagcgaacaacatgaactgagccactttaaacgcacccaaacaaagaaggagaagtttaattgctcagagtacggcaataggtcatgccccgaaaatgagagaagcttgggcgtgcgtgtggcaatgtattcttttatggccgggtccatcttcattaccatcttcgggaacttagccatgataatatccatcagttatttcaaacagctgcacacacccacgaacttcctcatcctctccatggcgataaccgatttcctgctgggttttacaatcatgccatactcaatgatccgcagtgtagagaactgttggtattttggattgaccttctgcaaaatctactacagcttcgatctgatgttatctatcaccagcatctttcacctgtgctctgtcgccatagatagattctatgctatttgctaccctctactgtacagtacaaagataactatccccgtcatcaaacgcctgctgctgctgtgctggtccgtcccaggagctttcgctttcggcgtggtgttctccgaggcttatgccgacgggattgagggatatgatattttagtcgcctgcagctcaagttgcccggtgatgtttaataagctgtggggcacaacactttttatggccggatttttcacacctgggagtatgatggtgggcatctacggcaaaatatttgcggtatccaggaaacacgcccacgcgatcaataatcttagagagaatcagaacaaccaggtgaaaaaggacaagaaagccgcaaaaacccttgggatagtgatcggagtgtttctgctctgctggtttccctgtttcttcaccatcctcctcgatcccttcctgaacttttcaacacctgtagtgctgttcgacgccttaacgtggtttggctatttcaattccacctgtaaccctctgatctacgggtttttctacccatggttccgcagggctttaaaatacatcctgctggggaaaattttctcatcgtgtttccataataccatcctgtgtatgcagaaggaaagcgagtag

SEQ ID NO: 30418 - DNA, 1056 bp, Artificial Sequence
  derived and/or modified sequence
atggctgtgtcctctgagcagcacgagctgagccacttcaagaggacccagaccaagaaggagaagttcaactgcagtgaatatggcaacagaagctgcccagaaaatgaaagaagcctgggcgtgcgggtggccatgtacagcttcatggccggcagcatcttcatcaccatctttggaaacctggccatgatcatcagcatctcctacttcaagcagctgcacacccccaccaacttcctgatcctgtccatggccatcacagacttcctgctgggcttcaccatcatgccctacagcatgatccgctctgtggagaactgctggtacttcggcctgaccttctgcaagatctactacagctttgacctgatgctgagcatcaccagcatcttccacctgtgcagcgtggccatcgaccgcttctacgccatctgctaccccctgctgtacagcaccaagatcaccatccctgtgatcaagaggctgctgctgctgtgctggagcgtgcctggggcctttgccttcggcgtggtgttttctgaggcctatgcagatggcatcgagggctatgacatcctggtggcctgcagcagcagctgccctgtgatgttcaacaagctgtggggcaccaccctcttcatggccggcttcttcaccccaggctccatgatggtgggcatctacggcaagatctttgctgtgtccaggaagcacgcccacgccatcaacaacctgcgggagaaccagaacaaccaggtgaagaaggacaagaaggccgccaagaccctgggcatcgtcatcggggtcttcctgctgtgctggttcccctgcttcttcaccatcctgctggaccccttcctgaacttcagcacccctgtggtgctgtttgatgccctgacctggtttggctacttcaacagcacctgcaaccccctcatctacggcttcttctacccctggttcagaagagccctgaagtacatcctgctgggcaagatcttcagcagctgcttccacaacaccatcctgtgcatgcagaaggagagcgagtag

SEQ ID NO: 30419 - DNA, 1056 bp, Artificial Sequence
  derived and/or modified sequence
atggccgtgagcagcgagcagcacgagctgagccacttcaagcggacgcagaccaagaaagagaagtttaactgctctgagtacggaaacaggtcttgtccggagaacgagcgctccctgggagtcagggtcgctatgtactcgttcatggcagggagcatcttcatcaccattttcggaaacttggccatgatcataagcataagctattttaagcagctgcatacccccacaaacttcctcatcctctcaatggccataacagatttcttgttggggtttacaattatgccatattctatgatccgctctgttgaaaattgttggtatttcggcttaacattctgtaaaatctactatagttttgacctgatgcttagcatcactagtatcttccacctatgcagtgtcgccattgaccgcttttatgccatttgttacccactgctctacagtactaaaattactattcccgtaatcaagaggcttcttctgctgtgctggtccgtacctggggctttcgctttcggagtcgtcttttctgaagcgtacgccgatggcatcgaaggctatgacatacttgtcgcctgttcgagtagctgccctgtcatgttcaataagttgtggggtacaaccttgttcatggccggatttttcacccccgggtccatgatggtaggcatctacggcaagattttcgctgttagtcgcaagcatgcgcatgcgattaacaaccttcgcgagaaccagaacaatcaagtcaagaaggacaagaaggctgccaaaactctgggcatcgtgatcggcgtgttcctgctgtgctggtttccttgcttttttacgatcctgctggaccctttcttaaactttagcaccccggtggtattatttgacgccctgacctggttcggttactttaacagcacctgcaatcctctgatttatggattcttttatccttggttcagaagggccctgaaatacatcttgttgggcaaaattttctccagctgttttcacaacaccattctgtgtatgcagaaggaatcggagtag

SEQ ID NO: 30420 - DNA, 1056 bp, Artificial Sequence
  derived and/or modified sequence
atggccgtttcctcagaacagcatgaactgtcccacttcaagaggacacaaacaaagaaggagaagtttaactgcagcgagtatggcaaccgcagctgtcccgaaaatgaaagatccctgggcgtgagagtggcaatgtattcctttatggccggtagcatattcatcactattttcgggaatctagctatgatcatctctatcagttactttaaacagcttcacactccaacaaacttcctcatactgagcatggccatcacggacttccttctgggctttactattatgccatattctatgatcaggagcgtggagaattgctggtattttggtttgactttctgtaagatatattactcttttgacctgatgctctctattacatctatctttcatctctgtagtgtggcaattgatcggttttacgctatctgctaccctttgctgtattccacaaagatcactattcccgtgatcaagcggctgcttctgctgtgttggtctgttccaggtgcttttgcattcggcgtggtatttagtgaagcttatgcagatggaattgaagggtatgatatcctggtggcctgttcctcctcctgtcccgtgatgtttaacaaattgtggggtactacactttttatggccggatttttcaccccaggctctatgatggtcgggatttacggcaaaatttttgccgtgagccggaaacatgcacatgctattaacaacctgagggagaaccagaacaatcaagtgaaaaaagataagaaagccgcaaaaacgttagggatcgtgattggtgtgttcctgctatgctggttcccctgcttcttcaccattctcctcgacccttttttgaacttttcaacgccagtggtgctgttcgacgcactgacctggttcggatattttaactcgacttgtaaccctcttatttacgggttcttctacccctggttcagacgggctctgaagtacattctgctgggaaagattttttcttcgtgctttcataatacgatactctgcatgcagaaagagtctgagtag

SEQ ID NO: 30421 - DNA, 1157 bp, Artificial Sequence
  derived and/or modified sequence
tgacaaaattctatctgttcttgttttttgaaggaaaaattcaattgctctgaatatggaaatagatcttgcccagaaaatgaaagatctctgggtgtccgagtggctatgtattcatttatggcaggatccatattcatcacaatatttggcaatcttgccatgataatttccatttcctacttcaagcagcttcacacaccaaccaacttcctcatcctctccatggccatcactgatttcctcctgggattcaccatcatgccatatagtatgatcagatcggtggagaactgctggtattttgggcttacattttgcaagatttattatagttttgacctgatgcttagcataacatccatttttcatctttgctcagtggccattgatagattttatgctatatgttacccattactttattccaccaaaataactattccagtcattaaaagattgctacttctatgttggtcggtccctggagcatttgccttcggggtggtcttctcagaggcctatgcagatggaatagagggctatgacatcttggttgcttgttccagttcctgcccagtgatgttcaacaagctatgggggaccaccttgtttatggcaggtttcttcactcctgggtctatgatggtggggatttatggcaaaatttttgcagtatccagaaaacatgctcatgccatcaataacttgcgagaaaatcaaaataatcaagtgaagaaagacaaaaaagctgccaaaactttaggaatagtgataggagttttcttattatgttggtttccttgtttcttcacaattttattggatccctttttgaacttctctactcctgtagttttgtttgatgccttgacatggtttggctattttaactccacatgtaatccgttaatatatggtttcttctatccctggtttcgcagagcactgaagtacattttgctaggtaaaattttcagctcatgtttccataatactattttgtgtatgcaaaaagaaagtgagtaggctttttctgcatgaataaattgaagcaaaaaactagaatttagaagaatgaagttgtttaagatgtgtgtttttgtgcatgtgtgtattattttagctaccatagaaagctgttggtttctaagacg

SEQ ID NO: 30422 - DNA, 1056 bp, Artificial Sequence
  derived and/or modified sequence
atggctgtctcatcagagcaacatgaactttcacatttcaaaagaacacagacaaaaaaggaaaaattcaattgctctgaatatggaaatagatcttgcccagaaaatgaaagatctctgggtgtccgagtggctatgtattcatttatggcaggatccatattcatcacaatatttggcaatcttgccatgataatttccatttcctacttcaagcagcttcacacaccaaccaacttcctcatcctctccatggccatcactgatttcctcctgggattcaccatcatgccatatagtatgatcagatcggtggagaactgctggtattttgggcttacattttgcaagatttattatagttttgacctgatgcttagcataacatccatttttcatctttgctcagtggccattgatagattttatgctatatgttacccattactttattccaccaaaataactattccagtcattaaaagattgctacttctatgttggtcggtccctggagcatttgccttcggggtggtcttctcagaggcctatgcagatggaatagagggctatgacatcttggttgcttgttccagttcctgcccagtgatgttcaacaagctatgggggaccaccttgtttatggcaggtttcttcactcctgggtctatgatggtggggatttatggcaaaatttttgcagtatccagaaaacatgctcatgccatcaataacttgcgagaaaatcaaaataatcaagtgaagaaagacaaaaaagctgccaaaactttaggaatagtgataggagttttcttattatgttggtttccttgtttcttcacaattttattggatccctttttgaacttctctactcctgtagttttgtttgatgccttgacatggtttggctattttaactccacatgtaatccgttaatatatggtttcttctatccctggtttcgcagagcactgaagtacattttgctaggtaaaattttcagctcatgtttccataatactattttgtgtatgcaaaaagaaagtgagtag

SEQ ID NO: 30423 - protein, 280 aa, Artificial Sequence
  derived and/or modified sequence
MKLPIFIADAFTARAFRGNPAAVCLLENELDEDMHQKIAREMNLSETAFIRKLHPTDNFAQSSCFGLRWFTPASEVPLCGHATLASAAVLFHKIKNMNSTLTFVTLSGELRARRAEDGIVLDLPLYPAHPQDFHEVEDLIKTAIGNTLVQDICYSPDTQKLLVRLSDVYNRSFLENLKVNTENLLQVENTGKVKGLILTLKGEPGGQTQAFDFYSRYFAPWVGVAEDPVTGSAHAVLSSYWSQHLGKKEMHGRTALYQFLFYLPNSKLVFLLICTIPLKM

SEQ ID NO: 30424 - DNA, 843 bp, Artificial Sequence
  derived and/or modified sequence
atgaagctgcctatctttatcgctgacgcatttacagctagggcatttcgggggaaccctgccgctgtgtgcttgttagagaacgagctggatgaggatatgcatcagaagatcgcccgtgagatgaatcttagtgaaacagctttcattcgaaagcttcaccctacggacaatttcgcccagtccagttgctttggtctaagatggtttacccctgcaagtgaagtccctttatgtgggcatgccacacttgcctcagccgccgtgctgtttcataagatcaagaacatgaacagcactctgaccttcgtgacattgagtggcgagctccgtgctcggagagcagaggacggtatcgtgctggatctgcccctctacccggcacaccctcaagacttccacgaagtcgaggacctgataaagaccgcaattggaaataccctggttcaggatatttgctactccccagacacacagaagctcctggtcaggctgagtgacgtgtataataggtccttcctagagaacctcaaagtcaacaccgagaacctcctacaggtcgaaaatacgggcaaggttaagggactcatcctcacactaaaaggcgagcccggaggtcaaacccaggcctttgatttttacagcagatatttcgctccctgggtcggggtggccgaggaccccgtcaccggcagtgcgcacgctgtcttgtcatcgtactggtcgcaacacctgggtaagaaggagatgcacggccgaacagcgctgtaccagtttttgttctatctgccaaactcaaaactggtgtttctcctgatatgtactatccctttgaagatgtag

SEQ ID NO: 30425 - DNA, 843 bp, Artificial Sequence
  derived and/or modified sequence
atgaagctgcccatcttcatcgcagatgccttcaccgcccgggccttccggggcaacccagctgctgtgtgcctgctggagaatgagctggatgaggacatgcaccagaagatcgcccgggagatgaacctgtctgaaacagccttcatcaggaagctgcaccccacagacaactttgcccagagcagctgcttcggcctgcgctggttcaccccagccagcgaggtgcccctgtgtggccacgccaccctggccagcgctgctgtgctcttccacaagatcaagaacatgaacagcaccctgacctttgtgaccctgtctggagagctgcgggccaggagagcagaagatggcatcgtgctggacctgcccctgtacccagcccacccccaggacttccacgaggtggaggacctgatcaagacagccatcggcaacaccctggtgcaggacatctgctacagcccagacacccagaagctgctggtgcggctgagtgatgtgtacaacagaagcttcctggagaacctgaaggtgaacacagagaacctgctgcaggtggagaacacaggcaaggtgaagggcctcatcctgaccctgaagggggagcccggcggccagacccaggcctttgacttctacagccgctactttgccccctgggtgggcgtggccgaggaccctgtgacaggcagcgcccatgctgtgctgagcagctactggagccagcacctgggcaagaaggagatgcacggccgcacagccctgtaccagttcctgttctacctgcccaacagcaagctggtgttcctgctgatctgcaccatccccctgaagatgtag

SEQ ID NO: 30426 - DNA, 843 bp, Artificial Sequence
  derived and/or modified sequence
atgaagctgcccatcttcatcgccgacgccttcaccgcccgggcctttcgggggaatcctgcagctgtctgcctgctggagaacgagctggatgaggacatgcaccagaagatagcaagagaaatgaatttatcggagacggccttcattagaaagcttcatccgacggacaatttcgcccagtcttcttgtttcggactgcggtggttcacccccgcctccgaagtgcccctgtgtggacacgctacgctagcttctgccgcagtgcttttccacaagatcaagaacatgaacagtacactaacttttgtcacactgagtggagaactccgcgcaaggcgggccgaggatgggattgtgctcgacttgcctctgtatcctgcccacccgcaggattttcacgaagttgaagatctaattaagaccgctattggcaataccctagttcaggacatctgctactcccctgacactcaaaaactgctcgtcaggttgagtgacgtttataatcgcagtttcctggaaaacctcaaagtcaacactgaaaatctgctgcaggtggaaaatactggaaaagttaagggcttaattctcacactgaaaggagaacctgggggtcagactcaggcatttgatttctactcaagatactttgctccctgggtgggggtggctgaggatcccgtcactggttctgcgcatgctgtccttagcagctactggtctcagcacctgggcaaaaaagaaatgcatggaaggacagctctttaccagtttctgttctatttgcccaattctaagctggtgtttctgctaatatgtaccattcctctcaagatgtag

SEQ ID NO: 30427 - DNA, 1224 bp, Artificial Sequence
  derived and/or modified sequence
gaattacaaaggaggccgtctgcctcctttgtcctggatttgggagttgagcaccttcgtcgccattggctttcctcccccagctccagcctctctcatcttgggaatctgcgtcagaagtcactcgcagtcccgtcagcccagaagacgtaaagcaggctaccagcaattttgagaacttgcaaaaacagcttgcaaggaaaatgaagcttcctattttcatagcagatgcattcacagcaagagcatttcgtgggaatcctgctgctgtttgcctcctagaaaatgaattggatgaagacatgcatcagaaaattgcaagggagatgaacctctctgaaactgcttttatccgaaaactgcacccgacagacaactttgcacaaagttcctgctttggactgagatggtttacaccagcgagtgaggtcccactctgtggccatgccaccctggcttctgcagctgtgctgtttcacaaaataaaaaacatgaatagcacgctcacgtttgtcactctgagtggagaactaagggccagacgagcagaggatggcatcgtcctggacttgcctctttatccagcccacccccaggacttccatgaagtagaggacttgataaagactgccataggcaacacactggtccaggacatctgttattctccagatacccaaaagctcctcgtccgcctcagtgacgtttacaacaggtcgtttctggagaacctgaaagtgaacacggagaatctgctgcaagttgaaaacacagggaaggtgaaagggcttattcttacccttaaaggagagcctggtgggcagacccaagcatttgacttttactcaagatattttgcaccgtgggttggtgtggctgaagacccagtgacagggtctgcacacgctgttctcagcagctactggtcccagcatctggggaagaaagaaatgcatggtaggacagctctttaccaatttcttttttatttgcctaattcgaagctagtgttccttctcatatgtactatccccttgaaaatgtaatacaatgtcatgtatcacccatgtgaaaatgaaaggttttaaaattccttcacccttaaagatcctccaccccaaacagccttcacctctgcctcccccaacatacagagactgtacagacacagatacagtaactgcccaataagtgtttgttgaataaaatagctgtataactttg

SEQ ID NO: 30428 - DNA, 843 bp, Artificial Sequence
  derived and/or modified sequence
atgaagctgcccatcttcatagcagacgccttcaccgccagagcctttaggggcaatcctgctgccgtttgccttctggaaaacgaattggatgaagacatgcatcagaaaattgctcgggagatgaatctctccgaaactgctttcatcaggaagctgcaccccacagataactttgcccagagttcatgtttcggactgcgatggttcactccggctagtgaggtgccactatgtggacacgccacactcgcatcagccgcagttctgtttcacaagataaagaatatgaattccacgcttaccttcgtgacactcagcggggagctcagagccagacgcgcagaggacggcattgtgctcgatttgcccctctaccctgcccatccccaagattttcacgaagtggaggacctgatcaagactgccatcggtaacacgctcgttcaggacatctgctactctcctgatacccaaaaactactggtccggctgagtgatgtgtacaataggagctttctggaaaacctcaaggtcaacaccgagaatctccttcaagtggaaaacaccggcaaggttaagggactgattttgacactcaagggagagccgggagggcagacacaagcgtttgatttttacagtcggtacttcgccccttgggttggagtggctgaagatccagtgacggggtcagctcatgccgtgctgtcaagttactggagccagcacttgggcaaaaaagaaatgcatggcaggaccgctttgtaccaatttctcttctacctgccaaactcaaagctggtctttctgctgatatgcactatacctctgaagatgtag

SEQ ID NO: 30429 - DNA, 843 bp, Artificial Sequence
  derived and/or modified sequence
atgaagctgcccatcttcatcgccgacgccttcaccgccagagccttcagaggcaaccccgccgccgtgtgcctgctggagaacgagctggacgaggacatgcaccagaagatcgccagagagatgaacctgagcgagaccgccttcatcagaaagctgcaccccaccgacaacttcgcccagagcagctgcttcggcctgagatggttcacccccgccagcgaggtgcccctgtgcggccacgccaccctggccagcgccgccgtgctgttccacaagatcaagaacatgaacagcaccctgaccttcgtgaccctgagcggcgagctgagagccagaagagccgaggacggcatcgtgctggacctgcccctgtaccccgcccacccccaggacttccacgaggtggaggacctgatcaagaccgccatcggcaacaccctggtgcaggacatctgctacagccccgacacccagaagctgctggtgagactgagcgacgtgtacaacagaagcttcctggagaacctgaaggtgaacaccgagaacctgctgcaggtggagaacaccggcaaggtgaagggcctgatcctgaccctgaagggcgagcccggcggccagacccaggccttcgacttctacagcagatacttcgccccctgggtgggcgtggccgaggaccccgtgaccggcagcgcccacgccgtgctgagcagctactggagccagcacctgggcaagaaggagatgcacggcagaaccgccctgtaccagttcctgttctacctgcccaacagcaagctggtgttcctgctgatctgcaccatccccctgaagatgtag

SEQ ID NO: 30430 - protein, 213 aa, Artificial Sequence
  derived and/or modified sequence
MNEFFSVDDNNEEEEDVEMKEDSDENGPEEKQSVEEMEEQSQDADGVNTVTVPGPASEEAVEDCKDEDFAKDENITKGGEVTDHSVRDQDHPDGQENDSTKNEIKIETESQSSYMETEELSSNQEDAVIVEQPEVIPLTEDQEEKEGEKAPGEDTPRMPGKSEGSSDLENTPGPDVEMNSQVDKVNDPTESQQEDQLIAGAQDEAKEQRNGTK

SEQ ID NO: 30431 - DNA, 642 bp, Artificial Sequence
  derived and/or modified sequence
atgaacgagttcttctctgtcgatgacaacaacgaggaggaggaagacgtggaaatgaaggaagacagtgacgaaaacggacctgaggagaagcagagcgtggaagaaatggaagaacagagccaggacgccgacggggtcaacacagtgactgtccctgggccagcttctgaggaggccgtggaggactgtaaagatgaagacttcgctaaagatgagaacatcaccaagggcggggaggttacagaccactcggtccgagaccaggatcatccagatgggcaggaaaatgactcaactaagaacgagattaaaatcgagaccgagagccagtctagttacatggaaaccgaagaattgagcagtaaccaggaggacgccgtgatcgtggaacagcctgaagtaattcctttgaccgaggaccaggaggaaaaggagggagaaaaggcccccggggaggatacgccacgtatgcctggcaagtccgaaggcagttcagatcttgagaacacacccggtccggacgtagagatgaatagccaggtggacaaggtgaatgatccaactgagtcccaacaagaggaccagctgattgctggcgctcaagatgaggcgaaggagcagcgtaacggaaccaaatag

SEQ ID NO: 30432 - DNA, 642 bp, Artificial Sequence
  derived and/or modified sequence
atgaacgaatttttcagtgtggatgataataatgaggaagaagaggacgtggagatgaaagaagacagtgacgaaaacggcccagaggaaaagcagagtgttgaggaaatggaggagcagagtcaggacgccgacggggttaatacagttactgttcccgggcctgcaagcgaagaggcagtggaagactgcaaggacgaggatttcgccaaagacgagaacatcacaaaaggcggagaagtcactgatcactcggtcagagatcaggaccatccagatgggcaggaaaacgactctacgaaaaatgaaataaagattgagactgagtcccagagctcttacatggagacggaagaactctctagtaaccaggaagatgctgtcattgtagaacaaccggaggtgattccacttacagaagaccaggaggaaaaggagggggaaaaagctcctggcgaagacaccccaagaatgccaggcaagtccgaggggtcttccgacctggaaaatactcctgggccagatgtagagatgaattcacaggtggataaggtgaatgatcctactgagtcccagcaggaagatcagctgatagctggggcccaggacgaggcaaaggaacagcggaatgggacgaagtag

SEQ ID NO: 30433 - DNA, 642 bp, Artificial Sequence
  derived and/or modified sequence
atgaatgagttcttctctgtggatgacaacaatgaggaggaggaggatgtggagatgaaggaggacagtgatgaaaatggacctgaggagaagcagagcgtggaggagatggaggagcagagccaggatgctgatggagtgaacacagtgacagtgcccggccctgccagcgaggaggccgtggaggactgcaaggatgaagattttgccaaggatgagaacatcaccaagggcggggaggtgacagaccacagcgtgcgggaccaggaccacccagatggccaggagaatgacagcaccaagaatgagatcaagattgaaacagagagccagagcagctacatggagacagaggagctgagcagcaaccaggaggatgctgtgattgtggagcagcctgaggtgatccccctgacagaggaccaggaggagaaggagggggagaaggcccctggagaggacacccccaggatgcctgggaagtctgagggcagcagtgacctggagaacaccccaggcccagatgtggagatgaacagccaggtggacaaggtgaatgaccccacagagagccagcaggaggaccagctgattgctggggcccaggatgaggccaaggagcagagaaatggcaccaagtag

SEQ ID NO: 30434 - DNA, 704 bp, Artificial Sequence
  derived and/or modified sequence
atgaatgagtttttctccgtagacgataataatgaagaagaagaggatgttgaaatgaaagaagattcagatgagaacggtccagaggagaagcaaagtgtggaagaaatggaagagcagagccaagatgcagatggtgtcaacactgtcactgtgcccggccctgcttcagaagaggcagttgaagactgtaaagatgaagattttgcaaaggatgaaaatattacaaaaggcggtgaagtgacagatcattctgtgcgtgaccaagatcatcccgatggacaagagaatgattcaacgaagaatgaaataaaaattgaaacagaatcgcagagctcatatatggaaacagaagaactttcatcaaaccaagaagatgccgtgattgtggagcaaccagaagtgattccattaacagaggaccaagaagaaaaagaaggtgaaaaagctccaggcgaggacacacctaggatgcctgggaaaagtgaaggctccagtgacctagaaaatactccaggtcctgatgttgaaatgaatagtcaggttgacaaggtaaatgacccaacagagagtcaacaagaagatcaactaatagcaggggcacaagatgaagcgaaggaacaaagaaatggaactaaatgacaatcctcagcatcgcaaggcctctcctggctctgggggagctcgggaagatagcagcacac

SEQ ID NO: 30435 - DNA, 642 bp, Artificial Sequence
  derived and/or modified sequence
atgaacgagttcttcagcgtggacgacaacaacgaggaggaggaggacgtcgagatgaaggaagactcagacgagaacggcccggaggagaagcagagcgtggaggaaatggaggagcagtctcaggatgctgacggcgttaatactgtaaccgttcccggtcccgcgagcgaggaagccgttgaggactgcaaagacgaagattttgcgaaggacgagaacataaccaaaggaggcgaggtgaccgatcactctgtcagggatcaagaccaccccgacggccaagagaacgacagtaccaagaacgaaatcaagattgagacagagtctcagagctcatatatggagaccgaagaactctcttctaatcaggaggacgcagtgatcgtggagcagcccgaggtgatccctcttaccgaggatcaagaggagaaggagggggagaaggccccaggtgaggacacgcctaggatgcctggtaagtccgaggggtctagcgatctggaaaacactccaggccctgatgtcgaaatgaactcccaagtggataaggtgaacgatcccaccgagtcccagcaggaagaccagctcatcgcaggggctcaggacgaagccaaggaacagcggaacgggactaagtag

SEQ ID NO: 30436 - DNA, 642 bp, Artificial Sequence
  derived and/or modified sequence
atgaacgagttcttcagcgtggacgacaacaacgaggaggaggaggacgtggaaatgaaagaggattcggacgagaacggaccggaggagaagcaatcagtcgaagagatggaagagcagagtcaggatgctgatggagtaaacaccgtcaccgtgcccgggcccgcttccgaggaagccgtcgaggattgtaaggacgaggattttgcaaaagatgaaaatatcaccaaagggggcgaggttacagatcatagtgttcgcgatcaggaccatcctgatggccaggagaacgactcaacaaagaatgaaatcaaaatcgaaactgaatcccagtcatcctatatggaaacagaggagctttcctctaaccaggaggatgctgtgatagtggagcagccggaggttataccgcttactgaggatcaggaggagaaagagggggaaaaggctccaggcgaggacactcctcgtatgccagggaagtctgagggatcttccgatctggaaaataccccagggccagacgtggagatgaactcacaggtggacaaggtgaacgacccaacagagtcccagcaggaagaccaactgatagccggtgcccaggacgaggcaaaggagcagcggaacgggacgaagtag

SEQ ID NO: 30437 - DNA, 642 bp, Artificial Sequence
  derived and/or modified sequence
atgaacgagtttttcagtgttgacgataacaatgaagaggaggaggatgtcgagatgaaggaggattctgacgagaacggtcccgaggaaaagcagagcgtcgaagaaatggaggaacagtctcaggatgcagatggagttaacacggtgaccgttcccggaccagcctcggaagaagcggtggaggattgtaaggatgaggattttgcaaaggatgaaaatatcacaaagggcggtgaggtgactgaccactccgttagagatcaggatcatccagatgggcaggagaacgatagtacaaaaaacgagatcaaaattgagactgaatcgcagagctcctatatggagacagaggaactgtcgtctaatcaggaagatgctgtcatcgtggagcagccggaagttataccgctgaccgaagatcaggaggagaaggaaggagagaaggcaccaggcgaagacacccctcggatgcccggaaagagtgaggggtcttctgacttggaaaacactcccggtcccgatgtggagatgaattcacaagtggataaagtcaacgatcccactgaaagtcagcaggaggaccagctaatagccggagcccaggacgaagccaaagagcagcgaaatggaaccaaatag

SEQ ID NO: 30438 - DNA, 642 bp, Artificial Sequence
  derived and/or modified sequence
atgaatgagtttttctccgtggacgacaataatgaagaagaggaggacgtggagatgaaagaagattctgatgagaacggaccagaggaaaaacagtccgtggaagagatggaagagcagagccaggacgccgacggggtgaatacggtgaccgtgcctgggccagcttccgaagaggccgtagaggattgcaaggacgaggatttcgccaaagacgaaaacatcaccaaggggggtgaggtgacagatcactcagtaagagaccaagatcatcctgacggtcaggagaacgattccacgaaaaatgaaattaagatcgagaccgagtctcagagctcttatatggagaccgaagaactgtccagcaatcaagaggacgccgtcattgtggagcagcccgaagtcataccactgacagaggaccaagaggagaaggaaggcgaaaaggctcctggagaggatacaccgagaatgcccggtaagtccgagggctcttccgacctggaaaacacaccgggtcccgacgtcgagatgaatagccaggtggacaaggtgaacgatccaaccgagagtcagcaagaagatcaattaattgccggagcccaagatgaggccaaggagcaaaggaatggaacgaagtag

SEQ ID NO: 30439 - DNA, 642 bp, Artificial Sequence
  derived and/or modified sequence
atgaacgagttcttcagcgtggacgacaacaacgaggaggaggaggacgtggagatgaaggaggacagcgacgagaacggccccgaggagaagcagagcgtggaggagatggaggagcagagccaggacgccgacggcgtgaacaccgtgaccgtgcccggccccgccagcgaggaggccgtggaggactgcaaggacgaggacttcgccaaggacgagaacatcaccaagggcggcgaggtgaccgaccacagcgtgagagaccaggaccaccccgacggccaggagaacgacagcaccaagaacgagatcaagatcgagaccgagagccagagcagctacatggagaccgaggagctgagcagcaaccaggaggacgccgtgatcgtggagcagcccgaggtgatccccctgaccgaggaccaggaggagaaggagggcgagaaggcccccggcgaggacacccccagaatgcccggcaagagcgagggcagcagcgacctggagaacacccccggccccgacgtggagatgaacagccaggtggacaaggtgaacgaccccaccgagagccagcaggaggaccagctgatcgccggcgcccaggacgaggccaaggagcagagaaacggcaccaagtag

SEQ ID NO: 30440 - protein, 1075 aa, Artificial Sequence
  derived and/or modified sequence
MSSQTKFKKDKEIIAEYEAQIKEIRTQLVEQFKCLEQQSESRLQLLQDLQEFFRRKAEIELEYSRSLEKLAERFSSKIRSSREHQFKKDQYLLSPVNCWYLVLHQTRRESRDHATLNDIFMNNVIVRLSQISEDVIRLFKKSKEIGLQMHEELLKVTNELYTVMKTYHMYHAESISAESKLKEAEKQEEKQFNKSGDLSMNLLRHEDRPQRRSSVKKIEKMKEKRQAKYSENKLKCTKARNDYLLNLAATNAAISKYYIHDVSDLIDCCDLGFHASLARTFRTYLSAEYNLETSRHEGLDVIENAVDNLDSRSDKHTVMDMCNQVFCPPLKFEFQPHMGDEVCQVSAQQPVQTELLMRYHQLQSRLATLKIENEEVRKTLDATMQTLQDMLTVEDFDVSDAFQHSRSTESVKSAASETYMSKINIAKRRANQQETEMFYFTKFKEYVNGSNLITKLQAKHDLLKQTLGEGERAECGTTRGRRNARTRNQDSGQAIPLVVESCIRYINLYGLQQQGIFRVPGSQVEVNDIKNSFERGEDPLVDDQNERDINSVAGVLKLYFRGLENPLFPKERFQDLISTIKLENPAERVHQIQQILVTLPRVVIVVMRYLFAFLNHLSQYSDENMMDPYNLAICFGPTLMHIPDGQDPVSCQAHINEVIKTIIIHHEAIFPSPRELEGPVYEKCMAGGEEYCDSPHSEPGAIDEVDHDNGTEPHTSDEEVEQIEAIAKFDYMGRSPRELSFKKGASLLLYHRASEDWWEGRHNGVDGLIPHQYIVVQDMDDAFSDSLSQKADSEASSGPLLDDKASSKNDLQSPTEHISDYGFGGVMGRVRLRSDGAAIPRRRSGGDTHSPPRGLGPSIDTPPRAAACPSSPHKIPLTRGRIESPEKRRMATFGSAGSINYPDKKALSEGHSMRSTCGSTRHSSLGDHKSLEAEALAEDIEKTMSTALHELRELERQNTVKQAPDVVLDTLEPLKNPPGPVSSEPASPLHTIVIRDPDAAMRRSSSSSTEMMTTFKPALSARLAGAQLRPPPMRPVRPVVQHRSSSSSSSGVGSPAVTPTEKMFPNSSADKSGTM

SEQ ID NO: 30441 - DNA, 3228 bp, Artificial Sequence
  derived and/or modified sequence
atgtctagtcagacgaagtttaaaaaggacaaagaaatcatagcagagtatgaagcccagatcaaggagatccggacacagctggtggagcagtttaaatgcctggagcagcaatccgaaagtaggctgcagctactacaggacctgcaagagttctttaggaggaaagcagaaatcgaactcgagtactcacggagcttggagaaactggccgagcgcttttccagcaaaattcgctccagtagggagcaccagtttaagaaggatcaatatcttctgtcacctgtcaactgctggtacctggttctgcaccagactagaagagaaagcagggatcacgctactctgaacgatatttttatgaataatgttatcgtcaggctatcgcaaattagcgaagatgtcattagactgttcaagaagtcaaaggaaatcgggcttcagatgcacgaggaactgctgaaagtgactaacgagctttacacagttatgaagacttaccacatgtaccacgctgaaagtataagcgcagagtcaaagttgaaggaggctgaaaagcaggaagaaaagcagttcaataaatcaggagatctctctatgaatctgcttcggcacgaggataggccccagaggcggtcttcagtgaagaagatcgaaaagatgaaggaaaagcgccaagccaaatacagcgaaaacaaactaaagtgtacgaaagctagaaatgattaccttcttaatttggcagccacaaatgcagcgattagcaaatactacatccacgacgtgtccgatctcattgactgctgcgatctgggcttccacgcatcgctggcgcgcaccttccgtacatacctcagcgccgaatacaacctggagacctctaggcatgagggtttggatgtgattgaaaatgctgttgataatttggactcccgcagcgacaaacacacagtaatggacatgtgtaatcaggtgttttgcccgccccttaaattcgagtttcagcctcacatgggggacgaggtttgccaggtgtcagcacagcagcctgtccaaaccgaactccttatgcggtaccatcagcttcagtcacgcctcgccaccttgaagattgagaatgaagaggtacgcaagaccttagatgctaccatgcaaacattgcaggatatgctgactgttgaggactttgatgtgtcggacgcctttcagcactcgcggtcaacagaaagcgtgaagtccgcggcttcggaaacttatatgtccaaaattaacattgctaagagacgtgctaatcagcaggagaccgagatgttttacttcactaaattcaaagagtatgtgaacgggtccaacctcatcacaaagctgcaggcaaaacatgatcttctcaagcagacacttggagagggagaacgcgcggaatgtgggacgacccggggcaggcgaaatgcacgaaccagaaatcaggactcggggcaagctatcccattagtcgtggaatcttgtataaggtacattaacctttatggccttcagcaacaggggatcttccgtgtccccggctcacaggtggaagttaacgacattaagaatagcttcgaacgcggcgaggatcctctagtggacgatcagaatgagagggatattaactcagtcgccggcgtgctcaagctgtattttcgtggtctggagaaccccctcttccctaaagagcggttccaggacctaatcagcacgattaagttggagaatcccgccgagagggtccatcagatccagcagatcctcgtaacacttccccgggttgtgatcgttgtcatgagatacctgtttgcattcctcaaccacctgtcccagtactcagatgaaaatatgatggacccctacaatctggccatctgctttggacctacgctgatgcatattcccgatggacaagaccccgtaagttgtcaagctcatatcaacgaggttattaaaaccattattattcaccacgaagccattttcccgtcacctcgggagctggagggtcccgtgtacgaaaagtgcatggcgggcggagaagaatattgtgattcacctcattcagaacctggcgcgatagacgaagtggaccatgataacggcacagagccgcatacctccgacgaggaggtcgagcagatagaagctattgctaaattcgactatatggggaggagcccacgggaactcagcttcaagaagggcgccagcttactactatatcaccgtgccagcgaagactggtgggagggccgacataatggtgtggatggattaatccctcaccagtacattgtagttcaggacatggatgacgcattctccgactctctctcccagaaggcagactccgaagcttccagcgggccgttgctcgacgataaggcctcaagcaaaaatgacctccagtctcccacagaacacatatccgattacggcttcgggggggtgatgggccgagtgaggctgcgctctgatggcgctgccatcccaagacgacgatcgggcggagacacccactcccctcctcggggcctcggcccttcaatagacacgccaccccgcgctgccgcatgtccttcctctccgcataaaatccctcttacccgcggtaggattgagagcccagagaaaaggagaatggctactttcggcagcgcgggcagtattaactatccggacaaaaaggccctttccgaaggacactccatgcgctcaacatgtggatcgactcgtcactcatcattaggtgaccacaagagtctggaggctgaagcactggccgaagacattgagaagaccatgtcaaccgcgctccacgagttaagagagctggagcgccaaaacaccgtcaagcaggctccagacgtcgtcctggatacactcgaacccttaaagaaccctccagggcccgtgtccagtgagcctgcttccccactccacacaattgtaatcagagacccagacgcagccatgcggaggtcaagctcatcatccacagagatgatgacaacttttaagcccgccctgagcgcgagactggcgggcgcccagctgcgcccccccccaatgaggcctgttcgccctgttgtgcagcacaggtcgtcaagttcaagtagttcaggcgtcggcagccccgcagtcacccctactgagaaaatgtttccaaactcctccgcagacaaatcaggcactatgtag

SEQ ID NO: 30442 - DNA, 3228 bp, Artificial Sequence
  derived and/or modified sequence
atgagcagccagaccaagttcaagaaggacaaggagatcatcgccgagtatgaggcccagatcaaggagatccgcacccagctggtggagcagttcaagtgcctggagcagcagagcgagagccggctgcagctgctgcaggacctgcaggagttcttccggaggaaggccgagattgagctggagtacagccgcagcctggagaagctggccgagcgcttcagcagcaagatccgcagcagccgggagcaccagttcaagaaggaccagtacctgctgagccctgtgaactgctggtacctggtgctgcaccagacccggcgggagagccgggaccacgccaccctgaatgacatcttcatgaacaacgtgattgtgcggctgagccagatcagtgaagatgtgatccgcctcttcaagaagagcaaggagatcggcctgcagatgcatgaggagctgctgaaggtgaccaatgagctgtacacagtgatgaagacctaccacatgtaccacgccgagagcatctctgctgagagcaagctgaaggaggccgagaagcaggaggagaagcagttcaacaagagcggggacctgtccatgaacctgctgcggcatgaggaccggccccagaggaggagctctgtgaagaagattgagaagatgaaggagaagaggcaggccaagtacagcgagaacaagctgaagtgcaccaaggccagaaatgactacctgctgaacctggccgccaccaatgctgccatcagcaagtactacatccatgatgtgtctgacctgattgactgctgtgacctgggcttccacgccagcctggcccggaccttccgcacctacctgtctgctgagtacaacctggagaccagcagacatgagggcctggatgtgattgaaaatgctgtggacaacctggacagcagaagtgacaagcacacagtgatggacatgtgcaaccaggtgttctgcccccccctgaagtttgagttccagccccacatgggagatgaggtgtgccaggtgtctgcccagcagcctgtgcagacagagctgctgatgagataccaccagctgcagagccggctggccaccctgaagattgaaaatgaggaggtgaggaagaccctggatgccaccatgcagaccctgcaggacatgctgactgtggaggactttgatgtgtctgatgccttccagcacagccgcagcacagagagcgtgaagtctgctgccagcgagacctacatgagcaagatcaacatcgccaagaggcgggccaaccagcaggagacagagatgttctacttcaccaagttcaaggagtatgtgaatggcagcaacctgatcaccaagctgcaggccaagcatgacctgctgaagcagaccctgggggagggggagcgggcagaatgtggcaccacccggggcagaagaaatgcccggaccaggaaccaggacagcggccaggccatccccctggtggtggagagctgcatccgctacatcaacctgtatggcctgcagcagcagggcatcttccgggtgcccggcagccaggtggaggtgaatgacatcaagaacagctttgaaagaggagaggaccccctggtggatgaccagaatgaaagagacatcaacagcgtggccggcgtgctgaagctgtacttccggggcctggagaaccccctcttccccaaggagcgcttccaggacctgatcagcaccatcaagctggagaacccagctgagcgggtgcaccagatccagcagatcctggtgaccctgccccgggtggtgattgtggtgatgagatacctgtttgccttcctgaaccacctgagccagtacagtgatgagaacatgatggacccctacaacctggccatctgcttcggccccaccctgatgcacatcccagatggccaggaccctgtgtcctgccaggcccacatcaatgaggtgatcaagaccatcatcatccaccacgaggccatcttccccagcccccgggagctggagggccctgtgtatgagaagtgcatggccggcggggaggagtactgtgacagcccccacagcgagcccggggccattgatgaggtggaccatgacaatggaacagagccccacaccagtgatgaggaggtggagcagatcgaggccatcgccaagtttgactacatgggccgcagcccccgggagctgtccttcaagaagggggccagcctgctgctgtaccaccgggccagcgaggactggtgggagggccgccacaatggagtggatggcctcatcccccaccagtacatcgtggtgcaggacatggatgatgccttcagtgacagcctgagccagaaggctgacagcgaggccagcagcggccccctgctggatgacaaggccagcagcaagaatgacctgcagagccccacagagcacatcagtgactatggctttggaggagtgatgggccgggtgcggctgcggagtgatggagctgccatcccccggcggcgcagcggcggggacacccacagccccccccggggcctgggccccagcattgacaccccacccagggctgctgcctgccccagcagcccccacaagatccccctgacccggggccgcatcgagagccctgagaagaggaggatggccacctttggatctgctggcagcatcaactacccagacaagaaggccctgtctgagggccacagcatgaggagcacctgtggcagcaccaggcacagcagcctgggggaccacaagagcctggaggccgaggccctggccgaggacatcgagaagaccatgagcacagccctgcacgagctgcgggagctggagcggcagaacacagtgaagcaggccccagatgtggtgctggacaccctggagcccctgaagaaccccccaggccctgtgtcctctgagcccgccagccccctgcacaccatcgtcatccgggaccctgatgctgccatgaggaggagcagcagcagcagcacagagatgatgaccaccttcaagccagccctgagcgcccggctggccggggcccagctgcggcccccacccatgaggcctgtgcggcctgtggtgcagcacaggagcagcagcagcagcagcagcggcgtgggcagccctgctgtgacccccacagagaagatgttccccaacagcagcgctgacaagagcggcaccatgtag

SEQ ID NO: 30443 - DNA, 3228 bp, Artificial Sequence
  derived and/or modified sequence
atgagcagccagaccaagttcaagaaggacaaggagatcatcgccgagtacgaggcgcagattaaggaaataaggactcagctggtggagcagtttaagtgcctggagcagcagagtgaatctcggcttcagctgctgcaagatctgcaggagttctttaggagaaaggctgagatcgagctggagtattcccgcagcctggagaagcttgccgagagatttagcagcaaaatccggtcctcgagagagcaccagtttaaaaaggaccagtacctcttgagtcctgtgaattgctggtacctggttttacatcagacgcggagagaaagccgcgatcatgctactctcaatgacatattcatgaataatgtgattgtgcgcttgtctcagatcagtgaggacgttattcggcttttcaagaaatctaaggagattggcttgcagatgcatgaggaattactgaaggttaccaacgaactgtacaccgtgatgaagacatatcacatgtatcacgccgagtctatttcagctgaatcaaagctcaaagaggcagagaaacaagaggagaagcaatttaacaaaagcggggacctgagtatgaatctgctgaggcatgaagatcgcccccagaggcggtcctctgtgaaaaagattgagaagatgaaagaaaaacggcaggccaaatacagcgagaacaagctcaaatgcacaaaagcacgtaatgactatctcctcaatctggctgcaacaaacgcagccatttctaaatactacatccacgacgtgtcagatttgattgactgctgtgacctcggctttcatgcatctctggccagaacttttagaacctacttgagtgcagagtacaatctggaaacctctcgccatgagggactcgatgttattgaaaatgctgtcgataatttagactcaagatcagataaacatactgtgatggacatgtgcaatcaggtgttttgcccccctctcaaattcgaatttcagccacatatgggagatgaggtctgccaagtttcagctcagcagccggtgcagacggaattgctgatgagataccaccaactgcaaagcagactagccaccctcaaaatcgagaatgaggaggttcgcaagactttagatgctaccatgcagacgctgcaggacatgctgacagtggaagatttcgacgttagcgacgcgttccagcactctcggtcgacggaatcggtaaaaagtgccgccagcgagacatatatgtcaaagatcaatatcgccaagcggcgggctaatcagcaagaaacggagatgttctacttcaccaagttcaaggagtacgttaatgggtctaatcttataacgaaacttcaagccaagcacgacctgttaaaacagactctgggcgagggggagcgggcggagtgcggcacaactagaggacggaggaacgcacggactcgtaatcaggattctggtcaggctatcccccttgtcgtggaatcatgtatcagatatataaatctttatggtttgcagcagcaaggaatcttcagagtcccaggttcccaggtggaggtcaacgacattaaaaacagttttgagcggggtgaggatcccctagtggacgaccagaatgagcgtgacataaactctgttgcaggagttttaaaactgtatttcagggggctggagaaccctctcttccccaaagagcggtttcaggacctcatttccactattaagttagaaaaccctgccgagcgcgtccaccagattcagcagatcctggtgaccctgcccagggtcgtaattgtagtgatgcgctacctgttcgcattcctgaaccatctttcacagtattcagacgagaatatgatggacccttacaacctggccatctgtttcggacctaccctgatgcatatccccgatggccaggatcccgtctcttgccaggcccacatcaatgaagttatcaaaaccattatcattcatcatgaagccattttcccctctccccgtgaattagaggggccagtttacgagaaatgcatggctggaggcgaggagtattgtgactcccctcattctgagcccggtgctatcgacgaagtggaccatgataacggcaccgagccacacacgtccgacgaagaagtcgagcagatcgaggctatagccaaattcgactatatgggccgatcccccagagaactctctttcaagaaaggtgctagccttctgctttaccacagggcatctgaggactggtgggaagggagacacaacggcgtggacggcctgatcccccaccagtacattgtcgtgcaagatatggacgatgcattctctgattctctgagccaaaaagcagactcagaagcatcctccggacctttgctcgatgacaaagcttcaagtaaaaatgatctgcagtcaccaactgaacacatttccgactacgggttcggaggcgtcatgggcagagtacggttgcgcagcgacggcgcagccatcccccggaggaggtcaggtggagacacccactcaccgccaagagggcttggcccctctatagatactcccccccgcgccgccgcctgcccctcatccccccacaaaattccacttacccgggggcgtatagagagccctgagaaaaggcgcatggccacctttggaagcgcgggctccatcaactaccccgacaagaaggctctgtctgaagggcactccatgcgctctacatgcgggtctacgcgccacagcagtctcggtgaccataagagccttgaggccgaagcactggctgaggacattgaaaagacaatgtcaaccgctctgcacgaacttcgtgaattagagcgccaaaacacagtgaagcaggcccctgacgtggtattagatactctggagccacttaagaatcccccaggacctgtcagcagcgagcctgcttccccattgcatacaatcgttattcgggatccagacgctgccatgcggaggtcctccagttccagcactgagatgatgacaacctttaagccggccttgagcgcccgcctcgctggagcacagctccgtccgccacctatgcggccagtgcggccagtggtccagcacaggagctcctcctcttcctcatctggcgttgggagccccgccgttactcccactgagaaaatgtttccgaacagttctgctgacaaatctgggactatgtag

SEQ ID NO: 30444 - DNA, 3228 bp, Artificial Sequence
  derived and/or modified sequence
atgagttctcagaccaaattcaaaaaagataaggagattatcgctgaatatgaggcacagatcaaagagatacggacgcagctagtagaacagtttaaatgtctggaacaacagagtgaatctcgcctgcaattattgcaggaccttcaagaattcttccggcgaaaagctgagatagaactggagtactctagatccctagaaaaactcgccgagcgtttttcatctaagattagaagctcacgcgagcatcaattcaagaaagatcagtatcttctgtctcctgttaactgctggtaccttgtgctccatcagacgcgtagagagtcaagggaccatgccacgctgaatgatatcttcatgaacaatgttattgtcagactctctcagattagcgaggatgtgatcagattgtttaaaaaatcgaaggagataggcctacagatgcatgaagaactgctgaaagtgaccaacgagctctataccgtgatgaaaacctatcacatgtaccacgctgagtccattagcgccgagtccaaacttaaggaggcagaaaaacaggaggaaaagcaatttaataaaagcggcgacctttccatgaacctgctccgccacgaagacagaccgcagagaagatcttccgtgaaaaaaatagagaaaatgaaggagaagcgccaggccaaatattctgaaaataagctcaagtgcaccaaagcccgtaacgattatctacttaacctggctgcaacgaatgccgcaatttcaaagtattacatacacgacgtctccgatctgatcgactgctgcgatctgggatttcatgcttcactagctaggacattcaggacctatctgtccgccgaatacaatctggagacctcacggcacgaaggattggatgtgatcgaaaacgccgtggacaacttggacagccgatcggacaagcacactgtaatggacatgtgtaaccaggtgttctgtcccccattgaaattcgaattccaaccacacatgggagatgaggtatgccaggtcagcgcccagcagccagtccaaaccgagttacttatgcgataccaccagctccagtctaggctagccacgctgaagatcgagaatgaggaggtgcgtaagaccctggacgccaccatgcagaccctgcaggacatgctcactgtggaagactttgacgtttctgatgcctttcagcacagtagatccactgaatccgtaaaatctgcagctagcgagacctatatgagcaagattaacattgcgaagagacgggctaatcagcaggagactgaaatgttttattttactaaattcaaggagtatgtcaacggatctaacctgatcaccaagttacaggcaaagcacgacctgcttaagcagactctcggagagggtgaacgcgcagaatgtggaaccacacgagggaggcggaacgctaggacccggaaccaagatagtggccaggctatcccgctggtggtggagtcttgtattagatatatcaatctctacggactacagcaacaaggcatcttcagggttccgggatcgcaggtggaagtgaacgatatcaagaatagttttgagcgaggcgaggaccccttggttgacgatcaaaacgaacgcgacattaacagcgtggcaggcgtgttgaaactctactttcgcggacttgagaaccccctctttccgaaggagcggtttcaagacctaatatctacaattaaactggagaaccctgcagagagggtccatcaaatccagcaaatcctcgtcacgctccctcgcgtggtcatcgtggttatgagatacttatttgccttcctgaaccatctatcgcagtactccgacgagaatatgatggatccatataacctggcaatttgttttggccctactctgatgcatatcccagacggacaggaccccgtgtcatgtcaggcgcacattaacgaagtcatcaaaaccattatcatccaccatgaagcaatcttccccagccccagagaattagaaggaccagtctatgaaaaatgcatggcagggggtgaagagtattgcgattcgccccatagtgagccaggcgctatcgacgaggtcgatcacgataacggcaccgagccccatacatctgatgaagaggtggaacagatcgaagctatcgccaagttcgactacatgggtcggtcccctcgtgagctctcttttaaaaaaggggcatccctgctcctgtaccatcgcgcttctgaagattggtgggagggcagacacaacggtgtcgacggattaatcccacaccagtatatcgtggtgcaggacatggacgacgccttcagcgactccctgtcacagaaagctgactcagaggcaagctctgggccactacttgatgataaagcctcctctaagaatgacttgcagtcccccaccgaacacatctcagattatgggttcggtggagtcatgggaagagtacgcctgcgaagcgatggggcagcaattcctagacggagatcagggggtgatacccattcaccccctcgaggcctggggccttcaattgacacgccgcctcgcgctgccgcttgcccttcatccccccataaaatcccccttacaagaggtaggatcgagagcccggagaaacgcaggatggccacttttggttctgcgggtagcattaattaccccgataaaaaggcactttccgagggacacagcatgcggtccacttgcgggtctacacgacatagttccctgggagatcacaaaagtttggaggctgaagccctcgctgaggatatcgaaaagaccatgtccactgcccttcacgagttaagggaactggagaggcaaaatacagtcaaacaggcacccgatgtcgtgcttgacacacttgaaccgctcaagaaccctccaggtccagtgagctccgaaccagcatcccctctccacaccatcgtgatcagagatccggacgctgcaatgcgtaggagttcctctagctccacagagatgatgactacattcaagccagcactttccgctcgcttggccggagcccaactgaggccccctccaatgaggcccgtcaggcctgtcgtgcagcaccgctcgagcagtagctccagcagcggggtggggtcccccgctgttacaccaaccgagaagatgtttccgaattcctccgccgacaaaagtggaacaatgtag

SEQ ID NO: 30445 - DNA, 8415 bp, Artificial Sequence
  derived and/or modified sequence
ctgtgctcctagggtgattcttcttttgcaagaggagctgaccagggcaagctactagagccatttctcggcaagtaaagagatttttccttccagaaggagaaggatttttctccctgctctgcagccaagtgaaagagattagtccctaaacctgtgaaatcgaccagagctgtgtgattaccagggcttgagagaggactcgaaaagaaaaggagaaataaatcaaacagcctgtcagttcctttggccacgtcagaagatgtcatctcaaactaagttcaagaaagacaaagagatcattgctgaatatgaagcccaaataaaagagatccgcacgcagctggtggagcagttcaaatgtctggagcagcaatcagagtcgcgactgcagctgcttcaagacctccaggagtttttccgccggaaagctgagattgagctcgagtactcccgcagcctggagaagctggctgagcgcttctcctccaaaatccgcagctcccgggagcaccagttcaagaaggaccagtacctcctctcgcctgtgaactgttggtatctggttctgcatcagacccggcgggagagccgagaccatgccaccctcaatgacatcttcatgaacaatgtcatcgtccgcctctcccagatcagtgaggatgtcatcagactcttcaaaaagagcaaggagattggcctgcagatgcacgaggagctcctgaaggtgaccaatgagctctacacagtcatgaaaacctaccacatgtaccatgcagagagcatcagtgcggaaagcaagctgaaggaggctgagaagcaggaggagaagcagttcaataagtcaggagacctcagcatgaacctgctccggcacgaggaccggccccagcgccgcagctctgtgaagaagattgagaagatgaaggagaagaggcaggccaagtactctgagaacaagctgaaatgcacaaaggcccggaatgactacttgctcaatctggcagccaccaacgcagctataagcaaatactacatccatgatgtctctgatctgatcgattgctgtgatttgggcttccatgccagcctggcccgcaccttccggacctatctctcagctgaatacaacctggagacctctcgccacgaagggctggatgtcattgagaatgcagtggacaacctggattcccgaagtgacaagcacacagtcatggacatgtgcaatcaagtcttctgccctccactcaagttcgagttccagccccacatgggggatgaggtctgccaggtcagcgctcagcagcccgtccagacagaactgctcatgcgttatcaccagctgcagtccagactggccaccctcaagatagagaatgaggaggttaggaaaaccctggatgccaccatgcagacattacaggacatgctgactgtggaggactttgatgtctccgatgccttccaacacagtcgatcgacagagtccgtcaagtcggctgcctctgagacctacatgagcaagatcaacattgccaagaggagagccaaccagcaggaaacagaaatgttttattttacaaaatttaaagagtatgtgaatggcagtaacctcatcaccaagctgcaggccaagcacgatttactcaagcagaccctgggcgaaggggaaagagcagaatgcggcaccaccagaggaagaagaaatgctcgaaccaggaaccaggattcaggacaagctataccgcttgtagtcgagagctgcatccgttacatcaatttatatggactccagcagcaggggatcttcagagtgccaggatctcaggtggaagtcaatgacatcaaaaattcctttgagagaggtgaagacccccttgtggacgatcaaaatgaacgagatatcaattcagtcgctggtgttttaaaactgtatttccgaggactggaaaacccactctttcctaaggaaaggtttcaagatttgatatctactattaaactggagaacccagccgagagggtgcaccagatccaacaaatcctcgtcacccttccccgcgtggtcattgtggtcatgagatacctcttcgctttcctcaaccacctctcccagtatagcgacgagaacatgatggatccctacaacctggccatctgcttcgggcctaccctcatgcacatccctgatgggcaggaccctgtgtcctgccaggcacacatcaatgaagtcatcaaaaccatcatcatccatcatgaagccatcttccccagcccccgggagctagagggacctgtgtatgaaaaatgcatggctggaggggaagaatattgtgacagcccacacagcgagccaggggccatcgatgaagttgaccatgacaatggcactgagcctcataccagcgatgaagaagtggagcagatcgaggctattgccaagtttgactacatggggcggtccccgcgtgagctatccttcaagaagggggcctcgctgctcctgtaccaccgcgcctcggaggactggtgggagggccggcacaacggcgtggatggactcatcccccatcagtacatagttgtacaggacatggatgatgccttctccgacagcctgagccagaaggctgacagcgaggccagcagtgggccattgctggatgacaaggcctcttccaaaaacgacctccagtcccccacggagcacatctcggattacggctttgggggggtgatgggccgagtgcggttacgatctgatggagcagccatccccagacgccgaagcgggggcgacacacacagcccgccccggggcctgggccccagcatagacacaccaccccgggctgctgcctgccccagcagcccccacaaaatccccctcacccgggggaggatcgagagccctgagaagcggaggatggcgacgttcgggagcgctggcagcatcaactaccctgacaagaaggcgctctccgaagggcactcgatgaggtcgacctgcggttccaccaggcacagcagcctaggggaccacaagtccctggaggccgaggccctggcagaagacatcgagaagaccatgagcacggctctgcacgagttgcgggaactcgagaggcagaacacggtcaagcaggcgccagatgtggtgctggacaccctggagcccctgaagaacccgccaggccccgtcagctcggagcccgccagtccccttcacaccatcgtcatccgcgaccccgatgccgccatgcgccgcagcagcagctcctccaccgagatgatgaccaccttcaagccagccctgtccgcccgcctggctggcgcccagctccgcccgccccccatgcggcccgtgcggccggtggtccagcaccggtccagcagcagcagcagctcgggcgtgggcagcccggccgtgacgcccaccgagaagatgttccccaacagctcagcggacaagtcgggcaccatgtgacctgcaggatgggccgcgccgccgtggcccgctgtggctcaccacggcccagggtggccttggtggcttccacgtgcttcccagtgaccctggccttggagggcagaggtccgtctgggagggtgtgtctgtgcagagctgaggcccgggcgctggctgcagctcacgtccagccatgggaatcccacggacctctcgcgtgtcaacagacgaccagaggagtgctggagctccagcagccccaaccacagcattccctaacatggaggcaaaataccacatggcttctcccgcatatcgtcactggaaacttcctctctcgacattctctctacatacgtatatgtgtgtgtatatcgatgtgtgcatatatacacatgtatacgtatgtacgtgtctgtaggtgtgtgtatatatatatatatttatgcatctatatacatatactagatctggacacacgcatactaagtgtatatagtatctcctttttctttttatgaaacttagatttacctcagatccatgccaccaaacatctcccaccgagttatttggtgggatttgcagggacttttctgggagaacttaaaggcccatagtaactgcgaatgaagcaatataccactaacctgcagaaaaacacaaacaaaaacagactcccactgtctccagaagtcgtggccttccagaacagtctgcccctcaaggaagggtggggcaggcagtacccccaagcaggctgctcccagaggtggggaacccttcataggaaatccccacccccgtccaccccagagaccctgcccttccacccggaggccaaaggccaactgtactcccaaaggcatgggagaaggttggcgagaagacccctgactaccacatccttgtgtttgtgtgtagagacgggggatagtgagaacctaagccccatcgtagcacagtattacatgtggttgggaaaaataaaaatacagtggtgtggaatactccaaaacctagaaatgctgtaggaataaatctgtggtaactatagaggtttaacttatatcattttcaaactatttaattttttcttttcctggttctactaattatactgtgtcagatttggaactaaacaggcaaggaggctttgagtcacatcgttttcattttaaatcaggctgtgatgcactgtggctggtgccgtcttgcatgaaacgcatgagccgtgagcgcccagttcagactggggccagggaggggcagtccttggcactttctgtcctagaggacactgtcagttgagttaatacaagtgacatagcttcccttccctcccccttcacccactccctccagaacatttagtgtagatgaaaatgtggtgatagaaatgggtgcatgatcttcacgtgtgacagccaggcctttgcctcttggccaagtaaagcccttccgggtcgctctccttcgattccattttacctcctcttctgatcacttccagagatgagctgtttctggataatggcacacgggcaaatctgtgtgccctgtgggccgctgttacttaccctctcctgcgagacccaggggcttttccctactgttcccacgcttcctctctctcgaggccactgaagtttggagtcaaaaggcccagagtctgagtcccagccctgagcacttaggagccttctgacttagggtttgtcactccacctcattgagcctgactgttctgctccataaaatagggtaataaaggtcaaacatcagtgagcaagctgtgtacactggaaaacactgaatcaatacaatgcgtttgtgattatcattagtaaggtaagtcttagatcagagccctccagcccttctttttgaaacctcccaatggcatttcagaagtgagcagtggaattttcctgccatcctaataagagccctggattccatcattaacatttcagcccattggatgaagtggtgccctctcctctggtcccccgcgaaaaggtaaatacacccaaagggagggacctagttaagtcactggcacctagataagttaggagggtaaagccactacctcgtctgaaggactggacttgacaccccacagtggaagggagcatcaggagaggaacaaaaaaagggatctcagggagaggccagtgtcaaacttgacctcccttgtttggcctagaatgaacccttctctttagctcctggatatgaaaggccatctgcttggagcacagaaagatattgccattttacagcttaagagagtaaggccttgggctgtgctgtgacctgcccaagatttgacactggctaggagcagaggctgcgtcaggctcttaaagtcatgtgtttgcatgctggatgctatactgtccagccaggacacaagacttctgatttctaccctcaagatactcccagatcctaaatccagtagcctcccaggcaaaatatagcaatctgccacaactgccagatgaaaagcaacaatcagagtagaaaaatctgttgcctgatatacataacaccaatcagaccgtgtggatttttctctgaattgactgattttgtttttttcttactgaaaatggacctgcctttcactgaattttctgagggcagagtcttagctgttttctttaagcaccttttttttttttttccattgggaaatggctgatgagttcacatttagggatgtacacacacagatggcagacgtctccccactcatccagccccagatctgagccttgacgcaggccaagtggaaaaatactttcccgcccccctcccctgttcccacttcctcatctggcactatgcatgtctcactcaccctccacagcactcagtcccatcgacgttcactgaacattggctttctctttctgactcctgcctgttttagtccactatatattgctgtatttgcttaaatgctggaaagtaactgttaaaatgtgaaattgtaatttttaaaaaggctacaattaaattttagccaatgccactcaccaaatctttgcacctagtagatagatcaatgtaaaaacaaatacctaactgtacagtgagtgtgggggaaatgtagtaacctagttagtagtcttcaatataaccaattgtacaaggggaagtggtgtttacctacttgttcatcaccattattgaaagccgtactgatcagttagttgacaacgggcatttttttttctttgcttcatggaatgatttcttttcttaaccttcgacttatcctgaggtcaagccttttgtctttatgtgtaaccgacgttcagtctattctaggaatgaaccagcaagttgttcatttaaaactgaccaaagacaattaattcctggtctagtttcctgggccttgtggctcagctgccactaaagagctttttggataaaattgagaacaagctgtgcttcctaccccactctccccgtccccttttattcccttttcctcttaaagagctgctctgagctgtgggattctatgaaaaattcttgcctttccttgtttcagtgctaacgatttctcacctcgaagcgccttttgaaccccggacagagtgcacaatcggagggaattgcgagcttgggaattagactttggagtcttttctctgaagtcaccaggccaggggtcaggagagagatggattcccaagggatgaaaggtttctattcaatgaagaaatcggagtgggaagagacacagggaaattgagccatattttggctatcggctggaaccagcagttcagagatctgccttataaacatttaaaaccggtttgtggtacacaaagaggaaccagtgtgggaaggggcctttatgtggggctttcttctctgttggagtcccttggagtgccttgttgggtatatttctctgtcattcaggaggcacgaatgtggaggacttctcgtgacctggtcgtgatgtggcattcagtgcatgtccacagctaatggaaaaacacgaggactcgggtaatggttcttcctctcagtctttctattcctaacttttcacacatccagatggttccacactagtgcaaatgcctcactctcctgagaaacccagaaagaagagtggctggctcacaaccatggggttagcccctgctgggctgggagtcggggtggcggccaggaggaaaggcagaaaggggtgagccgaggtgttgcctagctgattttctgctgtgcagagctaatgctgacatttcatgtcaacttccccggttctctggggtctcctctcctctgagcagccacatagaacattccccacatatccaaagctgcccaggggagccgagagaagggactttgctgtcaggtccaagccctcctgacctccctgagattgatctgccagtgtcctgctgtccctctgggactggccacatggccatcgctgccccttgttgacacctcctttctgtgtgagttgtccccggccaataacaaagctgttccttgaaccagaacaaccagagtgcacttttccttccttagacggaagtagatcctggctagggtttctgcccaggcccttgttcccggcagtgtgactgtttacatggtttggcaataggtttgattctgattgcttcagagtggctggtctattttgtttcctttggtttccttcctccccaaattgtgacaggaaaaacagaccaaaaccaccctaggaaattgctggttgcctgtccccacgtgatgataaatgttgccctcttctggatatcgtttctctaccttacgaccaaacgcccgtcctatagagtgtctgattggatcctctgtcgcgtattctgatggtgcctgctggtttgacgtggagctatcctgtgaaataaaacagcttaacttttctc

SEQ ID NO: 30446 - DNA, 3228 bp, Artificial Sequence
  derived and/or modified sequence
atgagcagccagaccaagttcaagaaggacaaggagatcatcgccgagtacgaggcccagatcaaggagatcagaacccagctggtggagcagttcaagtgcctggagcagcagagcgagagcagactgcagctgctgcaggacctgcaggagttcttcagaagaaaggccgagatcgagctggagtacagcagaagcctggagaagctggccgagagattcagcagcaagatcagaagcagcagagagcaccagttcaagaaggaccagtacctgctgagccccgtgaactgctggtacctggtgctgcaccagaccagaagagagagcagagaccacgccaccctgaacgacatcttcatgaacaacgtgatcgtgagactgagccagatcagcgaggacgtgatcagactgttcaagaagagcaaggagatcggcctgcagatgcacgaggagctgctgaaggtgaccaacgagctgtacaccgtgatgaagacctaccacatgtaccacgccgagagcatcagcgccgagagcaagctgaaggaggccgagaagcaggaggagaagcagttcaacaagagcggcgacctgagcatgaacctgctgagacacgaggacagaccccagagaagaagcagcgtgaagaagatcgagaagatgaaggagaagagacaggccaagtacagcgagaacaagctgaagtgcaccaaggccagaaacgactacctgctgaacctggccgccaccaacgccgccatcagcaagtactacatccacgacgtgagcgacctgatcgactgctgcgacctgggcttccacgccagcctggccagaaccttcagaacctacctgagcgccgagtacaacctggagaccagcagacacgagggcctggacgtgatcgagaacgccgtggacaacctggacagcagaagcgacaagcacaccgtgatggacatgtgcaaccaggtgttctgcccccccctgaagttcgagttccagccccacatgggcgacgaggtgtgccaggtgagcgcccagcagcccgtgcagaccgagctgctgatgagataccaccagctgcagagcagactggccaccctgaagatcgagaacgaggaggtgagaaagaccctggacgccaccatgcagaccctgcaggacatgctgaccgtggaggacttcgacgtgagcgacgccttccagcacagcagaagcaccgagagcgtgaagagcgccgccagcgagacctacatgagcaagatcaacatcgccaagagaagagccaaccagcaggagaccgagatgttctacttcaccaagttcaaggagtacgtgaacggcagcaacctgatcaccaagctgcaggccaagcacgacctgctgaagcagaccctgggcgagggcgagagagccgagtgcggcaccaccagaggcagaagaaacgccagaaccagaaaccaggacagcggccaggccatccccctggtggtggagagctgcatcagatacatcaacctgtacggcctgcagcagcagggcatcttcagagtgcccggcagccaggtggaggtgaacgacatcaagaacagcttcgagagaggcgaggaccccctggtggacgaccagaacgagagagacatcaacagcgtggccggcgtgctgaagctgtacttcagaggcctggagaaccccctgttccccaaggagagattccaggacctgatcagcaccatcaagctggagaaccccgccgagagagtgcaccagatccagcagatcctggtgaccctgcccagagtggtgatcgtggtgatgagatacctgttcgccttcctgaaccacctgagccagtacagcgacgagaacatgatggacccctacaacctggccatctgcttcggccccaccctgatgcacatccccgacggccaggaccccgtgagctgccaggcccacatcaacgaggtgatcaagaccatcatcatccaccacgaggccatcttccccagccccagagagctggagggccccgtgtacgagaagtgcatggccggcggcgaggagtactgcgacagcccccacagcgagcccggcgccatcgacgaggtggaccacgacaacggcaccgagccccacaccagcgacgaggaggtggagcagatcgaggccatcgccaagttcgactacatgggcagaagccccagagagctgagcttcaagaagggcgccagcctgctgctgtaccacagagccagcgaggactggtgggagggcagacacaacggcgtggacggcctgatcccccaccagtacatcgtggtgcaggacatggacgacgccttcagcgacagcctgagccagaaggccgacagcgaggccagcagcggccccctgctggacgacaaggccagcagcaagaacgacctgcagagccccaccgagcacatcagcgactacggcttcggcggcgtgatgggcagagtgagactgagaagcgacggcgccgccatccccagaagaagaagcggcggcgacacccacagcccccccagaggcctgggccccagcatcgacaccccccccagagccgccgcctgccccagcagcccccacaagatccccctgaccagaggcagaatcgagagccccgagaagagaagaatggccaccttcggcagcgccggcagcatcaactaccccgacaagaaggccctgagcgagggccacagcatgagaagcacctgcggcagcaccagacacagcagcctgggcgaccacaagagcctggaggccgaggccctggccgaggacatcgagaagaccatgagcaccgccctgcacgagctgagagagctggagagacagaacaccgtgaagcaggcccccgacgtggtgctggacaccctggagcccctgaagaacccccccggccccgtgagcagcgagcccgccagccccctgcacaccatcgtgatcagagaccccgacgccgccatgagaagaagcagcagcagcagcaccgagatgatgaccaccttcaagcccgccctgagcgccagactggccggcgcccagctgagacccccccccatgagacccgtgagacccgtggtgcagcacagaagcagcagcagcagcagcagcggcgtgggcagccccgccgtgacccccaccgagaagatgttccccaacagcagcgccgacaagagcggcaccatgtag

SEQ ID NO: 30447 - protein, 130 aa, Artificial Sequence
  derived and/or modified sequence
MTFTTFDLGGHVQARRVWKNYLPAINGIVFLVDCADHERLLESKEELDSLMTDETIANVPILILGNKIDRPEAISEERLREMFGLYGQTTGKGSISLKELNARPLEVFMCSVLKRQGYGEGFRWMAQYID

SEQ ID NO: 30448 - protein, 198 aa, Artificial Sequence
  derived and/or modified sequence
MSFIFDWIYSGFSSVLQFLGLYKKTGKLVFLGLDNAGKTTLLHMLKDDRLGQHVPTLHPTSEELTIAGMTFTTFDLGGHVQARRVWKNYLPAINGIVFLVDCADHERLLESKEELDSLMTDETIANVPILILGNKIDRPEAISEERLREMFGLYGQTTGKGSISLKELNARPLEVFMCSVLKRQGYGEGFRWMAQYID

SEQ ID NO: 30449 - protein, 103 aa, Artificial Sequence
  derived and/or modified sequence
MSFIFDWIYSGFSSVLQFLGLYKKTGKLVFLGLDNAGKTTLLHMLKDDRLGQHVPTLHPTSEELTIAGMTFTTFDLGGHVQARRVWKNYLPAINGIVFLVDCA

SEQ ID NO: 30450 - protein, 170 aa, Artificial Sequence
  derived and/or modified sequence
MSFIFDWIYSGFSSVLQFLGLYKKTGKLVFLGLDNAGKTTLLHMLKDDRLGQHVPTLHPTSEELTIAGMTFTTFDLGGHVQARRVWKNYLPAINGIVFLVDCADHERLLESKEELDSLMTDETIANVPILILGNKIDRPEAISEERLREMFGLYGQTTGKGSISLKELNA

SEQ ID NO: 30451 - DNA, 393 bp, Artificial Sequence
  derived and/or modified sequence
atgacattcactactttcgacttaggggggcacgtccaggccaggagagtgtggaaaaattacctgccggctattaatggcattgtgttccttgttgattgtgccgaccacgaaagactgttagagtccaaggaggagctagattctttgatgacagatgagaccatcgccaacgtacctatattgatcctgggcaacaagattgacagacccgaggcaatctcagaggagcggctgagagagatgtttggcttgtacggtcagactaccggcaagggcagcatttcccttaaggagttgaatgcgagaccccttgaggtttttatgtgcagtgtgctgaagcgacaaggctatggggaaggatttcggtggatggcccagtacatcgattag

SEQ ID NO: 30452 - DNA, 597 bp, Artificial Sequence
  derived and/or modified sequence
atgagttttatattcgattggatatactcagggttttcctcagtgttacagtttctcgggctgtacaaaaagacgggtaagttagtctttctgggccttgacaatgccggaaagacaactctcttacacatgctgaaagatgataggctgggccaacacgtgccaaccttgcaccccacttctgaggagttgaccattgccggcatgacattcacaaccttcgacttaggtgggcacgtccaggccaggcgcgtgtggaagaattatctcccggctattaatggaattgtttttctcgtggattgcgctgatcacgagcgcctgttggaatctaaagaggagcttgatagcctgatgaccgacgagaccattgcaaacgtgcccatcctgatcctggggaataaaatagaccgcccagaagcgattagtgaagagcggcttcgcgagatgttcggattgtatggacaaaccacaggaaagggctccatttctctcaaggaattaaatgcacgccccctggaagtcttcatgtgctctgtgctgaaacggcagggctatggggagggctttcggtggatggcacaatacattgattag

SEQ ID NO: 30453 - DNA, 597 bp, Artificial Sequence
  derived and/or modified sequence
atgtctttcatctttgactggatctacagcggcttctcgtctgtcttgcagtttcttgggctttataagaaaaccggaaagctagtgtttctgggtttggataacgccggaaagacaaccctcctccacatgctcaaagacgaccgactgggacaacacgtccccaccctccaccctacaagcgaggaattgaccatcgccggaatgacgttcacgacgttcgacctcggaggacacgtgcaggcccgacgggtgtggaagaactacctcccagccattaacgggatcgttttcctggtcgactgtgctgatcatgagcggctgcttgaaagtaaagaagagctcgacagcctgatgactgacgagaccatagccaatgtgccaatactgatactgggtaataagatcgatagacccgaagcaatcagcgaagaacggctccgcgagatgtttggactgtacggccaaaccacaggaaaggggagcatttccttaaaggaattgaacgccaggccattggaggtgttcatgtgctccgttctgaaacgccagggctacggggaaggattcaggtggatggctcagtatatcgactag

SEQ ID NO: 30454 - DNA, 312 bp, Artificial Sequence
  derived and/or modified sequence
atgtcattcatcttcgattggatctatagtgggttcagtagcgtcctgcagtttttggggttatacaaaaagaccggcaaactggtgtttcttggccttgataacgctggcaagaccaccctgctccatatgctgaaggacgacaggctgggccagcatgtccctacactgcaccccacatcagaggaacttaccatcgccggcatgaccttcacaaccttcgatttgggggggcacgttcaagctaggagggtttggaaaaactacctaccagcaatcaatggcatcgtgtttcttgtggattgcgcctag

SEQ ID NO: 30455 - DNA, 393 bp, Artificial Sequence
  derived and/or modified sequence
atgacgttcacaacctttgatttaggggggcatgttcaggcccgccgcgtttggaagaactaccttccggcgataaacggtattgtgttcttagtggactgcgccgaccatgaaaggttgctcgagtcaaaggaggaattggactctctgatgacagacgagactatcgccaatgtacctatcctgattcttggcaacaagatcgaccggccagaggcaatctcagaagaacgtctgcgggaaatgtttggactgtatggtcaaaccacaggcaaagggtccatcagtcttaaggagctaaacgccaggccattggaagttttcatgtgtagcgtcctgaagagacagggatacggcgagggatttcgatggatggcacagtatatcgactag

SEQ ID NO: 30456 - DNA, 513 bp, Artificial Sequence
  derived and/or modified sequence
atgtccttcatctttgactggatatactccggattctccagtgtcttgcaattcctcggtttgtataagaaaacaggaaagttagtgttcctaggcctcgacaatgcaggtaaaaccacactgctgcacatgttaaaagacgatagattaggccagcacgtgcctactcttcatcccacctctgaggaattgaccattgctggaatgaccttcaccacgttcgacctgggcgggcatgtgcaggcgaggcgcgtatggaaaaattacctgcctgctataaacgggatcgttttcctggttgactgcgccgatcacgagagactccttgaaagtaaggaggaacttgattctttgatgacagacgagaccatcgccaacgtcccgattctgatactcggtaacaaaatcgatagacccgaagctatctcggaggagaggctgagagaaatgttcggactgtatggccagaccactggaaagggctcaatcagcctcaaggagctgaatgcctag

SEQ ID NO: 30457 - DNA, 393 bp, Artificial Sequence
  derived and/or modified sequence
atgacattcaccacatttgacctgggcgggcatgttcaggcccgtagagtatggaaaaattacctaccagcaattaacgggatcgtttttcttgttgactgcgcggaccacgaaaggctgcttgaatctaaagaagagctcgactctttgatgaccgacgaaactattgcaaacgtgccaattctcattctcggaaataaaattgatcgccctgaggcaatctctgaggagagactcagggagatgtttgggttgtacgggcagacaactgggaaaggtagcatcagtcttaaggagctgaacgcaaggcctttggaggtttttatgtgcagcgtattgaaacggcaggggtatggtgaaggtttccggtggatggctcaatacattgattag

SEQ ID NO: 30458 - DNA, 393 bp, Artificial Sequence
  derived and/or modified sequence
atgacatttacgacgtttgatctgggggggcatgtccaggctcgacgggtctggaaaaactatctgcccgctattaacggaatcgtgttccttgtggattgtgccgaccacgaaagactgctggagagcaaggaggagctcgacagtcttatgacagacgagaccatcgccaacgtgcctatcctgatactcggcaataagatcgacaggcccgaggccatctctgaagaacgcctgagagaaatgttcgggctgtacggccaaacgaccgggaaaggatcaatatccctgaaagagctaaatgccagacctctagaggtgtttatgtgctcagtgttaaagcgtcagggatatggagagggttttaggtggatggcacagtacatcgactag

SEQ ID NO: 30459 - DNA, 393 bp, Artificial Sequence
  derived and/or modified sequence
atgaccttcaccacctttgacctgggcggccacgtgcaggccaggagagtgtggaagaactacctgcctgccatcaatggcatcgtgttcctggtggactgtgccgaccacgagcggctgctggagagcaaggaggagctggacagcctgatgacagatgagaccatcgccaacgtgcccatcctgatcctgggcaacaagattgacaggcctgaggccatcagcgaggagcggctgcgggagatgtttggcctgtatggccagaccaccgggaagggcagcatcagcctgaaggagctgaatgcccggcccctggaggtgttcatgtgcagcgtgctgaagaggcagggctacggggagggcttccgctggatggcccagtacattgattag

SEQ ID NO: 30460 - DNA, 597 bp, Artificial Sequence
  derived and/or modified sequence
atgtccttcatctttgactggatctacagcggcttcagctctgtgctgcagttcctgggcctgtacaagaagacaggcaagctggtgttcctgggcctggacaatgctgggaagaccaccctgctgcacatgctgaaggatgaccggctgggccagcacgtgcccaccctgcaccccaccagcgaggagctgaccatcgccggcatgaccttcaccacctttgacctgggcggccacgtgcaggccaggagagtgtggaagaactacctgcctgccatcaatggcatcgtgttcctggtggactgtgccgaccacgagcggctgctggagagcaaggaggagctggacagcctgatgacagatgagaccatcgccaacgtgcccatcctgatcctgggcaacaagattgacaggcctgaggccatcagcgaggagcggctgcgggagatgtttggcctgtatggccagaccaccgggaagggcagcatcagcctgaaggagctgaatgcccggcccctggaggtgttcatgtgcagcgtgctgaagaggcagggctacggggagggcttccgctggatggcccagtacattgattag

SEQ ID NO: 30461 - DNA, 312 bp, Artificial Sequence
  derived and/or modified sequence
atgtccttcatctttgactggatctacagcggcttcagctctgtgctgcagttcctgggcctgtacaagaagacaggcaagctggtgttcctgggcctggacaatgctgggaagaccaccctgctgcacatgctgaaggatgaccggctgggccagcacgtgcccaccctgcaccccaccagcgaggagctgaccatcgccggcatgaccttcaccacctttgacctgggcggccacgtgcaggccaggagagtgtggaagaactacctgcctgccatcaatggcatcgtgttcctggtggactgtgcctag

SEQ ID NO: 30462 - DNA, 513 bp, Artificial Sequence
  derived and/or modified sequence
atgtccttcatctttgactggatctacagcggcttcagctctgtgctgcagttcctgggcctgtacaagaagacaggcaagctggtgttcctgggcctggacaatgctgggaagaccaccctgctgcacatgctgaaggatgaccggctgggccagcacgtgcccaccctgcaccccaccagcgaggagctgaccatcgccggcatgaccttcaccacctttgacctgggcggccacgtgcaggccaggagagtgtggaagaactacctgcctgccatcaatggcatcgtgttcctggtggactgtgccgaccacgagcggctgctggagagcaaggaggagctggacagcctgatgacagatgagaccatcgccaacgtgcccatcctgatcctgggcaacaagattgacaggcctgaggccatcagcgaggagcggctgcgggagatgtttggcctgtatggccagaccaccgggaagggcagcatcagcctgaaggagctgaatgcctag

SEQ ID NO: 30463 - DNA, 393 bp, Artificial Sequence
  derived and/or modified sequence
atgaccttcaccaccttcgacctgggcggccacgtgcaggcccggagggtatggaaaaactatctgcctgctatcaatggaatcgttttcctggtcgattgtgccgaccacgagcgactactagagtccaaggaagagctggacagtctcatgacagatgagactatcgctaatgtcccgatcctcatcctcgggaataagatcgataggccagaggctatcagcgaggaaagactcagagagatgtttgggctctacggccagacaaccggcaaggggtcaatctccctgaaggagttgaacgcgagacctctggaggtctttatgtgttctgtgctcaagagacagggatatggtgagggctttcgctggatggcacagtatattgattag

SEQ ID NO: 30464 - DNA, 597 bp, Artificial Sequence
  derived and/or modified sequence
atgagcttcatcttcgactggatctacagcggcttcagcagcgtgcttcagttcttgggcctgtacaagaagactggaaaactggtgttcctggggttagacaacgctggtaagaccactctactccacatgctgaaggatgacagactcggccagcacgtccctactctgcacccaacatccgaagaacttaccatcgcaggtatgacattcactacgttcgacctggggggacacgtacaggcccgcagggtgtggaaaaattatcttccggccatcaacggcatcgtgttccttgtggactgcgcagaccacgaaaggctgcttgaatctaaagaggaactggactcactcatgactgatgaaacaattgccaatgtccccatcctcatcctcggcaacaagattgatcgtcctgaggccatctccgaggagaggctgagagagatgttcggactctatgggcagactaccggtaagggatccatatccctgaaggaattgaacgcgcgcccactggaggtctttatgtgcagcgttctgaagcggcagggatacggagaaggatttcggtggatggcccagtacatcgattag

SEQ ID NO: 30465 - DNA, 597 bp, Artificial Sequence
  derived and/or modified sequence
atgagcttcatcttcgactggatctacagcggcttcagcagcgtgctccaatttttgggattgtataagaagacaggtaaactggtgtttctgggactggacaacgccggtaagacaacacttctgcacatgctcaaggatgaccgactgggacagcacgtacctaccttgcaccctacatcagaggagctcactatcgccggcatgactttcaccacatttgatctgggcgggcacgtacaggccagaagggtgtggaagaactacctccctgcaatcaatgggatcgtcttcctggtcgactgcgccgaccatgagcgattgttggaaagtaaggaagagctggatagtttaatgacagacgaaactatcgcaaacgttcccatccttattctgggtaacaaaatcgaccgacctgaggccatatcagaggagcgtcttcgcgaaatgttcggtttatacgggcaaacaactggcaaaggatctatcagccttaaagagttgaatgcgcgaccactggaagtattcatgtgttctgtgctgaagcgtcaggggtatggtgaggggttccgatggatggctcagtacattgattag

SEQ ID NO: 30466 - DNA, 312 bp, Artificial Sequence
  derived and/or modified sequence
atgagcttcatcttcgactggatctacagcggcttcagcagcgtgcttcaatttctaggcctttacaaaaagaccgggaaactggtatttttaggactggacaacgctggtaagaccacccttttgcacatgctgaaagacgaccgcttgggtcaacacgtgcctacactccatccaactagcgaggaattgaccatcgcaggcatgacttttactacatttgatctcgggggccatgtgcaggcacggcgcgtctggaaaaactacctgcccgcaataaatggcattgtattcttggtggattgcgcttag

SEQ ID NO: 30467 - DNA, 393 bp, Artificial Sequence
  derived and/or modified sequence
atgaccttcaccaccttcgacctgggcggccacgtgcaggcccggagagtgtggaagaactacctgccggctattaatggcatcgtcttccttgtggactgcgctgaccacgagcgcctactggagagcaaagaggagctagatagcctgatgactgatgagaccatcgccaacgtccctattctaatcctgggaaacaagatagaccgacctgaggccattagcgaagaaaggcttagagagatgtttggactgtacggacaaactactgggaagggctccatttctctcaaggagcttaacgccagacccctggaggtgttcatgtgttcagtgctgaagcgacaggggtatggtgaaggctttagatggatggcacagtacatagactag

SEQ ID NO: 30468 - DNA, 513 bp, Artificial Sequence
  derived and/or modified sequence
atgagcttcatcttcgactggatctacagcggcttcagcagcgtgctgcagttccttgggctgtataaaaagaccggaaagctcgtttttcttggcctcgataacgctggcaagaccactctgctgcatatgctcaaagatgatcgtctggggcagcacgtgcccaccttgcatccaacaagcgaggaactcacaatcgctgggatgacgtttactacatttgacctcggtggccacgtgcaggcacgacgcgtgtggaagaattatctccccgcaattaatggcatcgtattcctggtggactgtgccgaccatgagagacttttggagagcaaagaggaactcgactcgctaatgactgatgagacaattgctaatgtgcctatcctgattctgggaaacaaaatcgacaggcccgaagccattagcgaggagaggctacgggagatgtttgggctctatggccagacgactgggaaaggctctatcagcttaaaagaactgaatgcctag

SEQ ID NO: 30469 - DNA, 393 bp, Artificial Sequence
  derived and/or modified sequence
atgaccttcaccaccttcgacctgggcggccacgtgcaggcccggcgtgtgtggaagaattacctgcctgccatcaatgggatcgtattcctcgtagattgtgctgaccacgaaaggctgctcgagagcaaggaagagctggactccctaatgaccgatgaaacgatagcaaatgtgcctatactcatcctcggaaacaaaatagataggcccgaggcgatctccgaagagagattgcgggaaatgtttgggctatatggccaaacaacaggcaagggatcaattagccttaaggagctgaatgccagaccattagaggtgtttatgtgtagcgtgctgaaaagacagggctacggagaaggttttagatggatggcccaatatattgactag

SEQ ID NO: 30470 - DNA, 393 bp, Artificial Sequence
  derived and/or modified sequence
atgaccttcaccaccttcgacctgggcggccacgtgcaggcccggagagtttggaaaaattacctgcctgccattaatggcatagtctttctagtcgactgcgcagatcacgagcggttacttgagagcaaagaggagctcgatagtctcatgaccgatgagacaattgctaacgtgcctatcttgattctcggcaataagatcgaccgccctgaggcgatcagcgaagaaagacttagagagatgtttggcttgtacgggcagacgactgggaagggctcaatcagtctaaaagaattaaatgccaggccacttgaggtgttcatgtgcagcgtgctgaagcggcagggatatggcgaaggattccgatggatggcacagtacatagactag

SEQ ID NO: 30471 - DNA, 393 bp, Artificial Sequence
  derived and/or modified sequence
atgacattcaccactttcgacttgggaggtcatgtgcaagctcggcgtgtatggaaaaattacttacccgctattaatggaatagtgttcctcgtggactgtgccgatcacgagcgactgctcgaatccaaagaagaactggacagcctcatgacagatgaaacaatcgccaatgtacctatcctgatcctgggtaacaagatcgaccgtcccgaggctattagcgaggagaggctccgagagatgttcggcctctacggccagacaacaggcaaagggagcatcagtctgaaagagctgaatgccagacccctggaggtcttcatgtgtagcgtactgaagaggcagggatacggtgagggtttccgatggatggcccagtacattgattag

SEQ ID NO: 30472 - DNA, 597 bp, Artificial Sequence
  derived and/or modified sequence
atgagctttatttttgattggatttacagcggctttagctccgtgctccagtttttaggtctgtacaagaagacagggaagctagtgttcctgggtttagacaacgccggtaaaacgaccctgctgcacatgctaaaggatgaccggctgggtcagcatgtgcccactctccacccgacttccgaggagttgaccatcgctgggatgacatttaccacttttgacctaggcggacatgtgcaggccaggcgggtgtggaagaactatctgcccgcaataaacgggatagtgtttttggtagactgcgcagaccatgaacggctcttagagtccaaagaagagttggattccctgatgaccgacgaaacaatcgcaaatgtgcctattctcattctcggcaacaagatcgaccgcccagaagctattagtgaggaacgcttacgggagatgttcgggttgtacggacagacaaccggcaagggatccatttctctgaaagagttgaacgcaaggccattggaggtgttcatgtgctcagtgctgaaacgtcagggatatggtgagggcttccgctggatggcgcagtatatcgactag

SEQ ID NO: 30473 - DNA, 597 bp, Artificial Sequence
  derived and/or modified sequence
atgagttttattttcgactggatctactccgggtttagctctgtgctgcagtttctcgggctctacaagaaaactgggaaactggtattcctcggtttggataacgcgggtaaaacaaccctgttacacatgctgaaggatgatcggctgggacagcacgtgccaaccctgcacccaacctcagaggagctcaccattgcgggaatgactttcaccacattcgatctggggggacacgttcaggcaaggcgtgtgtggaaaaattacctaccagccatcaacggcatcgtgtttctcgtggactgtgctgaccacgaacggctactggaaagcaaggaagagctggactcactaatgacggacgagacgatagctaacgtccctattcttatccttggcaataagatagaccgcccagaagccattagcgaagagagactccgggaaatgttcggcctctacggccagacaactggtaaaggctctatttcactcaaggaactgaacgccagacccctggaagtctttatgtgctctgtgcttaaaagacagggctacggggaaggctttcggtggatggctcagtacatagactag

SEQ ID NO: 30474 - DNA, 312 bp, Artificial Sequence
  derived and/or modified sequence
atgtctttcattttcgactggatctactcaggcttctcatccgtgctgcagtttctgggactctataagaagaccggaaaattggtttttctgggtttggataacgcgggtaaaacaaccctgctgcacatgctcaaggatgaccgtcttggacagcacgtccctaccctccaccctacatctgaagagctcactatcgctggcatgaccttcactacattcgatcttgggggacatgtccaggcccgtcgggtctggaagaactatctgcccgctatcaacgggatcgtctttctagtggattgtgcctag

SEQ ID NO: 30475 - DNA, 393 bp, Artificial Sequence
  derived and/or modified sequence
atgacatttaccacgttcgacctggggggtcatgtgcaggcacgacgagtctggaaaaattaccttccggctattaacgggattgtgttcttggtggattgcgcggaccacgaaagattgctggagagtaaagaagagttagacagcctcatgacagatgagactatcgcaaacgtgccaatactaattctgggaaacaaaatcgataggcctgaggcaattagtgaggaaagattacgagaaatgtttggattgtacggccaaacaacgggcaaaggctcaatatcactgaaggaattgaatgccagacctctggaggtcttcatgtgctctgttctaaagcgccaaggatacggagaaggatttagatggatggcccagtacatagactag

SEQ ID NO: 30476 - DNA, 513 bp, Artificial Sequence
  derived and/or modified sequence
atgagcttcatttttgattggatctactcgggcttctcatctgtcctgcagttcctcgggctgtacaagaagacaggcaaactagtattcctaggcctcgacaacgccggtaaaactacactcctgcatatgctcaaggatgaccggctaggtcagcacgtgccaacactccacccaactagcgaagagttgaccatcgcaggcatgacattcacaaccttcgatcttggaggccacgttcaggctcgccgtgtgtggaagaattaccttcccgctatcaatgggattgtcttcctggtcgactgtgccgatcacgagaggctgctggagtccaaggaggaactggacagcttaatgactgatgaaaccattgcgaatgtgccaatcctcatactgggaaataagatagatagacctgaagctattagtgaagaacggctacgagaaatgtttggcctctatgggcagactaccggcaaaggtagcattagtctgaaggagctgaatgcctag

SEQ ID NO: 30477 - DNA, 393 bp, Artificial Sequence
  derived and/or modified sequence
atgacctttactacttttgacctgggaggccacgtccaggcaagacgagtctggaagaattatctgcctgccattaacggtatcgtgttcctcgtcgactgcgcagatcatgagcggctgctggagtccaaagaggaactagactcgctgatgacagacgagacaattgccaacgtacctatcctgattctcggcaacaaaatagatagacctgaggcaattagcgaggagagactcagggaaatgtttggattatacgggcagactactggcaagggttcgatcagcctgaaagagctcaatgcacgcccactggaagtctttatgtgcagcgtactcaaaaggcaaggatatggtgaggggttcaggtggatggctcagtacatcgactag

SEQ ID NO: 30478 - DNA, 393 bp, Artificial Sequence
  derived and/or modified sequence
atgacattcacaaccttcgatctgggtggccacgttcaagctcggagggtttggaaaaattacttgccagccataaacggaatcgtgttccttgtggactgtgcggatcacgagaggctcctggaaagtaaagaggaactggatagtctgatgaccgatgaaacgatcgccaacgtacctattctcatcctgggtaataaaattgataggcccgaagctatatcggaggaacgcctgagagaaatgtttggcctttacggccaaacaaccggcaagggctcaatttccctaaaagagttaaacgcgaggccgctcgaagtgttcatgtgttcggtactgaagaggcagggatatggggagggcttcaggtggatggcccagtatattgactag

SEQ ID NO: 30479 - DNA, 2314 bp, Artificial Sequence
  derived and/or modified sequence
gaggtcactctctctatctatgtcgcctcaagcagcagtggcacgcaaaggtcagtcagccctggccaggctgcgccctccccccggacagcactcaccgttggtgtagggagaccccgaggccaaggcggctccgttctgggcctggaggctggctggggcgccgccggaggccggtattcccggctgggacatgatgactgggttggaaggggctggtcggggtcgacaacagcgcacaagaagagagctgaaagaccactgctgaaagcggagggaggaggctaacgacttaagactgaagactgggagaagaggggggggcgcattaagcccgaggcatggcgccgcactctccccaggccaccggcggccacagcctagcctgggagctgaggcttgagagtcgggccggcggggccgcgaacgcccggctagaaggcggcagccaaacctagagagaaggagggaggccctggccggaagtgcctgtcagccgccggccgcgcagccgcaatcaggacacgtggcacttccggctccgggctcgcagcagccgccgccgcgccggcgaactcttctctgccagccgggctgccccgaggccacctgacagctcctggtgccccgaccccgacgaccgtgcccggcctcgccgccacgtcaccgactctcacggccggccggaagtgccgtgtgtcaccgctacggaaattcccgccgttgtgaacgtgacctcgctcgcagagccaggatcgtggggcaatctgagattcagtagccgctttcgtggggtgggactgacagttcctctcctcgggttttgtgaagattacctgagaccatagaagtcatcgtcctctgttgagaccgtaccaccactgggagctggggcggttaatgttcatcgcagtatttcattcacatttcgtcttcgtgtttcagatgtaaattataaggggttttaaaaagaggtggttaaatatgtgtacatgttaatagtgtgatcaagccaagaaggaggcctttgtctttgactggaggactcagaggaattttaattttgaaactcgctgattcacagcatagtcacgctcaagttcattagcacatttaaatggcagttttgtttcctcttctaagagtttacagtaaggaaaaacaacattgctacacatgctaaaagatgacagacttggacaacatgtcccaacattacatcccaatggagtctcgctctgtcacccaggctggagtgcagtggcacgatctcgactcactgcaacctccgcctcccaagttcacaccattctcctgcctcagcttcccgagtagctggaactacagcttccgaagaactgaccattgctggcatgacgtttacaacttttgatctgggtggacatgttcaagctcgaagagtgtggaaaaactaccttcctgctatcaatggcattgtatttctggtggattgtgcagaccacgaaaggctgttagagtcaaaagaagaacttgattcactaatgacagatgaaaccattgctaatgtgcctatactgattcttgggaataagatcgacagacctgaagccatcagtgaagagaggttgcgagagatgtttggtttatatggtcagacaacaggaaaggggagtatatctctgaaagaactgaatgcccgacccttagaagttttcatgtgtagtgtgctcaaaagacaaggttacggagaaggcttccgctggatggcacagtacattgattaacacaaactcacattggttccaggtctcaacgttcaggcttactcagagatttgattgctcaacatgcataacttgaattcaatagacttttgctggttataaaacagatgttttttagattattaatattaaatcaacttaatttgaatgagaattgaaaactgattcaagtaagtttgagtatcacaatgttagctttctaattccataaaagtacttggtttttacagtttataatctgacatcaccccagcgccatttgtaaagagcaactttccagcagtacatttgaagcactttttaacaacatgaaactataaaccatatttaaaagctcatcatgttaaattttttatgtacttttctggaactagtttttaaattttagattatatgtccacctatcttaagtgtacagttaataattagcttattcaatgattgcatgatgccttacagttttcaataactttttttcttatgcaaacgtcatgcaataaaacaaactctaatgtttggcaaaaaaaaaaaaaaaaaaaaaaaaaaaa

SEQ ID NO: 30480 - DNA, 6682 bp, Artificial Sequence
  derived and/or modified sequence
gagaccaggcggctgggagacccaggcggtgttaggggttgcgagcagcctcgctcaactggggaattggcggcaagactgccaggaggcggaacctagggcgctcggcgacgcggtcctgcggactgtcgctagtgaggcacccgccggcccggaaggggctgatgcgaactggggccacggcagccatcgcgctttgcagttcggtctcctggtgtacggccaacgccaagtaggggattgcgttccctccagtcgcagaccctatcagatttggatatgtccttcatatttgattggatttacagtggtttcagcagtgtgctacagtttttaggattatataagaaaactggtaaactggtatttcttggattggataatgcaggaaaaacaacattgctacacatgctaaaagatgacagacttggacaacatgtcccaacattacatcccacttccgaagaactgaccattgctggcatgacgtttacaacttttgatctgggtggacatgttcaagctcgaagagtgtggaaaaactaccttcctgctatcaatggcattgtatttctggtggattgtgcagaccacgaaaggctgttagagtcaaaagaagaacttgattcactaatgacagatgaaaccattgctaatgtgcctatactgattcttgggaataagatcgacagacctgaagccatcagtgaagagaggttgcgagagatgtttggtttatatggtcagacaacaggaaaggggagtatatctctgaaagaactgaatgcccgacccttagaagttttcatgtgtagtgtgctcaaaagacaaggttacggagaaggcttccgctggatggcacagtacattgattaacacaaactcacattggttccaggtctcaacgttcaggcttactcagagatttgattgctcaacatgcataacttgaattcaatagacttttgctggttataaaacagatgttttttagattattaatattaaatcaacttaatttgaatgagaattgaaaactgattcaagtaagtttgagtatcacaatgttagctttctaattccataaaagtacttggtttttacagtttataatctgacatcaccccagcgccatttgtaaagagcaactttccagcagtacatttgaagcactttttaacaacatgaaactataaaccatatttaaaagctcatcatgttaaattttttatgtacttttctggaactagtttttaaattttagattatatgtccacctatcttaagtgtacagttaataattagcttattcaatgattgcatgatgccttacagttttcaataactttttttcttatgcaaacgtcatgcaataaaacaaactctaatgtttggcatccttgttgggcaaatgtttcatttaaatgtgtcttatctagctagtatactctgaaaatttgagtatttaatattaggcatatgaagtggttgttgggaaaggagattccttcagaatatttagaatagcgtttaaggctctcaaggcttaggtatttaccatgagatggttgtggtcagttgcacctgataccatgtatccctgaatcatgtgtatttttattagtaatgcagccactaccattgctgatggggtctgtgtcctagtccctgtgggattggccttctgaagaaaagcacatttatggtacacaaggttgattctcagtttggtaggctctatagttccatcccagctgtctaattctgaagtgctccagtcttattggtgcccaatggggtaatctgtgcctcttccccaaaagcaatgacaggcaccagtgtctccacatttagatatattcccagtctctgtacatttaacagtactctctggggcaagcaataagtaggaccttgtgtgcagtttcattgtagagacatgtatatctgaggaataaaacagcttgttctgtgtcagtctgagatatgtggagattttgttcctatcctatagctcttttgtattctttggcatattttatatcctggtagaagaaaacaagtgcttgtttccaattttcttttttcttatttgctctcaggtagttcttactccatacaacaaagactttttgtttgttgggctttttttttttttttttttttgctctgtttcattttgttttagagacggggtttcaccatgttgtccaggctggtctcaaactcctgacctcaagtgatctgcccgccttggcctcccaaagttctgggattataggcgtgagctaccatgcctgacctgacttttgtttttagatattatgcttgccatgtgatagggcctgcaagcctcattgctaggcttactaagaaaattttagtttttcaaaagcattataatttcctaagaaactgaattctttttttatatgtttgagattcccatcattagtaatataagatgaaaggtaagtgccaaaaatgtatttttaaagaccctcaagtttaagatttatcctgattataagccaagttttatagtatatttaaccaattccatcaagaataattttaatatcaaaaattagtgttttctgtagccattgtccatgtcagagttacagtcctttttgtcattgataatataacctatgaagcagataaggattgaggaatatgactggaaggaattactatttagctaagctgacaaggtcgcttcttaagatgacatttggtttcagtaatctgactattctgttttcactttcatcttctttctaaatgaaaacaaaagtgctccctcccttcctggaaacctcagtaacactatgggaaaagtagaacatgacattgcagcctattgatttcttcttccagataggtttaaagtactccttaagttctgactaaatagaactaagccttattaaaaataactgcctcttgttcatgttatctgtaccttcagggacctgcctttcttcaagtatttcctagagtatctattatgatactgaagaagctaattatttgtgttgtaaatgggtataaatgaaaaaaaaacatactggtttctctagccaggaaaaatgctttctggtgtaatatatcttgctccagaaccctcattctaattgtaacactaggatcaaagaaacaaagtcactttgtggaccacagctaaactgtggatattttcccaaagacataagatttttatggcccgagcctctagaaaggaagccatgtttaggagcaaccagctttcctcccagctttagggggcagagttcctgagccagaggacttactgtccagctttgagaacctctccagagtatatgcactgggtactgctctttttcaagagaaccaaattaagaggatggcaagaaacagtagaagcacagaggaaagacaactctgcatgtgcctgtgtgaatgtgtgcatccatggagtatttcccaggtaaatactagtactggggacataggctaattgtgtgtcccacactgcaagatgctagggcgtagttaacactgtggtatacatacaaatcaggcactgtccaaaagattttttaaaatctaaagtctgaaatgtaaaaatataaggtctcaacccacttttacacttttaaagagatcccatacctgtttcactgactgccgttaattacacttttggatcacagctggttaaattgatagatttcagtttatctcagtgaatttttagaatggagattatagcattttttaattggagaacagacatttcctaaagtatatgaaaaaaaattattcactgttggtttaaaccagtatctttgtatgagtgccaaagatatatgaacacagatactgcctgtgcagacctaaattttagttttgtgtacctggatccatatacaaattttttgtggtttatagcataaaagcagaacgttgtttctttcttagttttcaaccggctcatcttttgtttttgttttttgtttttttgttttttgttttttttgagatggagtcttgctttgttgcccaggctagagtgcagtggcacaatctctgcttactgcaacctccacctccggggttcaagtgattctcctgcctcagcctcctgagtagctgggactacaggcgcgcaccaccatgcccggctaatttttgtatttttagtagagatggggtttcactatgttggccaggctggtctcgaactcctgacctcgtgatctgcccacctcagcctcccaaagtgctgggattacaggcgtgagccgccatgcccggccaattttcaactggcccatactttatagtgatggaaagcgcataaactacttgtaaatcattaaaatagggtgataactgtgataatagtgtttcttgcattctagaaaattattttattaactacattcaaaacccagcatttcacaggttccatcattagaaacagtatagttctagttaacatgattggagagtttcaggggaaaggtttacattttctgaaactgtatttggtatgtgactcaatgtggtatttcagtcttgttagtcacttacatgactgacgtttgcaaggatttattgccaagtaaaatttgaccagagtgcactgagaatagctacataaggggaaatctctcaaaattccttctgttcatttaatttggagcatattgtttaaatcattttaaacatatgtaaaaagttgaagcattaaaaaatcttcaagaaacaatgaaaaaatagaaattagcaaacataagtttcttaatgcaaaattaatagtgaataaaatatagcctacattaaaagccagaggctttgctataaatataagagtttagaaaaacagtgtgcttcaattaaggactaaattatcaaaactgcatgtttgttttttcttttcttttcttttttttttgagatgaagtctcactctgttgcccaggctggagtgcagtggtgcgatcttggctcactgcaacctctgcttcccaggttcaagcgattctcgtgcctcaccatcccgagtagctgggattacaggtgcaccacaccatgcccagttaatttttgtatttttagtagagacagggtttcattatttggccaggctggtctcgagctcctgatcttaagtgatccactcgcctcggcctcccaaagtgctgggattatacacatgagccactgtgcccagcctaaaactacatgttgaagcttccggtcatttccattattatccttcttttgaaattcaagttagtgctttttaaccaaataaaagaagaaccagctcttgggatatgtgactctgcctctgtataaagtgactggaattttgttaaaaccgtgtttccacttctgaaccctgttaccattccccctcacaaatccccacccaacacctggattttaaagatcctccagtgtcaagggaagccacagagtctattaaagaggcagttctgaaccaattaatttttgtccttataatttagagcattaaatagctaatatatttaatggcactaattgttgttcacggctttcatcatacttttaaacagaatccaaagtattcaaaggaaagtaagcgaagttatccaaagccaactttgtttcaggtgtgtcccctgccccaaatagattttagggcagaaatagaaaactgagtttacacagaactatttttggaaaagctgcactggagtagatggattcttcttcagcatacttttttgtttgtttgtttgagatggagtcttgctttgtcacccaggctggagtgcagtggtgtgatctccactcactgcaacctccacctcccagcttcaagtgattctcctgcctcaaccttccaagtagcttggattacaggcgtgcgccaccacagctggctaatatttgtattgttagtagagacagggtttcaccatgttgtccaggcttgtcgaacttctgacctcacgtgatccacctgcctcagcctcccaaagtgctagattataggcgtgaaccactgcgcccggccagcatgcattttaaaagtggcttagatttagttttaaatattttggggtgaaaggcaggaacagttctgtttttgacatacaggttttctttgggattgttttcattttcaagtatagattcatgtcagaatggccaacttaacgtgggtttctgtattccctggtgttgctcttaacctgaactcataatcagttgccatactgaggcaagagcactcagggtgaacatagtcaagttactttaaaagtgataaaagtgtttttccatggtgaaaccttcagtatttggctgaatgtaaagtatgttgaagtggtatattgatggtaagttgttaatcactaaccttgtttgcacttttgtacaccactgcttgcactaggatcttggtgtgaattttcaattgttttacagtgtatacagattattaaggataatttatataaagatgtttctgtttaactttgtgtgttttacaacaaagagctataatagatggttaaacgtttttgaattgtgtttatatgttagtttgattatgttctattatcttttcacctgccatgaatttgagtgttaggaagggaaaaataaaatactaatctggtcttgaagaactcta

SEQ ID NO: 30481 - DNA, 929 bp, Artificial Sequence
  derived and/or modified sequence
gtgtacggccaacgccaagtaggggattgcgttccctccagtcgcagagtttccctcttgtcgcccaggctggagtgaagtggcacgatctcggcttactgcaagctccgcctcccgggttcacgccattctcctgcctcagcctcccgagtagctgggactacagaccctatcagatttggatatgtccttcatatttgattggatttacagtggtttcagcagtgtgctacagtttttaggattatataagaaaactggtaaactggtatttcttggattggataatgcaggaaaaacaacattgctacacatgctaaaagatgacagacttggacaacatgtcccaacattacatcccacttccgaagaactgaccattgctggcatgacgtttacaacttttgatctgggtggacatgttcaagctcgaagagtgtggaaaaactaccttcctgctatcaatggcattgtatttctggtggattgtgcagaccacgaaaggctgttagagtcaaaagaagaacttgattcactaatgacagatgaaaccattgctaatgtgcctatactgattcttgggaataagatcgacagacctgaagccatcagtgaagagaggttgcgagagatgtttggtttatatggtcagacaacaggaaaggggagtatatctctgaaagaactgaatgcccgacccttagaagttttcatgtgtagtgtgctcaaaagacaaggttacggagaaggcttccgctggatggcacagtacattgattaacacaaactcacattggttccaggtctcaacgttcaggcttactcagagatttgattgctcaacatgcataacttgaattcaatagacttttgctggttataaaacagatgttttttagattattaatattaaatcaacttaatttgaa

SEQ ID NO: 30482 - DNA, 548 bp, Artificial Sequence
  derived and/or modified sequence
gatgcgaactggggccacggcagccatcgcgctttgcagttcggtctcctggtgtacggccaacgccaagtaggggattgcgttccctccagtcgcagacagagtttccctcttgtcgcccaggctggagtgaagtggcacgatctcggcttactgcaagctccgcctcccgggttcacgccattctcctgcctcagcctcccgagtagctgggactacagaccctatcagatttggatatgtccttcatatttgattggatttacagtggtttcagcagtgtgctacagtttttaggattatataagaaaactggtaaactggtatttcttggattggataatgcaggaaaaacaacattgctacacatgctaaaagatgacagacttggacaacatgtcccaacattacatcccacttccgaagaactgaccattgctggcatgacgtttacaacttttgatctgggtggacatgttcaagctcgaagagtgtggaaaaactaccttcctgctatcaatggcattgtatttctggtggattgtgca

SEQ ID NO: 30483 - DNA, 708 bp, Artificial Sequence
  derived and/or modified sequence
tgctgagaaaggtaaaaacaccttcaaataaggaagaggaacaggctatgacctaatgcttgcttggaccagtgtaacttccgaagaactgaccattgctggcatgacgtttacaacttttgatctgggtggacatgttcaagctcgaagagtgtggaaaaactaccttcctgctatcaatggcattgtatttctggtggattgtgcagaccacgaaaggctgttagagtcaaaagaagaacttgattcactaatgacagatgaaaccattgctaatgtgcctatactgattcttgggaataagatcgacagacctgaagccatcagtgaagagaggttgcgagagatgtttggtttatatggtcagacaacaggaaaggggagtatatctctgaaagaactgaatgcccgacccttagaagttttcatgtgtagtgtgctcaaaagacaaggttacggagaaggcttccgctggatggcacagtacattgattaacacaaactcacattggttccaggtctcaacgttcaggcttactcagagatttgattgctcaacatgcataacttgaattcaatagacttttgctggttataaaacagatgttttttagattattaatattaaatcaacttaatttgaatgagaattgaaaactgattcaagtaagtttgagtatcacaatgttagctttctaattccataaa

SEQ ID NO: 30484 - DNA, 670 bp, Artificial Sequence
  derived and/or modified sequence
cggccaacgccaagtaggggattgcgttccctccagtcgcaggcttttcaccattctttagctctcacctaccaacaatcatcttcagtgaggactttgccacttgattcacagtctgtatcagtgccctccagtcttccagaccctatcagatttggatatgtccttcatatttgattggatttacagtggtttcagcagtgtgctacagtttttaggattatataagaaaactggtaaactggtatttcttggattggataatgcaggaaaaacaacattgctacacatgctaaaagatgacagacttggacaacatgtcccaacattacatcccacttccgaagaactgaccattgctggcatgacgtttacaacttttgatctgggtggacatgttcaagctcgaagagtgtggaaaaactaccttcctgctatcaatggcattgtatttctggtggattgtgcagaccacgaaaggctgttagagtcaaaagaagaacttgattcactaatgacagatgaaaccattgctaatgtgcctatactgattcttgggaataagatcgacagacctgaagccatcagtgaagagaggttgcgagagatgtttggtttatatggtcagacaacaggaaaggggagtatatctctgaaagaactgaatgcc

SEQ ID NO: 30485 - DNA, 2287 bp, Artificial Sequence
  derived and/or modified sequence
gaggtcactctctctatctatgtcgcctcaagcagcagtggcacgcaaaggtcagtcagccctggccaggctgcgccctccccccggacagcactcaccgttggtgtagggagaccccgaggccaaggcggctccgttctgggcctggaggctggctggggcgccgccggaggccggtattcccggctgggacatgatgactgggttggaaggggctggtcggggtcgacaacagcgcacaagaagagagctgaaagaccactgctgaaagcggagggaggaggctaacgacttaagactgaagactgggagaagaggggggggcgcattaagcccgaggcatggcgccgcactctccccaggccaccggcggccacagcctagcctgggagctgaggcttgagagtcgggccggcggggccgcgaacgcccggctagaaggcggcagccaaacctagagagaaggagggaggccctggccggaagtgcctgtcagccgccggccgcgcagccgcaatcaggacacgtggcacttccggctccgggctcgcagcagccgccgccgcgccggcgaactcttctctgccagccgggctgccccgaggccacctgacagctcctggtgccccgaccccgacgaccgtgcccggcctcgccgccacgtcaccgactctcacggccggccggaagtgccgtgtgtcaccgctacggaaattcccgccgttgtgaacgtgacctcgctcgcagagccaggatcgtggggcaatctgagattcagtagccgctttcgtggggtgggactgacagttcctctcctcgggttttgtgaagattacctgagaccatagaagtcatcgtcctctgttgagaccgtaccaccactgggagctggggcggttaatgttcatcgcagtatttcattcacatttcgtcttcgtgtttcagatgtaaattataaggggttttaaaaagaggtggttaaatatgtgtacatgttaatagtgtgatcaagccaagaaggaggcctttgtctttgactggaggactcagaggaattttaattttgaaactcgctgattcacagcatagtcacgctcaagttcattagcacatttaaatggcagttttgtttcctcttctaagagtttacagtaaggaaaaacaacattgctacacatgctaaaagatgacagacttggacaacatgtcccaacattacatcccaatggagtctcgctctgtcacccaggctggagtgcagtggcacgatctcgactcactgcaacctccgcctcccaagttcacaccattctcctgcctcagcttcccgagtagctggaactacagcttccgaagaactgaccattgctggcatgacgtttacaacttttgatctgggtggacatgttcaagctcgaagagtgtggaaaaactaccttcctgctatcaatggcattgtatttctggtggattgtgcagaccacgaaaggctgttagagtcaaaagaagaacttgattcactaatgacagatgaaaccattgctaatgtgcctatactgattcttgggaataagatcgacagacctgaagccatcagtgaagagaggttgcgagagatgtttggtttatatggtcagacaacaggaaaggggagtatatctctgaaagaactgaatgcccgacccttagaagttttcatgtgtagtgtgctcaaaagacaaggttacggagaaggcttccgctggatggcacagtacattgattaacacaaactcacattggttccaggtctcaacgttcaggcttactcagagatttgattgctcaacatgcataacttgaattcaatagacttttgctggttataaaacagatgttttttagattattaatattaaatcaacttaatttgaatgagaattgaaaactgattcaagtaagtttgagtatcacaatgttagctttctaattccataaaagtacttggtttttacagtttataatctgacatcaccccagcgccatttgtaaagagcaactttccagcagtacatttgaagcactttttaacaacatgaaactataaaccatatttaaaagctcatcatgttaaattttttatgtacttttctggaactagtttttaaattttagattatatgtccacctatcttaagtgtacagttaataattagcttattcaatgattgcatgatgccttacagttttcaataactttttttcttatgcaaacgtcatgcaataaaacaaactctaatgtttggca

SEQ ID NO: 30486 - DNA, 455 bp, Artificial Sequence
  derived and/or modified sequence
ggaaggaggaagtaacttgtggaatgctgagaaagcttccgaagaactgaccattgctggcatgacgtttacaacttttgatctgggtggacatgttcaagctcgaagagtgtggaaaaactaccttcctgctatcaatggcattgtatttctggtggattgtgcagaccacgaaaggctgttagagtcaaaagaagaacttgattcactaatgacagatgaaaccattgctaatgtgcctatactgattcttgggaataagatcgacagacctgaagccatcagtgaagagaggttgcgagagatgtttggtttatatggtcagacaacaggaaaggggagtatatctctgaaagaactgaatgcccgacccttagaagttttcatgtgtagtgtgctcaaaagacaaggttacggagaaggcttccgctggatggcacagtacattgattaac

SEQ ID NO: 30487 - DNA, 393 bp, Artificial Sequence
  derived and/or modified sequence
atgaccttcaccaccttcgacctgggcggccacgtgcaggccagaagagtgtggaagaactacctgcccgccatcaacggcatcgtgttcctggtggactgcgccgaccacgagagactgctggagagcaaggaggagctggacagcctgatgaccgacgagaccatcgccaacgtgcccatcctgatcctgggcaacaagatcgacagacccgaggccatcagcgaggagagactgagagagatgttcggcctgtacggccagaccaccggcaagggcagcatcagcctgaaggagctgaacgccagacccctggaggtgttcatgtgcagcgtgctgaagagacagggctacggcgagggcttcagatggatggcccagtacatcgactag

SEQ ID NO: 30488 - DNA, 597 bp, Artificial Sequence
  derived and/or modified sequence
atgagcttcatcttcgactggatctacagcggcttcagcagcgtgctgcagttcctgggcctgtacaagaagaccggcaagctggtgttcctgggcctggacaacgccggcaagaccaccctgctgcacatgctgaaggacgacagactgggccagcacgtgcccaccctgcaccccaccagcgaggagctgaccatcgccggcatgaccttcaccaccttcgacctgggcggccacgtgcaggccagaagagtgtggaagaactacctgcccgccatcaacggcatcgtgttcctggtggactgcgccgaccacgagagactgctggagagcaaggaggagctggacagcctgatgaccgacgagaccatcgccaacgtgcccatcctgatcctgggcaacaagatcgacagacccgaggccatcagcgaggagagactgagagagatgttcggcctgtacggccagaccaccggcaagggcagcatcagcctgaaggagctgaacgccagacccctggaggtgttcatgtgcagcgtgctgaagagacagggctacggcgagggcttcagatggatggcccagtacatcgactag

SEQ ID NO: 30489 - DNA, 312 bp, Artificial Sequence
  derived and/or modified sequence
atgagcttcatcttcgactggatctacagcggcttcagcagcgtgctgcagttcctgggcctgtacaagaagaccggcaagctggtgttcctgggcctggacaacgccggcaagaccaccctgctgcacatgctgaaggacgacagactgggccagcacgtgcccaccctgcaccccaccagcgaggagctgaccatcgccggcatgaccttcaccaccttcgacctgggcggccacgtgcaggccagaagagtgtggaagaactacctgcccgccatcaacggcatcgtgttcctggtggactgcgcctag

SEQ ID NO: 30490 - DNA, 513 bp, Artificial Sequence
  derived and/or modified sequence
atgagcttcatcttcgactggatctacagcggcttcagcagcgtgctgcagttcctgggcctgtacaagaagaccggcaagctggtgttcctgggcctggacaacgccggcaagaccaccctgctgcacatgctgaaggacgacagactgggccagcacgtgcccaccctgcaccccaccagcgaggagctgaccatcgccggcatgaccttcaccaccttcgacctgggcggccacgtgcaggccagaagagtgtggaagaactacctgcccgccatcaacggcatcgtgttcctggtggactgcgccgaccacgagagactgctggagagcaaggaggagctggacagcctgatgaccgacgagaccatcgccaacgtgcccatcctgatcctgggcaacaagatcgacagacccgaggccatcagcgaggagagactgagagagatgttcggcctgtacggccagaccaccggcaagggcagcatcagcctgaaggagctgaacgcctag

SEQ ID NO: 30491 - protein, 443 aa, Artificial Sequence
  derived and/or modified sequence
MNLASQSGEAGAGQLLFANFNQDNTEVKGASRAAGLGRRAVVWSLAVGSKSGYKFFSLSSVDKLEQIYECTDTEDVCIVERLFSSSLVAIVSLKAPRKLKVCHFKKGTEICNYSYSNTILAVKLNRQRLIVCLEESLYIHNIRDMKVLHTIRETPPNPAGLCALSINNDNCYLAYPGSATIGEVQVFDTINLRAANMIPAHDSPLAALAFDASGTKLATASEKGTVIRVFSIPEGQKLFEFRRGVKRCVSICSLAFSMDGMFLSASSNTETVHIFKLETVKEKPPEEPTTWTGYFGKVLMASTSYLPSQVTEMFNQGRAFATVRLPFCGHKNICSLATIQKIPRLLVGAADGYLYMYNLDPQEGGECALMKQHRLDGSLETTNEILDSASHDCPLVTQTYGAAAGKAYTDDLGAVGGACLEDEASALRLDEDSEHPPMILRTD

SEQ ID NO: 30492 - DNA, 1332 bp, Artificial Sequence
  derived and/or modified sequence
atgaacctggccagccagagcggcgaggccggcgccggccagctgctgttcgccaacttcaaccaggacaacaccgaggtgaagggcgccagcagagccgccggcctgggcagaagagccgtggtgtggagcctggccgtgggcagcaagagcggctacaagttcttcagcctgagcagcgtggacaagctggagcagatctacgagtgcaccgacaccgaggacgtgtgcatcgtggagagactgttcagcagcagcctggtggccatcgtgagcctgaaggcccccagaaagctgaaggtgtgccacttcaagaagggcaccgagatctgcaactacagctacagcaacaccatcctggccgtgaagctgaacagacagagactgatcgtgtgcctggaggagagcctgtacatccacaacatcagagacatgaaggtgctgcacaccatcagagagaccccccccaaccccgccggcctgtgcgccctgagcatcaacaacgacaactgctacctggcctaccccggcagcgccaccatcggcgaggtgcaggtgttcgacaccatcaacctgagagccgccaacatgatccccgcccacgacagccccctggccgccctggccttcgacgccagcggcaccaagctggccaccgccagcgagaagggcaccgtgatcagagtgttcagcatccccgagggccagaagctgttcgagttcagaagaggcgtgaagagatgcgtgagcatctgcagcctggccttcagcatggacggcatgttcctgagcgccagcagcaacaccgagaccgtgcacatcttcaagctggagaccgtgaaggagaagccccccgaggagcccaccacctggaccggctacttcggcaaggtgctgatggccagcaccagctacctgcccagccaggtgaccgagatgttcaaccagggcagagccttcgccaccgtgagactgcccttctgcggccacaagaacatctgcagcctggccaccatccagaagatccccagactgctggtgggcgccgccgacggctacctgtacatgtacaacctggacccccaggagggcggcgagtgcgccctgatgaagcagcacagactggacggcagcctggagaccaccaacgagatcctggacagcgccagccacgactgccccctggtgacccagacctacggcgccgccgccggcaaggcctacaccgacgacctgggcgccgtgggcggcgcctgcctggaggacgaggccagcgccctgagactggacgaggacagcgagcacccccccatgatcctgagaaccgactag

SEQ ID NO: 30493 - DNA, 1332 bp, Artificial Sequence
  derived and/or modified sequence
atgaacctggctagccagagtggcgaggccggggcagggcaactgctgtttgctaacttcaaccaggacaacactgaagtgaagggggcttcacgtgccgccgggctgggtcggcgggccgtcgtgtggagccttgctgtgggctctaagtcaggttataagttcttcagcttgtcaagcgtagacaagcttgagcaaatttacgagtgtacggataccgaggatgtgtgcattgtagaaaggcttttctcctctagtctggtggctatagtgagtctgaaagcgcctagaaaattgaaggtgtgccattttaaaaagggcaccgaaatatgtaactatagttacagcaacaccatactcgccgtgaagctgaaccgccaacgtttgattgtttgtttggaagagtcactttatatccacaacataagagatatgaaggttctccacacaattagggagacccccccaaatcctgccggcttgtgcgctttatccattaataatgataactgttacctcgcctatccagggtctgccactataggcgaggtgcaggttttcgacaccattaacctgcgtgctgctaatatgattccggctcacgacagtccgctcgctgctttagccttcgatgcatcagggacgaaactggcaacggcttcggagaagggcactgtcatccgggtctttagtatcccagaaggccagaagctgtttgagttcaggagaggggttaagaggtgtgtgtctatctgttcattagcattttccatggatggaatgtttctctccgcgtcatccaacaccgaaacagtgcacattttcaaacttgaaacagtcaaggaaaaaccgcccgaagaacctactacctggactggatacttcgggaaagtgcttatggcctcaaccagctatcttcccagccaggtgacagaaatgttcaaccaggggcgcgccttcgcgactgttaggctgccattctgcggacataaaaatatttgttcgctcgctacaatccagaagatacctcgtctgttggtgggcgctgccgacggctatctttatatgtacaatctcgatcctcaggaagggggagaatgtgctctgatgaaacagcacaggctggatggctccctcgagacaaccaatgaaatcctggacagcgcttcgcatgattgccctctcgtaacccagacgtacggtgctgccgctggcaaagcgtacactgatgatctgggtgccgtgggcggcgcttgtctggaggatgaagctagcgctcttcgtttggatgaggacagtgagcatcctcccatgattctaaggaccgactag

SEQ ID NO: 30494 - DNA, 1332 bp, Artificial Sequence
  derived and/or modified sequence
atgaacctggccagccagagcggggaggccggggccggccagctgctgtttgccaacttcaaccaggacaacacagaggtgaagggggccagcagagctgctggcctgggccggcgggctgtggtgtggagcctggccgtgggcagcaagagcggctacaagttcttcagcctgagctctgtggacaagctggagcagatctatgaatgtacagacacagaagatgtgtgcatcgtggagcggctcttcagcagcagcctggtggccatcgtgtccctgaaggcccccaggaagctgaaggtgtgccacttcaagaagggcacagagatctgcaactacagctacagcaacaccatcctggccgtgaagctgaaccggcagaggctcatcgtgtgcctggaggagagcctgtacatccacaacatccgggacatgaaggtgctgcacaccatccgggagaccccacccaacccagctggcctgtgtgccctgagcatcaacaatgacaactgctacctggcctacccaggcagcgccaccatcggggaggtgcaggtgtttgacaccatcaacctgcgggccgccaacatgatcccagcccatgacagccccctggccgccctggcctttgatgccagcggcaccaagctggccacagccagcgagaagggcaccgtcatccgggtcttcagcatccctgagggccagaagctgtttgagttccggcggggcgtgaagagatgtgtgtccatctgcagcctggccttctccatggatggcatgttcctgagcgccagcagcaacacagaaacagtgcacatcttcaagctggagaccgtgaaggagaagcccccagaggagcccaccacctggacaggctactttgggaaggtgctgatggccagcaccagctacctgcccagccaggtgacagagatgttcaaccagggccgggcctttgccaccgtgcggctgcccttctgtggccacaagaacatctgcagcctggccaccatccagaagatcccccggctgctggtgggcgctgctgatggctacctgtacatgtacaacctggacccccaggagggcggggagtgtgccctgatgaagcagcaccggctggatggcagcctggagaccaccaatgagatcctggacagcgccagccatgactgccccctggtgacccagacctacggggctgctgctgggaaggcctacacagatgacctgggcgctgtgggcggggcctgcctggaggatgaggccagcgccctgcggctggatgaagattctgagcacccccccatgatcctgaggacagactag

SEQ ID NO: 30495 - DNA, 1332 bp, Artificial Sequence
  derived and/or modified sequence
atgaacctggccagccagagcggcgaggccggcgccggccagctgctgtttgccaacttcaaccaggataatactgaagtcaagggcgcatctcgcgctgccggcctcgggcgacgggcggtcgtgtggagtctggctgtcgggagtaaatctggatacaaattcttcagcctcagctccgtggacaaattggagcagatatacgagtgtaccgacaccgaggacgtgtgcatagtggaaagactgttctcctcatcactggttgctattgtgtcacttaaggctcctaggaagctgaaggtgtgtcattttaagaagggcacggagatctgcaactatagttattctaatactatcctggcggtgaagctgaaccgccagcggctgatcgtgtgcctggaggaatcactgtatattcacaatatcagggacatgaaagtccttcatacaatcagagagacaccgccgaatcccgccggcctctgtgccctctccattaacaacgacaactgctacttggcctatccaggttcagccactatcggcgaagtgcaagttttcgataccatcaacctgcgagctgctaatatgatccctgcgcacgattcacctctggccgcccttgcatttgacgcatccgggactaagttagctactgcatctgaaaagggcactgttatcagggtcttctccatacctgaggggcagaaactctttgagtttagaaggggagtcaagcgctgcgtgtcaatctgctcccttgccttctctatggatggcatgtttctttccgctagttcaaataccgaaaccgtacacatctttaagctggaaaccgtgaaggaaaagccccccgaggaaccaaccacgtggactggctacttcgggaaggttctgatggcttccaccagctatcttccctcccaagtgaccgaaatgttcaatcagggccgggcatttgccacggttagactgcccttttgcggccataaaaacatctgctctcttgccaccatacagaaaataccgcgtttgctggtcggagctgcagacggttatctttatatgtataacctggacccccaggaagggggcgagtgcgccctgatgaagcagcatcggctggacggttcacttgaaaccacgaatgagattcttgactcagcctctcacgactgtcccctggtcacacagacatacggcgccgccgctggcaaggcatacacagacgacctcggtgcggtgggcggtgcctgtctggaggacgaggcatctgcactccggctcgatgaagacagtgagcatccccccatgatcctgcggactgactag

SEQ ID NO: 30496 - DNA, 1332 bp, Artificial Sequence
  derived and/or modified sequence
atgaatctcgcctcacagagtggggaggccggagctggccaattgctgttcgccaactttaatcaggacaatacagaggttaaaggagcaagccgggcagctggtttagggcgaagagccgtcgtttggtccctggccgtgggttctaagtctggctacaagtttttttctctgtccagcgtggacaaactggagcaaatctacgaatgtacagacacagaagacgtctgcatagtggaaaggttgtttagctcctcgttagttgccatcgtctccctcaaggcgcctagaaaactcaaagtctgtcacttcaagaaaggaaccgaaatatgcaattatagctatagcaatacgattctggcggtcaaactgaaccgacaaaggctaattgtgtgcctggaagagagcctctacatccataacatcagggatatgaaggtactgcatacaatccgagagactccccctaacccagcagggttgtgcgcgctctctatcaataacgataactgctatctggcttaccccggaagtgctacaattggagaggtgcaggtgtttgacacaattaacctgagagctgccaacatgatccctgcccacgactcaccgctggccgctttggcatttgatgcgagcggaaccaaactggccactgcatcagaaaagggaactgtaattagggtgtttagcatccctgaagggcagaagttattcgagttccggagaggggtgaagcgctgcgtgtccatttgttccctcgcattttcaatggatggaatgttccttagcgcctcaagcaacacagaaacggtccatatcttcaagttggaaacagttaaagagaagcctcccgaggaacccactacgtggaccggctacttcgggaaggttttgatggcctcaacatcttacttaccatctcaggtcacagagatgtttaaccagggacgggcttttgccacagtgcgccttcccttttgcgggcacaaaaacatttgtagcctggccaccatccagaagatcccaagactactcgtcggagcggcagatggctatttatacatgtacaacctggatccacaggaaggaggagagtgcgccctgatgaagcagcacagattggatgggtccttggagacaacaaacgagatcctggattccgctagccacgactgtccgctcgtgacccagacctacggtgccgctgctgggaaggcgtatacagacgatctgggagctgtcgggggagcctgcttggaggatgaagcctccgcactccgccttgatgaagatagcgagcatccaccgatgattctgcgcactgactag

SEQ ID NO: 30497 - DNA, 1663 bp, Artificial Sequence
  derived and/or modified sequence
cggctctggagcataaacaagagcggggacgggatgaggcggcggttgatcccagggtggcgagtggcggcgaccgaggcggcgagcggggcccggcgccgaccctgagtgcagcctgacccgccctcgcgcgcgcgccctccccggccgggcccactcgccgcgcgcccagccatgaacctggcgagccagagcggggaggccggcgccggccagctgctcttcgccaacttcaaccaggacaacacagaagtgaaaggggcatcaagagcagctggtcttggccgtcgcgctgttgtctggtccctagctgttggtagtaagtccggttataaatttttctccctttcttctgtggataagctggaacagatctatgaatgcaccgatacggaagatgtgtgcattgtagagagattgttctccagcagcctagtggccatcgtcagccttaaagcaccaaggaagctaaaggtttgccactttaagaagggaactgagatctgcaactacagctactccaacacgattctggctgtgaagctcaacaggcagaggctgatagtatgcctggaggagtccctgtacatccacaacattcgggacatgaaggtgctgcatacgatcagggagacgcctccaaaccctgcaggcctgtgtgcgctgtcaatcaacaacgacaactgctacttggcgtacccagggagcgcgaccatcggagaggtgcaggtcttcgataccattaatttgagagctgcaaacatgattccggctcacgacagtcctttagcggcactggcctttgacgcaagtggaactaaacttgccacggcttcggagaaggggaccgtgattagggtattttccattccagaaggacaaaaactctttgagtttcggagaggagtaaagaggtgcgtgagcatctgctccctggccttcagcatggacggcatgttcctctccgcctccagcaacactgagaccgtgcacatcttcaaactcgagactgtgaaagaaaaacccccagaggagcccaccacctggaccgggtacttcgggaaagtgctcatggcctccaccagctacctgccttcccaagtgacagaaatgttcaaccagggcagagccttcgccacggtccgcctgccattctgcggccacaaaaacatctgctcgctagccacaattcagaagatcccgcggttgttggtgggtgccgccgacgggtacctgtacatgtacaacctggacccccaggagggcggcgagtgtgccctgatgaagcagcaccggctggacggcagtctggaaacgaccaatgagatcttggactctgcctctcacgactgccccttagtcactcagacatacggcgcagctgcaggaaaagcctacacagacgacctgggtgctgtgggtggcgcctgcctggaggacgaggccagcgccctgcgcctggatgaggacagcgagcacccgcccatgattcttcggactgactgaacttgacctgtgacctctgacccggggagcagagaacactggcttcacagaggactttgtgcattgctgctatgaactttgacctgagtcgggggagaggatggcagagactttattaaaaaaaaaaaaagattgtagtggtagtctaactccataa

SEQ ID NO: 30498 - protein, 425 aa, Artificial Sequence
  derived and/or modified sequence
MNLASQSGEAGAGQLLFANFNQDNTSLAVGSKSGYKFFSLSSVDKLEQIYECTDTEDVCIVERLFSSSLVAIVSLKAPRKLKVCHFKKGTEICNYSYSNTILAVKLNRQRLIVCLEESLYIHNIRDMKVLHTIRETPPNPAGLCALSINNDNCYLAYPGSATIGEVQVFDTINLRAANMIPAHDSPLAALAFDASGTKLATASEKGTVIRVFSIPEGQKLFEFRRGVKRCVSICSLAFSMDGMFLSASSNTETVHIFKLETVKEKPPEEPTTWTGYFGKVLMASTSYLPSQVTEMFNQGRAFATVRLPFCGHKNICSLATIQKIPRLLVGAADGYLYMYNLDPQEGGECALMKQHRLDGSLETTNEILDSASHDCPLVTQTYGAAAGKAYTDDLGAVGGACLEDEASALRLDEDSEHPPMILRTD

SEQ ID NO: 30499 - DNA, 1278 bp, Artificial Sequence
  derived and/or modified sequence
atgaacctggccagccagagcggcgaggccggcgccggccagctgctgttcgccaacttcaaccaggacaacaccagcctggccgtgggcagcaagagcggctacaagttcttcagcctgagcagcgtggacaagctggagcagatctacgagtgcaccgacaccgaggacgtgtgcatcgtggagagactgttcagcagcagcctggtggccatcgtgagcctgaaggcccccagaaagctgaaggtgtgccacttcaagaagggcaccgagatctgcaactacagctacagcaacaccatcctggccgtgaagctgaacagacagagactgatcgtgtgcctggaggagagcctgtacatccacaacatcagagacatgaaggtgctgcacaccatcagagagaccccccccaaccccgccggcctgtgcgccctgagcatcaacaacgacaactgctacctggcctaccccggcagcgccaccatcggcgaggtgcaggtgttcgacaccatcaacctgagagccgccaacatgatccccgcccacgacagccccctggccgccctggccttcgacgccagcggcaccaagctggccaccgccagcgagaagggcaccgtgatcagagtgttcagcatccccgagggccagaagctgttcgagttcagaagaggcgtgaagagatgcgtgagcatctgcagcctggccttcagcatggacggcatgttcctgagcgccagcagcaacaccgagaccgtgcacatcttcaagctggagaccgtgaaggagaagccccccgaggagcccaccacctggaccggctacttcggcaaggtgctgatggccagcaccagctacctgcccagccaggtgaccgagatgttcaaccagggcagagccttcgccaccgtgagactgcccttctgcggccacaagaacatctgcagcctggccaccatccagaagatccccagactgctggtgggcgccgccgacggctacctgtacatgtacaacctggacccccaggagggcggcgagtgcgccctgatgaagcagcacagactggacggcagcctggagaccaccaacgagatcctggacagcgccagccacgactgccccctggtgacccagacctacggcgccgccgccggcaaggcctacaccgacgacctgggcgccgtgggcggcgcctgcctggaggacgaggccagcgccctgagactggacgaggacagcgagcacccccccatgatcctgagaaccgactag

SEQ ID NO: 30500 - DNA, 1278 bp, Artificial Sequence
  derived and/or modified sequence
atgaacctggcctctcagtcaggcgaagctggcgccggacaattactctttgctaacttcaatcaggacaatacatccctggccgtggggtctaaatcaggttataagttcttcagcctgtcctcggttgataaacttgaacagatttacgagtgcacggacaccgaggatgtgtgtattgtggagcgcctatttagttcaagtctggtggccatcgtgagcctgaaggcacccagaaagcttaaagtctgccactttaaaaaaggtactgaaatatgtaactattcttatagtaataccattctggcagtgaaactcaataggcagcgccttattgtctgtttagaagagtctctctatatacataacattcgtgatatgaaggttctgcatactattcgcgagacacctcccaatcccgcagggctctgcgcgctcagtatcaataacgataactgctatttggcttacccaggatctgcaactattggcgaagtgcaggtgttcgacacgattaatctgcgggctgccaacatgattccagctcacgatagccctctggccgcactggcgtttgacgcttctggaaccaaacttgcgactgcaagtgaaaaagggaccgtgattcgggtgtttagcatacctgaaggccaaaagctctttgaattccggaggggcgtcaagcgctgcgtgtcaatttgttctctggcctttagtatggacggcatgtttctttcagccagtagcaatacagaaactgtgcacatttttaagctggagacagtgaaagagaagccgccagaggaacccacaacatggacagggtatttcggcaaggtgctgatggcctccacctcataccttcctagtcaggttactgagatgttcaatcagggtcgcgcctttgccacagtgcggctacctttttgcggtcataagaacatctgctcactggcaaccatacaaaagatcccccgcctcctcgttggcgctgctgatggatatctctacatgtacaacctggacccacaggagggaggagagtgcgccttaatgaagcaacacaggcttgatggatccctcgagactacaaatgaaattcttgatagcgctagtcatgactgcccactcgtgacccagacctatggggccgcagctgggaaggcttatacggatgacctaggagcagtaggcggggcttgcttagaggatgaggcatctgcgttgcggctggatgaggactccgagcatccccctatgatcctgaggactgattag

SEQ ID NO: 30501 - DNA, 1278 bp, Artificial Sequence
  derived and/or modified sequence
atgaacctggccagccagagcggggaggccggggccggccagctgctgtttgccaacttcaaccaggacaacaccagcctggccgtgggcagcaagagcggctacaagttcttcagcctgagctctgtggacaagctggagcagatctatgaatgtacagacacagaagatgtgtgcatcgtggagcggctcttcagcagcagcctggtggccatcgtgtccctgaaggcccccaggaagctgaaggtgtgccacttcaagaagggcacagagatctgcaactacagctacagcaacaccatcctggccgtgaagctgaaccggcagaggctcatcgtgtgcctggaggagagcctgtacatccacaacatccgggacatgaaggtgctgcacaccatccgggagaccccacccaacccagctggcctgtgtgccctgagcatcaacaatgacaactgctacctggcctacccaggcagcgccaccatcggggaggtgcaggtgtttgacaccatcaacctgcgggccgccaacatgatcccagcccatgacagccccctggccgccctggcctttgatgccagcggcaccaagctggccacagccagcgagaagggcaccgtcatccgggtcttcagcatccctgagggccagaagctgtttgagttccggcggggcgtgaagagatgtgtgtccatctgcagcctggccttctccatggatggcatgttcctgagcgccagcagcaacacagaaacagtgcacatcttcaagctggagaccgtgaaggagaagcccccagaggagcccaccacctggacaggctactttgggaaggtgctgatggccagcaccagctacctgcccagccaggtgacagagatgttcaaccagggccgggcctttgccaccgtgcggctgcccttctgtggccacaagaacatctgcagcctggccaccatccagaagatcccccggctgctggtgggcgctgctgatggctacctgtacatgtacaacctggacccccaggagggcggggagtgtgccctgatgaagcagcaccggctggatggcagcctggagaccaccaatgagatcctggacagcgccagccatgactgccccctggtgacccagacctacggggctgctgctgggaaggcctacacagatgacctgggcgctgtgggcggggcctgcctggaggatgaggccagcgccctgcggctggatgaagattctgagcacccccccatgatcctgaggacagactag

SEQ ID NO: 30502 - DNA, 1278 bp, Artificial Sequence
  derived and/or modified sequence
atgaacctggccagccagagcggcgaggccggcgccggccagctgctttttgctaacttcaaccaggataacacctccctcgccgtcgggtcgaaatccggttataaatttttcagcctttctagtgtggacaagctggagcagatttatgagtgcacagacactgaggacgtgtgcattgtcgagcgcctcttctcctcctcccttgttgccatagtttcactgaaggccccccgcaagctcaaagtctgccacttcaagaagggaacagaaatttgcaattactcatacagcaacaccattctcgccgtgaaactgaaccggcagcgcttgatcgtgtgcctcgaggagtctttatacattcacaatataagggacatgaaagtgctgcatactatcagagagaccccccctaaccccgcagggttatgcgccctcagcattaataacgacaattgttacctcgcctacccagggtctgcaactatcggagaggtgcaggtattcgataccatcaacttgcgcgcagccaacatgataccagcccatgacagcccactggcagcactcgccttcgatgcatccggtaccaaactcgctactgcatcagagaagggtactgtgattagagtgtttagtattcccgagggccagaagctcttcgaattcagaaggggcgtcaagcgatgtgtttccatctgctctctggcattcagcatggacggtatgttcttaagcgcgagctccaacacagaaactgttcacatcttcaaattggagacggttaaagaaaaacccccggaggagcctacgacatggacgggttacttcggaaaagtattaatggctagtacaagctacctgcctagtcaggtgacggaaatgtttaatcagggccgagcctttgccactgtgcggctgcctttttgcggccacaaaaacatctgctcattggcaaccattcagaaaattccacggctgttagtgggggccgctgatggctatctctatatgtataacctcgatcctcaggaagggggggagtgcgctctgatgaagcaacaccggctggacggatccctcgagacgacaaatgagatcctcgattcagcctcacacgactgtcctcttgtgactcagacttatggggccgccgcaggcaaagcctataccgatgatttgggcgcggttggtggggcctgcctggaggacgaggcatccgcactgcgccttgatgaggactccgagcaccccccaatgattttacgcacagattag

SEQ ID NO: 30503 - DNA, 1278 bp, Artificial Sequence
  derived and/or modified sequence
atgaacctggctagtcaatcaggagaagcaggcgctggacaacttctgttcgcaaattttaatcaggataatacaagcctggccgtagggtctaagagcggctataaatttttctccttaagttctgtggacaagttggagcagatttacgagtgcacagataccgaagatgtgtgcatcgtcgaaagattgttctctagctcccttgtggccatagtttcactgaaagcccctagaaagctgaaggtgtgccactttaagaagggaacagagatctgcaattattcctattccaatacaatcttggccgtgaagcttaacaggcagaggctgatcgtttgtctcgaagaaagcttgtacattcacaacattcgcgatatgaaggttctccatactattagggaaactccgccaaatccagctggcctctgcgctctgtcgataaataatgataattgctacctggcttaccctggttcagctactattggcgaggtacaggtgtttgacacaattaacttgcgcgcagccaacatgatacctgcacacgactcccctctggctgcgcttgcttttgacgccagcggcaccaagcttgctactgcatcagaaaaaggaaccgtgatcagagttttctcaatccccgagggccagaagctcttcgagttccggcgaggagttaagcgatgtgtctccatctgctccctcgctttttcaatggatggcatgtttctgtcagcttcctcgaacacagagaccgttcacatctttaagcttgagactgttaaagaaaaacctccagaggaaccaaccacttggacaggttactttggcaaggtgctcatggcatctacatcctaccttcctagtcaggtcacggagatgtttaatcagggtcgagccttcgccactgtgcgactccctttttgcggtcataaaaacatctgctccctggcaacgattcagaagatccccagactgttagtgggtgcagccgacggttacctctacatgtacaacctggaccctcaggaggggggagaatgtgcgctgatgaaacagcaccggctcgatggctcactcgagaccacgaacgaaatcctcgactcagcttctcacgactgccccttggtgacacagacatacggcgctgctgccggaaaagcctacactgacgatcttggggctgtagggggagcctgtttggaagatgaggccagcgccttgaggctggacgaggactccgagcatccacctatgatcctccgcactgactag

SEQ ID NO: 30504 - DNA, 1948 bp, Artificial Sequence
  derived and/or modified sequence
gacgggatgaggcggcggttgatcccagggtggcgagtggcggcgaccgaggcggcgagcggggcccggcgccgaccctgagtgcagcctgacccgccctcgcgcgcgcgccctccccggccgggcccactcgccgcgcgcccagccatgaacctggcgagccagagcggggaggccggcgccggccagctgctcttcgccaacttcaaccaggacaacacgtccctagctgttggtagtaagtccggttataaatttttctccctttcttctgtggataagctggaacagatctatgaatgcaccgatacggaagatgtgtgcattgtagagagattgttctccagcagcctagtggccatcgtcagccttaaagcaccaaggaagctaaaggtttgccactttaagaagggaactgagatctgcaactacagctactccaacacgattctggctgtgaagctcaacaggcagaggctgatagtatgcctggaggagtccctgtacatccacaacattcgggacatgaaggtgctgcatacgatcagggagacgcctccaaaccctgcaggcctgtgtgcgctgtcaatcaacaacgacaactgctacttggcgtacccagggagcgcgaccatcggagaggtgcaggtcttcgataccattaatttgagagctgcaaacatgattccggctcacgacagtcctttagcggcactggcctttgacgcaagtggaactaaacttgccacggcttcggagaaggggaccgtgattagggtattttccattccagaaggacaaaaactctttgagtttcggagaggagtaaagaggtgcgtgagcatctgctccctggccttcagcatggacggcatgttcctctccgcctccagcaacactgagaccgtgcacatcttcaaactcgagactgtgaaagaaaaacccccagaggagcccaccacctggaccgggtacttcgggaaagtgctcatggcctccaccagctacctgccttcccaagtgacagaaatgttcaaccagggcagagccttcgccacggtccgcctgccattctgcggccacaaaaacatctgctcgctagccacaattcagaagatcccgcggttgttggtgggtgccgccgacgggtacctgtacatgtacaacctggacccccaggagggcggcgagtgtgccctgatgaagcagcaccggctggacggcagtctggaaacgaccaatgagatcttggactctgcctctcacgactgccccttagtcactcagacatacggcgcagctgcaggaaaagcctacacagacgacctgggtgctgtgggtggcgcctgcctggaggacgaggccagcgccctgcgcctggatgaggacagcgagcacccgcccatgattcttcggactgactgaacttgacctgtgacctctgacccggggagcagagaacactggcttcacagaggactttgtgcattgctgctatgaactttgacctgagtcgggggagaggatggcagagactttattaaaaaaaaaaaaagattgtagtggtagtctaactccataacgctgaggaaatacatcattttcacttcagtggcttttaaatcctgcttatgaattttagctttttgtttgtttgttttctctttttgccaaaattaactgtttggtgaagcccgcaaaacctcctcgctttgcatgcatgaacgtgccaagccagcataggggagctagaagccactttccagccacctgccgttgggttttttcatatctgtacataatgccgagtgcgtaaggaaaccgtggcgtcgcgcacagtgggtctgcttgtcaaggccagttctgcagtgacaggcccaggggctgcccaccaggtgtgctgggcagacttcagctgggacagaagtccgatctccctagggcccca

SEQ ID NO: 30505 - protein, 437 aa, Artificial Sequence
  derived and/or modified sequence
MLLRLQRIKTLRPPGCPHPMTTCSAGTLSAVPCVSPRQVFVFERRFCLWSHVEMFTHVLPFVISADTEDVCIVERLFSSSLVAIVSLKAPRKLKVCHFKKGTEICNYSYSNTILAVKLNRQRLIVCLEESLYIHNIRDMKVLHTIRETPPNPAGLCALSINNDNCYLAYPGSATIGEVQVFDTINLRAANMIPAHDSPLAALAFDASGTKLATASEKGTVIRVFSIPEGQKLFEFRRGVKRCVSICSLAFSMDGMFLSASSNTETVHIFKLETVKEKPPEEPTTWTGYFGKVLMASTSYLPSQVTEMFNQGRAFATVRLPFCGHKNICSLATIQKIPRLLVGAADGYLYMYNLDPQEGGECALMKQHRLDGSLETTNEILDSASHDCPLVTQTYGAAAGKAYTDDLGAVGGACLEDEASALRLDEDSEHPPMILRTD

SEQ ID NO: 30506 - protein, 384 aa, Artificial Sequence
  derived and/or modified sequence
MFTHVLPFVISADTEDVCIVERLFSSSLVAIVSLKAPRKLKVCHFKKGTEICNYSYSNTILAVKLNRQRLIVCLEESLYIHNIRDMKVLHTIRETPPNPAGLCALSINNDNCYLAYPGSATIGEVQVFDTINLRAANMIPAHDSPLAALAFDASGTKLATASEKGTVIRVFSIPEGQKLFEFRRGVKRCVSICSLAFSMDGMFLSASSNTETVHIFKLETVKEKPPEEPTTWTGYFGKVLMASTSYLPSQVTEMFNQGRAFATVRLPFCGHKNICSLATIQKIPRLLVGAADGYLYMYNLDPQEGGECALMKQHRLDGSLETTNEILDSASHDCPLVTQTYGAAAGKAYTDDLGAVGGACLEDEASALRLDEDSEHPPMILRTD

SEQ ID NO: 30507 - DNA, 1314 bp, Artificial Sequence
  derived and/or modified sequence
atgctgctgagactgcagagaatcaagaccctgagaccccccggctgcccccaccccatgaccacctgcagcgccggcaccctgagcgccgtgccctgcgtgagccccagacaggtgttcgtgttcgagagaagattctgcctgtggagccacgtggagatgttcacccacgtgctgcccttcgtgatcagcgccgacaccgaggacgtgtgcatcgtggagagactgttcagcagcagcctggtggccatcgtgagcctgaaggcccccagaaagctgaaggtgtgccacttcaagaagggcaccgagatctgcaactacagctacagcaacaccatcctggccgtgaagctgaacagacagagactgatcgtgtgcctggaggagagcctgtacatccacaacatcagagacatgaaggtgctgcacaccatcagagagaccccccccaaccccgccggcctgtgcgccctgagcatcaacaacgacaactgctacctggcctaccccggcagcgccaccatcggcgaggtgcaggtgttcgacaccatcaacctgagagccgccaacatgatccccgcccacgacagccccctggccgccctggccttcgacgccagcggcaccaagctggccaccgccagcgagaagggcaccgtgatcagagtgttcagcatccccgagggccagaagctgttcgagttcagaagaggcgtgaagagatgcgtgagcatctgcagcctggccttcagcatggacggcatgttcctgagcgccagcagcaacaccgagaccgtgcacatcttcaagctggagaccgtgaaggagaagccccccgaggagcccaccacctggaccggctacttcggcaaggtgctgatggccagcaccagctacctgcccagccaggtgaccgagatgttcaaccagggcagagccttcgccaccgtgagactgcccttctgcggccacaagaacatctgcagcctggccaccatccagaagatccccagactgctggtgggcgccgccgacggctacctgtacatgtacaacctggacccccaggagggcggcgagtgcgccctgatgaagcagcacagactggacggcagcctggagaccaccaacgagatcctggacagcgccagccacgactgccccctggtgacccagacctacggcgccgccgccggcaaggcctacaccgacgacctgggcgccgtgggcggcgcctgcctggaggacgaggccagcgccctgagactggacgaggacagcgagcacccccccatgatcctgagaaccgactag

SEQ ID NO: 30508 - DNA, 1155 bp, Artificial Sequence
  derived and/or modified sequence
atgttcacccacgtgctgcccttcgtgatcagcgccgacaccgaggacgtgtgcatcgtggagagactgttcagcagcagcctggtggccatcgtgagcctgaaggcccccagaaagctgaaggtgtgccacttcaagaagggcaccgagatctgcaactacagctacagcaacaccatcctggccgtgaagctgaacagacagagactgatcgtgtgcctggaggagagcctgtacatccacaacatcagagacatgaaggtgctgcacaccatcagagagaccccccccaaccccgccggcctgtgcgccctgagcatcaacaacgacaactgctacctggcctaccccggcagcgccaccatcggcgaggtgcaggtgttcgacaccatcaacctgagagccgccaacatgatccccgcccacgacagccccctggccgccctggccttcgacgccagcggcaccaagctggccaccgccagcgagaagggcaccgtgatcagagtgttcagcatccccgagggccagaagctgttcgagttcagaagaggcgtgaagagatgcgtgagcatctgcagcctggccttcagcatggacggcatgttcctgagcgccagcagcaacaccgagaccgtgcacatcttcaagctggagaccgtgaaggagaagccccccgaggagcccaccacctggaccggctacttcggcaaggtgctgatggccagcaccagctacctgcccagccaggtgaccgagatgttcaaccagggcagagccttcgccaccgtgagactgcccttctgcggccacaagaacatctgcagcctggccaccatccagaagatccccagactgctggtgggcgccgccgacggctacctgtacatgtacaacctggacccccaggagggcggcgagtgcgccctgatgaagcagcacagactggacggcagcctggagaccaccaacgagatcctggacagcgccagccacgactgccccctggtgacccagacctacggcgccgccgccggcaaggcctacaccgacgacctgggcgccgtgggcggcgcctgcctggaggacgaggccagcgccctgagactggacgaggacagcgagcacccccccatgatcctgagaaccgactag

SEQ ID NO: 30509 - DNA, 1314 bp, Artificial Sequence
  derived and/or modified sequence
atgctgctacgtctgcagcggattaagacgctgcgaccacccggctgtccgcaccccatgaccacctgctcagcgggcactctttccgctgtgccgtgtgtgtctcctagacaggtttttgtctttgagagaagattctgtctgtggagccacgtggagatgtttacccatgtgctaccttttgtgatcagcgccgacacagaggacgtgtgtatcgtggagcgtctgttcagtagctcgctggtagccatcgtgagtctgaaggcgcctaggaaactcaaagtgtgtcactttaagaaaggcaccgagatttgtaattactcgtattccaatacgattcttgcagtaaagctgaatcgtcagcggctcattgtgtgtttggaggagtctctctatattcataacatcagggatatgaaggtattgcatactattcgcgagactccgcctaacccggctggactctgcgccctctccatcaacaacgacaattgttacttggcctacccaggcagcgccacaattggcgaggtccaagtgtttgatacaatcaatttgcgtgccgcaaacatgataccagctcatgatagccctctcgcagccttggcattcgatgcgtcaggcactaagttggccacggctagcgagaaaggtacagtgattcgcgtgttttctattcccgagggtcagaaactgtttgaattccgccgtggggtcaagcgttgcgtgagcatctgcagcctcgcgttttccatggacggtatgttcctctcagcctcctctaatactgagacggtgcatatttttaagctggaaaccgtcaaggagaaaccgcccgaagagcccacaacatggacaggatattttggaaaagtgctgatggcatcgacatcttatctcccatcgcaggtcaccgaaatgtttaatcaaggaagagctttcgccactgtcaggcttcccttttgcgggcacaagaacatttgctcactggcgaccatccagaagatccctaggctgctggtgggtgcagcagacgggtatctctacatgtataacctggaccctcaggaagggggtgaatgtgctctgatgaagcagcacagactggacggctccttagagactactaacgaaatcttggatagcgcctcacacgactgtcccctggtgacccagacgtacggcgctgcagccgggaaagcttataccgacgaccttggcgccgtcggtggagcttgccttgaagacgaggcaagcgctcttagactggacgaggattcagagcatccccctatgatcctgcgcactgattag

SEQ ID NO: 30510 - DNA, 1155 bp, Artificial Sequence
  derived and/or modified sequence
atgtttactcatgtgttaccattcgtcatttccgccgacactgaggacgtatgtattgttgagcggttgttcagcagctctctggttgctatcgtgagccttaaggcacctaggaagctgaaagtatgccacttcaaaaaaggcacagagatatgcaattactcctacagcaataccatactagcggttaagcttaataggcagaggcttatcgtgtgtctagaggagagtctgtacatccataatattagagacatgaaggtgctgcataccatcagagaaaccccccccaatccagccggactgtgcgccctctctatcaacaacgacaattgttatttggcataccctggctcggcgactatcggagaagtccaggtgttcgataccatcaatctcagagccgccaatatgatcccagcccacgactcccctctcgctgccttagcctttgatgccagtgggaccaagttagccaccgcctccgaaaaggggactgtgatccgcgtgttctcgatccccgaaggacagaagctctttgagttcagaaggggcgtgaaacgatgtgtgtccatttgctcactggccttttctatggacgggatgttcttgagcgcctcttccaatacagaaaccgtgcatattttcaagctggaaacagtcaaagagaagcctcccgaagagccaactacgtggactggctacttcggcaaggtgctgatggcaagcacttcatacctgccatcccaggttactgaaatgtttaatcaaggtcgcgcatttgctactgtgcggttacctttttgtggtcacaagaacatttgtagcctcgccaccatacaaaaaatcccgagacttctggttggagctgcagatggatatctttatatgtataacttggaccctcaagaagggggggagtgcgccctcatgaagcagcatcgactggatggttccctggagaccactaatgaaatcctggattcagcaagtcacgattgtccgctggtcacccaaacatacggggccgccgccgggaaggcatacactgacgaccttggggccgttggcggagcttgtctggaggacgaggccagtgcgcttcgcctagacgaagactccgaacatcccccaatgattctcaggacagattag

SEQ ID NO: 30511 - DNA, 1314 bp, Artificial Sequence
  derived and/or modified sequence
atgctgctgcggctgcagaggatcaagaccctgcggcccccaggctgcccccaccccatgaccacctgcagcgctggcaccctgtctgctgtgccctgtgtgagcccccggcaggtgtttgtgtttgagcggcgcttctgcctgtggagccacgtggagatgttcacccacgtgctgccctttgtgatctctgctgacacagaagatgtgtgcatcgtggagcggctcttcagcagcagcctggtggccatcgtgtccctgaaggcccccaggaagctgaaggtgtgccacttcaagaagggcacagagatctgcaactacagctacagcaacaccatcctggccgtgaagctgaaccggcagaggctcatcgtgtgcctggaggagagcctgtacatccacaacatccgggacatgaaggtgctgcacaccatccgggagaccccacccaacccagctggcctgtgtgccctgagcatcaacaatgacaactgctacctggcctacccaggcagcgccaccatcggggaggtgcaggtgtttgacaccatcaacctgcgggccgccaacatgatcccagcccatgacagccccctggccgccctggcctttgatgccagcggcaccaagctggccacagccagcgagaagggcaccgtcatccgggtcttcagcatccctgagggccagaagctgtttgagttccggcggggcgtgaagagatgtgtgtccatctgcagcctggccttctccatggatggcatgttcctgagcgccagcagcaacacagaaacagtgcacatcttcaagctggagaccgtgaaggagaagcccccagaggagcccaccacctggacaggctactttgggaaggtgctgatggccagcaccagctacctgcccagccaggtgacagagatgttcaaccagggccgggcctttgccaccgtgcggctgcccttctgtggccacaagaacatctgcagcctggccaccatccagaagatcccccggctgctggtgggcgctgctgatggctacctgtacatgtacaacctggacccccaggagggcggggagtgtgccctgatgaagcagcaccggctggatggcagcctggagaccaccaatgagatcctggacagcgccagccatgactgccccctggtgacccagacctacggggctgctgctgggaaggcctacacagatgacctgggcgctgtgggcggggcctgcctggaggatgaggccagcgccctgcggctggatgaagattctgagcacccccccatgatcctgaggacagactag

SEQ ID NO: 30512 - DNA, 1155 bp, Artificial Sequence
  derived and/or modified sequence
atgttcacccacgtgctgcccttcgtcatctctgctgacacagaagatgtgtgcatcgtggagcggctcttcagcagcagcctggtggccatcgtgtccctgaaggcccccaggaagctgaaggtgtgccacttcaagaagggcacagagatctgcaactacagctacagcaacaccatcctggccgtgaagctgaaccggcagaggctgattgtgtgcctggaggagagcctgtacatccacaacatccgggacatgaaggtgctgcacaccatccgggagaccccacccaacccagctggcctgtgtgccctgagcatcaacaatgacaactgctacctggcctacccaggcagcgccaccatcggggaggtgcaggtgtttgacaccatcaacctgcgggccgccaacatgatcccagcccatgacagccccctggccgccctggcctttgatgccagcggcaccaagctggccacagccagcgagaagggcaccgtcatccgggtcttcagcatccctgagggccagaagctgtttgagttcagaagaggagtgaagagatgtgtgtccatctgcagcctggccttctccatggatggcatgttcctgagcgccagcagcaacacagagaccgtgcacatcttcaagctggagaccgtgaaggagaagcccccagaggagcccaccacctggacaggctactttgggaaggtgctgatggccagcaccagctacctgcccagccaggtgacagagatgttcaaccagggccgggcctttgccaccgtgcggctgcccttctgtggccacaagaacatctgcagcctggccaccatccagaagatcccccggctgctggtgggcgctgctgatggctacctgtacatgtacaacctggacccccaggagggcggagaatgtgccctgatgaagcagcaccggctggatggcagcctggagaccaccaatgagatcctggacagcgccagccatgactgccccctggtgacccagacctatggagctgctgctgggaaggcctacacagatgacctgggcgctgtgggcggggcctgcctggaggatgaggccagcgccctgcggctggatgaggacagcgagcacccccccatgatcctgaggacagactag

SEQ ID NO: 30513 - DNA, 1314 bp, Artificial Sequence
  derived and/or modified sequence
atgctgctgcggctgcagcggatcaagaccctgcggccccccggctgtccccacccaatgaccacctgctctgccggtaccctgagcgcagttccctgcgtctcacctcggcaggtgttcgtcttcgagagacgtttctgcctttggagccatgtcgaaatgttcacgcacgtgctgccgtttgtgattagtgccgacaccgaggacgtgtgtattgtcgagcggctgttcagctcctctctcgtcgccattgtgtccctgaaagctccacgcaagttaaaggtgtgccacttcaaaaagggcacagagatttgtaattactcttactctaataccatcctagctgtgaaactgaaccgccagcgactaatagtgtgcctggaggagagcctgtatattcacaatattagagacatgaaagtgctccacacaatccgggaaaccccaccaaaccccgcaggattgtgcgccctgtctatcaataacgacaattgttacctagcctatccggggtctgctaccattggcgaggtccaggtatttgacacaatcaacctgcgcgcagcgaatatgatccccgcacacgactctccacttgcggccctcgccttcgatgcgtccggcaccaagctggccaccgcctccgaaaagggaactgtcatcagagtttttagtattcctgaaggccagaagctgttcgaattccggcggggggttaagcggtgcgtttcaatttgctctttagcatttagcatggatggaatgtttcttagtgcaagctcaaacaccgagactgtgcatatctttaaactggaaaccgtgaaagaaaagcctcctgaagagccaaccacatggactggttatttcggtaaagttcttatggcctcaacctcctacttaccttcacaggtgacggagatgttcaatcagggcagagcatttgccacggtgcgactgccattttgtgggcacaaaaatatctgttcactcgccacgattcagaaaattcctcggctgctcgtaggcgctgcggatgggtatttgtatatgtacaaccttgatcctcaggagggcggagagtgcgctctaatgaagcaacacagacttgacggaagcttggagacgaccaatgagattctcgattccgccagccacgattgccccctcgtcacccagacctatggcgccgcggcgggtaaggcttataccgatgatctgggcgccgtgggcggggcatgcttagaagatgaagcctctgcgttgcgactggacgaagatagcgagcaccctccaatgatccttcgcacagattag

SEQ ID NO: 30514 - DNA, 1155 bp, Artificial Sequence
  derived and/or modified sequence
atgttcacccacgtgctgcccttcgtgatcagcgccgacaccgaggatgtgtgcatcgtggaacgattgttctcctcatccctcgtggctatcgtctctctgaaggcgcccaggaaactcaaggtctgtcactttaaaaaaggaacagagatatgcaactactcatattctaatacgattctagcagtcaagctgaaccggcagagactaatcgtttgtctggaggaatccctctacatacataatatcagagacatgaaagtgttacacacgatacgcgaaactccccctaacccggctggcctatgcgccctgagcattaacaatgacaactgctatctggcgtacccgggctccgcaacaattggagaagtgcaagtgtttgatacaattaacttaagggccgcgaacatgattcctgcccatgattcgccgctggccgcattggcttttgacgcctccgggaccaagttagccacagctagcgagaaaggaaccgtcatccgggtcttttcaattcctgagggacaaaagttgttcgagtttagaagaggcgtcaagcggtgcgtcagcatctgctcattggccttcagcatggacggaatgtttttatccgcttcttctaacaccgaaacagtacatatctttaaacttgagacagtaaaggaaaagcctccagaagaaccaaccacctggacaggctactttggaaaggtgcttatggcgagcaccagctatctgccatctcaagtaactgaaatgtttaaccagggaagggcctttgccacagtgagactgcctttctgcgggcacaaaaatatttgctcgctcgctaccattcaaaagatcccacgactgttggttggcgctgccgatgggtacctgtatatgtacaatctggatcctcaggaagggggggaatgtgccctgatgaaacaacaccggctagatggcagtttagaaactaccaatgaaatcctggattccgcctctcatgattgccctctcgtgacccagacatatggagctgctgcgggaaaagcctataccgatgacctgggcgctgtgggaggcgcgtgtctggaagacgaggccagcgctctgcgtctggacgaggacagcgaacacccccctatgatcctgcgaactgactag

SEQ ID NO: 30515 - DNA, 1314 bp, Artificial Sequence
  derived and/or modified sequence
atgctactgcgactgcaaaggataaagacactccggcctccaggatgtccgcatccgatgaccacatgctcagcaggcactctgagcgccgtgccttgcgtaagtcctcgccaggtgttcgtgtttgaaagacgcttttgtctgtggtcccatgtggagatgttcacgcacgtcctcccttttgttatctcggcggataccgaggatgtgtgtatcgttgaacggctgttctcaagtagcctcgtggcgatcgtgtcactgaaagcaccgaggaagctgaaagtttgtcatttcaagaagggcactgaaatctgtaactattcgtacagcaacacaattttagcagtgaaacttaacaggcagcgcctcatcgtgtgcttggaagagagcctctatatccacaacatccgggatatgaaggtccttcacacaatcagagaaaccccaccaaaccccgctggcttatgtgctctgtcaattaacaacgataactgttacctggcctatccgggttcagccaccattggagaggtccaggtgttcgacacaatcaacctccgggctgccaatatgattcccgcacacgatagccccttagcagccctggcctttgacgcgtctggcactaagctggctaccgcctcagagaaaggaactgtcatcagggtcttctctatacccgaaggacagaaactgtttgaattcagacgcggagtgaaacggtgtgtgtccatttgttcactggccttctccatggacgggatgttcctcagcgcctcgtccaacacagaaactgtgcatattttcaaacttgaaaccgtgaaggaaaagccccctgaggagccaaccacttggacaggatacttcgggaaggtgcttatggctagcacctcatacctcccatcccaggtgaccgaaatgtttaaccaagggagggctttcgccaccgttcggctgcctttttgcggccacaaaaatatttgctctctagcaacaatccagaaaattcccagactcctggtgggcgcagccgacggctatctctatatgtacaatcttgaccctcaggaaggtggtgagtgcgccttgatgaaacagcataggctggatggtagtctggagactacaaatgaaattttggactctgcgagtcatgactgcccactcgtgacccagacctacggagccgctgcagggaaagcttacactgacgatctgggcgcagtgggaggcgcatgtctggaggacgaagctagtgccctgcggttggacgaggacagcgagcatccacccatgatactgcgcacagattag

SEQ ID NO: 30516 - DNA, 1155 bp, Artificial Sequence
  derived and/or modified sequence
atgtttacgcatgtactccctttcgtcatctccgctgacacagaggatgtgtgcatcgtggaaaggttgtttagctcatcactggtggcaattgtatctctgaaagccccaaggaagttaaaggtatgccactttaagaagggtaccgagatttgcaattactcttattcaaataccatccttgctgtaaaattgaaccggcagagactgatagtgtgtctggaggagagcctttacatccacaacatacgggatatgaaggtactccacaccattagggagacacctccaaaccccgcaggcctatgtgccctaagtattaataacgataactgttacctcgcctaccctggctccgccaccatcggagaggtccaggtgtttgacaccattaatctgcgcgctgctaacatgatccctgcacacgactccccactcgcagcgctggctttcgatgccagtggtacgaagctggctactgctagcgaaaaaggcaccgtgatccgtgttttttctattccagagggacagaaactgttcgaattcagacgaggcgtgaagaggtgcgtcagcatttgtagcctggcgtttagtatggatgggatgtttctttccgcgagcagtaacaccgaaacagtgcacatcttcaagttggaaaccgtcaaggaaaagccacccgaggaacccaccacatggactggctactttggtaaggtccttatggcctccacgtcttatttaccttcacaggtaactgagatgtttaatcagggaagagccttcgccactgtccgtctccctttctgcgggcacaaaaatatctgttctctggctaccattcagaaaattccgagactgcttgttggggcagctgacggctacttgtacatgtacaatttggatccccaagagggaggggaatgtgccctaatgaagcagcaccgtctcgatggttctctcgagacaaccaacgaaatattggactcagcctcccacgattgtcctttggtgacccagacgtacggcgctgctgccggtaaggcgtacaccgatgacctcggggcagttgggggagcatgcctggaggacgaagccagcgctctcagacttgacgaagattcagagcaccctcccatgattttaaggacagactag

SEQ ID NO: 30517 - DNA, 2090 bp, Artificial Sequence
  derived and/or modified sequence
atgctcctgaggctccagcgaatcaagaccctcagacccccgggctgtccccaccccatgaccacatgttccgcaggcaccctcagcgctgtgccctgcgtgtcgcccaggcaggtgtttgtttttgagcgcagattctgcctgtggagccatgtggagatgttcacgcatgtacttccctttgtgatttcagccgatacggaagatgtgtgcattgtagagagattgttctccagcagcctagtggccatcgtcagccttaaagcaccaaggaagctaaaggtttgccactttaagaagggaactgagatctgcaactacagctactccaacacgattctggctgtgaagctcaacaggcagaggctgatagtatgcctggaggagtccctgtacatccacaacattcgggacatgaaggtgctgcatacgatcagggagacgcctccaaaccctgcaggcctgtgtgcgctgtcaatcaacaacgacaactgctacttggcgtacccagggagcgcgaccatcggagaggtgcaggtcttcgataccattaatttgagagctgcaaacatgattccggctcacgacagtcctttagcggcactggcctttgacgcaagtggaactaaacttgccacggcttcggagaaggggaccgtgattagggtattttccattccagaaggacaaaaactctttgagtttcggagaggagtaaagaggtgcgtgagcatctgctccctggccttcagcatggacggcatgttcctctccgcctccagcaacactgagaccgtgcacatcttcaaactcgagactgtgaaagaaaaacccccagaggagcccaccacctggaccgggtacttcgggaaagtgctcatggcctccaccagctacctgccttcccaagtgacagaaatgttcaaccagggcagagccttcgccacggtccgcctgccattctgcggccacaaaaacatctgctcgctagccacaattcagaagatcccgcggttgttggtgggtgccgccgacgggtacctgtacatgtacaacctggacccccaggagggcggcgagtgtgccctgatgaagcagcaccggctggacggcagtctggaaacgaccaatgagatcttggactctgcctctcacgactgccccttagtcactcagacatacggcgcagctgcaggaaaagcctacacagacgacctgggtgctgtgggtggcgcctgcctggaggacgaggccagcgccctgcgcctggatgaggacagcgagcacccgcccatgattcttcggactgactgaacttgacctgtgacctctgacccggggagcagagaacactggcttcacagaggactttgtgcattgctgctatgaactttgacctgagtcgggggagaggatggcagagactttattaaaaaaaaaaaaagattgtagtggtagtctaactccataacgctgaggaaatacatcattttcacttcagtggcttttaaatcctgcttatgaattttagctttttgtttgtttgttttctctttttgccaaaattaactgtttggtgaagcccgcaaaacctcctcgctttgcatgcatgaacgtgccaagccagcataggggagctagaagccactttccagccacctgccgttgggttttttcatatctgtacataatgccgagtgcgtaaggaaaccgtggcgtcgcgcacagtgggtctgcttgtcaaggccagttctgcagtgacaggcccaggggctgcccaccaggtgtgctgggcagacttcagctgggacagaagtccgatctccctagggccccacctggaccattttccctccgttttattttgttaattaaattctttccaaattggatcgctctgggatttcttccatggtggacttttgtttctgatcttgttttccctgtggatattggaggacagcgaggttctttctgatactaaaaacctttctttcaggcagcaaatgaacttgaaaggttgcctggactcgctggagcaaaggaaagcgattttgtttgtataattaaatgatctgttcttctacttc

SEQ ID NO: 30518 - DNA, 1504 bp, Artificial Sequence
  derived and/or modified sequence
acagaactgactgaaaggaacctttgtctttcgtgtgaatgctcgtgaggggccatccttagagtggaaatgctcctgaggctccagcgaatcaagaccctcagacccccgggctgtccccaccccatgaccacatgttccgcaggcaccctcagcgctgtgccctgcgtgtcgcccaggcaggtgtttgtttttgagcgcagattctgcctgtggccatagccatgtggagatgttcacgcatgtacttccctttgtgatttcagccgatacggaagatgtgtgcattgtagagagattgttctccagcagcctagtggccatcgtcagccttaaagcaccaaggaagctaaaggtttgccactttaagaagggaactgagatctgcaactacagctactccaacacgattctggctgtgaagctcaacaggcagaggctgatagtatgcctggaggagtccctgtacatccacaacattcgggacatgaaggtgctgcatacgatcagggagacgcctccaaaccctgcaggcctgtgtgcgctgtcaatcaacaacgacaactgctacttggcgtacccagggagcgcgaccatcggagaggtgcaggtcttcgataccattaatttgagagctgcaaacatgattccggctcacgacagtcctttagcggcactggcctttgacgcaagtggaactaaacttgccacggcttcggagaaggggaccgtgattagggtattttccattccagaaggacaaaaactctttgagtttcggagaggagtaaagaggtgcgtgagcatctgctccctggccttcagcatggacggcatgttcctctccgcctccagcaacactgagaccgtgcacatcttcaaactcgagactgtgaaagaaaaacccccagaggagcccaccacctggaccgggtacttcgggaaagtgctcatggcctccaccagctacctgccttcccaagtgacagaaatgttcaaccagggcagagccttcgccacggtccgcctgccattctgcggccacaaaaacatctgctcgctagccacaattcagaagatcccgcggttgttggtgggtgccgccgacgggtacctgtacatgtacaacctggacccccaggagggcggcgagtgtgccctgatgaagcagcaccggctggacggcagtctggaaacgaccaatgagatcttggactctgcctctcacgactgccccttagtcactcagacatacggcgcagctgcaggaaaagcctacacagacgacctgggtgctgtgggtggcgcctgcctggaggacgaggccagcgccctgcgcctggatgaggacagcgagcacccgcccatgattcttcggactgactgaacttgacctgtgacctctgacccggggagcagagaacactggcttcacagaggactttgtgcattgctgctatgaactttgacctgagtcgggggagaggatggcagagactttatt

SEQ ID NO: 30519 - protein, 703 aa, Artificial Sequence
  derived and/or modified sequence
MGNHSGRPEDPEPGAFTTTKRTGIPAPREFSVTVSRERSVPRGPSNPRKSVSSPTSSNTPTPTKHLRTPSTKPKQENEGGEKAALESQVRELLAEAKAKDSEINRLRSELKKYKEKRTLNAEGTDALGPNVDGTSVSPGDTEPMIRALEEKNKNFQKELSDLEEENRVLKEKLIYLEHSPNSEGAASHTGDSSCPTSITQESSFGSPTGNQMSSDIDEYKKNIHGNALRTSGSSSSDVTKASLSPDASDFEHITAETPSRPLSSTSNPFKSSKCSTAGSSPNSVSELSLASLTEKIQKMEENHHSTAEELQATLQELSDQQQMVQELTAENEKLVDEKTILETSFHQHRERAEQLSQENEKLMNLLQERVKNEEPTTQEGKIIELEQKCTGILEQGRFEREKLLNIQQQLTCSLRKVEEENQGALEMIKRLKEENEKLNEFLELERHNNNMMAKTLEECRVTLEGLKMENGSLKSHLQGEKQKATEASAVEQTAESCEVQEMLKVARAEKDLLELSCNELRQELLKANGEIKHVSSLLAKVEKDYSYLKEICDHQAEQLSRTSLKLQEKASESDAEIKDMKETIFELEDQVEQHRAVKLHNNQLISELESSVIKLEEQKSDLERQLKTLTKQMKEETEEWRRFQADLQTAVVVANDIKCEAQQELRTVKRKLLEEEEKNARLQKELGDVQGHGRVVTSRAAPP

SEQ ID NO: 30520 - protein, 709 aa, Artificial Sequence
  derived and/or modified sequence
MGNHSGRPEDPEPGAFTTTKRTGIPAPREFSVTVSRERSVPRGPSNPRKSVSSPTSSNTPTPTKHLRTPSTKPKQENEGGEKAALESQVRELLAEAKAKDSEINRLRSELKKYKEKRTLNAEGTDALGPNVDGTSVSPGDTEPMIRALEEKNKNFQKELSDLEEENRVLKEKLIYLEHSPNSEGAASHTGDSSCPTSITQESSFGSPTGNQMSSDIDEYKKNIHGNALRTSGSSSSDVTKASLSPDASDFEHITAETPSRPLSSTSNPFKSSKCSTAGSSPNSVSELSLASLTEKIQKMEENHHSTAEELQATLQELSDQQQMVQELTAENEKLVDEKTILETSFHQHRERAEQLSQENEKLMNLLQERVKNEEPTTQEGKIIELEQKCTGILEQGRFEREKLLNIQQQLTCSLRKVEEENQGALEMIKRLKEENEKLNEFLELERHNNNMMAKTLEECRVTLEGLKMENGSLKSHLQGEKQKATEASAVEQTAESCEVQEMLKVARAEKDLLELSCNELRQELLKANGEIKHVSSLLAKVEKDYSYLKEICDHQAEQLSRTSLKLQEKASESDAEIKDMKETIFELEDQVEQHRAVKLHNNQLISELESSVIKLEEQKSDLERQLKTLTKQMKEETEEWRRFQADLQTAVVVANDIKCEAQQELRTVKRKLLEEEEKNARLQKELGDVQGHGRVVTSRAAPPSLGSVS

SEQ ID NO: 30521 - DNA, 2130 bp, Artificial Sequence
  derived and/or modified sequence
atgggcaaccacagcggcagacccgaggaccccgagcccggcgccttcaccaccaccaagagaaccggcatccccgcccccagagagttcagcgtgaccgtgagcagagagagaagcgtgcccagaggccccagcaaccccagaaagagcgtgagcagccccaccagcagcaacacccccacccccaccaagcacctgagaacccccagcaccaagcccaagcaggagaacgagggcggcgagaaggccgccctggagagccaggtgagagagctgctggccgaggccaaggccaaggacagcgagatcaacagactgagaagcgagctgaagaagtacaaggagaagagaaccctgaacgccgagggcaccgacgccctgggccccaacgtggacggcaccagcgtgagccccggcgacaccgagcccatgatcagagccctggaggagaagaacaagaacttccagaaggagctgagcgacctggaggaggagaacagagtgctgaaggagaagctgatctacctggagcacagccccaacagcgagggcgccgccagccacaccggcgacagcagctgccccaccagcatcacccaggagagcagcttcggcagccccaccggcaaccagatgagcagcgacatcgacgagtacaagaagaacatccacggcaacgccctgagaaccagcggcagcagcagcagcgacgtgaccaaggccagcctgagccccgacgccagcgacttcgagcacatcaccgccgagacccccagcagacccctgagcagcaccagcaaccccttcaagagcagcaagtgcagcaccgccggcagcagccccaacagcgtgagcgagctgagcctggccagcctgaccgagaagatccagaagatggaggagaaccaccacagcaccgccgaggagctgcaggccaccctgcaggagctgagcgaccagcagcagatggtgcaggagctgaccgccgagaacgagaagctggtggacgagaagaccatcctggagaccagcttccaccagcacagagagagagccgagcagctgagccaggagaacgagaagctgatgaacctgctgcaggagagagtgaagaacgaggagcccaccacccaggagggcaagatcatcgagctggagcagaagtgcaccggcatcctggagcagggcagattcgagagagagaagctgctgaacatccagcagcagctgacctgcagcctgagaaaggtggaggaggagaaccagggcgccctggagatgatcaagagactgaaggaggagaacgagaagctgaacgagttcctggagctggagagacacaacaacaacatgatggccaagaccctggaggagtgcagagtgaccctggagggcctgaagatggagaacggcagcctgaagagccacctgcagggcgagaagcagaaggccaccgaggccagcgccgtggagcagaccgccgagagctgcgaggtgcaggagatgctgaaggtggccagagccgagaaggacctgctggagctgagctgcaacgagctgagacaggagctgctgaaggccaacggcgagatcaagcacgtgagcagcctgctggccaaggtggagaaggactacagctacctgaaggagatctgcgaccaccaggccgagcagctgagcagaaccagcctgaagctgcaggagaaggccagcgagagcgacgccgagatcaaggacatgaaggagaccatcttcgagctggaggaccaggtggagcagcacagagccgtgaagctgcacaacaaccagctgatcagcgagctggagagcagcgtgatcaagctggaggagcagaagagcgacctggagagacagctgaagaccctgaccaagcagatgaaggaggagaccgaggagtggagaagattccaggccgacctgcagaccgccgtggtggtggccaacgacatcaagtgcgaggcccagcaggagctgagaaccgtgaagagaaagctgctggaggaggaggagaagaacgccagactgcagaaggagctgggcgacgtgcagggccacggcagagtggtgaccagcagagccgccccccccagcctgggcagcgtgagctag

SEQ ID NO: 30522 - DNA, 2130 bp, Artificial Sequence
  derived and/or modified sequence
atgggaaatcattcagggcgcccagaggacccagagcccggagcgttcaccacaaccaaaagaacaggcattcccgctccccgagagttctccgtgacagtgtctcgagagcgatccgtcccacggggtccctctaacccaaggaaatcggtctctagtcccacctcgagtaacacgcccactcccacaaagcacctccgaacgccctcaactaagccaaaacaagagaacgagggcggggagaaagccgctcttgaatctcaggtacgtgagttactggctgaagctaaagcgaaggacagcgagatcaacaggctcaggagcgaactgaaaaaatacaaagagaagcgaactttaaacgcagaagggaccgatgctctcggtccgaacgtagacgggacctccgtgagccccggcgataccgagcctatgattcgagctctcgaagaaaaaaacaagaactttcaaaaagagcttagtgacttagaagaagagaatcgcgttctcaaagagaagcttatctacctggagcactctcccaactcggagggagcagcttcccatacgggcgactctagctgcccaaccagcatcacacaggaatccagcttcggatctcctacgggcaaccaaatgagcagtgatattgatgagtacaagaagaacatacatggaaatgccctgcggacctcaggatcgtctagttctgacgtgacaaaagccagtctgagcccagacgccagtgatttcgagcacataactgctgagacaccctctagacccctctcatcgacctcaaaccctttcaagtctagcaaatgctctaccgcaggatcttctcccaattccgtgagcgaactcagtctggcctccctgacagagaagatccagaagatggaagaaaaccatcacagcacagctgaggagctgcaagcaactctccaggagttgtccgatcagcaacagatggtccaagagcttaccgccgaaaacgaaaaactagtcgatgaaaaaacgatcctggaaacatcctttcaccagcaccgtgagagagctgaacaactgagccaggagaacgagaagctcatgaacttgctccaggaaagagtcaaaaacgaggaaccgacaactcaggaggggaaaatcatagaactggaacaaaagtgtactgggatcctcgagcagggtcgatttgagagagaaaaactgctcaacattcagcagcaactcacttgcagtctaaggaaagtagaggaagaaaaccagggcgcactagaaatgatcaagagactcaaagaggagaatgagaaacttaatgaattcctagagctggaacgtcataacaacaacatgatggccaagactctggaggagtgccgggtgacactggagggactgaagatggagaacggctccctgaaatcgcatctccagggcgagaagcagaaggcaacagaagccagcgccgtagaacaaacagccgaatcctgcgaagtccaggaaatgcttaaggtggctagagcagagaaggacctgctggagctctcatgcaatgagctccgccaggagctcctgaaagcgaatggcgaaattaaacatgtcagcagtctgcttgcgaaggtggagaaggattattcatacctgaaggaaatctgtgaccatcaggcagagcagctgagtcgcaccagcctgaagttacaggagaaggccagcgagagcgatgccgaaattaaggacatgaaggagaccatctttgaactggaagatcaagtcgagcagcaccgagctgtcaaactccataataatcaactgatctcagaactcgaatcctcggtcatcaagctcgaggaacagaaaagcgatctcgagcgccagctgaagactttaactaaacagatgaaagaggaaacagaagaatggcgcaggttccaggccgatctgcaaacggccgtggtcgtggcgaacgacatcaaatgcgaagcgcagcaggaactgagaacggttaagaggaagttgcttgaagaggaagaaaagaacgccagactgcagaaagagcttggcgacgtccaggggcatggtagagttgtgacgtcccgcgccgcccctccttcactgggatcagtatcttag

SEQ ID NO: 30523 - DNA, 2130 bp, Artificial Sequence
  derived and/or modified sequence
atgggcaaccacagcggccgcccagaagatcctgagcccggggccttcaccaccaccaagaggacaggcatcccagccccccgggagttctctgtgacagtgtcccgggagaggtctgtgccccggggccccagcaaccccaggaagtctgtgagcagccccaccagcagcaacacccccacccccaccaagcacctgcggacccccagcaccaagcccaagcaggagaatgaaggaggagagaaggccgccctggagagccaggtgcgggagctgctggccgaggccaaggccaaggacagcgagatcaaccggctgcggtctgagctgaagaagtacaaggagaagaggaccctgaatgctgagggcacagatgccctgggccccaacgtggatggcacctctgtgtcccctggggacacagagcccatgatccgggccctggaggagaagaacaagaacttccagaaggagctgagtgacctggaggaggagaacagagtgctgaaggagaagctgatctacctggagcacagccccaacagcgagggcgccgccagccacactggagacagcagctgccccaccagcatcacccaggagagcagctttggcagccccaccggcaaccagatgagcagtgacattgatgagtacaagaagaacatccacggcaatgccctgcggaccagcggcagcagcagcagtgatgtgaccaaggccagcctgagcccagatgccagtgactttgagcacatcacagctgagacccccagccggcccctgagcagcaccagcaaccccttcaagagcagcaagtgcagcacagctggcagcagccccaacagcgtgtctgagctgagcctggccagcctgacagagaagatccagaagatggaggagaaccaccacagcacagctgaggagctgcaggccaccctgcaggagctgagtgaccagcagcagatggtgcaggagctgacagcagaaaatgagaagctggtggatgagaagaccatcctggagaccagcttccaccagcaccgggagcgggcagagcagctgagccaggagaatgagaagctgatgaacctgctgcaggagcgggtgaagaatgaggagcccaccacccaggagggcaagatcatcgagctggagcagaagtgcaccggcatcctggagcagggccgctttgagcgggagaagctgctgaacatccagcagcagctgacctgcagcctgaggaaggtggaggaggagaaccagggcgccctggagatgatcaagaggctgaaggaggagaatgagaagctgaatgagttcctggagctggagcggcacaacaacaacatgatggccaagaccctggaggagtgccgggtgaccctggagggcctgaagatggagaatggcagcctgaagagccacctgcagggcgagaagcagaaggccacagaggccagcgctgtggagcagacagctgagagctgtgaggtgcaggagatgctgaaggtggcccgggcagagaaggacctgctggagctgagctgcaatgagctgcggcaggagctgctgaaggccaacggggagatcaagcacgtgagcagcctgctggccaaggtggagaaggactacagctacctgaaggagatctgtgaccaccaggccgagcagctgagcaggaccagcctgaagctgcaggagaaggccagcgagagtgatgctgagatcaaggacatgaaggagaccatctttgagctggaggaccaggtggagcagcacagagctgtgaagctgcacaacaaccagctgatcagcgagctggagagcagcgtcatcaagctggaggagcagaagagtgacctggagcggcagctgaagaccctgaccaagcagatgaaggaggagacagaggagtggaggcgcttccaggccgacctgcagacagctgtggtggtggccaatgacatcaagtgtgaggcccagcaggagctgaggacagtgaagaggaagctgctggaggaggaggagaagaatgcccggctgcagaaggagctgggagatgtgcagggccacggccgggtggtgaccagccgggccgccccacccagcctgggctctgtgtcctag

SEQ ID NO: 30524 - DNA, 2130 bp, Artificial Sequence
  derived and/or modified sequence
atgggcaaccacagcggccggcccgaggaccccgagcccggcgccttcacgacaaccaagcgaactgggattcctgcacctagagagttttcagtcacagtgtcacgagagcgatccgtgccgcgtggtccttctaacccccggaaaagtgtctcctcacccacaagcagcaacacacccacccctacaaaacacctacgcaccccatctaccaagcctaagcaggaaaacgagggcggggaaaaagcagcactcgagtcacaggtgcgcgagctgttggcagaggccaaggccaaggactccgagattaatagattgaggagtgagctgaaaaaatacaaagagaaaaggactctgaacgccgagggtaccgacgctcttggcccgaacgtggatgggacttccgttagtccaggggatacagagcctatgattcgcgccttggaggagaagaataaaaactttcagaaggagctcagtgaccttgaagaagagaatcgtgtcttgaaagaaaaactgatataccttgaacactctccaaatagcgaaggggctgcttctcacaccggcgatagctcctgcccaacgtctattacacaggaatcaagcttcggttcgccaacaggaaatcagatgagttcagacattgacgaatacaaaaagaatatacatggcaatgctcttcgcacgtcaggctccagttctagcgacgtcaccaaggcctccctgagcccagacgcgagcgattttgagcacatcaccgcagaaacaccgagcagaccactctcctccaccagcaatccattcaaaagcagcaagtgcagcacagcgggctcctcccctaattccgtctctgaactttctctggcctccctcaccgagaagattcaaaagatggaggagaatcatcactctacagctgaagagttgcaggctacacttcaggagctgagcgaccagcagcagatggtccaggagctgacagccgaaaacgaaaaattggtcgatgagaagactatcctcgagacttcctttcaccagcaccgagaacgcgccgagcagctctcccaggaaaatgagaagctcatgaatctgctgcaggaacgagttaaaaacgaagagcctactacgcaggagggcaagataatcgagctggagcaaaagtgcacgggaattcttgaacagggacgcttcgaacgggaaaaattgctgaatattcaacaacagctgacctgttccctgcggaaggtggaagaggagaatcagggcgcactcgaaatgataaagaggctgaaggaagagaatgagaagctcaacgaattcctggaactcgagcgtcacaacaataacatgatggccaaaacgttggaagaatgccgagtaacacttgaggggctgaaaatggaaaacggaagcttgaagagccatcttcagggggaaaagcaaaaagcaaccgaagccagtgccgttgagcagactgctgagtcttgtgaagtacaggaaatgctgaaggtggctagagccgagaaggatctgctagaactgtcgtgtaacgagctcaggcaggagcttctgaaggcaaatggagaaattaagcatgtgtcgtctctgctggctaaggtggaaaaggattatagctacctgaaggaaatctgtgatcaccaggcagagcagctgtctaggacgtccctcaaactacaagaaaaagcatctgagtctgatgccgagatcaaggatatgaaggagactatctttgagctcgaagatcaagtcgagcaacatcgggccgtaaagctccacaataaccagctgatttctgagctggagtcgtctgtgatcaagctagaagagcagaagagcgaccttgagaggcaattgaagacccttactaaacagatgaaggaggaaactgaagagtggaggcggtttcaggccgacctccagacggccgtggttgttgctaacgacattaagtgtgaagctcagcaggagctgagaaccgtcaaaagaaagttgctggaagaggaggaaaagaacgcacgactgcagaaagagctaggagatgtgcaagggcacggtcgagtcgtcacctctcgagcagctccccccagcttagggtccgtcagctag

SEQ ID NO: 30525 - DNA, 2130 bp, Artificial Sequence
  derived and/or modified sequence
atggggaaccattccggacgccctgaggaccccgagcctggagcgtttaccaccacaaagcgaacagggatccctgcgcctagggaattcagcgtcactgtttccagggagcggtctgtgcccagggggccaagcaacccaaggaagagtgtgtcctccccaacttcttcaaacacgccaacccctaccaagcatctcagaacacccagtacgaagcccaagcaagaaaatgagggcggtgaaaaagctgcgctggagtcccaagtgagagaactccttgctgaggccaaggctaaagactctgagatcaaccgactccgctctgagttgaaaaagtataaggaaaaacgaacactcaatgcagaagggacggacgcacttggaccgaatgtggatggtacatcggtaagccccggagacacggagcctatgattagggctctagaggagaaaaataagaatttccaaaaggaactgagtgacttggaagaagagaacagggtccttaaagaaaaactgatctaccttgaacactctccaaattctgagggtgccgcatcacataccggagattcatcctgccctacttctattactcaggagtcgagctttggctctcccactgggaaccagatgtcttctgacatagatgaatacaagaaaaacatccatggcaatgccctcaggacctcaggctctagctccagcgatgtcaccaaggcttccctgagtcccgacgcttcagatttcgagcacatcacagccgaaacaccttccagaccactgagctcgacgagcaaccccttcaagtcttctaagtgctccacagcaggttcatcacctaactcggtgagcgagctgtccctggctagcctaacagagaaaatacagaaaatggaggagaaccaccacagtactgctgaggagttacaggcaacactgcaggaactgagcgaccagcaacaaatggtgcaggaacttaccgctgagaacgagaagcttgtcgacgagaaaacgatcttggaaacaagctttcaccagcatagggagcgcgctgaacagctttctcaggaaaacgagaagttgatgaacctgctccaggagagggtgaagaacgaagagccaacaacccaagaaggaaagattattgaactcgagcaaaagtgcacgggcattctggaacagggccgattcgaaagagagaagctcctaaatatccaacaacagctgacatgttccttgaggaaggtagaggaagagaaccagggggctttagagatgatcaaaagactgaaggaggaaaatgagaaactaaatgaatttcttgaactcgagagacacaataacaatatgatggctaagactctggaggagtgccgcgtcactctcgaaggccttaaaatggaaaacggatccctgaagagccatctgcaaggcgaaaaacagaaagcaaccgaggcttcggcggtggaacagactgccgaatcgtgtgaggtgcaggagatgttgaaggttgctcgggctgaaaaggatctgctggagctcagctgcaatgagcttaggcaagagctcctgaaagctaatggcgagatcaagcacgtttcctctctgctcgctaaggtcgagaaggattatagctatctcaaagaaatctgcgaccaccaggccgagcaattgagtagaacctcattgaagctgcaagagaaagccagcgagtccgatgccgaaatcaaagatatgaaggagactatatttgaattggaggaccaggtagaacagcatcgggcagtaaaattgcacaacaatcaactgataagcgagctcgagtcctctgtaatcaagctcgaagagcagaagagtgatcttgaaagacagctcaaaaccctgacaaaacagatgaaagaggagactgaagagtggcgccgatttcaggcggacctccagaccgcggtcgtcgtcgctaatgacataaaatgtgaggctcagcaggagctacgtacagtgaagagaaaattactcgaagaggaagaaaagaacgcccgtctccagaaggagctgggagacgtccagggccatggtcgggtggtgacatcccgagctgctccacctagcctgggtagtgtgtcatag

SEQ ID NO: 30526 - DNA, 4799 bp, Artificial Sequence
  derived and/or modified sequence
ctggagcggacccgccggacgcaaccgcctcgccagccggagccagcgcgagctcggcacggtggacacccggtccgaggccggcaagccggctggtgcccgagtcggccaagcatgggcaaccactcaggacggcccgaggatccggaaccaggggcctttacaacaactaaacggacaggcattccagccccacgggaattttcagtaactgtctcaagagagaggtctgtgccacgtggtccctccaaccccaggaaatcagtgtccagtccaacttcttccaacactcccactcctacgaaacacctgaggaccccttccacaaagcccaagcaagagaatgaaggtggagaaaaggctgcgcttgagtcccaagttcgggaacttttggcagaagccaaagcaaaagatagtgaaattaacaggcttcgaagtgaactaaagaaatacaaagagaaaaggactctgaacgctgaggggactgatgctttgggcccaaatgtcgatggaacatcagtctccccaggtgacacggaacctatgataagagctcttgaggagaagaacaagaactttcagaaagagctttccgatctagaggaagaaaaccgggtcctgaaggagaaactgatctatcttgagcactccccaaattcagaaggggcagcaagtcacactggcgacagcagctgcccaacatccataactcaagagtcaagcttcggaagcccaactggaaatcagatgtccagtgacattgatgagtataaaaaaaacatacatggaaatgcattacggacatcaggctcctcaagtagcgatgttaccaaagcttctttgtcgccagatgcttccgactttgagcacattacagcagagacaccctcaaggcccctgtcctccaccagtaacccctttaagagttcaaagtgttctactgctgggagttccccaaacagcgtaagtgaattgtccctggcttccctcacagagaagatacaaaagatggaagaaaaccaccatagcactgcagaagaactacaggctactctacaagaattatcagaccagcaacaaatggtacaggaattgacagctgaaaatgagaagctggtggatgaaaagacgattttagagacatcctttcatcagcatcgagagagggcagagcagctaagtcaagaaaatgagaagctgatgaatcttttacaagagcgagtaaagaatgaagagcccaccactcaggaaggaaaaattattgaactggagcagaagtgcacaggtattcttgaacagggccgctttgaaagagagaagctactcaacattcagcagcagttgacctgtagcttgcggaaggttgaggaagaaaaccaaggagctttagaaatgattaaacgtctgaaggaagaaaatgaaaaactgaatgagtttctagaactggaacggcataataataacatgatggccaaaactttggaagagtgtagagttaccttggaagggctaaaaatggagaatggatctttgaagtctcatttgcagggtgagaagcagaaagccacagaggccagtgctgtggagcagacggcagagagctgcgaagttcaagaaatgttgaaagtagcccgagcagagaaagatctactggaactgtcttgcaatgagctcagacaagaattactaaaggcaaacggtgaaattaaacatgtttccagtctgctggccaaggtggaaaaggattattcatacctgaaggagatatgtgatcaccaagccgaacagctgagcagaaccagcctaaagctgcaagaaaaagcatcagagagtgatgcagagatcaaagacatgaaagaaaccatatttgaattggaagatcaggtggaacagcaccgggctgtcaagttacacaataatcaactcatcagtgagctagaaagtagtgtgatcaagctggaggaacagaagtcagacctggagaggcagctgaagactctgaccaagcagatgaaggaggagaccgaggaatggaggcggttccaggcggatctgcagaccgcagtggtggtggccaatgacatcaagtgtgaggcccagcaggagctgcgcaccgtgaagaggaaactgctggaggaggaggagaagaatgcccggttgcagaaggagctgggggatgtgcagggccacggcagggtggtcaccagcagagccgcccctccgtgagtctgctccctgggctctgtcagctagcagagcatttggtggaagaaagacagcccagctcttgccatgattgggagccgcagccatctctagatgaaagggggaatgtgtagaggagaaattgcctctttataaagagcccagttgtctccttgtgacattctctgtttctcagagtcattgccgtcgagtctctgctttttgtccacattttgggatcagcttactgcatgatcaaagatgatgtttccctctttttacttttcctcagaagattgagctgtcttttatttggagaataaaatgaagttctgaaaaaaacaaagtacaagtcttatgaaaagttatttgcagctggagtgctgaaaagggcacagtggcagagcagatgcagagctgggtacagcgcaggcccgagttcttttgttttttgttgttgttgttgttgttgttttgttttgttttttttttttttttgagacagagtttcactcttgttgcccaggctggagtgcaatggtacgatctcggctcactgcaacctctgcctcccgggttcaagtgattctcttgcctcagccttccaagtagctggaattacaggcgcctgccaccacacccagctaatttttgtattgttagtagagatggggtttcaccgtgttggccaggctgctcttgaactcctgacctcaggtgatccccacctcagcctcccaaagtgctgggattacagacatgagccaccgcacccagaacctaaggcccaagttctactttttggtgttcatttctctgcttccttttgatcgtggtgtctgatcatcttggaattcacattactcaaggcaaaataggaagccatctgcgtgatgtcacattccgaagaagtcagaaggttcggcgagttggagctttactcttgttgcccaggctagagtgcagtggtgcgatcttggctcattgcaagctccgcttcctgggtttaagctattctcctgccttggcctcccaagtagctgggattacaggcatgtgccgtcactcctggctaattttgtatttttagtagagatgcaatttcaccatgttggtcaggctggtctcgaactcctgacctcaagtgatctggccgcctcagcctcccaaagtgctgggattacaggcttgagaccccatgtctggccccttctgtggggtcttgattgagccccttcacttggagtctgacttcattacctcgtctgaaacaaggtgcctccaagctttgggttgatttccagaatcttgttgggttaaacataagtagaagtttgatcataaaggatgttattaagccggataggtaagcacggtgacaatggcaatagaaatctaatggaaaacgattgaatgacaactacaccaaagtttcatggatgaaactcaccccagaaacttagtgttcaaatcagagtgatacacaattcaaaatgtgattttaaacttctggaaatatgtgtgtttgtgaagatccaaatccaattcagcaacctccatcaggcagaaaccttctgcaatcctcacatgaggaactggttcacagtgtacacagcatggagccattagtgacgttatccaaaggatgagacaagacaaaagttactgtctaataaaaggaaaattaggaacaggaatgctctttaaactcaggaagatcttttggggtgtcaaactggacagcacagaatcattagaaaaattagcttggcgtgagaagagacattgaggtcttctctgtaaaatttacttagatacttgtgaataggactgaaatttatattttgggcactctttacctcagattcagagttcttaggattatttaaaattcatttgctggatgttttcaagtataaacaataagaaaactgcaacttcaacttaaaaggcactgctgtatttgcaccctatattttgacctgtcgttaggtactgttgaatatttttatctgtaagcatttatgaagtgcaaaataaacatgttattatatagaagcgtctgctgcttagttttaatcaccagctacgtttctgcagggcctttatgtcgttttgttctacatttttttctgaatacagtttcagaacttcaaagtcacatcaagtaactagaatttgaggtagaaaaaagctggatgtaagttgtaaataggaggttgacatggaatatgaacagtttcattagtagaacaaaagggcatggagtaaaaatgctaattttgcataaatttttaaaactctagggtctcagaaaatatagcatggacttaaagtctagatgtgttttgttgacatttaaatatgaatagattgatgatttaatgtattggattttttcttaattatgaagtattatttaggtatactaataacaaaatggagacgtgtgaagaaaaatattaatctttcttctccctcagtaccacctgtgaggaaatcagtgttaacagtgtgtacatttttctttactcatgaatatgtatagggttcattttcatatttttaataaaaattggattatattcttttca

SEQ ID NO: 30527 - DNA, 2525 bp, Artificial Sequence
  derived and/or modified sequence
cggacccgccggacgcaaccgcctcgccagccggagccagcgcgagctcggcacggtggacacccggtccgaggccggcaagccggctggtgcccgagtcggccaagcatgggcaaccactcaggacggcccgaggatccggaaccaggggcctttacaacaactaaacggacaggcattccagccccacgggaattttcagtaactgtctcaagagagaggtctgtgccacgtggtccctccaaccccaggaaatcagtgtccagtccaacttcttccaacactcccactcctacgaaacacctgaggaccccttccacaaagcccaagcaagagaatgaaggtggagaaaaggctgcgcttgagtcccaagttcgggaacttttggcagaagccaaagcaaaagatagtgaaattaacaggcttcgaagtgaactaaagaaatacaaagagaaaaggactctgaacgctgaggggactgatgctttgggcccaaatgtcgatggaacatcagtctccccaggtgacacggaacctatgataagagctcttgaggagaagaacaagaactttcagaaagagctttccgatctagaggaagaaaaccgggtcctgaaggagaaactgatctatcttgagcactccccaaattcagaaggggcagcaagtcacactggcgacagcagctgcccaacatccataactcaagagtcaagcttcggaagcccaactggaaatcagatgtccagtgacattgatgagtataaaaaaaacatacatggaaatgcattacggacatcaggctcctcaagtagcgatgttaccaaagcttctttgtcgccagatgcttccgactttgagcacattacagcagagacaccctcaaggcccctgtcctccaccagtaacccctttaagagttcaaagtgttctactgctgggagttccccaaacagcgtaagtgaattgtccctggcttccctcacagagaagatacaaaagatggaagaaaaccaccatagcactgcagaagaactacaggctactctacaagaattatcagaccagcaacaaatggtacaggaattgacagctgaaaatgagaagctggtggatgaaaagacgattttagagacatcctttcatcagcatcgagagagggcagagcagctaagtcaagaaaatgagaagctgatgaatcttttacaagagcgagtaaagaatgaagagcccaccactcaggaaggaaaaattattgaactggagcagaagtgcacaggtattcttgaacagggccgctttgaaagagagaagctactcaacattcagcagcagttgacctgtagcttgcggaaggttgaggaagaaaaccaaggagctttagaaatgattaaacgtctgaaggaagaaaatgaaaaactgaatgagtttctagaactggaacggcataataataacatgatggccaaaactttggaagagtgtagagttaccttggaagggctaaaaatggagaatggatctttgaagtctcatttgcagggtgagaagcagaaagccacagaggccagtgctgtggagcagacggcagagagctgcgaagttcaagaaatgttgaaagtagcccgagcagagaaagatctactggaactgtcttgcaatgagctcagacaagaattactaaaggcaaacggtgaaattaaacatgtttccagtctgctggccaaggtggaaaaggattattcatacctgaaggagatatgtgatcaccaagccgaacagctgagcagaaccagcctaaagctgcaagaaaaagcatcagagagtgatgcagagatcaaagacatgaaagaaaccatatttgaattggaagatcaggtggaacagcaccgggctgtcaagttacacaataatcaactcatcagtgagctagaaagtagtgtgatcaagctggaggaacagaagtcagacctggagaggcagctgaagactctgaccaagcagatgaaggaggagaccgaggaatggaggcggttccaggcggatctgcagaccgcagtggtggtggccaatgacatcaagtgtgaggcccagcaggagctgcgcaccgtgaagaggaaactgctggaggaggaggagaagaatgcccggttgcagaaggagctgggggatgtgcagggccacggcagggtggtcaccagcagagccgcccctccctccctgggctctgtcagctagcagagcatttggtggaagaaagacagcccagctcttgccatgattgggagccgcagccatctctagatgaaagggggaatgtgtagaggagaaattgcctctttataaagagcccagttgtctccttgtgacattctctgtttctcagagtcattgccgtcgagtctctgctttttgtccacattttgggatcagcttactgcatgatcaaagatgatgtttccctctttttacttttcctcagaagattgagctgtcttttatttggagaataaaatgaagttctg

SEQ ID NO: 30528 - protein, 987 aa, Artificial Sequence
  derived and/or modified sequence
MGNHSGRPEDPEPGAFTTTKRTGIPAPREFSVTVSRERSVPRGPSNPRKSVSSPTSSNTPTPTKHLRTPSTKPKQENEGGEKAALESQVRELLAEAKAKDSEINRLRSELKKYKEKRTLNAEGTDALGPNVDGTSVSPGDTEPMIRALEEKNKNFQKELSDLEEENRVLKEKLIYLEHSPNSEGAASHTGDSSCPTSITQESSFGSPTGNQMSSDIDEYKKNIHGNALRTSGSSSSDVTKASLSPDASDFEHITAETPSRPLSSTSNPFKSSKCSTAGSSPNSVSELSLASLTEKIQKMEENHHSTAEELQATLQELSDQQQMVQELTAENEKLVDEKTILETSFHQHRERAEQLSQENEKLMNLLQERVKNEEPTTQEGKIIELEQKCTGILEQGRFEREKLLNIQQQLTCSLRKVEEENQGALEMIKRLKEENEKLNEFLELERHNNNMMAKTLEECRVTLEGLKMENGSLKSHLQGEKQKATEASAVEQTAESCEVQEMLKVARAEKDLLELSCNELRQELLKANGEIKHVSSLLAKVEKDYSYLKEICDHQAEQLSRTSLKLQEKASESDAEIKDMKETIFELEDQVEQHRAVKLHNNQLISELESSVIKLEEQKSDLERQLKTLTKQMKEETEEWRRFQADLQTAVVVANDIKCEAQQELRTVKRKLLEEEEKNARLQKELGDVQGHGRVVTSRAAPPPVDEEPESSEVDAAGRWPGVCVSRTSPTPPESATTVKSLIKSFDLGRPGGAGQNISVHKTPRSPLSGIPVRTAPAAAVSPMQRHSTYSSVRPASRGVTQRLDLPDLPLSDILKGRTETLKPDPHLRKSPSLESLSRPPSLGFGDTRLLSASTRAWKPQSKLSVERKDPLAALAREYGGSKRNALLKWCQKKTQGYANIDITNFSSSWSDGLAFCALLHTYLPAHIPYQELNSQEKKRNLLLAFEAAESVGIKPSLELSEMLYTDRPDWQSVMQYVAQIYKYFET

SEQ ID NO: 30529 - DNA, 2964 bp, Artificial Sequence
  derived and/or modified sequence
atgggcaaccacagcggcagacccgaggaccccgagcccggcgccttcaccaccaccaagagaaccggcatccccgcccccagagagttcagcgtgaccgtgagcagagagagaagcgtgcccagaggccccagcaaccccagaaagagcgtgagcagccccaccagcagcaacacccccacccccaccaagcacctgagaacccccagcaccaagcccaagcaggagaacgagggcggcgagaaggccgccctggagagccaggtgagagagctgctggccgaggccaaggccaaggacagcgagatcaacagactgagaagcgagctgaagaagtacaaggagaagagaaccctgaacgccgagggcaccgacgccctgggccccaacgtggacggcaccagcgtgagccccggcgacaccgagcccatgatcagagccctggaggagaagaacaagaacttccagaaggagctgagcgacctggaggaggagaacagagtgctgaaggagaagctgatctacctggagcacagccccaacagcgagggcgccgccagccacaccggcgacagcagctgccccaccagcatcacccaggagagcagcttcggcagccccaccggcaaccagatgagcagcgacatcgacgagtacaagaagaacatccacggcaacgccctgagaaccagcggcagcagcagcagcgacgtgaccaaggccagcctgagccccgacgccagcgacttcgagcacatcaccgccgagacccccagcagacccctgagcagcaccagcaaccccttcaagagcagcaagtgcagcaccgccggcagcagccccaacagcgtgagcgagctgagcctggccagcctgaccgagaagatccagaagatggaggagaaccaccacagcaccgccgaggagctgcaggccaccctgcaggagctgagcgaccagcagcagatggtgcaggagctgaccgccgagaacgagaagctggtggacgagaagaccatcctggagaccagcttccaccagcacagagagagagccgagcagctgagccaggagaacgagaagctgatgaacctgctgcaggagagagtgaagaacgaggagcccaccacccaggagggcaagatcatcgagctggagcagaagtgcaccggcatcctggagcagggcagattcgagagagagaagctgctgaacatccagcagcagctgacctgcagcctgagaaaggtggaggaggagaaccagggcgccctggagatgatcaagagactgaaggaggagaacgagaagctgaacgagttcctggagctggagagacacaacaacaacatgatggccaagaccctggaggagtgcagagtgaccctggagggcctgaagatggagaacggcagcctgaagagccacctgcagggcgagaagcagaaggccaccgaggccagcgccgtggagcagaccgccgagagctgcgaggtgcaggagatgctgaaggtggccagagccgagaaggacctgctggagctgagctgcaacgagctgagacaggagctgctgaaggccaacggcgagatcaagcacgtgagcagcctgctggccaaggtggagaaggactacagctacctgaaggagatctgcgaccaccaggccgagcagctgagcagaaccagcctgaagctgcaggagaaggccagcgagagcgacgccgagatcaaggacatgaaggagaccatcttcgagctggaggaccaggtggagcagcacagagccgtgaagctgcacaacaaccagctgatcagcgagctggagagcagcgtgatcaagctggaggagcagaagagcgacctggagagacagctgaagaccctgaccaagcagatgaaggaggagaccgaggagtggagaagattccaggccgacctgcagaccgccgtggtggtggccaacgacatcaagtgcgaggcccagcaggagctgagaaccgtgaagagaaagctgctggaggaggaggagaagaacgccagactgcagaaggagctgggcgacgtgcagggccacggcagagtggtgaccagcagagccgcccccccccccgtggacgaggagcccgagagcagcgaggtggacgccgccggcagatggcccggcgtgtgcgtgagcagaaccagccccaccccccccgagagcgccaccaccgtgaagagcctgatcaagagcttcgacctgggcagacccggcggcgccggccagaacatcagcgtgcacaagacccccagaagccccctgagcggcatccccgtgagaaccgcccccgccgccgccgtgagccccatgcagagacacagcacctacagcagcgtgagacccgccagcagaggcgtgacccagagactggacctgcccgacctgcccctgagcgacatcctgaagggcagaaccgagaccctgaagcccgacccccacctgagaaagagccccagcctggagagcctgagcagaccccccagcctgggcttcggcgacaccagactgctgagcgccagcaccagagcctggaagccccagagcaagctgagcgtggagagaaaggaccccctggccgccctggccagagagtacggcggcagcaagagaaacgccctgctgaagtggtgccagaagaagacccagggctacgccaacatcgacatcaccaacttcagcagcagctggagcgacggcctggccttctgcgccctgctgcacacctacctgcccgcccacatcccctaccaggagctgaacagccaggagaagaagagaaacctgctgctggccttcgaggccgccgagagcgtgggcatcaagcccagcctggagctgagcgagatgctgtacaccgacagacccgactggcagagcgtgatgcagtacgtggcccagatctacaagtacttcgagacctag

SEQ ID NO: 30530 - DNA, 2964 bp, Artificial Sequence
  derived and/or modified sequence
atgggaaaccacagcggacgccctgaagatcccgagccgggggccttcactaccactaagcggaccgggatccctgcccccagggagttttcagtcaccgtttcccgcgaacgctccgtccccagaggtccgagtaaccctcgcaaatccgtttcctcccctaccagctcaaataccccaacaccaacaaaacatctgcgaaccccctccaccaaaccaaagcaagaaaacgaggggggggagaaggctgctctggaatctcaggtgcgcgaactgttggccgaggcaaaagcaaaggattcggagattaataggctgaggagtgagctcaagaagtataaggagaagcggaccctcaatgcagagggcaccgacgcactgggacctaatgttgatggcacctcagtctcacctggggatactgagccgatgatacgggcgctggaagagaaaaacaaaaactttcagaaggaactgtcagacttagaagaggaaaaccgagttttaaaagaaaagctaatttacctggaacacagccctaacagcgaaggcgccgcctctcacaccggagatagttcgtgccctacttcaatcacccaagaatcgagctttggtagtcctacaggcaaccagatgtcaagcgatattgacgaatacaagaagaacattcacggaaacgccctgcgaacctccggaagtagttcaagcgacgtcactaaggccagtctgtccccggacgctagcgactttgaacatatcaccgcagagactccctcacggcccctctcttcaacgagcaatcccttcaaatcctctaagtgttccaccgccggctcttcccctaattctgtctctgaattaagcctagccagcttgacagaaaaaatccaaaaaatggaagaaaatcatcactctactgccgaagagctgcaggctactctccaggagctgagcgaccagcagcaaatggtgcaagaattaacagccgagaatgaaaaactagtggatgaaaagacaattctggagacctccttccatcagcacagggagagggcagagcagctcagccaagaaaacgaaaaacttatgaacctgcttcaggaacgagtgaaaaacgaggagccaacaacacaggaaggcaaaatcatcgaactcgagcagaagtgtactggcattctagagcaagggcggtttgagagggagaagctgttgaatatccagcagcagctgacctgttctttgaggaaagttgaggaggagaatcagggtgccctggagatgatcaaacgtctgaaagaagagaatgaaaagttgaacgagttcctggagctcgagcgtcataacaacaatatgatggccaagactttagaagagtgccgcgttacacttgaggggctgaaaatggagaatgggagtctgaagtcccacctccaaggcgagaaacagaaagctaccgaggcttcagcagtcgaacagacagcggagagctgcgaagtacaagaaatgctcaaagtagctcgggcggagaaagatctgcttgagctgtcctgcaacgaactcagacaggaattactcaaggctaatggagaaatcaagcatgtttcctcactcctggccaaggtggaaaaagattattcttatctcaaagagatctgtgatcaccaggccgagcagcttagcagaacatctctgaagttacaggagaaggcttcggagagcgacgcagagatcaaggatatgaaggagacaatatttgaattggaagatcaggtagaacagcatagagctgtgaagttgcacaataaccagctcatcagtgaacttgagtcgtcagtgatcaagctcgaagagcaaaagtctgacctggagcgccaactcaagaccctcactaagcagatgaaggaagagacagaggagtggagaaggttccaggctgatctgcaaacagcggttgttgtcgccaatgacatcaaatgcgaagctcagcaggaacttcggaccgtcaagcggaagctactcgaggaagaggagaagaacgctagattgcagaaggagctgggagacgtacagggccacggacgcgttgtgacttcacgtgccgcccctccgcctgtggacgaggaaccggaatccagtgaggtcgatgccgccggcagatggccaggcgtgtgcgtctcccgtaccagccccacacctcccgaaagtgccacaactgtcaaatccctcataaaaagttttgatctcggccgtcccgggggggctggtcagaacatctctgtgcacaagacgccgcgctccccactctctggtattccggtccggactgcccctgccgcggctgtgtccccgatgcaaagacattccacctattcgagcgtccgcccagcctctaggggcgttacacagagacttgacctgccagatttgcccctgtctgacatcctgaaaggcagaaccgagactctgaaacccgatccgcatctgagaaagtctccatcattagaatcactgtctagaccgcccagcctcgggttcggagacacacggctactgagcgcttcaacacgagcttggaagcctcaatcgaagctcagcgtggaacgcaaagacccattggccgcccttgccagagaatatgggggttcaaaacgaaatgccctactgaagtggtgccagaaaaaaacccaagggtacgccaatatcgacatcaccaacttttcctcctcatggagcgacgggttagccttctgcgcgctgctgcatacctacctgccagctcatataccataccaagagcttaactcgcaggaaaaaaagcgcaaccttctgctcgcgtttgaggccgctgaaagtgtggggataaagcccagtttggagttgtctgagatgctctacacagatcgacccgattggcagagcgttatgcagtacgtagcacagatctataaatatttcgagacatag

SEQ ID NO: 30531 - DNA, 2964 bp, Artificial Sequence
  derived and/or modified sequence
atgggcaaccacagcggccgcccagaagatcctgagcccggggccttcaccaccaccaagaggacaggcatcccagccccccgggagttctctgtgacagtgtcccgggagaggtctgtgccccggggccccagcaaccccaggaagtctgtgagcagccccaccagcagcaacacccccacccccaccaagcacctgcggacccccagcaccaagcccaagcaggagaatgaaggaggagagaaggccgccctggagagccaggtgcgggagctgctggccgaggccaaggccaaggacagcgagatcaaccggctgcggtctgagctgaagaagtacaaggagaagaggaccctgaatgctgagggcacagatgccctgggccccaacgtggatggcacctctgtgtcccctggggacacagagcccatgatccgggccctggaggagaagaacaagaacttccagaaggagctgagtgacctggaggaggagaacagagtgctgaaggagaagctgatctacctggagcacagccccaacagcgagggcgccgccagccacactggagacagcagctgccccaccagcatcacccaggagagcagctttggcagccccaccggcaaccagatgagcagtgacattgatgagtacaagaagaacatccacggcaatgccctgcggaccagcggcagcagcagcagtgatgtgaccaaggccagcctgagcccagatgccagtgactttgagcacatcacagctgagacccccagccggcccctgagcagcaccagcaaccccttcaagagcagcaagtgcagcacagctggcagcagccccaacagcgtgtctgagctgagcctggccagcctgacagagaagatccagaagatggaggagaaccaccacagcacagctgaggagctgcaggccaccctgcaggagctgagtgaccagcagcagatggtgcaggagctgacagcagaaaatgagaagctggtggatgagaagaccatcctggagaccagcttccaccagcaccgggagcgggcagagcagctgagccaggagaatgagaagctgatgaacctgctgcaggagcgggtgaagaatgaggagcccaccacccaggagggcaagatcatcgagctggagcagaagtgcaccggcatcctggagcagggccgctttgagcgggagaagctgctgaacatccagcagcagctgacctgcagcctgaggaaggtggaggaggagaaccagggcgccctggagatgatcaagaggctgaaggaggagaatgagaagctgaatgagttcctggagctggagcggcacaacaacaacatgatggccaagaccctggaggagtgccgggtgaccctggagggcctgaagatggagaatggcagcctgaagagccacctgcagggcgagaagcagaaggccacagaggccagcgctgtggagcagacagctgagagctgtgaggtgcaggagatgctgaaggtggcccgggcagagaaggacctgctggagctgagctgcaatgagctgcggcaggagctgctgaaggccaacggggagatcaagcacgtgagcagcctgctggccaaggtggagaaggactacagctacctgaaggagatctgtgaccaccaggccgagcagctgagcaggaccagcctgaagctgcaggagaaggccagcgagagtgatgctgagatcaaggacatgaaggagaccatctttgagctggaggaccaggtggagcagcacagagctgtgaagctgcacaacaaccagctgatcagcgagctggagagcagcgtcatcaagctggaggagcagaagagtgacctggagcggcagctgaagaccctgaccaagcagatgaaggaggagacagaggagtggaggcgcttccaggccgacctgcagacagctgtggtggtggccaatgacatcaagtgtgaggcccagcaggagctgaggacagtgaagaggaagctgctggaggaggaggagaagaatgcccggctgcagaaggagctgggagatgtgcagggccacggccgggtggtgaccagccgggccgcccctcctcctgtggatgaggagcctgagagcagcgaggtggatgctgctggccgctggccaggagtgtgtgtgtccaggaccagccccaccccacctgagagcgccaccaccgtgaagagcctcatcaagagctttgacctgggccggcctggaggagctggccagaacatctctgtgcacaagacccccaggagccccctgagcggcatccctgtgaggacagccccagctgctgctgtgagccccatgcagaggcacagcacctacagctctgtgcggcctgccagcagaggagtgacccagaggctggacctgcctgacctgcccctgagtgacatcctgaagggccgcacagagaccctgaagccagacccccacctgaggaagagccccagcctggagagcctgagccggccccccagcctgggctttggagacacccggctgctgagcgccagcacccgggcctggaagccccagagcaagctgtctgtggagaggaaggaccccctggccgccctggcccgggagtatggaggcagcaagagaaatgccctgctgaagtggtgccagaagaagacccagggctacgccaacatcgacatcaccaacttcagcagctcctggagcgatggcctggccttctgtgccctgctgcacacctacctgcctgcccacatcccctaccaggagctgaacagccaggagaagaagaggaacctgctgctggcctttgaggccgctgagagcgtgggcatcaagcccagcctggagctgtctgagatgctgtacacagacagaccagactggcagagcgtgatgcagtatgtggcccagatctacaagtactttgagacctag

SEQ ID NO: 30532 - DNA, 2964 bp, Artificial Sequence
  derived and/or modified sequence
atgggcaaccacagcggccggcccgaggaccccgagcccggcgccttcactactacgaaaagaactggaataccagccccacgtgagttctccgtgaccgtctccagggagaggtctgtgccaagaggtccctctaatcccagaaagtctgtgtctagccccaccagcagcaatactccaacacccaccaagcatttgagaacgccatctacaaaacctaaacaagagaatgaaggcggcgaaaaagccgctctggagagccaggtcagggagctgctggccgaggccaaggccaaggactcggagataaatagactcagaagcgaactgaaaaagtataaagaaaaaaggacattaaatgccgagggaacggatgccttgggaccgaacgtagatggtacctctgtgtcccctggcgatactgagcctatgattagggccctggaggaaaagaacaagaacttccaaaaggaactgtccgacttagaggaggagaatcgggtcttaaaagagaaacttatctatctggagcatagccccaacagcgagggagccgccagccacaccggggattccagctgccccaccagcattacacaagagagcagcttcggatcacctactggaaatcaaatgagctcagatatcgacgaatataaaaagaacatccacggcaatgccctgaggactagcgggtcttcctcttctgacgtgaccaaggctagcctcagccctgacgcttcagactttgagcacataaccgcagaaacgccctcccgtcccctgagcagcaccagcaacccatttaaaagttcgaagtgttccactgccggtagctcacctaatagtgtcagcgagttgagtttggcaagtctgacggaaaagattcagaagatggaggagaatcatcattccactgcagaggaactccaggcaaccctgcaagagctatccgaccagcaacagatggtgcaggagctcacagccgagaacgagaagctggttgatgaaaaaaccatcctggagacatcttttcatcagcaccgtgagcgcgccgagcagttgagccaggagaatgaaaagcttatgaacctactacaagaaagagtgaaaaatgaggagccaacaactcaagaggggaaaataatcgagttagaacagaagtgtactggaattcttgaacaggggagatttgaacgcgaaaaactcctgaatattcaacagcagctaacctgtagcttgcgcaaagtcgaggaagagaatcaaggtgccttggagatgatcaaacgccttaaggaagaaaacgaaaaactcaacgagtttctcgaactggagaggcacaacaataacatgatggcgaaaacgctggaagagtgccgcgttaccctggaaggactcaagatggagaatggaagcctgaaatcacacctgcaaggggagaagcagaaagccaccgaggcctccgctgtggagcagacagctgagagctgtgaggtgcaggagatgctgaaggtggcccgggcagagaaagacctgttggaactctcatgcaacgagctccgtcaggagttgctgaaggctaatggcgaaattaaacacgtgtccagcctcctcgccaaggtagaaaaagactactcctatctgaaagaaatctgtgatcaccaggcagagcaactctcccgcacctctctaaaacttcaggagaaggcaagcgaaagcgacgccgaaatcaaagatatgaaggagacgattttcgaactggaagatcaggtggagcagcaccgcgccgttaaattacataataaccaactgatctccgaactcgaatcaagtgtgattaagttggaggaacagaaatctgatcttgagcgccagctaaagactttgacaaagcagatgaaggaggagaccgaggagtggcggaggttccaggccgacctacagaccgctgtagtggtcgctaacgatattaagtgtgaggcacaacaggagctacgaactgtcaaaaggaaactcctagaggaagaggaaaaaaacgctcgcctacaaaaggagctgggagacgtccagggccacggccgagttgtgacgtcacgcgctgccccaccacctgtcgacgaggaacctgagagctcggaagttgatgcagccgggcggtggcccggtgtgtgcgtgtcacgaaccagtcccacacctccagaaagtgcaacaacagtcaaatccttgattaaatcgttcgacctagggaggcccggaggcgctggccagaatatctctgttcacaagacacctcggtccccactgagtgggatccctgtgaggaccgcaccagcggccgcggtttctccgatgcaacgccattcgacttacagctctgtcaggccggcctcccggggtgtgacccagaggctggacctgccagatctccccctgtcagacatcttgaagggacggacggagacgctaaagcccgacccgcatctcaggaagagcccgagccttgaatcactatcacgtcctcctagccttgggtttggggacactcggttgttatccgcatcgacacgcgcatggaagccacagtctaagctgtctgtagagagaaaggaccccctggccgcgctagccagagagtatggaggcagtaaacgaaatgcattgcttaagtggtgccagaagaagactcaagggtatgcaaatattgacattacgaacttctccagctcctggagtgacgggctcgccttttgcgccctacttcacacttacctgccggctcacattccatatcaggagctgaactctcaggagaagaaacggaatctcctattagctttcgaagctgcagagagcgtgggtatcaagccgtcccttgagctctctgagatgctgtataccgatagaccagattggcaaagcgtgatgcagtacgttgcccagatctacaaatactttgaaacatag

SEQ ID NO: 30533 - DNA, 2964 bp, Artificial Sequence
  derived and/or modified sequence
atgggaaatcattccgggaggcctgaggatcccgagccgggtgcattcactaccaccaagaggactggtattccagccccacgggaattttccgtaactgtttcccgcgaacgttcagtgcctcgaggcccaagcaatccaaggaagtccgtcagctcccctacaagcagtaatacaccaaccccaacgaaacatctcaggacgccatccaccaagcctaagcaggagaacgagggcggagagaaggctgccctcgaaagtcaagtgcgagagctgttagcagaagccaaggccaaagatagcgagatcaacaggctgagatctgagctgaaaaaatacaaggagaagagaactctgaatgcagaaggcacagacgctctcggtcctaatgtcgatggcacttcagtgtcccctggagatacggaaccaatgatccgagcactggaagaaaaaaataagaacttccagaaagaactctccgatttggaagaagaaaatcgtgtgctcaaagaaaagctcatctacctggaacattcacccaattcagaaggcgctgctagccacactggagacagcagctgccccacatctattacccaggaatctagcttcggttctcccacagggaaccaaatgtcttccgacatagacgagtacaaaaaaaacattcacggaaacgcactgaggacgagtggcagtagttcaagcgatgtcaccaaagctagcctgtcacctgacgccagcgatttcgagcacattactgctgagaccccatccaggcccttgagctccacatccaacccgttcaaaagctccaagtgtagcacggcaggctccagccccaatagcgtttccgagctgtcgctcgcctcactcacagagaagattcagaagatggaggagaatcatcattcaacagccgaagagctgcaggccaccctgcaagagctgtctgaccagcagcagatggtacaggaactcaccgccgagaacgaaaagttggtggacgaaaaaacaatcctggaaacttcatttcaccagcaccgcgaaagggcggaacagctgtcccaagagaacgagaagttgatgaacctcctgcaagaaagggtgaaaaacgaagaaccgactacccaggaagggaaaatcattgaactggagcagaagtgtactggcattctggaacaagggagatttgaacgggagaagctactgaacatccaacagcaattgacctgcagtttgcgcaaggtggaagaagagaatcagggagccctcgagatgatcaagaggcttaaagaggagaatgagaagttaaatgagtttctggagcttgaacgacacaataacaatatgatggcaaaaactcttgaggagtgcagggtgacactcgaaggcctgaagatggagaatggcagtttgaagagccacttacaaggcgagaaacagaaggcgacagaggcgagcgcagtggaacagactgccgaatcttgtgaggtccaggaaatgcttaaagttgctcgggcagaaaaggatttactggagctctcttgcaacgagctgaggcaggaacttctgaaagctaacggagaaattaagcatgtctcaagcctcctcgcaaaggtggagaaggattacagttatctgaaagaaatttgcgatcaccaagcagaacagctgtcaagaacgtcactgaaattgcaggaaaaggcctccgagagtgatgccgagattaaagatatgaaggagacaattttcgaactggaagaccaggtagagcagcacagggccgtaaagctgcacaataatcaactgatctctgaactggaatcctcagtgattaagctcgaagagcagaaaagcgacttggagagacagttaaagacactcactaaacagatgaaagaagaaacggaagaatggagacgcttccaggctgacttacagacggccgttgtcgtggctaacgacattaagtgtgaggctcaacaggaacttcgtacggtgaagaggaagctactggaagaggaggaaaagaatgcgagactgcagaaagagctgggagacgttcaaggccacggtcgggtcgtaacctcccgtgctgccccacctcccgtggacgaggagccagaatcaagcgaggtagatgcagctggtcgttggccgggagtttgtgtcagcaggactagccccaccccacccgagagcgcgacaactgtgaagtccttaataaaaagcttcgacctggggaggccaggcggagcaggacagaatataagcgttcacaaaacaccacgctcccctctgtctgggattccagtgaggacagctccagcagccgcagtgtcccctatgcaacggcacagcacctattcgagtgtacggcctgcatcccgcggagtaacacaacgccttgacttgcccgatttgcccttatctgacattctgaaggggaggacagaaactcttaagcccgatccgcatctgaggaaatcaccttctttggagtctctctccagacctccaagcttgggattcggggatactaggctgctaagcgctagcacccgggcttggaaaccgcagtctaaacttagcgttgaaaggaaagaccctttggcagcacttgcacgagaatatggtgggagcaaaagaaatgctttactgaaatggtgtcagaaaaagactcagggttatgccaacatcgatattactaattttagttcaagctggtccgacgggcttgccttctgcgctctcttgcacacatatctaccggcacatatcccctaccaggagctgaactcccaggaaaaaaaacggaacctcttattggcttttgaggctgctgaaagcgtcggaataaagccatccttagagctgagcgagatgctgtataccgatagacccgattggcagagtgtgatgcaatacgtggctcagatctacaaatatttcgaaacatag

SEQ ID NO: 30534 - DNA, 3747 bp, Artificial Sequence
  derived and/or modified sequence
ctggagcggacccgccggacgcaaccgcctcgccagccggagccagcgcgagctcggcacggtggacacccggtccgaggccggcaagccggctggtgcccgagtcggccaagcatgggcaaccactcaggacggcccgaggatccggaaccaggggcctttacaacaactaaacggacaggcattccagccccacgggaattttcagtaactgtctcaagagagaggtctgtgccacgtggtccctccaaccccaggaaatcagtgtccagtccaacttcttccaacactcccactcctacgaaacacctgaggaccccttccacaaagcccaagcaagagaatgaaggtggagaaaaggctgcgcttgagtcccaagttcgggaacttttggcagaagccaaagcaaaagatagtgaaattaacaggcttcgaagtgaactaaagaaatacaaagagaaaaggactctgaacgctgaggggactgatgctttgggcccaaatgtcgatggaacatcagtctccccaggtgacacggaacctatgataagagctcttgaggagaagaacaagaactttcagaaagagctttccgatctagaggaagaaaaccgggtcctgaaggagaaactgatctatcttgagcactccccaaattcagaaggggcagcaagtcacactggcgacagcagctgcccaacatccataactcaagagtcaagcttcggaagcccaactggaaatcagatgtccagtgacattgatgagtataaaaaaaacatacatggaaatgcattacggacatcaggctcctcaagtagcgatgttaccaaagcttctttgtcgccagatgcttccgactttgagcacattacagcagagacaccctcaaggcccctgtcctccaccagtaacccctttaagagttcaaagtgttctactgctgggagttccccaaacagcgtaagtgaattgtccctggcttccctcacagagaagatacaaaagatggaagaaaaccaccatagcactgcagaagaactacaggctactctacaagaattatcagaccagcaacaaatggtacaggaattgacagctgaaaatgagaagctggtggatgaaaagacgattttagagacatcctttcatcagcatcgagagagggcagagcagctaagtcaagaaaatgagaagctgatgaatcttttacaagagcgagtaaagaatgaagagcccaccactcaggaaggaaaaattattgaactggagcagaagtgcacaggtattcttgaacagggccgctttgaaagagagaagctactcaacattcagcagcagttgacctgtagcttgcggaaggttgaggaagaaaaccaaggagctttagaaatgattaaacgtctgaaggaagaaaatgaaaaactgaatgagtttctagaactggaacggcataataataacatgatggccaaaactttggaagagtgtagagttaccttggaagggctaaaaatggagaatggatctttgaagtctcatttgcagggtgagaagcagaaagccacagaggccagtgctgtggagcagacggcagagagctgcgaagttcaagaaatgttgaaagtagcccgagcagagaaagatctactggaactgtcttgcaatgagctcagacaagaattactaaaggcaaacggtgaaattaaacatgtttccagtctgctggccaaggtggaaaaggattattcatacctgaaggagatatgtgatcaccaagccgaacagctgagcagaaccagcctaaagctgcaagaaaaagcatcagagagtgatgcagagatcaaagacatgaaagaaaccatatttgaattggaagatcaggtggaacagcaccgggctgtcaagttacacaataatcaactcatcagtgagctagaaagtagtgtgatcaagctggaggaacagaagtcagacctggagaggcagctgaagactctgaccaagcagatgaaggaggagaccgaggaatggaggcggttccaggcggatctgcagaccgcagtggtggtggccaatgacatcaagtgtgaggcccagcaggagctgcgcaccgtgaagaggaaactgctggaggaggaggagaagaatgcccggttgcagaaggagctgggggatgtgcagggccacggcagggtggtcaccagcagagccgcccctccacctgtggatgaagagccagagtcctctgaggtcgatgctgctggtcggtggcctggtgtctgtgttagcagaacatctccaacacccccagagtcggcaaccaccgttaagtcacttatcaagtcatttgacttgggacgcccaggtggagctggacagaatatttctgtccataagacccccagaagtcccctaagtgggataccagtgaggactgctccagcagctgctgtctctccaatgcagaggcattcgacttacagcagtgtgcggccagccagcagaggggtgactcaacgcttggaccttcctgaccttcccctctcagatattctaaagggaaggactgagaccctgaagccagacccccacctccgcaagagtccctcactagagtcactgagcagacccccgtctctgggctttggggacacaagactgctgagtgcttccacccgggcatggaaaccacaaagcaaactcagtgtggaaagaaaagaccctctggcagccttggcccgggaatacggtggttccaagcgcaatgctctactgaaatggtgccagaagaagacacaaggttatgcgaacattgacatcaccaatttcagcagcagctggagcgatggcctggccttctgtgctctgctccacacctacctgcctgcccacatcccctaccaggagctgaatagtcaggagaaaaagaggaatctcttgttggcatttgaagcggctgaaagtgtaggcatcaaacccagcctggaactcagcgagatgctgtacacagaccggcccgactggcagagtgtgatgcagtacgtggcccaaatctacaagtactttgagacgtaaccctggagggcctggggcagccaccattgccacctactgcagcttttcctggaagcgcctgattactgtccactgaccctgctctgcccaccacccagctgcctagacttcaaagacaggctcaatccaagtggaccaacacccaaataagaaacagagtgggtcccacgatgtacctgtctgaaatgcaaatgcagctggactgtaaattggggactctttgatctcttgtgggatgcttctaaagagggcagcctccctccttccagaccaagaccccacacccaggcttgttttgctgattatattgggtggctgaacgaacacattatctgcagaaattcagacaaagaacatctccaaatcagtcttttggttgctgttgttaaaaatatcccggctttgcctttatgaaacctttgcccttggctgggtgtggtagctcgtggctgtaatcccagcactttaggaagccaaggcagtaggatcgtttgagcccaggagttcgaggctgcagtgagctatgagcataccactgcactccagcctgtgtgaaagagccagaccctgtctcaaaaaaatgataaaacccaaaactttgcccttgtgaaccctcccttcccccctccccccccaaaaaaaaacaacaaaacacaaaaaataaacatt

SEQ ID NO: 30535 - DNA, 1143 bp, Artificial Sequence
  derived and/or modified sequence
atgggagccttccttgacaaacccaagacagaaaaacacaacgctcacggtgctggcaatggactgagatatggattgagctcaatgcagggctggagggtggagatggaagacgcccatacagctgtcgtggggattccccacggtctagaggactggtcctttttcgcagtttacgatggacatgccggtagccgtgttgcaaattactgctctacccacctgctggaacatattacgacaaatgaagattttagagctgccggaaaatcaggcagcgctctggagctcagcgttgagaatgtaaaaaacggtatcagaacaggttttctcaaaattgatgaatatatgagaaatttttcagatctgaggaatgggatggataggtctgggtcaaccgccgttggcgtgatgatcagccctaaacacatctactttattaactgcggagatagtagagccgtgctctaccgaaatggacaagtgtgcttttcaacacaagaccacaaaccatgtaaccctcgtgaaaaggaacggatccaaaacgcggggggctctgtgatgatccaaagggtgaatggaagcttagccgtgtcccgggccctcggggattacgattacaagtgcgtggacgggaagggcccaacagagcaacttgtgtctccagagcctgaagtgtacgaaatactgcgcgctgaggaggatgagttcattatcctcgcatgcgacggcatttgggacgtgatgtcaaacgaggagctttgcgaatacgtaaagagcagactggaagtgtccgatgatctggaaaatgtgtgtaactgggtcgtcgacacatgtttgcacaagggatcaagagataatatgtctattgttctcgtttgcttctcgaatgcccctaaggtgagtgacgaggccgtaaaaaaagattcggagctcgataagcacctggaatcccgggtagaggagataatggaaaagtcaggcgaagaaggaatgcccgacctagctcacgtaatgcggattctaagtgccgaaaacattcccaatctgcctccaggcggcggactggcaggcaaacgcaatgtgatcgaagccgtatatagtcgactcaacccccatagagagtctgatggccagaagtag

SEQ ID NO: 30536 - DNA, 984 bp, Artificial Sequence
  derived and/or modified sequence
atgggcgctttcctggacaagcccaaaactgaaaaacataatgcccatggggctggaaatggcttgcggtatgggctgtcctcaatgcagggctggagagttgaaatggaggacgcacacactgctgtcgtgggaataccacacgggctcgaggattggtcattttttgccgtgtacgacggccatgcaggaagtcgggtggctaattactgctccacccacctgctagagcacatcacaactaacgaggatttccgggcagccgggaagtccggctcggccctggagctgagcgtcgaaaatgtgaagaacggcatcagaacgggctttctgaagattgatgagtacatgcggaatttcagcgatctgcgcaacggcatggatcgcagtggctcaactgccgtcggtgtcatgatctcgcccaaacacatttactttattaactgcggggatagtagggctgtgctgtaccggaacggccaggtgtgcttttctacacaagaccacaagccgtgcaacccccgagagaaagaacgtatccagaatgccggcggctcagttatgattcagcgagttaacggttctctcgccgtttccagagctctaggcgactacgactacaaatgcgtcgacggaaaggggcccactgagcagctggtgagtcctgagccagaagtgtatgaaatcctgagagctgaggaagacgaatttatcattttggcttgtgacggtatctgggacgtgatgagcaatgaagagctctgcgaatacgtcaagtcccggctggaagtctcagacgacctggaaaatgtgtgtaactgggtggtcgacacctgtttacataagggaagtcgggacaacatgtctatcgttctagtctgtttttccaacgctccaaaggtttccgatgaagcagtgaagaaagactcagagctggataagcatctggagtcccgcgtcgaagggaagactaacgccttttag

SEQ ID NO: 30537 - DNA, 1137 bp, Artificial Sequence
  derived and/or modified sequence
atgggggcatttctggataaaccgaaaacagagaaacataacgcacacggagcagggaatggccttagatatggcctgtccagcatgcagggatggagagtggaaatggaagacgctcataccgctgttgtgggaatccctcatggactagaagattggagtttttttgccgtctatgatggacatgcaggttcccgagtcgctaattattgtagcacccatctattggaacatatcactacgaacgaggatttccgcgccgccggcaagagcggcagcgctctggagctgtctgtcgaaaatgtaaagaacgggatcaggaccggtttcctgaaaatagacgaatatatgcgaaactttagtgatctgaggaacggaatggataggagtggttctactgccgtgggcgtgatgattagccccaagcatatttacttcattaactgcggcgatagtagagccgtgctatataggaatggtcaggtgtgtttctccacgcaggaccataagccttgcaaccccagagaaaaggagaggattcagaacgctgggggctcagtcatgattcaaagagtgaatggatctctggcagttagccgagctctcggagactatgattacaaatgcgtcgatggcaaagggcccacagaacagctcgtctcgcccgagccagaagtttatgaaattctccgagccgaggaagatgagttcatcatcctggcctgtgacggcatctgggatgttatgagcaacgaagaactgtgcgagtatgttaaatcgagacttgaggtatctgacgatctcgaaaacgtgtgtaattgggtggtggatacttgtttgcacaaaggctcaagggacaatatgagtatcgtattggtttgcttcagcaacgctccaaaggtatctgacgaagctgtgaagaaggacagcgagctggacaagcatctggaaagccgtgtggaggagattatggagaaatcgggggaggagggcatgccagacctcgcacacgtcatgcgaatcctgagtgctgaaaacattccaaatttgcccccaggggggggcctcgctggtaagcgaaatgtcatcgaggccgtgtactctagactgaacccccaccgtgagagtgacggttag

SEQ ID NO: 30538 - DNA, 1143 bp, Artificial Sequence
  derived and/or modified sequence
atgggcgccttcctggacaagcccaagacagagaagcacaatgcccacggggctggaaatggcctgcgctatggcctgagctccatgcagggctggagggtggagatggaggatgcccacacagctgtggtgggcatcccccacggcctggaggactggagcttctttgctgtgtatgatggccatgctggcagccgggtggccaactactgcagcacccacctgctggagcacatcaccaccaatgaagacttccgggccgccggcaagagcggcagcgccctggagctgtctgtggagaatgtgaagaatggcatcagaacaggcttcctgaagattgatgagtacatgaggaacttcagtgacctgagaaatggcatggacaggagcggcagcacagctgtgggcgtgatgatcagccccaagcacatctacttcatcaactgtggggacagcagagctgtgctgtacagaaatggccaggtgtgcttcagcacccaggaccacaagccctgcaacccccgggagaaggagcgcatccagaatgccggcggctctgtgatgatccagagggtgaatggcagcctggccgtgtcccgggccctgggggactatgactacaagtgtgtggatggcaagggccccacagagcagctggtgtccccagagcctgaggtgtatgagatcctgcgggcagaggaggatgagttcatcatcctggcctgtgatggcatctgggatgtgatgagcaatgaggagctgtgtgaatatgtgaagagccggctggaggtgtctgatgacctggagaatgtgtgcaactgggtggtggacacctgcctgcacaagggcagccgggacaacatgagcatcgtgctggtgtgcttcagcaatgcccccaaggtgtctgatgaagctgtgaagaaggacagcgagctggacaagcacctggagagccgggtggaggagatcatggagaagtctggagaggagggcatgccagacctggcccacgtgatgaggatcctgtctgctgagaacatccccaacctgcccccaggcggcggcctggccggcaagagaaatgtgattgaagctgtgtacagccggctgaacccccaccgggagagtgatggccagaagtag

SEQ ID NO: 30539 - DNA, 984 bp, Artificial Sequence
  derived and/or modified sequence
atgggcgccttcctggacaagcccaagacagagaagcacaatgcccacggggctggaaatggcctgcgctatggcctgagctccatgcagggctggagggtggagatggaggatgcccacacagctgtggtgggcatcccccacggcctggaggactggagcttctttgctgtgtatgatggccatgctggcagccgggtggccaactactgcagcacccacctgctggagcacatcaccaccaatgaagacttccgggccgccggcaagagcggcagcgccctggagctgtctgtggagaatgtgaagaatggcatcagaacaggcttcctgaagattgatgagtacatgaggaacttcagtgacctgagaaatggcatggacaggagcggcagcacagctgtgggcgtgatgatcagccccaagcacatctacttcatcaactgtggggacagcagagctgtgctgtacagaaatggccaggtgtgcttcagcacccaggaccacaagccctgcaacccccgggagaaggagcgcatccagaatgccggcggctctgtgatgatccagagggtgaatggcagcctggccgtgtcccgggccctgggggactatgactacaagtgtgtggatggcaagggccccacagagcagctggtgtccccagagcctgaggtgtatgagatcctgcgggcagaggaggatgagttcatcatcctggcctgtgatggcatctgggatgtgatgagcaatgaggagctgtgtgaatatgtgaagagccggctggaggtgtctgatgacctggagaatgtgtgcaactgggtggtggacacctgcctgcacaagggcagccgggacaacatgagcatcgtgctggtgtgcttcagcaatgcccccaaggtgtctgatgaagctgtgaagaaggacagcgagctggacaagcacctggagagccgggtggagggcaagaccaatgccttctag

SEQ ID NO: 30540 - DNA, 1137 bp, Artificial Sequence
  derived and/or modified sequence
atgggcgccttcctggacaagcccaagacagagaagcacaatgcccacggggctggaaatggcctgcgctatggcctgagctccatgcagggctggagggtggagatggaggatgcccacacagctgtggtgggcatcccccacggcctggaggactggagcttctttgctgtgtatgatggccatgctggcagccgggtggccaactactgcagcacccacctgctggagcacatcaccaccaatgaagacttccgggccgccggcaagagcggcagcgccctggagctgtctgtggagaatgtgaagaatggcatcagaacaggcttcctgaagattgatgagtacatgaggaacttcagtgacctgagaaatggcatggacaggagcggcagcacagctgtgggcgtgatgatcagccccaagcacatctacttcatcaactgtggggacagcagagctgtgctgtacagaaatggccaggtgtgcttcagcacccaggaccacaagccctgcaacccccgggagaaggagcgcatccagaatgccggcggctctgtgatgatccagagggtgaatggcagcctggccgtgtcccgggccctgggggactatgactacaagtgtgtggatggcaagggccccacagagcagctggtgtccccagagcctgaggtgtatgagatcctgcgggcagaggaggatgagttcatcatcctggcctgtgatggcatctgggatgtgatgagcaatgaggagctgtgtgaatatgtgaagagccggctggaggtgtctgatgacctggagaatgtgtgcaactgggtggtggacacctgcctgcacaagggcagccgggacaacatgagcatcgtgctggtgtgcttcagcaatgcccccaaggtgtctgatgaagctgtgaagaaggacagcgagctggacaagcacctggagagccgggtggaggagatcatggagaagtctggagaggagggcatgccagacctggcccacgtgatgaggatcctgtctgctgagaacatccccaacctgcccccaggcggcggcctggccggcaagagaaatgtgattgaagctgtgtacagccggctgaacccccaccgggagagtgatggatag

SEQ ID NO: 30541 - DNA, 1143 bp, Artificial Sequence
  derived and/or modified sequence
atgggcgccttcctggacaagcccaagaccgagaagcacaacgcccacggggccggcaacggtctcaggtatggcctatcctccatgcaaggctggcgagtagagatggaggacgcacatactgcagtggttggcattccacacggactggaggattggtctttctttgcagtatacgacgggcacgccgggtctcgagtggctaattactgttctacacacttactggaacacattacaacgaacgaggactttagagctgccggcaaaagtgggagtgctctggaacttagtgttgaaaacgtgaaaaacggaattcgcaccggctttttaaagatcgacgagtatatgcggaacttctctgacctgcgcaatggtatggacagatctggtagtactgctgttggtgtcatgatctctcccaagcacatttactttattaactgcggggattctagggctgtcctctaccggaacggacaagtgtgcttttcgactcaagaccacaagccttgcaacccacgggaaaaggagcggattcagaatgcagggggcagtgtcatgatccaaagggttaatgggtctcttgctgtctcacgcgcattaggcgactacgactacaagtgcgttgatgggaaggggcctaccgagcagctggtttcccctgaacccgaagtctacgagattttacgggctgaggaggacgaattcattatcttggcttgtgacggcatttgggatgtgatgtctaacgaagaactgtgtgagtacgtgaagagccggttagaagtgtctgatgatctcgagaatgtgtgtaattgggttgttgatacctgtctgcacaaaggttcacgcgataacatgagcattgtcttggtttgcttttccaacgcaccaaaagtgagcgatgaggcagtgaagaaggattccgagttggataaacatctggaatccagggtcgaagagattatggagaaatcaggtgaggaaggtatgcccgatctagctcacgtgatgagaattctgagcgcagaaaatattcccaacctacccccgggtggaggcctggcaggaaaacgcaacgtaattgaagcggtatattcccgtctgaatccccaccgcgagagcgacgggcagaaatag

SEQ ID NO: 30542 - DNA, 984 bp, Artificial Sequence
  derived and/or modified sequence
atgggcgccttcctggacaagcccaagaccgagaagcacaacgcccatggagcgggaaatgggctcagatatggactgagctctatgcagggttggagggtggaaatggaggatgctcacacagcagtggttggcatcccccacgggctggaggactggagttttttcgccgtgtacgacggccatgccggcagtcgcgttgctaattactgtagcacgcatctgctggagcatattactaccaatgaggattttcgcgccgccggcaaatccgggagcgctctggagctctcagtagaaaatgtcaagaatggtatacgaactggcttcttgaaaatcgatgagtacatgaggaattttagcgatctgaggaatggaatggatcgatccggttctactgcagtcggtgtgatgatctctcctaaacacatctactttatcaactgcggggattcccgcgccgtgctctataggaatggacaggtgtgtttcagcacccaggaccacaaaccatgtaacccccgcgagaaggaaaggatccaaaacgccggaggcagtgttatgatacagcgtgtcaatgggagtctcgccgtcagtagggctctgggtgactacgactacaaatgcgtggatggcaaggggcctacagaacagctcgtgtcgcccgaaccggaggtgtacgaaatcctgcgcgcagaagaggatgagtttatcatactggcctgtgacgggatctgggatgtgatgagcaatgaggagctctgtgaatatgtcaaaagccggctcgaagtgtccgatgacctagagaacgtgtgtaattgggtcgtagacacatgcctgcacaagggaagcagagataacatgtccatcgtcttggtatgtttctccaatgcccccaaagtaagcgacgaggccgtcaagaaagatagtgagttggataagcatctggagtcacgtgtcgagggtaagacaaatgccttctag

SEQ ID NO: 30543 - DNA, 1137 bp, Artificial Sequence
  derived and/or modified sequence
atgggcgccttcctggacaagcccaagaccgagaagcacaacgcccacggcgctggcaacggactgcggtacggcctgtccagcatgcagggctggcgcgttgagatggaggacgcgcatactgcggtagtggggatcccccacggcctggaggattggagtttttttgctgtctacgatggccacgcaggttctcgggttgcaaattattgttccacccacttacttgagcacatcacgaccaacgaggacttcagggcggcgggcaaaagtgggtccgctctggaactgagtgtcgagaacgtcaagaatgggatccggacaggatttctcaagattgacgaatatatgcgcaactttagcgatcttaggaacggaatggaccgttccggtagcactgccgtcggggtgatgataagccccaaacacatctactttatcaactgcggagacagccgtgccgtgttgtacaggaacgggcaggtatgtttcagtactcaagaccacaagccctgtaatcctcgggagaaggaaagaattcagaacgccggagggtcggtcatgatccagcgagtaaacgggtccttagcggtgtcaagagctctgggtgactatgactataaatgcgtcgatgggaaaggacctacagaacaactcgtgagccctgaaccggaggtatatgaaatcctgcgtgcagaagaggatgagtttatcatcctagcttgtgacggaatctgggacgtaatgtctaatgaggagctctgcgaatatgttaagtcgcgtctggaagtcagcgacgatcttgaaaacgtgtgcaattgggtcgtagacacctgcttgcataaaggcagccgcgataacatgtcaattgtgctggtctgcttcagcaacgccccgaaggtttcagacgaagccgtgaaaaaggattccgagctagataaacacctagagtcccgagtcgaagaaatcatggagaagtccggggaggaaggcatgcctgacctggctcacgtgatgagaattttatccgcagaaaatatccccaatctaccaccaggcggcgggctggctggaaagaggaacgtcatcgaggcggtatattcccgacttaacccccaccgggagtccgatggatag

SEQ ID NO: 30544 - DNA, 1143 bp, Artificial Sequence
  derived and/or modified sequence
atgggtgcatttctagataagccaaaaactgagaagcacaacgcacatggagccggaaatggcctgcgctacggactgagcagcatgcagggctggcgagtagagatggaagatgcccacactgccgttgtgggaatccctcatggcctcgaggactggtccttttttgctgtctatgacgggcatgcgggatctagagtggccaactattgttctacacacctgctggaacatataaccacaaacgaggacttccgagccgcagggaaatcgggaagtgccctcgagctttctgttgaaaacgtgaagaatgggattcggaccgggttcctgaagatagatgagtacatgcggaactttagcgatctacgtaatggcatggataggagcggaagtaccgctgtaggcgtgatgattagccctaagcatatttacttcattaattgcggtgactcccgggcagttctgtacaggaacggccaggtgtgcttcagcacccaagaccataagccgtgcaacccacgggaaaaggagagaatccagaacgctggaggcagcgtgatgattcaacgagttaatggtagcctggccgtaagccgcgcactgggcgattacgactacaaatgtgttgacgggaagggtccaactgaacaattagtgtctccagaacctgaggtttacgaaattctgcgagccgaggaagatgagtttatcatactggcctgtgacgggatttgggacgtcatgagtaacgaagagctgtgtgagtatgttaagtcgaggctggaggtgagcgatgacctggagaacgtgtgcaattgggtagtagacacatgtctgcacaagggctcacgtgataatatgtcgatagttctggtttgtttcagtaacgcgcctaaagtgtctgatgaagctgttaaaaaagacagtgagctcgacaaacacctcgagtccagggtcgaagaaataatggagaagagtggggaagaggggatgcccgacctcgcccatgtgatgcgcatcctctccgccgaaaatatcccgaatctacccccagggggtgggctagccggtaaacggaacgttatcgaagctgtctactccagactgaatccacaccgggagagcgatggccagaagtag

SEQ ID NO: 30545 - DNA, 984 bp, Artificial Sequence
  derived and/or modified sequence
atgggagcctttctggacaaaccaaagacagagaagcacaatgctcatggggctgggaatggcctgaggtacggtttgtcatccatgcaaggttggcgcgtagagatggaagatgcccacaccgccgtagtcggaatcccgcacggactagaggattggtcctttttcgcagtgtacgacgggcacgccggtagtagggtggccaactattgcagcacccacctcctggaacatattactacaaacgaggacttccgagctgctggaaaatcaggctcagctcttgagttgtctgttgagaatgtgaagaacggcattcgcacaggttttctcaagattgacgaatacatgcgtaatttctcggatttaagaaatgggatggaccggagtggcagtacggcagttggcgtgatgatatctccgaaacacatctactttattaattgtggggacagccgtgccgtgctgtatcggaatgggcaagtgtgtttttcaacccaggatcataagccttgcaatccaagagaaaaagaaagaattcagaacgccggaggctcagttatgatccagcgcgtcaacggttccctggcggtgagccgggctcttggggattacgactacaagtgtgttgatggtaaaggaccaactgagcagttagtctccccggagccagaggtttacgaaattctcagagcagaggaggatgaatttattattcttgcatgtgatggtatctgggacgtgatgagcaacgaagagctgtgtgagtatgttaagtcccgacttgaggtgtccgacgatctggagaatgtgtgcaactgggtcgtagacacctgtttgcacaaggggagtagggataacatgagtatagttctggtgtgtttctccaacgcccctaaggtgtcagacgaggcagttaaaaaggattctgagctagacaagcacctggagtctcgcgtggagggaaagacaaacgcgttctag

SEQ ID NO: 30546 - DNA, 1137 bp, Artificial Sequence
  derived and/or modified sequence
atgggcgcatttctggataagcctaagacagaaaagcacaacgcccatggcgcagggaatggattacgatacggcctgtccagtatgcagggctggcgggtggagatggaggacgcgcatactgccgttgttggaataccacacggccttgaagactggagttttttcgccgtgtacgatgggcatgcagggtcacgcgtggcaaactactgctccactcatcttctcgaacacattactaccaatgaagacttccgagcagccggtaaatcgggcagtgcgctggagctgtctgtggagaatgtcaaaaacgggattagaaccggcttcctgaagattgatgagtatatgcggaacttctccgacttgaggaacggtatggatagatcagggagtaccgctgtaggagtgatgatcagcccaaagcatatctacttcataaactgtggagacagcagggccgtgctgtacagaaacggacaggtgtgcttttccacacaggaccataagccctgcaatccaagagaaaaggaacgaattcaaaacgccggaggctctgtcatgatacagagggtgaatggcagtcttgcagtttctagggcactaggcgattatgattacaagtgcgtcgatggaaaagggcctaccgagcaactggtctcccctgaacctgaagtgtatgagatattacgagctgaagaggacgagtttattattttggcctgtgatggaatttgggacgtgatgtccaatgaggaactatgcgaatacgtcaagagccgccttgaggtgtccgatgacttggagaacgtgtgcaactgggtggttgacacgtgcttgcacaagggatcccgggataatatgagcatcgtgctggtctgttttagtaatgcccctaaagtgtccgacgaggccgtgaaaaaggattccgaattagacaagcacctggaatcaagagtcgaggagataatggagaagagcggggaagagggtatgccagacctggcccatgtgatgcggatcctgtctgcggagaatatcccaaatctgcctcccggaggcggactggccggaaagcgaaacgtgattgaagctgtgtacagccgcctgaacccccaccgcgaatcagacgggtag

SEQ ID NO: 30547 - DNA, 3025 bp, Artificial Sequence
  derived and/or modified sequence
aaaaggagccgagcggcttctgctcaatggcggaaaagccgccggtgctctgacggcctcgttcccctagcagttgcgggggagtttcctgccggcgcggctggagtctctgattctcagggttcggtggttggaagatgctccagagagacgaggctgcggcggaggaggtggcggcggccgaatcggcaacggcgctagggtggagagaaggcggcatcggcggcggcggcggcgtgaggggccgggcggtgtaaacagccccggaggcggcggtcgagaccccgagggggaagcggcggctgagtcagggtcgcgcctccgttggaaacttgggctgagtaccgcggcgggcgcgagcgaggcgccctagacatcttctccctcccttgcctcagatttattgctaaacatgggtgcatttttggataaacccaaaactgaaaaacataatgctcatggtgctgggaatggtttacgttatggcctgagcagcatgcaaggatggagagtggaaatggaagatgcacacacagctgttgtaggtattcctcacggcttggaagactggtcattttttgcagtttatgatggtcatgctggatcccgagtggcaaattactgctcaacacatttattagaacacatcactactaacgaagactttagggcagctggaaaatcaggatctgctcttgagctttcagtggaaaatgttaagaatggtatcagaactggatttttgaaaattgatgaatacatgcgtaacttttcagacctcagaaacgggatggacaggagtggttcaactgcagtgggagttatgatttcacctaagcatatctactttatcaactgtggtgattcacgtgctgttctgtataggaatggacaagtctgcttttctacccaggatcacaaaccttgcaatccaagggaaaaggagcgaatccaaaatgcaggaggcagcgtgatgatacaacgtgttaatggttcattagcagtatctcgtgctctgggggactatgattacaagtgtgttgatggcaagggcccaacagaacaacttgtttctccagagcctgaggtttatgaaattttaagagcagaagaggatgaatttatcatcttggcttgtgatgggatctgggatgttatgagtaatgaggagctctgtgaatatgttaaatctaggcttgaggtatctgatgacctggaaaatgtgtgcaattgggtagtggacacttgtttacacaagggaagtcgagataacatgagtattgtactagtttgcttttcaaatgctcccaaggtctcagatgaagcggtgaaaaaagattcagagttggataagcacttggaatcacgggttgaagagattatggagaagtctggcgaggaaggaatgcctgatcttgcccatgtcatgcgcatcttgtctgcagaaaatatcccaaatttgcctcctgggggaggtcttgctggcaagcgtaatgttattgaagctgtttatagtagactgaatccacatagagaaagtgatgggcagaaatgatgaagaaactgttctgatggcctgcttttctgtccttttcctactgctttaaacattgattttcttttgtactaaatcatatagccaaatattgtttaagtaagtcagttttaggaaatgcttgtgttgctgttgaattataaaagctgagtaaatttcagattaaactttaaatgactgtgaaataagacataaactagttaatggtaatttgcttaaaatgacttgagattattattggaagtttttattaattgatacaggtaagaattgatatttaataaaatgttctcatgcttagactatattacttttcggtagagaaattagtattttgctgtaatgtgttatgaaatacatgtgatatcctagtttgtctactgacactggggtcttgaatcttaaaaaaaggcctccgatgaagcagaggaaagtggatcacagggaaaattggtggaagctctcaggcaaatgagaattaatcataggggaaactaccgacaacttctggaggagatgctgactagttacaggctagctaaagtagagggagaagaaagccctgctgaaccagctgccacagctacttcttcgaacagtgatgctggaaacccagtgacaatgcaggaaagccatactgaatcagaaagtggtcttgctgaattagacagctctaatgaagatgcagggacaaagatgagtggtgaaaaaatatgactttcctttttggtaatatttttgtgatctttgatggtttttaacctaggaagtgtaatgtatgcatttatataactgttttgttatttgaatcttggaaaactagttttattatattcagatagccttgttttttaaaaaggcctttgcatacacctttatgagatagtgtaaaattgactatttatagtactatggatttaatgaaattatatgtcatttcacattgtatgccagaaattaggctaccaattatgaattaaagtcagtagttaaattaatactagatagaattagaaattttgattagagagattatgctatattatggaaaaacttgttaatgtagaattatactgcttcatattattttacctattagtacactcatagttagctttgtaataaatttatgttttctttaataattttagttcttcaaagaatggctgatgctggcctgtaatttttctttcaaggatgataatttgtgtgttgtttgatttgtttatattttacatctctgtagttttatttttagaagttgtgagatattggatgtgtggctatttttcctttctctgtattctttatgaaacataacttttgaaaaacctatgtattattcatacagctttggtttgtatattctgtatagcctaactacacacatcaaaatgtatgtcaaccaagtgtttagaatgaaattataagtgtttaagtccaaataaagcatgtgatgtggaataatct

SEQ ID NO: 30548 - DNA, 1497 bp, Artificial Sequence
  derived and/or modified sequence
gcggggagggggttgcaaaaggagccgagcggcttctgctcaatggcggaaaagccgccggtgctctgacggcctcgttcccctagcagttgcgggggagtttcctgccggcgcggctggagtctctgattctcagggttcggtggttggaagatgctccagagagacgaggctgcggcggaggaggtggcggcggccgaatcggcaacggcgctagggtggagagaaggcggcatcggcggcggcggcggcgtgaggggccgggcggtgtaaacagccccggaggcggcggtcgagaccccgagggggaagcggcggctgagtcagggtcgcgcctccgttggaaacttgggctgagtaccgcggcgggcgcgagcgaggcgccctagacatcttctccctcccttgcctcagatttattgctaaacatgggtgcatttttggataaacccaaaactgaaaaacataatgctcatggtgctgggaatggtttacgttatggcctgagcagcatgcaaggatggagagtggaaatggaagatgcacacacagctgttgtaggtattcctcacggcttggaagactggtcattttttgcagtttatgatggtcatgctggatcccgagtggcaaattactgctcaacacatttattagaacacatcactactaacgaagactttagggcagctggaaaatcaggatctgctcttgagctttcagtggaaaatgttaagaatggtatcagaactggatttttgaaaattgatgaatacatgcgtaacttttcagacctcagaaacgggatggacaggagtggttcaactgcagtgggagttatgatttcacctaagcatatctactttatcaactgtggtgattcacgtgctgttctgtataggaatggacaagtctgcttttctacccaggatcacaaaccttgcaatccaagggaaaaggagcgaatccaaaatgcaggaggcagcgtgatgatacaacgtgttaatggttcattagcagtatctcgtgctctgggggactatgattacaagtgtgttgatggcaagggcccaacagaacaacttgtttctccagagcctgaggtttatgaaattttaagagcagaagaggatgaatttatcatcttggcttgtgatgggatctgggatgttatgagtaatgaggagctctgtgaatatgttaaatctaggcttgaggtatctgatgacctggaaaatgtgtgcaattgggtagtggacacttgtttacacaagggaagtcgagataacatgagtattgtactagtttgcttttcaaatgctcccaaggtctcagatgaagcggtgaaaaaagattcagagttggataagcacttggaatcacgggttgaaggtaagacaaatgctttttaaaaatatagacaggccaggcacggtagctcatgcctgtaatcctagcacttttgtcgcctgggcgacacaccaaggctctgtctca

SEQ ID NO: 30549 - DNA, 2084 bp, Artificial Sequence
  derived and/or modified sequence
ggctgaagcaaaacaaccgcctctcccctgcccacttcttgtcctcgtctgagtcgtcccttcccgtctccacgccgaagagaggcgtttagatcctccaatgagggcctaggaggactttcttagccaatcagtagccaagcccctgcaattccgggtgggaccaggcgtccacacctatagctggactgctcgttggtcccttatggcgcttcttttacgcgaggcttagaggtcaaatacaagggggcacggtcctcacagaacggaaaggatccgtacagactctccgggtttgaccgttttctaggacgaaccaatcgctttccagatacttccccgccttttgcgcgttcatttgaaaaaagccggtgtgacggacttggaaattggctcagtgactgacccgcaagaaagccagtgactgggggttcggatcacgagttggaccaataagaaaagacaatcgctggggccggggctttgctaggaggagcgcaggtgggcgttatttgattgacggagggctctacttatggctggtagcgggggctggtccctgacgttcgggaggtaggacctagcggaggcggggccgaataaagtaaatgttgcgggggagtttcctgccggcgcggctggagtctctgattctcagggttcggtggttggaagatgctccagagagacgaggctgcggcggaggaggtggcggcggccgaatcggcaacggcgctagggtggagagaaggcggcatcggcggcggcggcggcgtgaggggccgggcggtgtaaacagccccggaggcggcggtcgagaccccgagggggaagcggcggctgagtcagggtcgcgcctccgttggaaacttgggctgagtaccgcggcgggcgcgagcgaggcgccctagacatcttctccctcccttgcctcagatttattgctaaacatgggtgcatttttggataaacccaaaactgaaaaacataatgctcatggtgctgggaatggtttacgttatggcctgagcagcatgcaaggatggagagtggaaatggaagatgcacacacagctgttgtaggtattcctcacggcttggaagactggtcattttttgcagtttatgatggtcatgctggatcccgagtggcaaattactgctcaacacatttattagaacacatcactactaacgaagactttagggcagctggaaaatcaggatctgctcttgagctttcagtggaaaatgttaagaatggtatcagaactggatttttgaaaattgatgaatacatgcgtaacttttcagacctcagaaacgggatggacaggagtggttcaactgcagtgggagttatgatttcacctaagcatatctactttatcaactgtggtgattcacgtgctgttctgtataggaatggacaagtctgcttttctacccaggatcacaaaccttgcaatccaagggaaaaggagcgaatccaaaatgcaggaggcagcgtgatgatacaacgtgttaatggttcattagcagtatctcgtgctctgggggactatgattacaagtgtgttgatggcaagggcccaacagaacaacttgtttctccagagcctgaggtttatgaaattttaagagcagaagaggatgaatttatcatcttggcttgtgatgggatctgggatgttatgagtaatgaggagctctgtgaatatgttaaatctaggcttgaggtatctgatgacctggaaaatgtgtgcaattgggtagtggacacttgtttacacaagggaagtcgagataacatgagtattgtactagtttgcttttcaaatgctcccaaggtctcagatgaagcggtgaaaaaagattcagagttggataagcacttggaatcacgggttgaagagattatggagaagtctggcgaggaaggaatgcctgatcttgcccatgtcatgcgcatcttgtctgcagaaaatatcccaaatttgcctcctgggggaggtcttgctggcaagcgtaatgttattgaagctgtttatagtagactgaatccacatagagaaagtgatggg

SEQ ID NO: 30550 - DNA, 1143 bp, Artificial Sequence
  derived and/or modified sequence
atgggcgccttcctggacaagcccaagaccgagaagcacaacgcccacggcgccggcaacggcctgagatacggcctgagcagcatgcagggctggagagtggagatggaggacgcccacaccgccgtggtgggcatcccccacggcctggaggactggagcttcttcgccgtgtacgacggccacgccggcagcagagtggccaactactgcagcacccacctgctggagcacatcaccaccaacgaggacttcagagccgccggcaagagcggcagcgccctggagctgagcgtggagaacgtgaagaacggcatcagaaccggcttcctgaagatcgacgagtacatgagaaacttcagcgacctgagaaacggcatggacagaagcggcagcaccgccgtgggcgtgatgatcagccccaagcacatctacttcatcaactgcggcgacagcagagccgtgctgtacagaaacggccaggtgtgcttcagcacccaggaccacaagccctgcaaccccagagagaaggagagaatccagaacgccggcggcagcgtgatgatccagagagtgaacggcagcctggccgtgagcagagccctgggcgactacgactacaagtgcgtggacggcaagggccccaccgagcagctggtgagccccgagcccgaggtgtacgagatcctgagagccgaggaggacgagttcatcatcctggcctgcgacggcatctgggacgtgatgagcaacgaggagctgtgcgagtacgtgaagagcagactggaggtgagcgacgacctggagaacgtgtgcaactgggtggtggacacctgcctgcacaagggcagcagagacaacatgagcatcgtgctggtgtgcttcagcaacgcccccaaggtgagcgacgaggccgtgaagaaggacagcgagctggacaagcacctggagagcagagtggaggagatcatggagaagagcggcgaggagggcatgcccgacctggcccacgtgatgagaatcctgagcgccgagaacatccccaacctgccccccggcggcggcctggccggcaagagaaacgtgatcgaggccgtgtacagcagactgaacccccacagagagagcgacggccagaagtag

SEQ ID NO: 30551 - DNA, 984 bp, Artificial Sequence
  derived and/or modified sequence
atgggcgccttcctggacaagcccaagaccgagaagcacaacgcccacggcgccggcaacggcctgagatacggcctgagcagcatgcagggctggagagtggagatggaggacgcccacaccgccgtggtgggcatcccccacggcctggaggactggagcttcttcgccgtgtacgacggccacgccggcagcagagtggccaactactgcagcacccacctgctggagcacatcaccaccaacgaggacttcagagccgccggcaagagcggcagcgccctggagctgagcgtggagaacgtgaagaacggcatcagaaccggcttcctgaagatcgacgagtacatgagaaacttcagcgacctgagaaacggcatggacagaagcggcagcaccgccgtgggcgtgatgatcagccccaagcacatctacttcatcaactgcggcgacagcagagccgtgctgtacagaaacggccaggtgtgcttcagcacccaggaccacaagccctgcaaccccagagagaaggagagaatccagaacgccggcggcagcgtgatgatccagagagtgaacggcagcctggccgtgagcagagccctgggcgactacgactacaagtgcgtggacggcaagggccccaccgagcagctggtgagccccgagcccgaggtgtacgagatcctgagagccgaggaggacgagttcatcatcctggcctgcgacggcatctgggacgtgatgagcaacgaggagctgtgcgagtacgtgaagagcagactggaggtgagcgacgacctggagaacgtgtgcaactgggtggtggacacctgcctgcacaagggcagcagagacaacatgagcatcgtgctggtgtgcttcagcaacgcccccaaggtgagcgacgaggccgtgaagaaggacagcgagctggacaagcacctggagagcagagtggagggcaagaccaacgccttctag

SEQ ID NO: 30552 - DNA, 1137 bp, Artificial Sequence
  derived and/or modified sequence
atgggcgccttcctggacaagcccaagaccgagaagcacaacgcccacggcgccggcaacggcctgagatacggcctgagcagcatgcagggctggagagtggagatggaggacgcccacaccgccgtggtgggcatcccccacggcctggaggactggagcttcttcgccgtgtacgacggccacgccggcagcagagtggccaactactgcagcacccacctgctggagcacatcaccaccaacgaggacttcagagccgccggcaagagcggcagcgccctggagctgagcgtggagaacgtgaagaacggcatcagaaccggcttcctgaagatcgacgagtacatgagaaacttcagcgacctgagaaacggcatggacagaagcggcagcaccgccgtgggcgtgatgatcagccccaagcacatctacttcatcaactgcggcgacagcagagccgtgctgtacagaaacggccaggtgtgcttcagcacccaggaccacaagccctgcaaccccagagagaaggagagaatccagaacgccggcggcagcgtgatgatccagagagtgaacggcagcctggccgtgagcagagccctgggcgactacgactacaagtgcgtggacggcaagggccccaccgagcagctggtgagccccgagcccgaggtgtacgagatcctgagagccgaggaggacgagttcatcatcctggcctgcgacggcatctgggacgtgatgagcaacgaggagctgtgcgagtacgtgaagagcagactggaggtgagcgacgacctggagaacgtgtgcaactgggtggtggacacctgcctgcacaagggcagcagagacaacatgagcatcgtgctggtgtgcttcagcaacgcccccaaggtgagcgacgaggccgtgaagaaggacagcgagctggacaagcacctggagagcagagtggaggagatcatggagaagagcggcgaggagggcatgcccgacctggcccacgtgatgagaatcctgagcgccgagaacatccccaacctgccccccggcggcggcctggccggcaagagaaacgtgatcgaggccgtgtacagcagactgaacccccacagagagagcgacggctag

SEQ ID NO: 30553 - protein, 376 aa, Artificial Sequence
  derived and/or modified sequence
MPLQVSDYSWQQTKTAVFLSLPLKGVCVRDTDVFCTENYLKVNFPPFLFEAFLYAPIDDESSKAKIGNDTIVFTLYKKEAAMWETLSVTGVDKEMMQRIREKSILQAQERAKEATEAKAAAKREDQKYALSVMMKIEEEERKKIEDMKENERIKATKALEAWKEYQRKAEEQKKIQREEKLCQKEKQIKEERKKIKYKSLTRNLASRNLAPKGRNSENIFTEKLKEDSIPAPRSVGSIKINFTPRVFPTALRESQVAEEEEWLHKQAEARRAMNTDIAELCDLKEEEKNPEWLKDKGNKLFATENYLAAINAYNLAIRLNNKMPLLYLNRAACHLKLKNLHKAIEDSSKAYRIMKRHLRLIHPTKLYKLMLRRFGM

SEQ ID NO: 30554 - DNA, 1131 bp, Artificial Sequence
  derived and/or modified sequence
atgcccctgcaggtgagcgactacagctggcagcagaccaagaccgccgtgttcctgagcctgcccctgaagggcgtgtgcgtgagagacaccgacgtgttctgcaccgagaactacctgaaggtgaacttcccccccttcctgttcgaggccttcctgtacgcccccatcgacgacgagagcagcaaggccaagatcggcaacgacaccatcgtgttcaccctgtacaagaaggaggccgccatgtgggagaccctgagcgtgaccggcgtggacaaggagatgatgcagagaatcagagagaagagcatcctgcaggcccaggagagagccaaggaggccaccgaggccaaggccgccgccaagagagaggaccagaagtacgccctgagcgtgatgatgaagatcgaggaggaggagagaaagaagatcgaggacatgaaggagaacgagagaatcaaggccaccaaggccctggaggcctggaaggagtaccagagaaaggccgaggagcagaagaagatccagagagaggagaagctgtgccagaaggagaagcagatcaaggaggagagaaagaagatcaagtacaagagcctgaccagaaacctggccagcagaaacctggcccccaagggcagaaacagcgagaacatcttcaccgagaagctgaaggaggacagcatccccgcccccagaagcgtgggcagcatcaagatcaacttcacccccagagtgttccccaccgccctgagagagagccaggtggccgaggaggaggagtggctgcacaagcaggccgaggccagaagagccatgaacaccgacatcgccgagctgtgcgacctgaaggaggaggagaagaaccccgagtggctgaaggacaagggcaacaagctgttcgccaccgagaactacctggccgccatcaacgcctacaacctggccatcagactgaacaacaagatgcccctgctgtacctgaacagagccgcctgccacctgaagctgaagaacctgcacaaggccatcgaggacagcagcaaggcctacagaatcatgaagagacacctgagactgatccaccccaccaagctgtacaagctgatgctgagaagattcggcatgtag

SEQ ID NO: 30555 - DNA, 975 bp, Artificial Sequence
  derived and/or modified sequence
atgcccctgcaggtgagcgactacagctggcagcagaccaagaccgccgtgttcctgagcctgcccctgaagggcgtgtgcgtgagagacaccgacgtgttctgcaccgagaactacctgaaggtgaacttcccccccttcctgttcgaggccttcctgtacgcccccatcgacgacgagagcagcaaggccaagatcggcaacgacaccatcgtgttcaccctgtacaagaaggaggccgccatgtgggagaccctgagcgtgaccggcgtggacaaggagatgatgcagagaatcagagagaagagcatcctgcaggcccaggagagagccaaggaggccaccgaggccaaggccgccgccaagagagaggaccagaagtacgccctgagcgtgatgatgaagatcgaggaggaggagagaaagaagatcgaggacatgaaggagaacgagagaatcaaggccaccaaggccctggaggcctggaaggagtaccagagaaaggccgaggagcagaagaagatccagagagaggagaagctgtgccagaaggagaagcagatcaaggaggagagaaagaagatcaagtacaagagcctgaccagaaacctggccagcagaaacctggcccccaagggcagaaacagcgagaacatcttcaccgagaagctgaaggaggacagcatccccgcccccagaagcgtgggcagcatcaagatcaacttcacccccagagtgttccccaccgccctgagagagagccaggtggccgaggaggaggagtggctgcacaagcaggccgaggccagaagagccatgaacaccgacatcgccgagctgtgcgacctgaaggaggaggagaagaaccccgagtggctgaaggacaagggcaagcccgagagatgcctgaagatccccgtgaccgtgatccacctggtggtgggcctgagcagcgtgatgagaggccagatctag

SEQ ID NO: 30556 - DNA, 1887 bp, Artificial Sequence
  derived and/or modified sequence
tcctctcctattatgcaaacccacaccatggatccagcagactactctggccccagcatgctgctccttgggatgatgggagaagggggaaacctgtgttttctcttggttttagggtatgggtctacttctttgaacattcgctcagatcgtaaggtaaccccaagaatcggcatcactctctggtctgggcgcctggatagtcacgcatggagtccgcgaggtgctggcgccggagcacgctgggaacgccgggctcccggccggcctgacccggaagggctggcgcatggtaaccccagcttccctagcaaccaagcaggcgcaagaagcaaccagccgcgctatccgctcccgttgctaccggaatgcctcttcaggttagcgattacagctggcagcagacgaagactgcggtctttctgtctctgcccctcaaaggcgtgtgcgtcagagacacggacgtgttctgcacggaaaactatctgaaggtcaactttcctccatttttatttgaggcatttctttatgctcccatagacgatgagagcagcaaagcaaagattgggaatgacaccattgtcttcaccttgtataaaaaagaagcggccatgtgggagaccctttctgtgacgggtgttgacaaagagatgatgcaaagaattagagaaaaatctattttacaagcacaagagagagcaaaagaagctacagaagcaaaagctgcagcaaagcgggaagatcaaaaatacgcactaagtgtcatgatgaagattgaagaagaagagaggaaaaaaatagaagatatgaaagaaaatgaacggataaaagccactaaagcattggaagcctggaaagaatatcaaagaaaagctgaggagcaaaaaaaaattcagagagaagagaaattatgtcaaaaagaaaagcaaattaaagaagaaagaaaaaaaataaaatataagagtcttactagaaatttggcatctagaaatcttgctccaaaagggagaaattcagaaaatatatttactgagaagttaaaggaagacagtattcctgctcctcgctctgttggcagtattaaaatcaactttacccctcgagtattcccaacagctcttcgtgaatcacaagtagcagaagaggaggagtggctacacaaacaagctgaggcacgaagagcaatgaatactgacatagctgaactttgcgatttaaaagaagaagaaaagaacccagaatggttgaaggataaaggaaacaaattgtttgcaacggaaaactatttggcagctatcaatgcatataatttagccataagactaaataataagatgccactattgtatttgaaccgggctgcttgccacctaaaactaaaaaacttacacaaggctattgaagattcttctaaggcctacaggattatgaagcggcacttaagattgatccatccaacaaaattgtacaaattgatgctgagaagattcggaatgtaattcaaggaacagaactaaaatcttaatgactattagaagtaactaagtattgttataagttttttaaaaacaactggaggcatctttgtacatattatggccagttgtacagaatcgctttctgtttagtactttagttctgttgagggcaaaatattataaatctatagaaaataaactgtttgacttgaatcatttctgaataagtaaatctaaataagaatctattttaattccttatttcttcatattaatacatatgtatacttttttgtgttactgaattaagcttgcccttgtaacaaaatatgttttggtatagttaccaggacacttactgattaatttttaacaaggtagaattttaaaataaaagatttataaataa

SEQ ID NO: 30557 - DNA, 1131 bp, Artificial Sequence
  derived and/or modified sequence
atgcccctgcaggtcagcgattacagctggcagcagaccaagaccgctgtgtttctgagtctaccccttaaaggcgtctgtgtccgggatacagatgtgttttgcactgagaactacctgaaagtcaacttcccacccttcctgtttgaagccttcctgtatgcacctattgacgacgagagttcaaaagccaagataggaaatgacaccattgtgttcacgttgtataaaaaggaggccgccatgtgggaaaccctctcggtaaccggagtggataaggagatgatgcaacgcatcagggaaaagagcattctgcaggcccaggaaagagccaaagaggccacagaggctaaggctgccgcaaagcgagaggatcagaagtacgccctgagcgtgatgatgaagattgaggaagaggagcggaagaagattgaggacatgaaagagaatgaaaggataaaagcaacaaaagcgctcgaggcttggaaggagtatcaacgtaaggctgaggagcagaaaaagatccagcgagaagagaaactgtgtcagaaagagaagcaaataaaggaagaacgcaagaagatcaaatacaagagcctgacccgcaatctggctagcaggaatctggcaccaaaagggaggaattctgagaacatttttacagaaaaactcaaagaggattcaattcccgctccacgcagcgtcggctcgatcaagattaactttactcctagggtttttccgacagctctccgagaatcccaggtggctgaggaggaagagtggctgcacaagcaggccgaagcgcggcgagcaatgaataccgatattgccgaactttgtgatctcaaggaagaagagaagaatcccgagtggctcaaggacaagggtaacaagctgtttgcaactgaaaactacctggccgccatcaacgcatacaacctggctattaggctcaacaataaaatgccactgctttacctcaaccgggccgcttgccatctgaaactcaagaatctccataaagccattgaggacagttcaaaggcctaccgcatcatgaagaggcatctgcggttaatccaccccaccaagttatataagctgatgcttcgccggtttggaatgtag

SEQ ID NO: 30558 - DNA, 975 bp, Artificial Sequence
  derived and/or modified sequence
atgccattacaggtcagtgattactcatggcagcagacaaaaaccgccgtttttctcagcctgccactgaaaggagtatgtgtgcgtgatacagacgtgttttgcaccgaaaattatcttaaagttaacttccctcccttcctgttcgaggcgtttctatatgctccgatcgatgacgagtctagtaaggccaagatcggcaatgatactattgttttcaccctgtacaaaaaggaggcagctatgtgggaaaccctgagcgtaactggtgtagacaaggaaatgatgcagaggattcgtgagaagagtattctgcaggcacaagagagggctaaggaagcaacagaagccaaggctgcggcgaaaagggaggaccaaaaatacgcgctgtcagtgatgatgaaaattgaagaggaggagcgaaaaaaaattgaggatatgaaagagaacgagcgtataaaggcaaccaaagcgctggaagcttggaaggaataccaaaggaaagcggaggagcagaagaaaattcaacgggaggagaaactctgccagaaggagaagcaaattaaagaagaacgcaagaagatcaaatataagagcttgactcgcaacctagcctcgcggaatctggcccccaaaggcaggaatagcgagaacattttcaccgagaaacttaaagaagacagcatacctgcaccaaggagcgtgggtagtataaaaatcaatttcacccctagggtcttcccaactgcgctgagggagagtcaagtggccgaagaggaggaatggttacacaagcaggccgaggcgagacgcgccatgaacactgacattgctgagttgtgtgatctcaaagaagaagagaaaaatcccgagtggctgaaagataagggaaaacctgaaaggtgcctgaaaatacctgtgacagtcatccacctagtggtaggactcagcagcgttatgcgcggccagatctag

SEQ ID NO: 30559 - DNA, 1131 bp, Artificial Sequence
  derived and/or modified sequence
atgcccttacaggtcagcgactactcatggcaacaaaccaagaccgcggtgttcctctcactccctctcaaaggggtgtgtgtacgggataccgacgtattttgtacagagaactacctcaaggtgaactttcctcctttcctgttcgaggcgttcctttacgccccaatcgatgacgagtccagcaaagctaagatcgggaatgacactattgtgtttacactgtacaagaaggaggctgcaatgtgggaaacacttagcgtgaccggtgtggacaaggagatgatgcagaggattagggagaaatccattctgcaagctcaggaacgagcaaaggaagcaaccgaggctaaggctgctgccaagcgtgaggaccagaaatatgcactgtctgttatgatgaagatcgaggaggaggagcgcaagaagattgaagatatgaaggaaaatgagaggattaaggcaacgaaggcattggaagcatggaaggagtaccagagaaaggctgaggaacagaagaagattcagagggaggagaaactctgtcagaaagagaagcagattaaggaagagcgcaagaagattaaatataaatccctgaccaggaacctcgcctcgcggaatctcgctcccaaaggaaggaactcagagaatatcttcactgaaaaacttaaagaggactccattcccgctccaagaagcgtgggcagcataaaaattaatttcaccccacgtgtgtttcccacggccctgcgggagtctcaggtagccgaggaagaagagtggctccataagcaagccgaagcccgccgcgccatgaacacagatattgcagaactttgcgacttgaaagaggaggaaaaaaaccctgaatggttaaaagataagggaaacaagctgtttgcaaccgaaaattaccttgcggctatcaatgcatataaccttgctatcagactgaataataagatgccgcttctgtacttgaatagggccgcgtgccacttgaagttaaagaatctgcacaaagcaatcgaggatagctccaaggcgtacagaattatgaagagacatctgaggctaatacacccaaccaagctgtataagctaatgttgaggcggtttggaatgtag

SEQ ID NO: 30560 - DNA, 1131 bp, Artificial Sequence
  derived and/or modified sequence
atgcccctgcaggtgtctgactacagctggcagcagaccaagacagctgtgttcctgagcctgcccctgaagggcgtgtgtgtgcgggacacagatgtgttctgcacagagaactacctgaaggtgaacttcccccccttcctgtttgaggccttcctgtatgcccccattgatgatgagagcagcaaggccaagattggaaatgacaccatcgtgttcaccctgtacaagaaggaggccgccatgtgggagaccctgtctgtgactggagtggacaaggagatgatgcagaggatccgggagaagagcatcctgcaggcccaggagcgggccaaggaggccacagaggccaaggccgccgccaagcgggaggaccagaagtatgccctgtctgtgatgatgaagattgaggaggaggagaggaagaagattgaggacatgaaggaaaatgaaagaatcaaggccaccaaggccctggaggcctggaaggagtaccagaggaaggccgaggagcagaagaagatccagcgggaggagaagctgtgccagaaggagaagcagatcaaggaggagaggaagaagatcaagtacaagagcctgaccaggaacctggccagcaggaacctggcccccaagggcaggaacagcgagaacatcttcacagagaagctgaaggaggacagcatcccagcccccaggtctgtgggcagcatcaagatcaacttcacccccagggtcttccccacagccctgcgggagagccaggtggccgaggaggaggagtggctgcacaagcaggccgaggcccggcgggccatgaacacagacattgctgagctgtgtgacctgaaggaggaggagaagaaccctgagtggctgaaggacaagggcaacaagctgtttgccacagagaactacctggccgccatcaatgcctacaacctggccatccggctgaacaacaagatgcccctgctgtacctgaacagagctgcctgccacctgaagctgaagaacctgcacaaggccatcgaggacagcagcaaggcctaccgcatcatgaagaggcacctgcggctcatccaccccaccaagctgtacaagctgatgctgcggcgcttcggcatgtag

SEQ ID NO: 30561 - DNA, 975 bp, Artificial Sequence
  derived and/or modified sequence
atgcccctgcaggtgtctgactacagctggcagcagaccaagacagctgtgttcctgagcctgcccctgaagggcgtgtgtgtgcgggacacagatgtgttctgcacagagaactacctgaaggtgaacttcccccccttcctgtttgaggccttcctgtatgcccccattgatgatgagagcagcaaggccaagattggaaatgacaccatcgtgttcaccctgtacaagaaggaggccgccatgtgggagaccctgtctgtgactggagtggacaaggagatgatgcagaggatccgggagaagagcatcctgcaggcccaggagcgggccaaggaggccacagaggccaaggccgccgccaagcgggaggaccagaagtatgccctgtctgtgatgatgaagattgaggaggaggagaggaagaagattgaggacatgaaggaaaatgaaagaatcaaggccaccaaggccctggaggcctggaaggagtaccagaggaaggccgaggagcagaagaagatccagcgggaggagaagctgtgccagaaggagaagcagatcaaggaggagaggaagaagatcaagtacaagagcctgaccaggaacctggccagcaggaacctggcccccaagggcaggaacagcgagaacatcttcacagagaagctgaaggaggacagcatcccagcccccaggtctgtgggcagcatcaagatcaacttcacccccagggtcttccccacagccctgcgggagagccaggtggccgaggaggaggagtggctgcacaagcaggccgaggcccggcgggccatgaacacagacattgctgagctgtgtgacctgaaggaggaggagaagaaccctgagtggctgaaggacaagggcaagccagagcgctgcctgaagatccctgtgaccgtcatccacctggtggtgggcctgagctctgtgatgaggggccagatctag

SEQ ID NO: 30562 - DNA, 1131 bp, Artificial Sequence
  derived and/or modified sequence
atgcccctgcaggtgagcgactacagctggcagcagaccaagaccgcagttttcttgagcctgcccctcaaaggcgtgtgtgtaagagacacagacgtcttctgcaccgaaaactatctgaaggttaactttccgccgttcctttttgaagcatttctctatgcacccattgatgacgaaagctccaaggccaagataggcaatgatacgatcgttttcactctgtacaaaaaagaggcagcaatgtgggagacccttagtgttactggcgtggataaagaaatgatgcaaagaattagagagaagtctattctgcaggcacaggaaagagccaaggaagccaccgaggcaaaggcggctgctaagagggaagaccaaaaatacgcgttgagcgtgatgatgaagatagaggaggaagaacggaaaaaaatagaggatatgaaggagaacgaaagaatcaaggctaccaaagccttagaggcctggaaggagtatcaaaggaaagcagaggaacaaaagaaaatccagagagaagagaaactgtgtcagaaagagaagcaaattaaggaggaaaggaaaaagattaaatataaaagcctgacaaggaatctggcgagtagaaacttggcccccaaaggccggaacagcgagaacatcttcaccgaaaaactcaaagaggattcaatacctgcgccgcggtcagtcggtagcatcaagattaatttcacccccagagtgttccccaccgcattacgtgaatcgcaggtggccgaggaagaggagtggctgcacaagcaggctgaagccaggcgagccatgaatacagatattgccgaactctgtgacctaaaggaagaagagaaaaatcctgagtggctcaaggataagggtaataaactcttcgccacagaaaactacctggcagcgattaacgcctacaatctcgctattcggctcaacaacaaaatgcccttactgtatttgaacagggccgcctgccacctgaaactgaagaacctgcataaagcaatagaggattcttccaaggcttacaggattatgaaacggcacctccgcctgatccatcccactaagttgtataaactgatgttgaggcggtttggcatgtag

SEQ ID NO: 30563 - DNA, 975 bp, Artificial Sequence
  derived and/or modified sequence
atgcccctgcaggtgagcgactacagctggcagcagaccaagaccgctgtatttctctccttgccccttaagggtgtgtgcgtcagagatacagacgtgttctgtaccgaaaactatttaaaagtgaacttcccgccatttctgtttgaggcttttctatatgcaccaattgatgacgagagctctaaagccaaaattggcaacgatacaattgtttttacgttgtacaaaaaagaggctgctatgtgggaaactttatcagtcacaggcgtcgacaaggaaatgatgcaacgtattcgcgagaaaagcatcttgcaggcgcaggagcgcgctaaagaagcaactgaggctaaagccgccgcgaagcgagaggaccagaaatatgcactgtctgtgatgatgaagatcgaggaagaagagcgaaagaaaatcgaagacatgaaagaaaacgaaaggatcaaagctaccaaagctttagaggcctggaaggagtatcagcgcaaggcagaggagcagaagaagatccagcgagaggagaagctttgccagaaggagaaacagattaaagaggagcggaagaagatcaagtacaagagcctgacgcgtaatctggctagccgcaacctggcccctaagggtcgtaacagcgaaaacatctttaccgaaaaattaaaggaagatagcatccctgccccgagaagcgtgggatctatcaagattaattttaccccccgggtctttccaaccgctctccgtgagtcccaggtggcagaagaagaggagtggcttcataaacaggcggaagctcggagggctatgaacacagatattgccgagttatgcgacctgaaagaagaggaaaaaaaccctgagtggctcaaagataaaggcaaacccgaacggtgcctgaagattcctgttaccgtcatccacctggttgttgggctgagcagtgtaatgcgcggtcagatatag

SEQ ID NO: 30564 - DNA, 1131 bp, Artificial Sequence
  derived and/or modified sequence
atgcccctgcaggtgagcgactacagctggcagcagaccaagaccgcagtcttcctgtccttgccgctaaaaggagtgtgtgtgagggacaccgatgtgttttgcacagagaactaccttaaggtcaattttcctcccttcctctttgaagcatttctgtatgccccaattgatgacgagtcaagcaaggcaaagatcgggaatgacaccatcgtgtttaccctttacaagaaggaggctgccatgtgggaaaccttgtctgtcacgggggtggataaggagatgatgcagcggatccgggaaaaaagcatcctgcaggcccaagaacgtgcaaaagaagccactgaggccaaagcagccgcaaagcgcgaagatcagaaatatgccctatcagtgatgatgaagatcgaagaggaggagcgcaaaaagatcgaggatatgaaagagaacgaacgtatcaaggctactaaggctttggaggcgtggaaagagtatcaacggaaagccgaggaacagaagaaaattcagcgcgaggagaaactctgtcagaaggagaagcagatcaaggaggagcgaaaaaagatcaagtacaaatccctgactagaaatctggccagccgcaacctcgcgccaaagggtcggaattctgaaaatatttttacggagaaactgaaggaagactcaattcccgcaccgcgcagcgtgggttctataaagatcaatttcacaccccgtgtgtttcccactgcactgagggaaagccaggtggccgaggaggaggaatggttacataagcaggccgaggctcgccgggctatgaacaccgacatcgccgaactctgcgacctgaaagaagaagagaaaaatcccgaatggctgaaggacaagggaaacaagctttttgcaacagagaactaccttgctgccataaacgcgtacaatctagctattcggctgaacaataaaatgccgcttctttacctgaatcgagccgcatgccacctgaagttaaagaaccttcacaaagcaatcgaggactcttcgaaggcctacagaataatgaaacgacatctccggttgattcacccgaccaagctgtacaagctaatgctgcggcgctttggaatgtag

SEQ ID NO: 30565 - DNA, 1131 bp, Artificial Sequence
  derived and/or modified sequence
atgcccctccaggtgtcagactacagctggcagcagactaagaccgccgtgtttttgagcctgccattgaaaggcgtttgcgttagagacaccgatgtcttctgtacagaaaactatttaaaagtgaatttccccccattcctgtttgaggcctttttgtatgcgcctatcgacgatgagtcttccaaggctaaaataggtaatgatacaatcgtatttaccctgtataagaaggaggccgcaatgtgggagactctatccgtcaccggcgtggataaggaaatgatgcagcggattcgggaaaagtccattttgcaggctcaggaacgtgccaaagaagctaccgaggcaaaggccgcagccaagcgagaggatcagaagtacgccctatcagtgatgatgaaaatagaggaggaagagagaaaaaaaattgaggatatgaaagaaaacgagcgcatcaaggctaccaaagccttggaggcttggaaagaataccaaaggaaagcggaggaacagaaaaagattcagcgagaggagaaactttgtcaaaaggaaaaacagatcaaagaggaacgaaaaaaaatcaagtataagtctctgaccagaaacctcgcaagtagaaacctggcgcctaaaggcagaaatagcgagaacattttcacagagaagctgaaggaggatagcatccccgctccccgatctgtgggtagcattaagattaacttcactccgagggtcttccccactgccctcagagaatcacaagtcgccgaggaagaggaatggctgcacaagcaggccgaagcacgcagggccatgaacactgatattgcggaactatgcgatctcaaggaagaagagaagaatcccgagtggttgaaggacaagggcaacaagctgtttgccactgaaaattacttggcagccataaatgcctacaatctcgccattcggttgaataataaaatgcccttgttatacctgaatcgggctgcatgccatttgaaactgaaaaacctccacaaagctatagaagactcgagtaaggcctatcgcatcatgaagaggcatttaagattgatacatcccactaagctgtacaagcttatgttgcgtaggtttgggatgtag

SEQ ID NO: 30566 - DNA, 1293 bp, Artificial Sequence
  derived and/or modified sequence
gttgctaccggaatgcctcttcaggttagcgattacagctggcagcagacgaagactgcggtctttctgtctctgcccctcaaaggcgtgtgcgtcagagacacggacgtgttctgcacggaaaactatctgaaggtcaactttcctccatttttatttgaggcatttctttatgctcccatagacgatgagagcagcaaagcaaagattgggaatgacaccattgtcttcaccttgtataaaaaagaagcggccatgtgggagaccctttctgtgacgggtgttgacaaagagatgatgcaaagaattagagaaaaatctattttacaagcacaagagagagcaaaagaagctacagaagcaaaagctgcagcaaagcgggaagatcaaaaatacgcactaagtgtcatgatgaagattgaagaagaagagaggaaaaaaatagaagatatgaaagaaaatgaacggataaaagccactaaagcattggaagcctggaaagaatatcaaagaaaagctgaggagcaaaaaaaaattcagagagaagagaaattatgtcaaaaagaaaagcaaattaaagaagaaagaaaaaaaataaaatataagagtcttactagaaatttggcatctagaaatcttgctccaaaagggagaaattcagaaaatatatttactgagaagttaaaggaagacagtattcctgctcctcgctctgttggcagtattaaaatcaactttacccctcgagtattcccaacagctcttcgtgaatcacaagtagcagaagaggaggagtggctacacaaacaagctgaggcacgaagagcaatgaatactgacatagctgaactttgcgatttaaaagaagaagaaaagaacccagaatggttgaaggataaaggaaaacctgaaagatgtctgaaaattccagtgacagtgattcatcttgtggttggactgtcatcagtcatgaggggtcagatatagaaatgttgaattctgtgacccccactgacagctgtgagcccgccccagaatgttcatctttagagcaagaggagcttcaagcattgcagatagagcaaggagaaagcagccaaaatggcacagtgcttatggaagaaactgcttatccagctttggaggaaaccagctcaacaattgaggcagaggaacaaaagatacccgaagacagtatctatattggaactgccagtgatgattctgatattgttacccttgagccacctaagttagaagaaattggaaatcaagaagttgtcattgttgaag

SEQ ID NO: 30567 - DNA, 975 bp, Artificial Sequence
  derived and/or modified sequence
atgccactccaggtttctgattattcttggcagcagacaaagacagcggtcttcctctcgctgccattgaaaggggtgtgtgtgagagacaccgacgtcttttgcactgaaaattacctgaaggtgaacttcccaccatttctattcgaagcttttttatacgccccaatcgacgacgagtcatcaaaagcaaagatcggaaatgatactatagtctttacactgtacaaaaaggaggccgctatgtgggaaacccttagtgtaacaggggtggataaggagatgatgcaacggatccgggagaagtccatcttgcaggcccaagagagggctaaggaagctacggaggctaaggccgctgctaagagagaagaccagaagtatgccctaagcgtgatgatgaagattgaagaagaggagaggaagaaaattgaagacatgaaggagaatgagaggattaaggccaccaaggctctggaagcgtggaaagaataccagaggaaagccgaggaacaaaagaaaatccagagagaagaaaagctgtgccagaaggaaaagcaaatcaaggaggagaggaagaaaatcaagtacaaatccctcaccagaaacctcgccagtaggaacttggctccaaaggggaggaactctgaaaacatttttactgaaaagctgaaggaggacagcatccctgcacctcgctctgtggggagtatcaaaattaacttcactccgagggtgtttcccacggccctgagggagagtcaggtggccgaggaggaggagtggctgcacaaacaggccgaagccagaagggctatgaacacggacattgcggagctgtgcgaccttaaagaggaggaaaagaatccagaatggttaaaggacaagggtaagcccgagcgctgcctcaagatccctgtcaccgtcattcatctggtcgtgggcctgtcttcagttatgcgtgggcagatttag

SEQ ID NO: 30568 - DNA, 1131 bp, Artificial Sequence
  derived and/or modified sequence
atgccgttgcaagtctctgactatagctggcagcagaccaaaaccgccgtgttcctgagcttacccttaaagggcgtctgcgtgcgagacacagatgtgttctgcactgagaactacctgaaagttaattttccaccgtttttgttcgaagcttttctgtacgctcctatcgatgatgagagcagcaaagctaaaatcgggaacgatacgatcgtgttcactctctataaaaaagaagccgcaatgtgggaaactctgtccgtgacgggagtggataaagaaatgatgcaacggatcagagaaaagtccatcctgcaggcccaggagcgggctaaggaggcaacagaggccaaggcagctgcgaagcgagaagaccaaaaatatgccctctccgtgatgatgaagatcgaggaagaagaaagaaagaaaattgaagatatgaaggagaacgagagaattaaagcgacaaaggcactcgaggcctggaaagagtaccagcggaaggccgaggaacagaaaaaaatccaacgtgaggagaagctctgccagaaggagaagcagatcaaggaggagaggaaaaagattaagtataaaagtctgacaagaaatctggccagccggaacctggccccaaaagggcgtaattctgaaaatatctttacagaaaaactgaaagaggattccatcccagcccctcgcagcgtcggatcaattaaaataaacttcacccccagggtcttcccaactgctttaagagagagtcaggtagctgaagaggaggagtggctgcataaacaggctgaagcgaggcgggctatgaatacagatatagccgagctgtgcgacttgaaggaagaggagaagaatcccgaatggttgaaggacaaggggaacaaacttttcgcaacagagaattacctcgccgctattaatgcctataacctggccatcaggctgaacaataagatgccacttctgtatctcaatagggccgcatgtcatctcaaactaaagaatttacataaagctatagaggacagcagcaaggcatatcgcatcatgaagaggcatttaagattgatccaccccactaagctttataagttaatgctgcgcagattcggaatgtag

SEQ ID NO: 30569 - DNA, 1567 bp, Artificial Sequence
  derived and/or modified sequence
aggcgcaagaagcaaccagccgcgctatccgctcccgttgctaccggaatgcctcttcaggttagcgattacagctggcagcagacgaagactgcggtctttctgtctctgcccctcaaaggcgtgtgcgtcagagacacggacgtgttctgcacggaaaactatctgaaggtcaactttcctccatttttatttgaggcatttctttatgctcccatagacgatgagagcagcaaagcaaagattgggaatgacaccattgtcttcaccttgtataaaaaagaagcggccatgtgggagaccctttctgtgacgggtgttgacaaagagatgatgcaaagaattagagaaaaatctattttacaagcacaagagagagcaaaagaagctacagaagcaaaagctgcagcaaagcgggaagatcaaaaatacgcactaagtgtcatgatgaagattgaagaagaagagaggaaaaaaatagaagatatgaaagaaaatgaacggataaaagccactaaagcattggaagcctggaaagaatatcaaagaaaagctgaggagcaaaaaaaaattcagagagaagagaaattatgtcaaaaagaaaagcaaattaaagaagaaagaaaaaaaataaaatataagagtcttactagaaatttggcatctagaaatcttgctccaaaagggagaaattcagaaaatatatttactgagaagttaaaggaagacagtattcctgctcctcgctctgttggcagtattaaaatcaactttacccctcgagtattcccaacagctcttcgtgaatcacaagtagcagaagaggaggagtggctacacaaacaagctgaggcacgaagagcaatgaatactgacatagctgaactttgcgatttaaaagaagaagaaaagaacccagaatggttgaaggataaaggaaacaaattgtttgcaacggaaaactatttggcagctatcaatgcatataatttagccataagactaaataataagatgccactattgtatttgaaccgggctgcttgccacctaaaactaaaaaacttacacaaggctattgaagattcttctaaggcctacaggattatgaagcggcacttaagattgatccatccaacaaaattgtacaaattgatgctgagaagattcggaatgtaattcaaggaacagaactaaaatcttaatgactattagaagtaactaagtattgttataagttttttaaaaacaactggaggcatctttgtacatattatggccagttgtacagaatcgctttctgtttagtactttagttctgttgagggcaaaatattataaatctatagaaaataaactgtttgacttgaatcatttctgaataagtaaatctaaataagaatctattttaattccttatttcttcatattaatacatatgtatacttttttgtgttactgaattaagcttgcccttgtaacaaaatatgttttggtatagttaccaggacacttactgattaatttttaacaaggtagaattttaaaataaaagatttataaataa

SEQ ID NO: 30570 - protein, 381 aa, Artificial Sequence
  derived and/or modified sequence
MPLQVSDYSWQQTKTAVFLSLPLKGVCVRDTDVFCTENYLKVNFPPFLFEAFLYAPIDDESSKAKIGNDTIVFTLYKKEAAMWETLSVTGVDKEMMQRIREKSILQAQERAKEATEAKAAAKREDQKYALSVMMKIEEEERKKIEDMKENERIKATKALEAWKEYQRKAEEQKKIQREEKLCQKEKQIKEERKKIKYKSLTRNLASRNLAPKGRNSENIFTEKLKEDSIPAPRSVGSIKINFTPRVFPTALRESQVAEEEEWLHKQAEARRAMNTDIAELCDLKEEEKNPEWLKDKGNKLFATENYLAAINAYNLAIRLNNKMPLLYLNRAACHLKLKNLHKAIEDSSKEFCSLEGIECQASEPKLSHHIPSDLHVYIQMA

SEQ ID NO: 30571 - protein, 324 aa, Artificial Sequence
  derived and/or modified sequence
MPLQVSDYSWQQTKTAVFLSLPLKGVCVRDTDVFCTENYLKVNFPPFLFEAFLYAPIDDESSKAKIGNDTIVFTLYKKEAAMWETLSVTGVDKEMMQRIREKSILQAQERAKEATEAKAAAKREDQKYALSVMMKIEEEERKKIEDMKENERIKATKALEAWKEYQRKAEEQKKIQREEKLCQKEKQIKEERKKIKYKSLTRNLASRNLAPKGRNSENIFTEKLKEDSIPAPRSVGSIKINFTPRVFPTALRESQVAEEEEWLHKQAEARRAMNTDIAELCDLKEEEKNPEWLKDKGKPERCLKIPVTVIHLVVGLSSVMRGQI

SEQ ID NO: 30572 - DNA, 1146 bp, Artificial Sequence
  derived and/or modified sequence
atgcccctgcaggtgagcgactacagctggcagcagaccaagaccgccgtgttcctgagcctgcccctgaagggcgtgtgcgtgagagacaccgacgtgttctgcaccgagaactacctgaaggtgaacttcccccccttcctgttcgaggccttcctgtacgcccccatcgacgacgagagcagcaaggccaagatcggcaacgacaccatcgtgttcaccctgtacaagaaggaggccgccatgtgggagaccctgagcgtgaccggcgtggacaaggagatgatgcagagaatcagagagaagagcatcctgcaggcccaggagagagccaaggaggccaccgaggccaaggccgccgccaagagagaggaccagaagtacgccctgagcgtgatgatgaagatcgaggaggaggagagaaagaagatcgaggacatgaaggagaacgagagaatcaaggccaccaaggccctggaggcctggaaggagtaccagagaaaggccgaggagcagaagaagatccagagagaggagaagctgtgccagaaggagaagcagatcaaggaggagagaaagaagatcaagtacaagagcctgaccagaaacctggccagcagaaacctggcccccaagggcagaaacagcgagaacatcttcaccgagaagctgaaggaggacagcatccccgcccccagaagcgtgggcagcatcaagatcaacttcacccccagagtgttccccaccgccctgagagagagccaggtggccgaggaggaggagtggctgcacaagcaggccgaggccagaagagccatgaacaccgacatcgccgagctgtgcgacctgaaggaggaggagaagaaccccgagtggctgaaggacaagggcaacaagctgttcgccaccgagaactacctggccgccatcaacgcctacaacctggccatcagactgaacaacaagatgcccctgctgtacctgaacagagccgcctgccacctgaagctgaagaacctgcacaaggccatcgaggacagcagcaaggagttctgcagcctggagggcatcgagtgccaggccagcgagcccaagctgagccaccacatccccagcgacctgcacgtgtacatccagatggcctag

SEQ ID NO: 30573 - DNA, 1146 bp, Artificial Sequence
  derived and/or modified sequence
atgccgctgcaggtgagtgattactcttggcagcagacaaaaacggctgtcttcctatcactgcctctgaaaggggtgtgcgtaagggacactgatgtattttgcaccgaaaactacttaaaggtgaactttccaccatttttgtttgaggcttttctgtacgcccctatcgacgacgaatcttctaaagctaagattggaaatgatactatcgtgtttacactgtataagaaagaagctgcaatgtgggagacactgtccgtgacaggcgtcgacaaggaaatgatgcagagaattcgggaaaagagcatcctgcaggcacaggagcgtgctaaagaagcaacagaagccaaagcagccgcaaagagggaagatcaaaagtacgccttgagtgtcatgatgaagattgaggaggaagaacgcaagaaaatcgaggatatgaaagaaaatgaaagaattaaggctaccaaagctctcgaggcctggaaggagtatcagaggaaggccgaagagcagaaaaagattcagcgcgaggaaaagttatgtcagaaagagaagcagatcaaagaggaaaggaaaaagattaagtacaagtccctgacccgaaacctcgcctccagaaatctggctccgaagggtcgcaatagcgagaatattttcacagaaaagctaaaggaagatagtatcccggcccctagaagtgttgggtccatcaagatcaacttcacacctcgggtattccctaccgctttgcgggagtctcaggtggccgaagaggaagagtggttacacaagcaagcagaggcccggcgagcaatgaatactgatattgccgaactatgtgatctaaaagaggaagagaagaatccagagtggctgaaagataagggaaataagctcttcgccactgaaaattacctggctgccatcaatgcctataaccttgctatcagactaaataacaagatgcccttgctgtacctgaaccgggctgcttgccatttgaagttgaaaaatctccataaggcaattgaggactcctccaaggaattctgttctttagaaggcatagaatgccaggcaagtgagccaaaactctctcaccacatcccaagtgatttgcacgtatatatacagatggcttag

SEQ ID NO: 30574 - DNA, 1146 bp, Artificial Sequence
  derived and/or modified sequence
atgcctcttcaggtcagcgactacagttggcagcagacaaagaccgcggtcttcttgtcactgcccctcaaaggcgtatgcgtgcgcgatacagatgtgttctgtacagaaaactacctcaaagtgaatttccccccctttctttttgaggcttttctctatgcacctatagacgatgagagctctaaagcaaagatcggaaacgataccatcgtgttcactctttacaaaaaggaagccgccatgtgggagacgctgtctgtgacgggcgtcgacaaagagatgatgcagcgaatccgagagaagtctattcttcaggcacaggaaagggcaaaggaagccacagaggctaaagcagcagctaaacgcgaggatcagaaatacgccctgagtgtgatgatgaagatcgaggaagaggaacgcaagaagatcgaggacatgaaagaaaatgaacgcataaaagctaccaaggcccttgaggcgtggaaggagtaccagagaaaggctgaggagcagaagaaaatccagcgtgaggagaaactctgtcagaaggaaaaacagatcaaagaggaacgtaaaaagattaagtataaaagtttgaccagaaatcttgcttcccgcaatctcgcccccaagggccggaactctgaaaacatttttacggagaagctgaaagaggattccataccagctccacgttctgtcggctctataaaaatcaacttcaccccacgcgtgtttccaactgcgcttagagaatcacaggtggctgaggaagaagaatggttgcacaaacaggccgaagctaggcgagccatgaatacagatattgcagaactttgtgacctgaaggaagaggaaaaaaacccagaatggttgaaggataaaggcaataagctttttgccaccgagaattatttggcagccattaacgcctacaatctggccattcgcttaaacaataagatgccccttctgtacttgaatcgtgcagcgtgtcatttgaaactgaagaacctgcacaaggcaattgaagactcatctaaagaattttgctccctggaagggattgaatgccaggcttcggagccgaaactctcccaccacatacccagcgacctgcacgtgtacattcagatggcctag

SEQ ID NO: 30575 - DNA, 1146 bp, Artificial Sequence
  derived and/or modified sequence
atgcccctgcaggtgtctgactacagctggcagcagaccaagacagctgtgttcctgagcctgcccctgaagggcgtgtgtgtgcgggacacagatgtgttctgcacagagaactacctgaaggtgaacttcccccccttcctgtttgaggccttcctgtatgcccccattgatgatgagagcagcaaggccaagattggaaatgacaccatcgtgttcaccctgtacaagaaggaggccgccatgtgggagaccctgtctgtgactggagtggacaaggagatgatgcagaggatccgggagaagagcatcctgcaggcccaggagcgggccaaggaggccacagaggccaaggccgccgccaagcgggaggaccagaagtatgccctgtctgtgatgatgaagattgaggaggaggagaggaagaagattgaggacatgaaggaaaatgaaagaatcaaggccaccaaggccctggaggcctggaaggagtaccagaggaaggccgaggagcagaagaagatccagcgggaggagaagctgtgccagaaggagaagcagatcaaggaggagaggaagaagatcaagtacaagagcctgaccaggaacctggccagcaggaacctggcccccaagggcaggaacagcgagaacatcttcacagagaagctgaaggaggacagcatcccagcccccaggtctgtgggcagcatcaagatcaacttcacccccagggtcttccccacagccctgcgggagagccaggtggccgaggaggaggagtggctgcacaagcaggccgaggcccggcgggccatgaacacagacattgctgagctgtgtgacctgaaggaggaggagaagaaccctgagtggctgaaggacaagggcaacaagctgtttgccacagagaactacctggccgccatcaatgcctacaacctggccatccggctgaacaacaagatgcccctgctgtacctgaacagagctgcctgccacctgaagctgaagaacctgcacaaggccatcgaggacagcagcaaggagttctgcagcctggagggcatcgagtgccaggccagcgagcccaagctgagccaccacatccccagcgacctgcacgtgtacatccagatggcctag

SEQ ID NO: 30576 - DNA, 1789 bp, Artificial Sequence
  derived and/or modified sequence
tcctctcctattatgcaaacccacaccatggatccagcagactactctggccccagcatgctgctccttgggatgatgggagaagggggaaacctgtgttttctcttggttttagggtatgggtctacttctttgaacattcgctcagatcgtaaggtaaccccaagaatcggcatcactctctggtctgggcgcctggatagtcacgcatggagtccgcgaggtgctggcgccggagcacgctgggaacgccgggctcccggccggcctgacccggaagggctggcgcatggtaaccccagcttccctagcaaccaagcaggcgcaagaagcaaccagccgcgctatccgctcccgttgctaccggaatgcctcttcaggttagcgattacagctggcagcagacgaagactgcggtctttctgtctctgcccctcaaaggcgtgtgcgtcagagacacggacgtgttctgcacggaaaactatctgaaggtcaactttcctccatttttatttgaggcatttctttatgctcccatagacgatgagagcagcaaagcaaagattgggaatgacaccattgtcttcaccttgtataaaaaagaagcggccatgtgggagaccctttctgtgacgggtgttgacaaagagatgatgcaaagaattagagaaaaatctattttacaagcacaagagagagcaaaagaagctacagaagcaaaagctgcagcaaagcgggaagatcaaaaatacgcactaagtgtcatgatgaagattgaagaagaagagaggaaaaaaatagaagatatgaaagaaaatgaacggataaaagccactaaagcattggaagcctggaaagaatatcaaagaaaagctgaggagcaaaaaaaaattcagagagaagagaaattatgtcaaaaagaaaagcaaattaaagaagaaagaaaaaaaataaaatataagagtcttactagaaatttggcatctagaaatcttgctccaaaagggagaaattcagaaaatatatttactgagaagttaaaggaagacagtattcctgctcctcgctctgttggcagtattaaaatcaactttacccctcgagtattcccaacagctcttcgtgaatcacaagtagcagaagaggaggagtggctacacaaacaagctgaggcacgaagagcaatgaatactgacatagctgaactttgcgatttaaaagaagaagaaaagaacccagaatggttgaaggataaaggaaacaaattgtttgcaacggaaaactatttggcagctatcaatgcatataatttagccataagactaaataataagatgccactattgtatttgaaccgggctgcttgccacctaaaactaaaaaacttacacaaggctattgaagattcttctaaggaattctgttctcttgagggcattgaatgtcaggcctctgagcccaagctaagccatcatatccctagtgacctgcacgtatacatccagatggcctgaagcaagtgaagaatcacaaaagaagtgaaaatggccggttcctgccttaactgatgacattaccttgtgaaattccttctcctggctcagaacctcccccactgagcaccttgtgacccctgcccctgcccgccacagaataaccccctttgactgtaattttccattacctacccaaatcctataaaacggccccacccctatctcccttcgctgactgtcttttcggactcagcccgcctccacccaggtgattaaaaagctttattgctcac

SEQ ID NO: 30577 - DNA, 1146 bp, Artificial Sequence
  derived and/or modified sequence
atgcccctgcaggtgagcgactacagctggcagcagaccaagaccgcggttttcctatccctgccactcaagggggtttgcgtcagggacaccgatgtgttctgcaccgagaattacttgaaagtgaacttcccccctttcttgttcgaagctttcctgtacgcgcctatcgatgatgagagcagtaaggccaagatcggaaatgataccattgtttttacactttataaaaaggaggctgcgatgtgggagacactctctgtgactggagttgataaggagatgatgcagcgcatccgggagaaaagcattctgcaggcacaagaacgtgcaaaagaggcaaccgaggcaaaagctgcagctaagcgtgaagaccagaagtatgctttgagcgtgatgatgaagatcgaggaggaggagcgtaagaagattgaggacatgaaggaaaatgagaggatcaaggccaccaaggcgttagaggcctggaaggaatatcagcgcaaagcggaagagcagaaaaaaatccaacgtgaggaaaagctgtgtcagaaagagaaacagattaaagaagaacgtaagaagattaagtacaaatcacttacgcgcaacctcgcaagtagaaacctcgccccaaagggacgcaacagtgaaaacattttcactgagaagctgaaagaagattcgatcccagccccaagatcagttggctccatcaaaatcaactttacgccccgtgtattccccactgcacttagagaatcccaggtcgccgaggaggaggaatggctgcacaagcaggctgaggctcgcagggcgatgaacaccgacatcgcggagctgtgtgaccttaaagaagaggagaagaatcctgaatggttgaaggataagggcaataaactgttcgccacagagaattacttggccgccataaacgcctacaacttggccattcgtttgaacaacaaaatgcccttgttgtacctgaaccgagctgcctgccacctgaaacttaagaatctccataaggccattgaggatagcagcaaggaattctgttccctagagggaatagagtgccaggcctctgaacccaagctcagccaccacataccttctgatctgcacgtgtacattcaaatggcgtag

SEQ ID NO: 30578 - DNA, 1146 bp, Artificial Sequence
  derived and/or modified sequence
atgcccctgcaggtgagcgactacagctggcagcagaccaagaccgcggtgtttctgtcactgcccctcaaaggcgtctgcgtacgtgataccgacgtattctgtacagagaattacctgaaggtgaacttcccccccttcctatttgaagcctttttgtacgccccaatagacgatgagtccagcaaagctaaaatcggcaacgacactatcgtgttcactctgtataagaaagaggctgccatgtgggaaacactatctgtaacaggtgtggacaaggagatgatgcagaggattagagaaaaatctatcctgcaggcgcaggagcgcgctaaggaggcaaccgaagctaaagccgccgccaagcgagaggatcagaaatacgcactaagcgtgatgatgaaaatcgaagaggaagagcgcaaaaagattgaggacatgaaggagaacgagcgaattaaagccacgaaggccctggaggcttggaaggagtaccagcggaaggccgaagagcagaagaaaatccagagggaagagaaattgtgtcagaaggaaaagcaaattaaggaagaacgtaaaaagatcaagtacaagagcctgacgagaaacttggcgtcgcggaaccttgcccccaagggtcgcaattctgagaatatttttacagaaaagttaaaggaggactccattccggctcctaggtcagtgggctccataaaaatcaattttactcccagagtgttcccaacagcgctacgggagagccaggtcgctgaggaagaggaatggttgcataaacaggccgaagcccgtcgggctatgaacactgacattgccgagttgtgtgatctgaaggaagaggaaaaaaatccagagtggctgaaagacaagggaaacaaattgtttgctaccgagaactacctggccgcaatcaatgcatacaacctagctattcgcctcaacaacaaaatgcccctgctttacctgaatcgggccgcatgtcatctgaagctgaagaacctgcacaaggctatcgaagacagcagcaaggaattttgttcactggagggcatcgaatgccaggcttctgaacccaaactttcccaccatatccctagtgatcttcacgtttacatccagatggcctag

SEQ ID NO: 30579 - DNA, 1146 bp, Artificial Sequence
  derived and/or modified sequence
atgcccttgcaggtctctgattacagttggcagcagacaaagacagccgtatttctctcattgcctcttaagggagtttgtgtccgcgacaccgacgtgttctgcacggagaattatctgaaggtcaacttccctccttttcttttcgaagcatttctttatgctcccatcgacgatgagtcctcaaaggctaaaatagggaacgatactatagtgtttaccttatacaagaaggaagctgctatgtgggaaacactgtcagtgaccggcgtggataaagagatgatgcagaggatccgggagaagtctatcctccaggcacaggagagggccaaggaagccaccgaggccaaagcggctgctaagagagaagatcaaaagtacgcccttagcgtgatgatgaagatcgaagaagaagagaggaaaaaaattgaggatatgaaagaaaatgagaggatcaaggccactaaagctctggaagcatggaaggagtatcagcggaaggctgaagaacagaagaagattcagcgggaggagaagctgtgccaaaaggaaaaacaaatcaaggaagagcgtaagaaaataaaatacaagagcctaacacggaatctggccagcagaaacctggcaccaaagggtagaaactcagagaatatttttacagagaagctgaaagaggattcgatcccggctcccagaagtgtgggttcaataaaaattaatttcacccccagggtctttcccaccgctctgcgggagtcccaggtggcagaagaagaggagtggctgcataagcaggctgaagcgaggcgtgctatgaacaccgatatcgccgaattatgcgatctcaaagaggaggagaagaaccccgagtggttaaaagacaaaggcaacaagctgtttgctacggaaaattacctggcggctattaatgcctacaaccttgcaattagactcaacaacaaaatgcctctcctctacctcaatagagctgcctgccaccttaagctcaaaaatctgcataaggctatcgaggactctagtaaagaattttgctcgcttgaaggcatagaatgtcaggctagcgagccgaaactcagccaccacatcccttctgatttgcatgtatacattcagatggcctag

SEQ ID NO: 30580 - DNA, 1146 bp, Artificial Sequence
  derived and/or modified sequence
atgcccctccaggtttctgattatagttggcagcaaaccaagacagctgtgtttctgtctctgcccctgaagggcgtttgcgttagggacacagatgtcttttgtaccgaaaactacctgaaagtcaacttcccgccattcctgttcgaggcctttctgtatgcacctatcgatgacgagagttctaaagcaaagatcggtaatgatacgattgtctttacgttgtacaaaaaagaagccgcaatgtgggaaactctttctgtgacaggggtggacaaggagatgatgcagaggattcgcgagaagtctatcttgcaggcccaggagcgggctaaggaagctactgaagccaaggctgctgccaagcgggaggaccaaaagtacgcactgtctgtaatgatgaagatcgaagaagaggagagaaaaaagattgaagacatgaaggaaaatgagaggattaaggccactaaggctttagaggcgtggaaggagtaccaacgaaaggctgaggagcagaagaagatccaacgcgaggagaagctatgccaaaaagagaagcagataaaggaagagaggaagaaaatcaagtacaagtctctcaccagaaatctcgcctcgcgcaatctggcacccaaaggcaggaactccgaaaatatctttactgagaaattaaaggaagactccatacccgcacctaggtccgttgggagcattaaaatcaatttcacccccagagtgttccctactgctttgcgggagagccaggtggcggaggaagaagagtggctacacaagcaggctgaagcaagacgggcaatgaatacggatattgcagagctgtgtgacctaaaggaggaggagaagaatcccgaatggctgaaagacaaggggaacaaactgtttgctacagaaaactatcttgctgcaattaatgcttataacttagcgatcaggcttaacaataaaatgcctttgctttatcttaatcgggctgcatgtcacttgaaactgaagaacttacataaagcaattgaggatagttccaaagagttctgcagccttgaggggattgagtgtcaggcctccgaaccaaaattgtctcaccacatcccatccgatttacatgtgtatatccaaatggcctag

SEQ ID NO: 30581 - DNA, 1445 bp, Artificial Sequence
  derived and/or modified sequence
cgctcccgttgctaccggaatgcctcttcaggttagcgattacagctggcagcagacgaagactgcggtctttctgtctctgcccctcaaaggcgtgtgcgtcagagacacggacgtgttctgcacggaaaactatctgaaggtcaactttcctccatttttatttgaggcatttctttatgctcccatagacgatgagagcagcaaagcaaagattgggaatgacaccattgtcttcaccttgtataaaaaagaagcggccatgtgggagaccctttctgtgacgggtgttgacaaagagatgatgcaaagaattagagaaaaatctattttacaagcacaagagagagcaaaagaagctacagaagcaaaagctgcagcaaagcgggaagatcaaaaatacgcactaagtgtcatgatgaagattgaagaagaagagaggaaaaaaatagaagatatgaaagaaaatgaacggataaaagccactaaagcattggaagcctggaaagaatatcaaagaaaagctgaggagcaaaaaaaaattcagagagaagagaaattatgtcaaaaagaaaagcaaattaaagaagaaagaaaaaaaataaaatataagagtcttactagaaatttggcatctagaaatcttgctccaaaagggagaaattcagaaaatatatttactgagaagttaaaggaagacagtattcctgctcctcgctctgttggcagtattaaaatcaactttacccctcgagtattcccaacagctcttcgtgaatcacaagtagcagaagaggaggagtggctacacaaacaagctgaggcacgaagagcaatgaatactgacatagctgaactttgcgatttaaaagaagaagaaaagaacccagaatggttgaaggataaaggaaacaaattgtttgcaacggaaaactatttggcagctatcaatgcatataatttagccataagactaaataataagatgccactattgtatttgaaccgggctgcttgccacctaaaactaaaaaacttacacaaggctattgaagattcttctaaggaattctgttctcttgagggcattgaatgtcaggcctctgagcccaagctaagccatcatatccctagtgacctgcacgtatacatccagatggcctgaagcaagtgaagaatcacaaaagaagtgaaaatggccggttcctgccttaactgatgacattaccttgtgaaattccttctcctggctcagaacctcccccactgagcaccttgtgacccctgcccctgcccgccacagaataaccccctttgactgtaattttccattacctacccaaatcctataaaacggccccacccctatctcccttcgctgactgtcttttcggactcagcccgcctccacccaggtgattaaaaagctttattgctcacacaaa

SEQ ID NO: 30582 - protein, 1004 aa, Artificial Sequence
  derived and/or modified sequence
MWEKMETKTIVYDLDTSGGLMEQIQALLAPPKTDEAEKRSRKPEKEPRRSGRATNHDSCDSCKEGGDLLCCDHCPAAFHLQCCNPPLSEEMLPPGEWMCHRCTVRRKKREQKKELGHVNGLVDKSGKRTTSPSSDTDLLDRSASKTELKAIAHARILERRASRPGTPTSSASTETPTSEQNDVDEDIIDVDEEPVAAEPDYVQPQLRRPFELLIAAAMERNPTQFQLPNELTCTTALPGSSKRRRKEETTGKNVKKTQHELDHNGLVPLPVKVCFTCNRSCRVAPLIQCDYCPLLFHMDCLEPPLTAMPLGRWMCPNHIEHVVLNQKNMTLSNRCQVFDRFQDTVSQHVVKVDFLNRIHKKHPPNRRVLQSVKRRSLKVPDAIKSQYQFPPPLIAPAAIRDGELICNGIPEESQMHLLNSEHLATQAEQQEWLCSVVALQCSILKHLSAKQMPSHWDSEQTEKADIKPVIVTDSSVTTSLQTADKTPTPSHYPLSCPSGISTQNSLSCSPPHQSPALEDIGCSSCAEKSKKTPCGTANGPVNTEVKANGPHLYSSPTDSTDPRRLPGANTPLPGLSHRQGWPRPLTPPAAGGLQNHTVGIIVKTENATGPSSCPQRSLVPVPSLPPSIPSSCASIENTSTLQRKTVQSQIGPPLTDSRPLGSPPNATRVLTPPQAAGDGILATTANQRFSSPAPSSDGKVSPGTLSIGSALTVPSFPANSTAMVDLTNSLRAFMDVNGEIEINMLDEKLIKFLALQRIHQLFPSRVQPSPGSVGTHQLASGGHHIEVQRKEVQARAVFYPLLGLGGAVNMCYRTLYIGTGADMDVCLTNYGHCNYVSGKHACIFYDENTKHYELLNYSEHGTTVDNVLYSCDFSEKTPPTPPSSIVAKVQSVIRRRRHQKQDEEPSEEAAMMSSQAQGPQRRPCNCKASSSSLIGGSGAGWEGTALLHHGSYIKLGCLQFVFSITEFATKQPKGDASLLQDGVLAEKLSLKPHQGPVLRSNSVP

SEQ ID NO: 30583 - DNA, 3015 bp, Artificial Sequence
  derived and/or modified sequence
atgtgggaaaaaatggagacaaagacaatcgtgtacgacctggatacaagtggggggctgatggagcagatccaggccctgctcgctccgccgaagacagatgaagccgaaaagcgaagccggaagccagaaaaagaacctaggagatctggccgagccacaaatcacgactcttgcgactcttgtaaagagggtggagatctactgtgttgtgatcattgtcctgcggcttttcaccttcagtgttgtaatccacctctttccgaagagatgcttcccccgggggaatggatgtgccaccgatgtactgttaggcgtaaaaagcgcgaacagaaaaaagagctgggccacgtgaacggcctcgtcgataagagtggcaagcgcacaacctccccaagtagcgacacagacctcctggatagatccgcttccaaaaccgagctgaaagctatcgcccacgcccggattttagaaaggagggcgtcccgtcctggcactccgaccagctcagcttccacagagaccccgacctctgaacagaatgatgtggatgaggatatcattgatgtcgacgaggaaccagttgcggctgagcctgactacgtgcagccgcagctgcgcagaccgttcgaactgctcatagccgccgccatggagcgtaaccctactcagtttcagctgccaaacgaacttacatgtaccaccgcacttccaggctccagcaagaggcgaagaaaagaggaaaccactgggaagaatgtcaaaaaaacccagcacgagctggaccacaacggcctcgtgccattgccagtgaaagtttgtttcacttgtaacagatcctgtagagtcgcgcccttaatccagtgtgattattgcccactactattccacatggattgtctggagccacccctcactgctatgccattgggtcggtggatgtgcccgaatcacatagaacacgtggtgctgaaccagaaaaacatgactttatcgaatcgttgccaggtgttcgaccggttccaggacacagtgtctcagcacgtggttaaggtggattttttgaacagaatccataaaaaacatccccccaaccgccgggtgctgcagtccgtgaagcgcaggtcactgaaggtgcctgatgctataaagagtcagtaccagttcccccccccacttattgctccagcggccattagggatggcgaattgatttgcaacggcatcccggaggagagtcagatgcatttgctcaattccgaacaccttgcaacccaagccgagcagcaggagtggctgtgcagtgttgttgctctgcagtgcagtatattgaagcatctgagtgcgaagcaaatgcccagccattgggactcagaacagaccgaaaaggccgatatcaagcctgtgattgtgaccgatagcagtgtgacaacttcgctacagacagccgataaaacccccactccctctcactatcctcttagctgcccttccgggattagcactcagaactccctgtcttgctctcctccccatcagagtccagccctggaggacattggctgcagctcatgcgctgaaaagagcaagaagacaccttgtggaacagctaacggtcctgtgaatacggaagtcaaggctaatggcccgcacctctactcttctcctaccgattccaccgatcctcgtagactacctggagctaacacccccctaccaggcctgagtcaccgtcaggggtggccgcgccctctcaccccacccgctgcaggtgggctgcaaaaccacacagtcggcattattgtgaaaaccgagaatgccacaggcccatcctcttgtccgcagagatctctcgtgcccgttccatcactgccacctagcataccttcaagctgtgcctcaattgaaaatacgtccaccctgcagcgcaagacagtgcagagccagattggaccgcccttgacagattccagacccttaggcagcccacccaacgccacacgcgtgctcacccccccccaggccgccggcgatgggatcctcgccacaactgctaaccagcggttctcctctcctgcaccgtcaagtgatggtaaggtgtccccaggtaccctgtctattggcagcgctttaactgtgccctcttttccagcaaacagtacagccatggtggacttgacaaacagcctccgggcatttatggacgtgaacggtgagattgagatcaatatgttggatgagaaacttataaagtttttggccctccaacgaatccaccagctctttccctccagagtacagcccagtccaggctcagtgggaacgcatcagctcgcttccggtggccaccatatcgaggtccagagaaaagaagtgcaggctcgagctgtcttttacccactgctgggtttagggggggcggtgaatatgtgttaccgcactttgtatattggaactggggctgatatggacgtctgccttactaattacggccattgcaattatgtgtccggaaaacatgcatgcattttttacgatgagaataccaagcattatgagctgctgaattatagcgagcatggaacaacggttgataacgtgctctatagctgtgattttagcgagaagaccccacctactccaccttcctcaattgtagctaaggtacagtccgttatcaggaggagaaggcaccagaagcaggatgaggagccaagtgaggaggcggccatgatgtcctcccaggcccaagggccacagagacgtccctgtaactgtaaggccagctcttcaagcctgattggcggatcgggcgctggctgggaaggaaccgctttattgcatcacggttcatatatcaagctcggttgtctacagttcgtattcagtattaccgaattcgctactaagcagcctaaaggggacgcaagcttgttgcaagatggcgttctggccgagaagttgagcctcaaacctcatcaaggacccgtcctgagaagtaactctgtaccttag

SEQ ID NO: 30584 - DNA, 4759 bp, Artificial Sequence
  derived and/or modified sequence
cttagtttgcacacaaacaccaatggatgaacagtccctagcttcctgcggctgcgccttgacccctacaagctttctcaagcgcctgcgcgagacctcaggtcccgcccttttgtctcagtgcgctggcgcagggcagaaaggtggggcttcggtcctccagacgaatgccagcgcggctgcgcgctggggggtactccctcaccgcggctgcgcgggagccaggccgccggctgtcactgcggttgcgcgcggcgagcgccgatcccggggcgcctgcgcgggtggctttgcgggcgctcgcggtaagtttgcgccaagtgcgcggcagccgggacgcagacggcggcggcggcgagaggcggagcccggggaccaccccccatcaccctccccccagtcacctcacgtaccacaacctcacgtaacctctcaccccccctccgatacccccagccccgggatggcagcgcccgccagccttcccggccggaccggctgtcgccagtgccggctttagcctgtgggactaggccccgccgaggcctgacccccggagccgggacccactgtgcagccagcagccgggccgggactgaggggccgctcccccctcgcggcccgtcgggaggacgctgtcgtcccggggactgggggccggggggtgggggggagccagggcgaggaagtcgggacccgtattgggaaaaaagcggggccggggtcaggagcgccccctcccctcacctcccccctccccccggggttgggggggccggagcagagagcacccagcccgggaggtggatgaatgtgggagaaaatggagaccaagacgatcgtgtacgacttggacacatcaggggggctgatggagcaaatccaagctctgctggctccccccaagacggacgaggcagaaaagcgcagtcggaagcctgagaaggagccccggagaagcggcagggccaccaaccacgacagctgcgatagctgcaaggaaggtggagatctcctgtgctgcgaccactgcccggctgccttccacctccagtgctgtaaccctccactgagtgaagaaatgttgcctcctggagagtggatgtgtcaccggtgcactgttcgccgaaagaaacgagagcagaaaaaggagctgggtcatgtcaatggactggtggacaaatctggcaaacggactacatcccccagcagtgacactgacttgttggacagatcggccagcaaaactgaactaaaggccattgcccatgcccggatcctggaaaggagagccagcaggcctggcacacccacatccagcgccagcacagagactcccacctctgagcagaatgatgtcgacgaagacatcattgacgtggatgaggaaccagtagcagcggagccagactatgtgcagccccagctgaggcggccctttgagctgctgattgctgccgccatggagcggaaccccacccaatttcagttgcccaatgaactgacttgtaccactgcactaccaggttctagcaagaggagaagaaaggaggaaaccacagggaaaaatgttaagaagacacagcatgaattagatcacaatggtctcgttcccttacccgtcaaagtctgcttcacgtgtaacaggagttgccgtgtggctcctctcatccagtgtgactattgccctctcctgtttcacatggattgcctcgagccgccgctcactgccatgcccctgggcagatggatgtgtccgaatcacatcgaacatgtggtgctgaaccagaagaatatgacactgagcaatcggtgccaggtgtttgatcgtttccaggacaccgtttcgcagcatgtcgtcaaagtggacttcctgaaccgaatccacaagaagcacccccctaaccggcgtgtgctccagtcggtcaaaagaagaagcttgaaggttcctgatgctataaaatctcagtaccagtttccaccccctctcattgcacccgcggccattcgggacggggagctgatctgcaatgggatccctgaggaatcacagatgcaccttttgaactctgagcacttagccacccaagcagagcagcaagagtggctctgtagtgttgttgcgctccagtgcagcatattgaaacatttatctgctaagcagatgccttcgcattgggactctgaacagacagagaaggctgatattaagcctgttattgtgactgacagctcagtcaccacctccctgcaaacagctgacaagacacctacaccttcccactaccccttgtcctgcccctcagggattagcacccagaattccctgagctgctctccaccccaccagtccccagccctagaggacatcggctgcagttcttgtgcggaaaaatccaagaaaaccccttgtgggactgccaatgggccagtgaacacagaggtgaaagctaatggcccacacctctacagcagccctactgattccacggacccccggcgacttccaggcgctaacaccccactaccaggcctctcacaccggcaaggctggccccggcccctcacgccaccagcggctgggggccttcagaaccacaccgtcggcatcattgtgaagacagagaatgccactggccccagctcttgcccccagaggagtttggttcctgtcccaagcctgcccccttccattcccagctcttgtgccagcatcgagaacaccagcactttgcaaagaaagactgtccaatcacagataggacctccgttgacagattcaaggccactgggctcacccccaaacgccacccgggtgctcactcccccgcaagcagcaggagatggtatcttggccacaacagccaaccaacgattcagctcaccagcgccatcgtcagatggcaaggtcagccccggcacgttatccataggaagcgctttaaccgtaccctctttcccagccaactctactgccatggtggacctcaccaactcacttcgagcatttatggatgtcaatggagaaatcgagataaatatgctggacgagaagctgatcaagtttctggccttgcagagaatacatcagcttttcccctcccgggtccaaccttcaccgggcagtgtcgggacacatcagctggcttctggagggcaccacatagaagtgcaaagaaaggaggtacaggcccgagctgtgttctaccccctcttagggttgggaggagctgtgaacatgtgctatcgaaccctctacatcgggacaggagctgacatggatgtgtgccttacaaactatggtcactgtaactacgtgtccgggaaacatgcctgcatattctacgatgagaataccaaacattatgagctgttaaactacagtgagcatgggacaacggtggacaatgtgctgtattcatgtgacttctcggagaagaccccgccaacccccccaagcagtattgttgccaaagtgcagagtgtcatcaggcgccgccggcaccagaaacaggacgaagagccaagtgaggaggcagccatgatgagttcccaggcccaggggccgcagcggagaccctgcaattgcaaagccagcagctcgagcttgattgggggcagtggggccggctgggagggcacagccttactgcaccatggcagctacatcaagctgggctgcctgcagtttgtcttcagcatcactgagtttgcgaccaaacagcccaaaggcgatgccagcctgctgcaggatggggtcttggccgagaagctctctctcaagccccaccagggccctgtgctgcgctccaactctgttccttaggactggcggctaccccgccactggcctgtacacccacccaagactcctgcaatgcaaaaatgtacacaaaccaagcccgggtgttttctatactctaccagaaacccttcaactacaatctttgcatgaaatgaagaaaaccttttgactgttttttaaaaatcctttttcttttctcaagttctagggggcatttgcacatatatttgtactcaacatttcatgggaaagcggcagacctgagctgaggaacagcgtgggcagggagggaaagacccagggtctggacacttcctccaacacaaaacccttccccacccacctcctgctccctccccctcgcccaccattgtaaaataatcagaaacttgttctattttgtggcagtgacaatagttttatattaaaagaaaaaatacagttttcatacagcaaaatctatacaatatcattgttttatttaatataaagatcgctacccaccttccttccatggttcccaccctccacgttattttccctttctgcagcggttgcactacaggtagctactgtgtattatggacaaatgagaaatgaattctttttctggctgtccatctattttatttcaaataaggaaaagtgtatttggattttgtgtaaatacatctagtgatgacattttttcaatgtttttaaaaaccgtgtacagtactacatgtggtagagcgttttctcaaattgtctattgtagcaaaaatgtttttgtcgtaaacctgttttgtctcctttttttgttctcttgccacttctctcctcttcctcctgcccctggttccctcctctcctcccacccccacaaccagtaccaatgtacatagtaattgtaatgttttagactttacagaaactttcctgtattctgtatataaaaaacaaaaatacttcaaa

SEQ ID NO: 30585 - DNA, 3015 bp, Artificial Sequence
  derived and/or modified sequence
atgtgggagaagatggagaccaagaccatcgtgtatgacctggacaccagcggcggcctgatggagcagatccaggccctgctggccccacccaagacagatgaggccgagaagaggagcaggaagccagagaaggagccccggcgcagcggccgggccaccaaccacgacagctgtgacagctgcaaggagggcggggacctgctgtgctgtgaccactgcccagctgccttccacctgcagtgctgcaacccccccctgtctgaggagatgctgcccccaggagagtggatgtgccaccgctgcaccgtgcggaggaagaagcgggagcagaagaaggagctgggccacgtgaatggcctggtggacaagagcggcaagaggaccaccagccccagcagtgacacagacctgctggacagaagtgccagcaagacagagctgaaggccatcgcccacgcccgcatcctggagcggcgggccagccggcccggcacccccaccagcagcgccagcacagagacccccaccagcgagcagaatgatgtggatgaggacatcattgatgtggatgaggagcctgtggccgctgagccagactatgtgcagccccagctgcggcggccctttgagctgctgattgctgctgccatggagaggaaccccacccagttccagctgcccaatgagctgacctgcaccacagccctgcccggcagcagcaagagaagaaggaaggaggagaccaccgggaagaatgtgaagaagacccagcacgagctggaccacaacggcctggtgcccctgcctgtgaaggtgtgcttcacctgcaacagaagctgccgggtggcccccctcatccagtgtgactactgccccctgctcttccacatggactgcctggagccccccctgacagccatgcccctgggccgctggatgtgccccaaccacattgaacatgtggtgctgaaccagaagaacatgaccctgagcaaccgctgccaggtgtttgaccgcttccaggacacagtgtcccagcacgtggtgaaggtggacttcctgaaccgcatccacaagaagcacccccccaacagaagagtgctgcagagcgtgaagaggaggagcctgaaggtgcctgatgccatcaagagccagtaccagttccccccacccctcatcgccccagctgccatcagagatggagagctgatctgcaatggcatccctgaggagagccagatgcacctgctgaacagcgagcacctggccacccaggccgagcagcaggagtggctgtgcagcgtggtggccctgcagtgcagcatcctgaagcacctgagcgccaagcagatgcccagccactgggacagcgagcagacagagaaggctgacatcaagcctgtgattgtgacagacagctctgtgaccaccagcctgcagacagctgacaagacccccacccccagccactaccccctgagctgccccagcggcatcagcacccagaacagcctgagctgcagccccccccaccagagccctgccctggaggacatcggctgcagcagctgtgccgagaagagcaagaagaccccctgtggcacagccaacggccctgtgaacacagaggtgaaggccaacggcccccacctgtacagcagccccacagacagcacagacccccggcggctgcccggggccaacacccccctgcccggcctgagccaccggcagggctggccccggcccctgaccccacctgctgctgggggcctgcagaaccacacagtgggcatcatcgtgaagacagaaaatgccaccggccccagcagctgcccccagaggagcctggtgcctgtgcccagcctgcccccatccatccccagcagctgtgccagcattgagaacaccagcaccctgcagaggaagacagtgcagagccagatcggcccccccctgacagacagccggcccctgggcagccccccaaatgccaccagggtgctgaccccaccccaggccgctggagatggcatcctggccaccacagccaaccagcgcttcagcagccctgcccccagcagtgatggcaaggtgtccccaggcaccctgagcatcggcagcgccctgactgtgcccagcttccctgccaacagcacagccatggtggacctgaccaacagcctgcgggccttcatggatgtgaatggagaaattgagatcaacatgctggatgagaagctgatcaagttcctggccctgcagaggatccaccagctgttccccagccgggtgcagcccagccctggctctgtgggcacccaccagctggccagcggcggccaccacatcgaggtgcagaggaaggaggtgcaggcccgggctgtgttctaccccctgctgggcctgggcggcgctgtgaacatgtgctaccgcaccctgtacatcggcactggagctgacatggatgtgtgcctgaccaactacggccactgcaactacgtgtctgggaagcacgcctgcatcttctatgatgagaacaccaagcactatgagctgctgaactacagcgagcacggcaccaccgtggacaacgtgctgtacagctgtgacttcagcgagaagaccccacccaccccacccagcagcatcgtggccaaggtgcagagcgtcatcagaagaagaagacaccagaagcaggatgaggagcccagcgaggaggccgccatgatgagcagccaggcccagggcccccagaggcggccctgcaactgcaaggccagcagcagcagcctcatcggcggcagcggggccggctgggagggcacagccctgctgcaccacggcagctacatcaagctgggctgcctgcagtttgtgttcagcatcacagaatttgccaccaagcagcccaagggagatgccagcctgctgcaggatggagtgctggccgagaagctgagcctgaagccccaccagggccctgtgctgcggagcaacagcgtgccctag

SEQ ID NO: 30586 - DNA, 3015 bp, Artificial Sequence
  derived and/or modified sequence
atgtgggagaagatggagaccaagaccatcgtgtacgacctggacacatccgggggcctgatggagcagatccaagctctgctagcaccccctaaaacagatgaggccgaaaagcgctcccggaaacctgaaaaggagcccaggcggagtggtagagccactaatcatgactcctgcgacagctgcaaggagggtggggacttgttgtgctgcgatcattgtccagctgccttccaccttcagtgttgcaacccaccactatctgaggaaatgctcccaccaggcgaatggatgtgtcatcgttgtactgtgcggaggaagaaaagggaacagaagaaggagctcgggcatgttaacgggttagttgataagagcggtaaaagaactacttctcccagttcggatacggacttgctggaccggtccgcatccaagactgagttaaaggctattgcccacgcaaggatcctggagcgaagagcaagtcgacccggcacgcctacttcctctgccagcacagagacaccgacgagcgaacagaatgacgtcgatgaggatatcattgatgtggatgaagaacctgtggccgcagagcctgattatgttcaaccccaactacggcgaccctttgagttgctcattgccgctgcaatggaacgaaacccaactcaatttcagctacccaacgagctgacgtgtaccacagcgttgcccggaagttcgaaacgtaggcgtaaagaggagaccaccggtaagaacgtgaagaaaactcaacacgagcttgaccataatggtttggtgcccctgccagttaaagtgtgcttcacctgtaatcgatcttgtcgggtggcccccttaatccagtgcgactattgccctttgctgttccatatggactgcttggagccacctttaaccgccatgccgctaggaaggtggatgtgcccaaaccatattgagcatgtcgtactaaaccaaaagaacatgacattgagcaatagatgtcaggtattcgataggttccaggatacagttagccagcacgtggtgaaagtggacttccttaaccggattcacaagaagcatccacctaataggagagttctgcagagtgtcaaacgcagatctcttaaggttccggatgcgattaaatcacagtatcagttcccacctcctcttattgctccagcagctattcgggatggtgaactcatctgtaatggcatccctgaagaatcccagatgcatctattaaattctgagcacttggctactcaggccgagcagcaggaatggttgtgctccgtcgtggccttgcagtgtagcatccttaaacacttgagcgccaaacaaatgccgtctcactgggactctgaacagacggaaaaagctgatattaagccggttattgtgaccgattcatccgtaactaccagtcttcagaccgctgacaagactcccacaccgtctcactaccccctgtcctgtccctctgggatcagcactcagaattctctgtcctgttcccccccacatcagtcaccagccttggaggatattggttgctcctcatgcgccgagaagtcgaaaaagacgccctgtgggaccgccaacggacctgtcaacacagaggttaaagctaatgggccacatctttacagttccccgacggattcaacagaccctcgccggctccccggggccaacactccactccctgggctatcacaccggcagggctggccccgtcccctcacaccacccgccgccggcggcctgcaaaaccacaccgtgggcatcatcgttaaaaccgagaacgccaccggccccagctcctgcccccagcgcagcttagtgcccgtcccctcactgccgccctctatcccatctagttgtgccagtatagagaatacttcgactttgcagaggaagaccgtacagtctcagattgggcctcctctgacagactctcgtccgctaggctcccctccgaatgcaaccagggtcctgacgccccctcaggcagctggggatggcatactcgctaccactgctaaccaacgcttttcctcaccggcaccctcatctgacggtaaagtctcacccgggactctgtctatcggttctgccctcacggtgcccagcttcccagctaactccaccgctatggtggatctgacaaacagcttacgcgcattcatggatgtgaacggggagatcgagatcaatatgctggatgaaaagctgatcaaatttctcgccctgcagcggatccatcagctgttcccaagtcgggtccaaccttctccgggctccgtgggaacgcaccaactcgcatccggagggcaccatattgaggtccagaggaaagaggtgcaggcccgcgctgtgttctaccccctgttaggtttgggcggggcagtgaacatgtgctaccgtacgttgtatattggtacaggagcagacatggatgtgtgtctcactaactatggccactgcaattacgtgtcaggcaagcatgcgtgcattttttacgacgagaacactaagcactacgagctgctcaactactcagagcacgggaccaccgtagacaacgtgctgtacagctgcgatttttctgagaagacgccccccacccctccctcctcaatagtcgcaaaggtgcagtccgtgattagaaggcggaggcatcagaaacaggacgaagaaccttccgaggaagccgccatgatgtcatcccaggctcaggggccacagaggagaccatgcaactgcaaagcttcgtcaagctctctaatcggggggagtggagccgggtgggagggcacggcattgcttcaccacggctcttatattaagctcgggtgtctccagttcgtgttttctattacagagttcgctactaagcaaccaaagggagacgcgagcctgctacaggatggagtgctcgccgagaagttgtctctcaaaccccatcaaggccccgtgcttagaagtaactctgtgccatag

SEQ ID NO: 30587 - DNA, 3015 bp, Artificial Sequence
  derived and/or modified sequence
atgtgggaaaagatggaaacgaaaacaatcgtttatgacttggacaccagcggcggactgatggagcagatccaggcgttgcttgcacccccaaagacagacgaggctgagaaacggagtaggaagccggagaaggaaccaagaaggagcggcagagctacaaaccacgacagctgtgactcctgtaaagagggtggtgatctactgtgttgcgatcactgccctgctgcattccacctgcaatgttgtaatcctcccctgtccgaggagatgttgcccccaggcgagtggatgtgtcatcggtgcaccgtacggagaaagaaacgggagcagaagaaagaacttggtcatgtgaacgggctcgtcgacaaatccgggaaacgtacaacttcaccgtccagcgataccgacctcctagaccggtcagcctcaaagacagaactgaaggcaattgcccacgctagaatcttggagagaagggctagcagacccggaactcctacctcaagtgcttcaaccgaaacacccacgtccgaacagaatgacgtggacgaggatatcattgacgtggacgaagagcccgtcgccgctgagcccgactacgtgcagccccaacttcgaaggccttttgagctactgattgcagccgctatggagagaaaccctacacaattccagctgcccaacgaactgacctgcacaaccgccttgcccggatcatcaaaaagacgtagaaaggaagagacaacaggtaagaatgttaaaaaaacccaacatgaactggatcacaacggcctcgtgcccctccccgtaaaggtgtgttttacgtgcaaccgaagctgcagagtggctcctctcatccagtgtgactactgcccccttctctttcacatggattgcctcgagccccctcttacggccatgcctctcggcagatggatgtgtcctaatcacatagagcacgtggtcctaaatcagaagaacatgactctcagtaatcgttgccaggtttttgacaggtttcaagataccgtatcacaacatgtcgtgaaggtggacttcctaaaccggatccacaagaagcatcctcccaatagacgggtgcttcagagcgtgaagagaaggagcctgaaagtgccagatgcaataaaatcacagtatcagttccccccacctctgatcgcaccggctgccattcgggacggtgaactgatctgtaacggaatacccgaagagagtcaaatgcaccttcttaactcagagcacctggcaacacaagccgagcagcaggagtggctgtgttcagtggtcgcactgcagtgctctatactgaaacacctgtccgccaaacagatgccctcgcattgggatagcgaacaaaccgagaaggccgatatcaagcctgtcatcgtcaccgacagttctgtgaccacatcacttcagaccgctgataagacacctacgccctcccactaccccttatcatgtccatccggtatctcaacgcagaactctctttcctgttctcctcctcatcagagcccagccctggaggatattggttgtagttcttgcgctgaaaagagcaagaagacgccttgtggcactgctaacgggcctgtaaacactgaggtgaaggctaatggtccccatctttattcatcgccaacagactctactgacccgagacgcctcccgggtgccaacacaccgctgcctggtctgtcccatcgccagggctggcctaggcctctgactccacctgcggctggaggcttacaaaaccacacagttggtatcatcgtaaagacagaaaatgcgactggtccaagtagctgtccccagagaagcctagtccccgtgccgtccctgcctcccagcattccctcttcttgtgcaagtatagagaatacttccaccctacagcggaaaaccgttcagtcgcaaatcggcccacctctgactgattccaggccccttgggtcacccccaaatgcaaccagagtgctgacgcctccccaagccgcaggtgacggtatcctggccaccaccgctaaccagaggttcagcagtcctgcgccatcttcagacggtaaagtctcgcccggaaccctatctattgggagcgccttgaccgtgccgagtttccctgccaatagtaccgcaatggtcgatttaaccaacagtttacgggcattcatggacgtgaacggagaaatcgagataaacatgttagatgaaaagctcattaagttcctcgctttacaaaggattcaccagttgtttccaagcagggtgcagcctagccctgggagcgtgggaacccaccagctagccagcggtggccatcacattgaagtgcaaaggaaggaagtgcaggcccgagcggtgttctacccactcctcggcttggggggtgcagtaaacatgtgctaccgcactctgtacatcggcactggcgctgacatggatgtttgcctgacgaactatggtcactgcaactatgtttcaggtaaacacgcatgcatattctacgacgagaatacaaagcactatgagctcttgaactacagtgaacatggcaccacagtcgataatgtgctatattcctgtgattttagtgagaagacacctcccacacccccttcttccatcgtcgcgaaagttcaaagcgtaatcagaaggaggaggcatcagaagcaggatgaggaaccaagtgaggaagctgcaatgatgtcatcgcaggcacaggggccacagcgcagaccctgtaattgtaaagcctcctcttcttctctgattggcggatctggggctggatgggaggggaccgcactattgcatcatggttcctacattaagctgggttgcctgcaatttgttttctcaatcacggagtttgccacaaaacagccaaaaggggacgcctctctgttacaggacggggtcctggctgagaagctgtccctgaagcctcaccagggccctgttttaagatcaaattctgtcccgtag

SEQ ID NO: 30588 - DNA, 3015 bp, Artificial Sequence
  derived and/or modified sequence
atgtgggagaagatggagaccaagaccatcgtgtacgacctggacaccagcggcggcctgatggagcagatccaggccctgctggccccccccaagaccgacgaggccgagaagagaagcagaaagcccgagaaggagcccagaagaagcggcagagccaccaaccacgacagctgcgacagctgcaaggagggcggcgacctgctgtgctgcgaccactgccccgccgccttccacctgcagtgctgcaacccccccctgagcgaggagatgctgccccccggcgagtggatgtgccacagatgcaccgtgagaagaaagaagagagagcagaagaaggagctgggccacgtgaacggcctggtggacaagagcggcaagagaaccaccagccccagcagcgacaccgacctgctggacagaagcgccagcaagaccgagctgaaggccatcgcccacgccagaatcctggagagaagagccagcagacccggcacccccaccagcagcgccagcaccgagacccccaccagcgagcagaacgacgtggacgaggacatcatcgacgtggacgaggagcccgtggccgccgagcccgactacgtgcagccccagctgagaagacccttcgagctgctgatcgccgccgccatggagagaaaccccacccagttccagctgcccaacgagctgacctgcaccaccgccctgcccggcagcagcaagagaagaagaaaggaggagaccaccggcaagaacgtgaagaagacccagcacgagctggaccacaacggcctggtgcccctgcccgtgaaggtgtgcttcacctgcaacagaagctgcagagtggcccccctgatccagtgcgactactgccccctgctgttccacatggactgcctggagccccccctgaccgccatgcccctgggcagatggatgtgccccaaccacatcgagcacgtggtgctgaaccagaagaacatgaccctgagcaacagatgccaggtgttcgacagattccaggacaccgtgagccagcacgtggtgaaggtggacttcctgaacagaatccacaagaagcacccccccaacagaagagtgctgcagagcgtgaagagaagaagcctgaaggtgcccgacgccatcaagagccagtaccagttccccccccccctgatcgcccccgccgccatcagagacggcgagctgatctgcaacggcatccccgaggagagccagatgcacctgctgaacagcgagcacctggccacccaggccgagcagcaggagtggctgtgcagcgtggtggccctgcagtgcagcatcctgaagcacctgagcgccaagcagatgcccagccactgggacagcgagcagaccgagaaggccgacatcaagcccgtgatcgtgaccgacagcagcgtgaccaccagcctgcagaccgccgacaagacccccacccccagccactaccccctgagctgccccagcggcatcagcacccagaacagcctgagctgcagccccccccaccagagccccgccctggaggacatcggctgcagcagctgcgccgagaagagcaagaagaccccctgcggcaccgccaacggccccgtgaacaccgaggtgaaggccaacggcccccacctgtacagcagccccaccgacagcaccgaccccagaagactgcccggcgccaacacccccctgcccggcctgagccacagacagggctggcccagacccctgaccccccccgccgccggcggcctgcagaaccacaccgtgggcatcatcgtgaagaccgagaacgccaccggccccagcagctgcccccagagaagcctggtgcccgtgcccagcctgccccccagcatccccagcagctgcgccagcatcgagaacaccagcaccctgcagagaaagaccgtgcagagccagatcggcccccccctgaccgacagcagacccctgggcagcccccccaacgccaccagagtgctgacccccccccaggccgccggcgacggcatcctggccaccaccgccaaccagagattcagcagccccgcccccagcagcgacggcaaggtgagccccggcaccctgagcatcggcagcgccctgaccgtgcccagcttccccgccaacagcaccgccatggtggacctgaccaacagcctgagagccttcatggacgtgaacggcgagatcgagatcaacatgctggacgagaagctgatcaagttcctggccctgcagagaatccaccagctgttccccagcagagtgcagcccagccccggcagcgtgggcacccaccagctggccagcggcggccaccacatcgaggtgcagagaaaggaggtgcaggccagagccgtgttctaccccctgctgggcctgggcggcgccgtgaacatgtgctacagaaccctgtacatcggcaccggcgccgacatggacgtgtgcctgaccaactacggccactgcaactacgtgagcggcaagcacgcctgcatcttctacgacgagaacaccaagcactacgagctgctgaactacagcgagcacggcaccaccgtggacaacgtgctgtacagctgcgacttcagcgagaagaccccccccaccccccccagcagcatcgtggccaaggtgcagagcgtgatcagaagaagaagacaccagaagcaggacgaggagcccagcgaggaggccgccatgatgagcagccaggcccagggcccccagagaagaccctgcaactgcaaggccagcagcagcagcctgatcggcggcagcggcgccggctgggagggcaccgccctgctgcaccacggcagctacatcaagctgggctgcctgcagttcgtgttcagcatcaccgagttcgccaccaagcagcccaagggcgacgccagcctgctgcaggacggcgtgctggccgagaagctgagcctgaagccccaccagggccccgtgctgagaagcaacagcgtgccctag

SEQ ID NO: 30589 - protein, 659 aa, Artificial Sequence
  derived and/or modified sequence
MKKDVRILLVGEPRVGKTSLIMSLVSEEFPEEVPPRAEEITIPADVTPERVPTHIVDYSEAEQSDEQLHQEISQANVICIVYAVNNKHSIDKVTSRWIPLINERTDKDSRLPLILVGNKSDLVEYSSMETILPIMNQYTEIETCVECSAKNLKNISELFYYAQKAVLHPTGPLYCPEEKEMKPACIKALTRIFKISDQDNDGTLNDAELNFFQRICFNTPLAPQALEDVKNVVRKHISDGVADSGLTLKGFLFLHTLFIQRGRHETTWTVLRRFGYDDDLDLTPEYLFPLLKIPPDCTTELNHHAYLFLQSTFDKHDLDRDCALSPDELKDLFKVFPYIPWGPDVNNTVCTNERGWITYQGFLSQWTLTTYLDVQRCLEYLGYLGYSILTEQESQASAVTVTRDKKIDLQKKQTQRNVFRCNVIGVKNCGKSGVLQALLGRNLMRQKKIREDHKSYYAINTVYVYGQEKYLLLHDISESEFLTEAEIICDVVCLVYDVSNPKSFEYCARIFKQHFMDSRIPCLIVAAKSDLHEVKQEYSISPTDFCRKHKMPPPQAFTCNTADAPSKDIFVKLTTMAMYPHARLRCMCTCNRCTFCICQNFLNSDLLQSVKNKIFTAVLNRHVTQADLKSSTFWLRASFGATVFAVLGFAMYKALLKQR

SEQ ID NO: 30590 - DNA, 1980 bp, Artificial Sequence
  derived and/or modified sequence
atgaaaaaagacgttcgaatacttctcgtgggcgagcctcgggttggaaagactagcttgatcatgagcctggtatccgaggagttcccagaagaagtgccgccccgcgcagaagaaatcacaatccccgcagatgtaacccctgagcgggttccgactcacattgtggattacagcgaggcagagcagtccgatgagcaactgcaccaggagatttcacaggccaatgtcatttgtatagtctatgctgtcaacaataaacattctatagataaggtcacatcacgttggattcctcttataaatgaaaggacggacaaggatagccggcttcctctaattctggtgggcaacaagtcagacctggtagaatattccagcatggaaacaatcttaccgatcatgaaccagtacaccgaaatcgagacgtgtgtggaatgctctgccaaaaacttaaaaaatatctcagagttgttctactacgcgcagaaggccgttctgcatccaacgggtcctctttactgtcctgaggaaaaagagatgaaaccagcttgtattaaggctctgaccagaatcttcaaaatctctgaccaggacaatgatggtaccttgaacgatgcagagcttaatttttttcagcgcatttgttttaacacacccttggcccctcaggccctagaggatgtcaagaatgtggtgcgtaagcacatatctgatggcgtggccgatagtgggctcaccctgaagggtttcctgttcctacataccctcttcattcaacgtggacggcatgagactacttggactgtgctgcggcggtttgggtatgacgacgacctcgacttaacgccggaatatttgtttcccctgctgaaaatcccacccgattgcacaaccgaactgaatcaccacgcctatctatttctgcaaagcaccttcgacaaacatgacttggaccgggattgtgccctttcccctgacgagctgaaggacctgttcaaagtgtttccatacatcccctggggccctgacgtgaataacactgtatgtactaatgagaggggctggataacttaccagggttttctgtctcagtggactctcaccacgtatctcgacgttcagagatgtttggagtacctagggtacctgggatatagcatactaacagaacaggaatcgcaggcttccgccgtaactgtgacgcgcgataaaaagatcgatctgcaaaaaaagcaaacccaacgcaacgtgttcagatgtaatgtgatcggcgtgaaaaattgtgggaagagtggggttttacaggcgctgctcggtagaaatctgatgcgccagaagaaaatcagggaggaccacaagtcctattacgccattaataccgtctatgtgtatggtcaggaaaagtatttactcctacacgacatttcggaatcagagttcctcaccgaggccgagatcatctgcgacgttgtctgcttagtgtacgacgttagcaacccaaagagcttcgaatactgtgcccgcatcttcaagcagcactttatggattccagaattccgtgccttattgtggctgctaaatcggacctgcatgaagtaaagcaggagtactctatatcccccaccgacttttgtcgcaagcacaagatgccccctcctcaggcttttacctgcaacaccgctgacgccccttcaaaggacatcttcgtgaagcttaccactatggcgatgtaccctcatgcacgactcaggtgcatgtgcacatgtaaccgctgtacattttgcatttgtcagaactttctaaatagcgacttactccagtccgtcaagaacaagatcttcaccgccgtactgaatagacacgtgacccaggctgatctgaaaagttcaacattctggctgagggcctcctttggtgcaactgtcttcgccgttttggggtttgccatgtacaaggctttattgaagcaacgatag

SEQ ID NO: 30591 - DNA, 1980 bp, Artificial Sequence
  derived and/or modified sequence
atgaagaaggatgtgcgcatcctgctggtgggggagccccgggtgggcaagaccagcctcatcatgagcctggtgtctgaggagttccctgaggaggtgccccccagggctgaggagatcaccatcccagcagatgtgaccccagagcgggtgcccacccacatcgtggactacagcgaggccgagcagagtgatgagcagctgcaccaggagatcagccaggccaacgtcatctgcatcgtgtatgctgtgaacaacaagcacagcattgacaaggtgaccagccgctggatccccctcatcaatgaaagaacagacaaggacagccggctgcccctcatcctggtgggcaacaagagtgacctggtggagtacagctccatggagaccatcctgcccatcatgaaccagtacacagaaattgagacctgtgtggagtgcagcgccaagaacctgaagaacatcagcgagctgttctactatgcccagaaggctgtgctgcaccccaccggccccctgtactgcccagaggagaaggagatgaagccagcctgcatcaaggccctgacccgcatcttcaagatcagtgaccaggacaatgatggcaccctgaatgatgctgagctgaacttcttccagaggatctgcttcaacacccccctggccccccaggccctggaggatgtgaagaatgtggtgaggaagcacatcagtgatggagtggccgacagcggcctgaccctgaagggcttcctgttcctgcacaccctcttcatccagagaggaagacatgagaccacctggacagtgctgcggcgcttcggctatgatgatgacctggacctgaccccagagtacctgttccccctgctgaagatccccccagactgcaccacagagctgaaccaccacgcctacctgttcctgcagagcacctttgacaagcatgacctggaccgggactgtgccctgagcccagatgagctgaaggacctcttcaaggtgttcccctacatcccctggggcccagatgtgaacaacacagtgtgcaccaatgaaagaggctggatcacctaccagggcttcctgagccagtggaccctgaccacctacctggatgtgcagcgctgcctggagtacctgggctacctgggctacagcatcctgacagagcaggagagccaggccagcgctgtgacagtgacccgggacaagaagattgacctgcagaagaagcagacccagagaaatgtgttccgctgcaacgtcatcggcgtgaagaactgtgggaagagcggcgtgctgcaggccctgctgggcaggaacctgatgaggcagaagaagatccgggaggaccacaagagctactatgccatcaacacagtgtatgtgtatggccaggagaagtacctgctgctgcatgacatcagcgagagcgagttcctgacagaagctgagatcatctgtgatgtggtgtgcctggtgtatgatgtgagcaaccccaagagctttgagtactgtgcccgcatcttcaagcagcacttcatggacagccgcatcccctgcctgattgtggccgccaagagtgacctgcacgaggtgaagcaggagtacagcatcagccccacagacttctgcaggaagcacaagatgcccccaccccaggccttcacctgcaacacagcagatgcccccagcaaggacatctttgtgaagctgaccaccatggccatgtacccccacgcccggctgcgctgcatgtgcacctgcaaccgctgcaccttctgcatctgccagaacttcctgaacagcgacctgctgcagagcgtgaagaacaagatcttcaccgctgtgctgaacagacatgtgacccaggccgacctgaagagcagcaccttctggctgcgggccagctttggagccaccgtgtttgctgtgctgggctttgccatgtacaaggccctgctgaagcagaggtag

SEQ ID NO: 30592 - DNA, 1980 bp, Artificial Sequence
  derived and/or modified sequence
atgaagaaggacgtgcggatcctgctggtgggcgagccccgggtggggaagacctctctcatcatgtctttagtaagcgaggagttcccagaggaagttcctcccagagctgaggaaatcacgatccccgcagacgtcacccccgagagggttccgacccacatcgtggattactcagaagctgagcagtctgatgaacagttgcatcaggagatctcacaagccaacgtcatctgtattgtgtacgcggtgaataacaaacacagtatcgataaagtaacctctagatggattccattgatcaacgagcgcacagacaaggactccagacttcctctaattttggtcggaaacaagtctgatttagtcgagtacagcagcatggagacaatcctgcccatcatgaatcagtatactgagatagaaacgtgcgttgaatgctcagccaaaaacctaaaaaatatctctgagcttttctactacgctcagaaagccgtacttcacccaactggccccttatactgccccgaggagaaggagatgaagccagcttgtattaaggcccttacccgcatcttcaaaatcagcgatcaggataatgacgggaccctcaacgatgctgaactaaactttttccagcgcatctgttttaacacgcccctggccccacaggcactggaagacgtgaagaacgtcgttaggaagcacatctccgatggggtggccgactctggacttacgctgaaaggtttcctcttcttgcatacgctgttcattcagagagggcgacacgaaaccacctggaccgttcttcggcgattcggctacgacgatgatctggaccttacccccgagtacctgtttcctctcctgaaaataccgccggactgcacaaccgaacttaaccatcacgcataccttttcttgcaaagcacttttgacaaacacgatctggaccgggattgtgccctgtctccggatgagctgaaggacttgttcaaggtttttccatacatcccctggggacctgacgtgaacaacactgtgtgtactaacgagaggggctggatcacttaccagggctttctgtcacaatggactctaaccacctatcttgatgtgcagaggtgtctggaatacctaggctaccttggctactctatcctcaccgagcaggagagtcaggccagcgcggtgactgtaacccgcgataaaaaaatcgatctccaaaagaaacaaacccaaagaaacgtcttccgttgtaacgttattggagtaaagaactgtggaaaaagtggtgtcttgcaagccttattgggccgcaatctgatgagacagaaaaagatcagggaagatcacaagagttactatgcaataaacactgtatacgtgtacgggcaagagaagtacctgttacttcacgatatctcagagtctgagttccttacagaagccgaaatcatatgtgatgtggtatgtctcgtctacgacgttagcaatccaaagtcctttgagtattgcgctaggattttcaaacaacatttcatggatagccgcatcccttgtctcatcgtggccgccaagagcgatctccatgaagtaaaacaggagtacagtatttctcctacagacttttgccggaaacacaagatgccccccccacaggcatttacttgcaataccgccgatgccccaagcaaggacatatttgtcaagctgaccacaatggccatgtaccctcatgctcgtctgcgctgcatgtgcacttgcaatcggtgtacgttctgtatttgccaaaacttcctgaattccgatcttctccagagcgtaaaaaacaaaattttcacggccgtgctgaataggcatgtcacacaggcagacctcaaaagctcgaccttctggctgagggcctcctttggcgcgactgtctttgcggtgttgggattcgccatgtacaaagctctattgaaacagagatag

SEQ ID NO: 30593 - DNA, 1980 bp, Artificial Sequence
  derived and/or modified sequence
atgaaaaaagatgtacgaattttgctggtgggagagccaagagtggggaaaacctccctaattatgtcgcttgtatccgaggaattccctgaggaagtccctccgcgtgccgaagagattacaattccagctgatgttacccccgagcgcgtgccaacccatattgtcgattattcagaagcggaacaaagcgatgagcagcttcaccaggaaatctctcaggctaatgttatatgtattgtgtacgctgtgaacaataagcactctattgacaaggtaacgtcccgctggattcctctcataaacgaacgcactgataaggatagcaggctgcctttaatcctggtgggaaacaagagcgacctcgtcgagtatagttcaatggagacaattctgcccattatgaatcaatacacggagattgagacctgcgtggagtgctccgcaaaaaatttgaaaaacatttctgaattgttttattacgcccagaaggctgtgctgcaccctactggacccctctactgccctgaggagaaggagatgaagcctgcatgtattaaagctctgacaaggatttttaaaatttcagatcaggataacgatggtactcttaatgacgcagagctaaacttttttcagaggatttgcttcaacacaccactggcccctcaggccctcgaggacgttaagaatgttgtgaggaagcatatatccgacggcgtggccgattccggtctgacattaaaaggatttttatttctccatacgctgtttatccagcggggacggcatgaaacaacatggacagttctgcgccgtttcgggtacgatgacgacctcgatctgacccctgaatacctcttcccactgctgaaaatcccacctgactgtactactgagctcaatcatcacgcctatttattcctccagtctacatttgacaagcacgacctggatcgcgattgcgcattgtcgcccgatgagctgaaggatctctttaaggtttttccttatattccctggggccctgatgtgaacaacactgtgtgtacaaatgaaagggggtggattacatatcagggttttctgtcccaatggacacttacaacatacttggatgtccagaggtgcctagagtatctgggctacctcggatattctatcctgactgagcaggagtcccaagcctccgccgtaacagtcacaagagacaaaaagatcgatctgcagaaaaagcagacgcagagaaatgtctttagatgcaacgtgattggtgtcaagaattgtggcaagagtggggtgctgcaggcgcttttaggccgaaatctgatgcggcaaaagaaaataagagaagaccacaagagttactatgctatcaacactgtttacgtatacgggcaagagaaatacctgctactgcatgatatttcagagagcgagtttctgaccgaggcggagattatttgcgacgttgtctgtctcgtatacgatgtgtctaatcccaaaagctttgagtactgcgccaggatcttcaagcaacatttcatggattccagaatcccttgtctgattgtcgccgctaagagcgatctgcatgaggtgaaacaggaatattcaatatctcctacagatttctgtaggaagcataagatgcctccccctcaggccttcacttgcaatacagccgatgcaccatccaaagatattttcgtgaagctaaccactatggctatgtatccccatgcacgcctgagatgcatgtgcacctgcaaccgatgcacgttttgtatttgccagaattttcttaatagcgacctgctgcaatctgtaaagaacaagattttcactgcagtcctcaacaggcacgtgacccaggccgacctgaagtcgagtaccttttggcttagagccagcttcggtgccacagtctttgcagtactggggtttgcgatgtacaaggctctgctgaagcaacgctag

SEQ ID NO: 30594 - DNA, 3213 bp, Artificial Sequence
  derived and/or modified sequence
gccgccgccgccgccgccgccgccgccgccgccgccgccgccgccgccacagcccgctgggccggaggaggcggagctggcgctgtcccggctctcttgcggggaagcaactgagggggcggcgcggcgggccccggcggccgaagaggctggcaggtggcgccgtggggtgggtgctcctggtgagaggagtccactccgtgcgtgcgggcggaggccggcccccgagagccgccgacatgaagaaagacgtgcggatcctgctggtgggagaacctagagttgggaagacatcactgattatgtctctggtcagtgaagaatttccagaagaggttcctccccgggcagaagaaatcaccattccagctgatgtcaccccagagagagttccaacacacattgtagattactcagaagcagaacagagtgatgaacaacttcatcaagaaatatctcaggctaatgtcatctgtatagtgtatgccgttaacaacaagcattctattgataaggtaacaagtcgatggattcctctcataaatgaaagaacagacaaagacagcaggctgcctttaatattggttgggaacaaatctgatctggtggaatatagtagtatggagaccatccttcctattatgaaccagtatacagaaatagaaacctgtgtggagtgttcagcgaaaaacctgaagaacatatcagagctcttttattacgcacagaaagctgttcttcatcctacagggcccctgtactgcccagaggagaaggagatgaaaccagcttgtataaaagcccttactcgtatatttaaaatatctgatcaagataatgatggtactctcaatgatgctgaactcaacttctttcagaggatttgtttcaacactccattagctcctcaagctctggaggatgtcaagaatgtagtcagaaaacatataagtgatggtgtggctgacagtgggttgaccctgaaaggttttctctttttacacacactttttatccagagagggagacacgaaactacttggactgtgcttcgacgatttggttatgatgatgacctggatttgacacctgaatatttgttccccctgctgaaaatacctcctgattgcactactgaattaaatcatcatgcatatttatttctccaaagcacctttgacaagcatgatttggatagagactgtgctttgtcacctgatgagcttaaagatttatttaaagttttcccttacataccttgggggccagatgtgaataacacagtttgtaccaatgaaagaggctggataacctaccagggattcctttcccagtggacgctcacgacttatttagatgtacagcggtgcctggaatatttgggctatctaggctattcaatattgactgagcaagagtctcaagcttcagctgttacagtgacaagagataaaaagatagacctgcagaaaaaacaaactcaaagaaatgtgttcagatgtaatgtaattggagtgaaaaactgtgggaaaagtggagttcttcaggctcttcttggaagaaacttaatgaggcagaagaaaattcgtgaagatcataaatcctactatgcgattaacactgtttatgtatatggacaagagaaatacttgttgttgcatgatatctcagaatcggaatttctaactgaagctgaaatcatttgtgatgttgtatgcctggtatatgatgtcagcaatcccaaatcctttgaatactgtgccaggatttttaagcaacactttatggacagcagaataccttgcttaatcgtagctgcaaagtcagacctgcatgaagttaaacaagaatacagtatttcacctactgatttctgcaggaaacacaaaatgcctccaccacaagccttcacttgcaatactgctgatgcccccagtaaggatatctttgttaaattgacaacaatggccatgtatccccatgcccggttacgctgtatgtgcacctgcaacaggtgtacattttgcatctgtcagaacttcctcaactcagacttgctgcaatctgtaaagaacaaaatcttcactgcagttcttaacaggcacgtgacacaagctgacctcaagagctccacgttttggcttcgagcaagttttggtgctactgtttttgcagttttgggctttgctatgtacaaagcattattgaaacagcgatgatataaaaagaaatactgtccctaccaaaaacaaatacttttatgtacattctgaatgctttaagttctgctagaattattgagatatttatacatgcagagttactttattaatatttgtaattcatgcataagagtattttaatgatagttataactgcagtattggctagcatatggaaagaaaacagctaacagccaaactaaaatggctaaattccagaggccaaaagggaatattttgtaaatatatgtacatattcaggcaagatatggtctcccaagctgagttctagaaatgatgtttctagacatttctaagtggtattgttagtgctcacttggctcactcttctaggtttaagttagcccagagattgtatttactcatggatcactttatttatttcacatttactcagaatgatcctttgggttctataaggacataaggtacaatttgccattgtctctccatttttaaaaacatacaagtcagtgtcagcttaccaacatgacattttttcagtcagttgtggtaggccagccttgaagccatcgcacagtctagaaacttgtgtagctgagtgtgcagctcacctttaagggtgaagttaggtaaaagcaattagcagaggcgttatctatgtgattatgttgcttccttgtcagtatgttgaattttatagccctttcaatgaaataaaaaaaaaatttgtatattaccaatgtttttagtttaaataaagagtcacccttactactgttgaatttcatcccaagtgtaaatcattctataatggctgtgtctgttatagtatattacagtaactgcatgtgtcaccaagtgttctatatcaggctaggataacctagaggcagtaattttttaaatgataaaataaatctaatgaatataaactctcatgataaacctattttttccatcatcagccttttcaagtatttaaataaataactgctgtgtactgtga

SEQ ID NO: 30595 - DNA, 1980 bp, Artificial Sequence
  derived and/or modified sequence
atgaagaaggacgtgagaatcctgctggtgggcgagcccagagtgggcaagaccagcctgatcatgagcctggtgagcgaggagttccccgaggaggtgccccccagagccgaggagatcaccatccccgccgacgtgacccccgagagagtgcccacccacatcgtggactacagcgaggccgagcagagcgacgagcagctgcaccaggagatcagccaggccaacgtgatctgcatcgtgtacgccgtgaacaacaagcacagcatcgacaaggtgaccagcagatggatccccctgatcaacgagagaaccgacaaggacagcagactgcccctgatcctggtgggcaacaagagcgacctggtggagtacagcagcatggagaccatcctgcccatcatgaaccagtacaccgagatcgagacctgcgtggagtgcagcgccaagaacctgaagaacatcagcgagctgttctactacgcccagaaggccgtgctgcaccccaccggccccctgtactgccccgaggagaaggagatgaagcccgcctgcatcaaggccctgaccagaatcttcaagatcagcgaccaggacaacgacggcaccctgaacgacgccgagctgaacttcttccagagaatctgcttcaacacccccctggccccccaggccctggaggacgtgaagaacgtggtgagaaagcacatcagcgacggcgtggccgacagcggcctgaccctgaagggcttcctgttcctgcacaccctgttcatccagagaggcagacacgagaccacctggaccgtgctgagaagattcggctacgacgacgacctggacctgacccccgagtacctgttccccctgctgaagatcccccccgactgcaccaccgagctgaaccaccacgcctacctgttcctgcagagcaccttcgacaagcacgacctggacagagactgcgccctgagccccgacgagctgaaggacctgttcaaggtgttcccctacatcccctggggccccgacgtgaacaacaccgtgtgcaccaacgagagaggctggatcacctaccagggcttcctgagccagtggaccctgaccacctacctggacgtgcagagatgcctggagtacctgggctacctgggctacagcatcctgaccgagcaggagagccaggccagcgccgtgaccgtgaccagagacaagaagatcgacctgcagaagaagcagacccagagaaacgtgttcagatgcaacgtgatcggcgtgaagaactgcggcaagagcggcgtgctgcaggccctgctgggcagaaacctgatgagacagaagaagatcagagaggaccacaagagctactacgccatcaacaccgtgtacgtgtacggccaggagaagtacctgctgctgcacgacatcagcgagagcgagttcctgaccgaggccgagatcatctgcgacgtggtgtgcctggtgtacgacgtgagcaaccccaagagcttcgagtactgcgccagaatcttcaagcagcacttcatggacagcagaatcccctgcctgatcgtggccgccaagagcgacctgcacgaggtgaagcaggagtacagcatcagccccaccgacttctgcagaaagcacaagatgccccccccccaggccttcacctgcaacaccgccgacgcccccagcaaggacatcttcgtgaagctgaccaccatggccatgtacccccacgccagactgagatgcatgtgcacctgcaacagatgcaccttctgcatctgccagaacttcctgaacagcgacctgctgcagagcgtgaagaacaagatcttcaccgccgtgctgaacagacacgtgacccaggccgacctgaagagcagcaccttctggctgagagccagcttcggcgccaccgtgttcgccgtgctgggcttcgccatgtacaaggccctgctgaagcagagatag

SEQ ID NO: 30596 - protein, 691 aa, Artificial Sequence
  derived and/or modified sequence
MKKDVRILLVGEPRVGKTSLIMSLVSEEFPEEVPPRAEEITIPADVTPERVPTHIVDYSEAEQSDEQLHQEISQANVICIVYAVNNKHSIDKVTSRWIPLINERTDKDSRLPLILVGNKSDLVEYSSMETILPIMNQYTEIETCVECSAKNLKNISELFYYAQKAVLHPTGPLYCPEEKEMKPACIKALTRIFKISDQDNDGTLNDAELNFFQRICFNTPLAPQALEDVKNVVRKHISDGVADSGLTLKGFLFLHTLFIQRGRHETTWTVLRRFGYDDDLDLTPEYLFPLLKIPPDCTTELNHHAYLFLQSTFDKHDLDRDCALSPDELKDLFKVFPYIPWGPDVNNTVCTNERGWITYQGFLSQWTLTTYLDVQRCLEYLGYLGYSILTEQESQASAVTVTRDKKIDLQKKQTQRNVFRCNVIGVKNCGKSGVLQALLGRNLMRQKKIREDHKSYYAINTVYVYGQEKYLLLHDISESEFLTEAEIICDVVCLVYDVSNPKSFEYCARIFKQHFMDSRIPCLIVAAKSDLHEVKQEYSISPTDFCRKHKMPPPQAFTCNTADAPSKDIFVKLTTMAMYPEDHYRDRLSRDMGHTDRIENLRKIWVFLKTAFHARLRCMCTCNRCTFCICQNFLNSDLLQSVKNKIFTAVLNRHVTQADLKSSTFWLRASFGATVFAVLGFAMYKALLKQR

SEQ ID NO: 30597 - DNA, 2076 bp, Artificial Sequence
  derived and/or modified sequence
atgaagaaagatgtccgtatcctgctggtcggggaaccacgagtggggaagacttcactcatcatgtctctcgtgtccgaggagttccccgaagaagtcccacctcgtgccgaggagattacgatccccgccgatgtgacaccagagcgcgttccgacccatatcgttgactattctgaggcagagcagtccgatgagcaactgcatcaggagatcagccaggccaatgtgatttgcatcgtctatgcagtgaacaacaagcacagtattgataaagttacttctcgatggattcctcttatcaacgaaagaacagacaaagactcccgacttccactgatactcgttggtaacaaaagtgatctggtggagtattcaagtatggaaaccatcctgcccatcatgaaccagtatacagaaatcgagacttgcgtggaatgctcagcgaagaacctaaagaatattagcgagctcttctactacgcgcagaaggctgtcctccatccaactggtccattatattgcccagaggaaaaagaaatgaagcctgcttgtatcaaggccctgacccggatcttcaagattagtgatcaggataacgacggtacgctgaatgacgccgagctgaacttcttccaacgtatttgctttaacactccactggctccccaggcgctggaagatgtgaagaatgtggtaagaaagcacatttctgatggagtggctgactcaggacttacgctgaaaggttttctctttttacacaccctgtttatacagcgcggacgacatgagacgacctggacggtactcagacgattcggttatgacgatgatctggacctgacacctgagtacctcttcccgctgctcaagatcccccctgattgcacaactgagctgaaccatcacgcttacctgtttctgcagtcgacgtttgacaagcacgacctggaccgggattgtgccttgtctcccgacgagctgaaggacctgttcaaagtctttccctacattccgtggggccccgacgttaataatacagtgtgtaccaacgagagaggttggattacctatcaaggcttcctgagccagtggacgctgacgacatatctggatgtgcagaggtgcctcgaatacctggggtacctcggatacagtatccttacagaacaagagtcccaagccagcgccgttacggtaacacgtgacaagaaaatcgatctgcagaagaagcagacccaacggaacgtctttcgttgtaacgtgattggcgtcaagaactgtgggaagagcggggtcttgcaggctctactgggcagaaacctcatgagacagaagaaaattcgggaggaccataagagttactacgcaatcaatacggtttacgtctatggccaggagaagtatctgctgctccatgatattagcgagagtgagttcctgacagaggcggaaatcatttgtgacgtggtttgccttgtgtatgacgtgagcaatccgaaatctttcgaatattgtgcacgaatttttaagcaacactttatggactctagaattccatgtctcatagtggccgcgaagtcggacttacatgaggtcaagcaggagtattcaatatcacctacagatttctgtagaaaacacaagatgccgcccccacaggcgtttacctgtaatacagctgatgcgccatctaaggatatcttcgtcaagctcaccaccatggccatgtacccagaagatcattaccgagaccgactttcgcgggatatgggacacaccgatagaattgagaaccttcggaaaatctgggtcttcttaaagaccgcgtttcatgccaggttgcgctgcatgtgtacatgtaataggtgtacattctgcatctgtcagaattttttgaactcagatttgctccagagcgtgaaaaataagatttttaccgccgtcctaaaccgccatgtaacacaggccgacctgaaatctagcacgttttggctgagagccagttttggagctactgtgtttgcggtactcgggtttgcaatgtataaagcgctcctgaagcagcggtag

SEQ ID NO: 30598 - DNA, 2076 bp, Artificial Sequence
  derived and/or modified sequence
atgaagaaggatgtgcgcatcctgctggtgggggagccccgggtgggcaagaccagcctcatcatgagcctggtgtctgaggagttccctgaggaggtgccccccagggctgaggagatcaccatcccagcagatgtgaccccagagcgggtgcccacccacatcgtggactacagcgaggccgagcagagtgatgagcagctgcaccaggagatcagccaggccaacgtcatctgcatcgtgtatgctgtgaacaacaagcacagcattgacaaggtgaccagccgctggatccccctcatcaatgaaagaacagacaaggacagccggctgcccctcatcctggtgggcaacaagagtgacctggtggagtacagctccatggagaccatcctgcccatcatgaaccagtacacagaaattgagacctgtgtggagtgcagcgccaagaacctgaagaacatcagcgagctgttctactatgcccagaaggctgtgctgcaccccaccggccccctgtactgcccagaggagaaggagatgaagccagcctgcatcaaggccctgacccgcatcttcaagatcagtgaccaggacaatgatggcaccctgaatgatgctgagctgaacttcttccagaggatctgcttcaacacccccctggccccccaggccctggaggatgtgaagaatgtggtgaggaagcacatcagtgatggagtggccgacagcggcctgaccctgaagggcttcctgttcctgcacaccctcttcatccagagaggaagacatgagaccacctggacagtgctgcggcgcttcggctatgatgatgacctggacctgaccccagagtacctgttccccctgctgaagatccccccagactgcaccacagagctgaaccaccacgcctacctgttcctgcagagcacctttgacaagcatgacctggaccgggactgtgccctgagcccagatgagctgaaggacctcttcaaggtgttcccctacatcccctggggcccagatgtgaacaacacagtgtgcaccaatgaaagaggctggatcacctaccagggcttcctgagccagtggaccctgaccacctacctggatgtgcagcgctgcctggagtacctgggctacctgggctacagcatcctgacagagcaggagagccaggccagcgctgtgacagtgacccgggacaagaagattgacctgcagaagaagcagacccagagaaatgtgttccgctgcaacgtcatcggcgtgaagaactgtgggaagagcggcgtgctgcaggccctgctgggcaggaacctgatgaggcagaagaagatccgggaggaccacaagagctactatgccatcaacacagtgtatgtgtatggccaggagaagtacctgctgctgcatgacatcagcgagagcgagttcctgacagaagctgagatcatctgtgatgtggtgtgcctggtgtatgatgtgagcaaccccaagagctttgagtactgtgcccgcatcttcaagcagcacttcatggacagccgcatcccctgcctgattgtggccgccaagagtgacctgcacgaggtgaagcaggagtacagcatcagccccacagacttctgcaggaagcacaagatgcccccaccccaggccttcacctgcaacacagcagatgcccccagcaaggacatctttgtgaagctgaccaccatggccatgtacccagaggaccactacagagaccggctgagccgggacatgggccacacagacagaattgagaacctgaggaagatctgggtgttcctgaagacagccttccacgcccggctgcgctgcatgtgcacctgcaaccgctgcaccttctgcatctgccagaacttcctgaacagcgacctgctgcagagcgtgaagaacaagatcttcaccgctgtgctgaacagacatgtgacccaggccgacctgaagagcagcaccttctggctgcgggccagctttggagccaccgtgtttgctgtgctgggctttgccatgtacaaggccctgctgaagcagaggtag

SEQ ID NO: 30599 - DNA, 2076 bp, Artificial Sequence
  derived and/or modified sequence
atgaagaaggacgtgcggatcctgctggtgggcgagccccgggtggggaagacctcgctgatcatgtcactggtctccgaggagtttccagaagaagtcccacccagggctgaagagattaccatccccgccgatgtcacacccgagcgggtccccacccacatcgtggactactccgaggctgagcagtctgacgagcaactgcaccaggaaatctctcaagctaacgtgatttgtatagtatatgctgtaaacaataagcacagtatcgacaaggtgacttcacgttggataccactgattaatgagagaacggataaagatagtaggctcccccttatactggttggcaacaagagtgaccttgtggaatactcaagcatggagaccattctgccaattatgaatcagtatactgaaattgaaacatgtgtggagtgtagcgctaagaatctgaaaaacatcagcgagctgttctattatgcccagaaggcagtgctccatccgacggggccattgtattgccccgaggaaaaggagatgaagcctgcctgcatcaaagcattaaccagaatttttaagatctccgaccaggataacgatggaacgttgaacgatgccgagttgaactttttccagcgaatttgctttaacacccctttggccccacaggcattagaggatgtcaagaacgtggtgcggaagcatattagcgatggtgtggcagatagcggcctgacactgaaagggtttctcttcctacataccctcttcattcagagaggacgacatgaaaccacgtggaccgtgctgagacggttcggatacgatgacgaccttgatcttaccccagagtacctgttccccttactgaaaataccacctgactgcaccacggaattaaatcaccacgcgtatctctttcttcagagtaccttcgataagcacgatctcgatcgcgactgcgccctgtcgccagatgagctgaaggacctcttcaaagtgtttccctacatcccctggggtcctgacgttaataatacggtctgcactaatgaacgagggtggattacttatcagggttttctttcccagtggaccctcaccacgtaccttgacgttcagcggtgtctagagtaccttggctaccttggatactcaatccttacagagcaagagtcccaagcctctgccgtgactgtgacaagggacaaaaaaatagacctgcagaagaaacaaacccagcggaacgtgtttcggtgcaatgttatcggcgtgaagaattgcggcaaaagcggagtgctgcaggcgctactggggagaaacctcatgaggcagaagaagattcgggaggatcacaaatcctactacgctatcaataccgtctacgtctacgggcaagagaagtacctgctgttgcatgacattagtgagagcgaattcctgacagaggctgagataatatgtgatgtggtatgcttggtgtacgacgtaagtaatcctaagtctttcgagtactgcgcgcgcatttttaagcagcactttatggactcgcgcattccttgtttgattgttgccgctaaaagtgatctgcacgaagtcaagcaggaatactccatatcgcctactgatttctgcaggaaacacaaaatgcctcccccgcaggcattcacctgcaatacagccgacgctccctcaaaagacatctttgtgaagctgacaaccatggccatgtatcctgaggaccattaccgtgaccggttaagtagggatatgggtcacaccgaccggatcgagaacttgcggaagatctgggttttcctaaaaaccgccttccatgccaggctgagatgcatgtgcacatgtaatagatgtacattttgcatatgccagaacttcctcaactctgatctcctccagtcagtgaaaaacaaaatttttactgccgtcctgaacaggcatgtcacccaggcggacctgaagagcagtacattttggctgagagcgagcttcggagctacagtttttgccgtcttaggattcgcaatgtataaggccttacttaagcagcgatag

SEQ ID NO: 30600 - DNA, 2076 bp, Artificial Sequence
  derived and/or modified sequence
atgaagaaagacgtgaggatcctcctggttggagaacctcgggtgggcaaaacctcactcattatgtcactggtttcggaggaattcccggaagaagtcccgcctagagccgaagagataaccatccctgccgacgtgacacccgagcgcgttccaacccacatcgtggattactccgaagcagaacagagcgacgaacaattacaccaggagatttcccaggctaacgtcatctgtattgtatacgccgtcaacaataagcactctatcgataaagtcacttccaggtggatacccttgattaatgagaggaccgataaggattccaggctccccctgatcctggtgggaaataaatccgatcttgtggaatactcatcaatggagaccatcctgccaattatgaaccaatacacagagatcgaaacatgtgtcgaatgttctgctaaaaacctgaagaacatctcagaactgttctactatgcccaaaaggcggtgcttcatcccaccggtcctctgtattgtcccgaagagaaagaaatgaagccagcctgcataaaagctttgacccggatcttcaagatctctgaccaggataatgacggcacgctgaacgacgcagaacttaacttcttccaacgcatttgttttaacacgcccctcgcccctcaggccctcgaagacgtgaaaaatgtcgttcgaaaacatatttctgacggagttgccgactcaggtttgactctcaaggggttcttgtttctgcataccttattcatccagcggggacgacatgaaacaacatggaccgtgctgaggagatttggctacgacgatgacctggatttgacacccgagtacctgtttccgctgctgaagatccctccagactgtacaactgagttgaaccatcacgcctacttatttctgcaatccacattcgataagcatgacctggatagagactgcgctctgtcaccagacgaactcaaggatctattcaaggtgttcccctacatcccctggggtccagatgtcaacaacacagtctgcaccaatgagcgcggttggatcacgtatcaggggttcttaagccaatggactctcaccacttacctagatgttcaacgctgcctggagtatctggggtacttaggttactccatcttgactgagcaggagtctcaggcttctgcagtgacagtcacgcgggacaagaagatcgacctgcagaagaaacagactcagcggaatgtgttccggtgcaatgttattggtgtgaagaactgcggcaagagtggcgtgctccaggcattgctgggcaggaacttgatgcgtcagaagaagatccgtgaagaccataagagctattatgcaattaacacagtttacgtctatgggcaggagaaataccttctgctccatgatatatcagagagtgagttcctaacagaggccgagattatctgtgatgtcgtatgcctcgtgtatgacgtctctaatccaaaaagttttgagtactgcgcccgaatttttaagcagcacttcatggactccagaattccttgtctgatcgtggcagcaaaaagcgacctccacgaagtaaagcaggaatattccatcagccctaccgacttttgccgcaaacacaagatgccgccaccccaagccttcacgtgtaacaccgctgatgcaccatcaaaggatatctttgtgaagttgacaactatggctatgtatccagaagaccactaccgcgatagattgagtcgagacatgggccataccgataggatagagaatcttcgtaagatctgggtgttcctgaagaccgccttccatgccaggttacggtgcatgtgtacatgtaatcggtgtaccttttgtatttgccagaattttttaaactccgatttgctgcaatctgtgaagaacaaaatcttcactgccgtcctgaatcggcatgtgacccaggccgaccttaaatccagtaccttctggcttcgagcatcattcggggctactgtgttcgctgtgctagggtttgcaatgtataaggccctgctcaaacagagatag

SEQ ID NO: 30601 - DNA, 3309 bp, Artificial Sequence
  derived and/or modified sequence
gccgccgccgccgccgccgccgccgccgccgccgccgccgccgccgccacagcccgctgggccggaggaggcggagctggcgctgtcccggctctcttgcggggaagcaactgagggggcggcgcggcgggccccggcggccgaagaggctggcaggtggcgccgtggggtgggtgctcctggtgagaggagtccactccgtgcgtgcgggcggaggccggcccccgagagccgccgacatgaagaaagacgtgcggatcctgctggtgggagaacctagagttgggaagacatcactgattatgtctctggtcagtgaagaatttccagaagaggttcctccccgggcagaagaaatcaccattccagctgatgtcaccccagagagagttccaacacacattgtagattactcagaagcagaacagagtgatgaacaacttcatcaagaaatatctcaggctaatgtcatctgtatagtgtatgccgttaacaacaagcattctattgataaggtaacaagtcgatggattcctctcataaatgaaagaacagacaaagacagcaggctgcctttaatattggttgggaacaaatctgatctggtggaatatagtagtatggagaccatccttcctattatgaaccagtatacagaaatagaaacctgtgtggagtgttcagcgaaaaacctgaagaacatatcagagctcttttattacgcacagaaagctgttcttcatcctacagggcccctgtactgcccagaggagaaggagatgaaaccagcttgtataaaagcccttactcgtatatttaaaatatctgatcaagataatgatggtactctcaatgatgctgaactcaacttctttcagaggatttgtttcaacactccattagctcctcaagctctggaggatgtcaagaatgtagtcagaaaacatataagtgatggtgtggctgacagtgggttgaccctgaaaggttttctctttttacacacactttttatccagagagggagacacgaaactacttggactgtgcttcgacgatttggttatgatgatgacctggatttgacacctgaatatttgttccccctgctgaaaatacctcctgattgcactactgaattaaatcatcatgcatatttatttctccaaagcacctttgacaagcatgatttggatagagactgtgctttgtcacctgatgagcttaaagatttatttaaagttttcccttacataccttgggggccagatgtgaataacacagtttgtaccaatgaaagaggctggataacctaccagggattcctttcccagtggacgctcacgacttatttagatgtacagcggtgcctggaatatttgggctatctaggctattcaatattgactgagcaagagtctcaagcttcagctgttacagtgacaagagataaaaagatagacctgcagaaaaaacaaactcaaagaaatgtgttcagatgtaatgtaattggagtgaaaaactgtgggaaaagtggagttcttcaggctcttcttggaagaaacttaatgaggcagaagaaaattcgtgaagatcataaatcctactatgcgattaacactgtttatgtatatggacaagagaaatacttgttgttgcatgatatctcagaatcggaatttctaactgaagctgaaatcatttgtgatgttgtatgcctggtatatgatgtcagcaatcccaaatcctttgaatactgtgccaggatttttaagcaacactttatggacagcagaataccttgcttaatcgtagctgcaaagtcagacctgcatgaagttaaacaagaatacagtatttcacctactgatttctgcaggaaacacaaaatgcctccaccacaagccttcacttgcaatactgctgatgcccccagtaaggatatctttgttaaattgacaacaatggccatgtatccagaggatcattacagagacagactctcccgagacatgggccacactgatagaatagagaatttgagaaaaatctgggtctttctaaaaactgctttccatgcccggttacgctgtatgtgcacctgcaacaggtgtacattttgcatctgtcagaacttcctcaactcagacttgctgcaatctgtaaagaacaaaatcttcactgcagttcttaacaggcacgtgacacaagctgacctcaagagctccacgttttggcttcgagcaagttttggtgctactgtttttgcagttttgggctttgctatgtacaaagcattattgaaacagcgatgatataaaaagaaatactgtccctaccaaaaacaaatacttttatgtacattctgaatgctttaagttctgctagaattattgagatatttatacatgcagagttactttattaatatttgtaattcatgcataagagtattttaatgatagttataactgcagtattggctagcatatggaaagaaaacagctaacagccaaactaaaatggctaaattccagaggccaaaagggaatattttgtaaatatatgtacatattcaggcaagatatggtctcccaagctgagttctagaaatgatgtttctagacatttctaagtggtattgttagtgctcacttggctcactcttctaggtttaagttagcccagagattgtatttactcatggatcactttatttatttcacatttactcagaatgatcctttgggttctataaggacataaggtacaatttgccattgtctctccatttttaaaaacatacaagtcagtgtcagcttaccaacatgacattttttcagtcagttgtggtaggccagccttgaagccatcgcacagtctagaaacttgtgtagctgagtgtgcagctcacctttaagggtgaagttaggtaaaagcaattagcagaggcgttatctatgtgattatgttgcttccttgtcagtatgttgaattttatagccctttcaatgaaataaaaaaaaaatttgtatattaccaatgtttttagtttaaataaagagtcacccttactactgttgaatttcatcccaagtgtaaatcattctataatggctgtgtctgttatagtatattacagtaactgcatgtgtcaccaagtgttctatatcaggctaggataacctagaggcagtaattttttaaatgataaaataaatctaatgaatataaactctcatgataaacctattttttccatcatcagccttttcaagtatttaaataaataactgctgtgtactgtga

SEQ ID NO: 30602 - DNA, 2076 bp, Artificial Sequence
  derived and/or modified sequence
atgaagaaggacgtgagaatcctgctggtgggcgagcccagagtgggcaagaccagcctgatcatgagcctggtgagcgaggagttccccgaggaggtgccccccagagccgaggagatcaccatccccgccgacgtgacccccgagagagtgcccacccacatcgtggactacagcgaggccgagcagagcgacgagcagctgcaccaggagatcagccaggccaacgtgatctgcatcgtgtacgccgtgaacaacaagcacagcatcgacaaggtgaccagcagatggatccccctgatcaacgagagaaccgacaaggacagcagactgcccctgatcctggtgggcaacaagagcgacctggtggagtacagcagcatggagaccatcctgcccatcatgaaccagtacaccgagatcgagacctgcgtggagtgcagcgccaagaacctgaagaacatcagcgagctgttctactacgcccagaaggccgtgctgcaccccaccggccccctgtactgccccgaggagaaggagatgaagcccgcctgcatcaaggccctgaccagaatcttcaagatcagcgaccaggacaacgacggcaccctgaacgacgccgagctgaacttcttccagagaatctgcttcaacacccccctggccccccaggccctggaggacgtgaagaacgtggtgagaaagcacatcagcgacggcgtggccgacagcggcctgaccctgaagggcttcctgttcctgcacaccctgttcatccagagaggcagacacgagaccacctggaccgtgctgagaagattcggctacgacgacgacctggacctgacccccgagtacctgttccccctgctgaagatcccccccgactgcaccaccgagctgaaccaccacgcctacctgttcctgcagagcaccttcgacaagcacgacctggacagagactgcgccctgagccccgacgagctgaaggacctgttcaaggtgttcccctacatcccctggggccccgacgtgaacaacaccgtgtgcaccaacgagagaggctggatcacctaccagggcttcctgagccagtggaccctgaccacctacctggacgtgcagagatgcctggagtacctgggctacctgggctacagcatcctgaccgagcaggagagccaggccagcgccgtgaccgtgaccagagacaagaagatcgacctgcagaagaagcagacccagagaaacgtgttcagatgcaacgtgatcggcgtgaagaactgcggcaagagcggcgtgctgcaggccctgctgggcagaaacctgatgagacagaagaagatcagagaggaccacaagagctactacgccatcaacaccgtgtacgtgtacggccaggagaagtacctgctgctgcacgacatcagcgagagcgagttcctgaccgaggccgagatcatctgcgacgtggtgtgcctggtgtacgacgtgagcaaccccaagagcttcgagtactgcgccagaatcttcaagcagcacttcatggacagcagaatcccctgcctgatcgtggccgccaagagcgacctgcacgaggtgaagcaggagtacagcatcagccccaccgacttctgcagaaagcacaagatgccccccccccaggccttcacctgcaacaccgccgacgcccccagcaaggacatcttcgtgaagctgaccaccatggccatgtaccccgaggaccactacagagacagactgagcagagacatgggccacaccgacagaatcgagaacctgagaaagatctgggtgttcctgaagaccgccttccacgccagactgagatgcatgtgcacctgcaacagatgcaccttctgcatctgccagaacttcctgaacagcgacctgctgcagagcgtgaagaacaagatcttcaccgccgtgctgaacagacacgtgacccaggccgacctgaagagcagcaccttctggctgagagccagcttcggcgccaccgtgttcgccgtgctgggcttcgccatgtacaaggccctgctgaagcagagatag

SEQ ID NO: 30603 - protein, 176 aa, Artificial Sequence
  derived and/or modified sequence
MGPAEAGRRGAASPVPPPLVRVAPSLFLGSARAAGAEEQLARAGVTLCVNVSRQQPGPRAPGVAELRVPVFDDPAEDLLAHLEPTCAAMEAAVRAGGACLVYCKNGRSRSAAVCTAYLMRHRGLSLAKAFQMVKSARPVAEPNPGFWSQLQKYEEALQAQSCLQGEPPALGLGPEA

SEQ ID NO: 30604 - DNA, 531 bp, Artificial Sequence
  derived and/or modified sequence
atgggccccgccgaggccggcagaagaggcgccgccagccccgtgcccccccccctggtgagagtggcccccagcctgttcctgggcagcgccagagccgccggcgccgaggagcagctggccagagccggcgtgaccctgtgcgtgaacgtgagcagacagcagcccggccccagagcccccggcgtggccgagctgagagtgcccgtgttcgacgaccccgccgaggacctgctggcccacctggagcccacctgcgccgccatggaggccgccgtgagagccggcggcgcctgcctggtgtactgcaagaacggcagaagcagaagcgccgccgtgtgcaccgcctacctgatgagacacagaggcctgagcctggccaaggccttccagatggtgaagagcgccagacccgtggccgagcccaaccccggcttctggagccagctgcagaagtacgaggaggccctgcaggcccagagctgcctgcagggcgagccccccgccctgggcctgggccccgaggcctag

SEQ ID NO: 30605 - DNA, 531 bp, Artificial Sequence
  derived and/or modified sequence
atggggcctgccgaagcaggccggcgcggcgcagctagccctgttccgccccccttagttcgagtagccccctcactattcttaggttctgccagagccgcgggagcagaagagcagttggcccgcgccggcgtcaccttgtgcgttaacgtctcacgccagcagcctggtccgagggccccgggcgtagctgagctgagagttcccgtgttcgacgaccctgctgaagacctgctcgcacatctggagcctacctgtgccgctatggaggccgctgtgagggccggcggggcctgcctcgtgtattgtaaaaatgggcgcagccgctccgcggccgtctgcactgcttatctgatgagacacagaggcctgtctcttgctaaagctttccagatggtgaagagtgcccgccccgtggcggaaccaaatcccggtttttggagtcagctgcaaaagtatgaagaagccttgcaagctcagtcttgtcttcaaggtgagcccccagcgctgggattgggtcctgaggcgtag

SEQ ID NO: 30606 - DNA, 531 bp, Artificial Sequence
  derived and/or modified sequence
atggggccggctgaagccgggagacggggcgcagcaagtcctgtgcccccccctttggttcgggtggctccctccctgttccttgggtctgccagagctgctggagccgaggagcagctggcacgagccggtgtcacgctgtgcgtgaacgtgagccggcagcagcccggaccacgggcccctggcgttgccgaacttcgggtccctgtgttcgacgatcccgcagaggatctcctggcccatcttgagcctacttgcgccgccatggaagccgccgtacgcgctggcggtgcctgcttagtttattgtaagaatggtcggagccggtccgcagctgtgtgtacagcctacctgatgcgtcatcgtggactgagtttagccaaagcctttcaaatggtaaaatcagcccgaccggttgcggagcccaaccccggattttggagtcagctccagaaatatgaagaggcactccaagcacagtcatgcctccaaggggaaccacccgccttagggcttggtcctgaagcttag

SEQ ID NO: 30607 - DNA, 1555 bp, Artificial Sequence
  derived and/or modified sequence
tggtctatgaagaagtgatgaaaatagaaattagttttattttatgagccatgtgttataatacatagaaaaaaatgcaccaattacaaagcgggccacaaaaaggaataaacgtaaagccgacaacgcagtcactagggaaagggtgaagacacgggaaccacgcagcccgccgtccacgtgcaccgggtagccacggggccctagccgaacgacgcggacgcgaagtgggcgggcccggccaagccacgcctccgcgccagacgccgcagtagagcgggcagggcgctgcgcccaagagccacagacgcaagcccagtgccacaggccgcgggggcggggaggacggcgcccggggacagagaacatgggacgcagagcggtccaaggccccggcgccctggtgaggcccaaacctcccgccatgccccggccccaacgagacccaagccccctgtcccggcccagcgcccgcgggggacccaagccccagcctggtccacctcggaggcctctaggacccgggggcgcccggcggcccgcccggctcccacaaatagactcctgggcgggcgcctgagcccccaaaatagatcctcagggcccaaaagcagactcttcggcgggcgccatgggaccggcagaagctgggcgccgcggggccgcctcgcccgtacctccaccgttggtgcgcgtcgcgccctcactcttcctcgggagcgcgcgagccgcgggcgcggaggagcagctggcgcgcgcgggagtcacgctgtgcgtcaacgtctcccgccagcagcccggcccgcgcgcgcccggcgtggcagagctgcgcgtgcccgtgttcgacgacccggctgaggacctgctggcgcacctggagcccacgtgcgccgccatggaggccgcggtgcgcgccggcggcgcctgcctagtctactgcaagaacggccgcagccgctcggccgccgtctgcaccgcgtacctcatgcggcaccgcggcctcagcctggcgaaggccttccagatggtgaagagcgctcgcccggtagcagaaccgaacccgggcttctggtctcagctccagaagtatgaggaggccctccaggcccagtcctgcctgcagggagagcccccagccttagggttgggccctgaggcttgaagcttgaaggcctgctgcctggaggaaggatgtccctgcactgatacagaagctgtttctggcaaagcctgccgtgtcttacatttgtctctctatccggattagatgttgctatatgaacacatcgggactgtgtctgcaggaaggagctccccattcgaggccttcacagtgtcacccacattcacctctttccacttaaacgtgtcccatgaatcttgtcataacagttttgtgttccttaactattttgtctgccatgtcatttatgatgtatataacctctttaatgcctgaaatcataagaataatcatcaaaggcaagagggttgtatattttcccgttggagacacatctggaatttgctgcaataaaataataataagaaagca

SEQ ID NO: 30608 - DNA, 3461 bp, Artificial Sequence
  derived and/or modified sequence
acgcctccgcgccagacgccgcagtagagcgggcagggcgctgcgcccaagagccacagacgcaagcccagtgccacaggccgcgggggcggggaggacggcgcccggggacagagaacatgggacgcagagcggtccaaggccccggcgccctggtgaggcccaaacctcccgccatgccccggccccaacgagacccaagccccctgtcccggcccagcgcccgcgggggacccaagccccagcctggtccacctcggaggcctctaggacccgggggcgcccggcggcccgcccggctcccacaaatagactcctgggcgggcgcctgagcccccaaaatagatcctcagggcccaaaagcagactcttcggcgggcgccatgggaccggcagaagctgggcgccgcggggccgcctcgcccgtacctccaccgttggtgcgcgtcgcgccctcactcttcctcgggagcgcgcgagccgcgggcgcggaggagcagctggcgcgcgcgggagtcacgctgtgcgtcaacgtctcccgccagcagcccggcccgcgcgcgcccggcgtggcagagctgcgcgtgcccgtgttcgacgacccggctgaggacctgctggcgcacctggagcccacgtgcgccgccatggaggccgcggtgcgcgccggcggcgcctgcctagtctactgcaagaacggccgcagccgctcggccgccgtctgcaccgcgtacctcatgcggcaccgcggcctcagcctggcgaaggccttccagatggtgaagagcgctcgcccggtagcagaaccgaacccgggcttctggtctcagctccagaagtatgaggaggccctccaggcccagtcctgcctgcagggagagcccccagccttagggttgggccctgaggcttgaagcttgaaggcctgctgcctggaggaaggatgtccctgcactgatacagaaggctggtctttacccttcttcctcactgtcatatcgagttttcctttgtgtgtgtgtgtgtgaaacatagtgcttttaattttatatttccggctgaggtgatgcacaaattatcttacagacacaaaaagaaatacatttggtaaaacatcgaagacaaattaagaaaaagcaaatagggatcctccattatttacactccagaatcttgagtgtttgggggtgccggcgcattctaccagtctcagggaaggacatgagtacagactacagtaatcagaatctgagtcataggtgaaatcaggaaaagcaactcttcttgtgtttatttttagtagtgtcataagaacggactagttcttcctgcgtgaccacggatgcttctgtttgagaaaatgcatacccacgtgggacatttagatcaagaaagctgttgatgaagacattgttgaagggcaacttgggtgattggggaattattctcttcatcagcccctctgcaatacagctggagctgtcccataggagttcggacaattacggacatcctttttctttctctctttctttttttttgtttgtttgtttgagacagagtctctgttgcccaggctggagtgcagtggcgcaatcccggctcactgcaacctccgcctccctggttcaagtgattctcctgcctcagcctcctgagtagctgggactacaggtgtgtgacaccagacccggctaattttttgtatttttagtagagatggggggtttcaccatgttagccaggatggtctcaaactcctgacctcgtgatccacccacctcagcctcccaaagtgctgggattacaggcgtgagccaccgtgcccagcctcctttttctattactagagaactccaggacattaagaatttcaaaagtgattttttcacccatggcttctacggtgacagagtatggtgttcctgtagggaaacaaagccaagtttttttgctcctttcactaaagctgcttcatccggggaggaagcctggtagattataatatttccagggataacagtgtggcacacagataacagggtaagaaattggtctatatagttttctgtgggatggccattctcaatgttctccaataaactggggtaattaaaatatcagggctcggatggaaggtgttgcaccataaatgacacctgcagtggtacttgttaaatgtcttaacattgcaagtgagggttcccattttatcagaaaatagaaattttacctgcccaagttcttcactgagattgaatgtgctggccatggtgtggacactatttactttataatgcacatcttgatcccagtttataaactgggcctgaatatatttcacaatttccatagtgaccagcagactaatggggatgaggtactgttataagatgatgaacaccagtatgtcaaacacaatgctgtgagctggaatcctctttcaggtaccaaatgtcaccatactttttattccatagcacggctcccacgcagctcactacagacatgaccagagcagcaggaaccaaagggagacccgcccattgtcactttcttaatctctgatctcttgaggtgatttgacagaattctgcaggaatttggtttcaaagccagtgtaaacaactatgccagtgatccactgagcatttcttttttttttttcttgagacggagtctcactctggtgcccaggctggagtgggcgccatcttggctcactgcaagctccgcctcccggcttcatgccattctcgtccttcagcctcctgagtggctgggattacaggcgcccgccaccacgcctagctaatttctttgtatttttggtagagacggggtttcactgtgttagccaggatggtctcaatctcctgacctcatgatcctcccgcctcggcctcccaaagcgctgggattacaggcgtgagccacctcgcccggccaatccactgagcatttctaagctgtgtatctcttaacaagacccagtcaggccctattggaacagggcttttaccacctaggcggaagctcagccattgaaatgacgatcaggtgcttcacggtctatttttccagataggcctaacagctggttttctgtttgcatttcagctgtttctggcaaagcctgccgtgtcttacatttgtctctctatccggattagatgttgctatatgaacacatcgggactgtgtctgcaggaaggagctccccattcgaggccttcacagtgtcacccacattcacctctttccacttaaacgtgtcccatgaatcttgtcataacagttttgtgttccttaactattttgtctgccatgtcatttatgatgtatataacctctttaatgcctgaaatcataagaataatcatcaaaggcaagagggttgtatattttcccgttggagacacatctggaatttgctgcaataaaataataataagaaagca

SEQ ID NO: 30609 - DNA, 531 bp, Artificial Sequence
  derived and/or modified sequence
atgggccctgctgaggccggcagaagaggagctgccagccctgtgcccccacccctggtgcgggtggcccccagcctcttcctgggcagcgcccgggccgccggggctgaggagcagctggcccgggccggcgtgaccctgtgtgtgaatgtgtcccggcagcagcccggcccccgggcccctggggtggccgagctgcgggtgcctgtgtttgatgatcctgctgaggacctgctggcccacctggagcccacctgtgccgccatggaggccgctgtgcgggccggcggggcctgcctggtgtactgcaagaatggccgcagccgctctgctgctgtgtgcacagcctacctgatgaggcaccggggcctgagcctggccaaggccttccagatggtgaagagcgcccggcctgtggccgagcccaaccctggcttctggagccagctgcagaagtatgaggaggccctgcaggcccagagctgcctgcagggcgagcccccagccctgggcctgggccctgaggcctag

SEQ ID NO: 30610 - DNA, 531 bp, Artificial Sequence
  derived and/or modified sequence
atgggccccgccgaggccggccggcggggcgccgccagccccgtgccccccccgttggtgcgtgttgctccaagcctgttcctgggcagcgctcgcgctgcaggagctgaggagcagctggctagagcaggggtgactctgtgtgtcaatgtcagcaggcagcaacctggtccccgcgcccccggagtcgccgaactcagagtgcctgtttttgacgaccctgcagaggatcttctcgctcatctcgagcccacatgtgcagcaatggaggccgcagtgcgagctggaggggcttgccttgtttattgcaagaacggcagatcccgtagcgccgcagtctgtactgcctatctaatgcgtcatagaggattgagcttggcgaaggccttccagatggtgaaatcagcacgacctgtagccgaaccaaatccaggattctggagtcagttgcaaaagtatgaggaggctctgcaggcccagagttgtctacagggagagccccccgcattaggcctggggccagaggcctag

SEQ ID NO: 30611 - DNA, 531 bp, Artificial Sequence
  derived and/or modified sequence
atgggccccgccgaggccggccggcggggcgccgccagccccgtgcctcctccactggtgcgagtcgccccctctctgttcctgggatctgctcgggctgctggggctgaagagcaattggcccgcgcaggcgttacactttgtgtgaacgttagccggcagcagccagggccgagagccccgggagtggcggaactgcgcgtgcccgttttcgacgaccccgccgaggacctgctggcccatttggaacccacttgtgccgccatggaagctgctgtacgagccggaggcgcctgcttggtatactgtaaaaacggacggtcaaggtcagcagcagtgtgtactgcctatctgatgcgccaccgaggtctcagcctcgccaaggcatttcagatggtaaagtctgcgcggccagttgccgagcccaatcccggcttttggtcccagctccagaaatatgaggaagctctgcaggcccagtcctgtctgcagggggaaccaccagctctcgggttaggccctgaagcatag

SEQ ID NO: 30612 - DNA, 531 bp, Artificial Sequence
  derived and/or modified sequence
atgggcccagccgaagcagggcgtagaggcgcagcttcccccgtcccaccaccactcgtacgggttgctccatccctttttctcggatctgcgcgagccgctggcgcagaagagcagctagctcgggctggagtcactctatgcgtcaacgtttcccgccaacaacccggacctcgggcacctggggttgctgaactccgcgtccctgtatttgacgacccagctgaagatctgttggcccacctagagccgacatgcgctgccatggaagcggcagtgagggctggcggagcctgtctggtctattgcaagaatggtaggagtcggtcagccgctgtttgcactgcctatcttatgaggcatcgcggactgagtttagccaaggccttccaaatggtgaaatccgctaggccggtggccgaacccaatcctggtttctggagccagctccagaagtacgaagaggccctgcaggcccaaagctgtctccagggagaaccccctgctttgggattagggccagaggcttag

SEQ ID NO: 30613 - DNA, 531 bp, Artificial Sequence
  derived and/or modified sequence
atggggcctgccgaagctggacgcagaggtgcagctagtccagttccccctccactcgtccgtgtcgctccttccctgtttctcgggtccgctagagccgcaggagccgaagaacagcttgcccgtgccggtgttaccctgtgtgtaaacgtgtcccgtcagcaaccaggccctcgtgctcccggtgtggccgagctgagggtaccagtgtttgatgatccagcagaagacctgttagcacacttagagcccacttgtgcagccatggaggctgccgtaagagctggaggcgcatgtcttgtgtactgcaagaacgggagatccagatccgcggcagtatgtaccgcctatctgatgcggcacagaggcctaagccttgccaaggcgttccagatggttaagtcggcccgacccgtggccgaaccaaatcccggattttggagtcaactccaaaagtatgaagaagcactgcaggctcagtcatgtctacagggggagccacctgcccttgggctgggccctgaggcctag

SEQ ID NO: 30614 - protein, 496 aa, Artificial Sequence
  derived and/or modified sequence
MQRDHTMDYKESCPSVSIPSSDEHREKKKRFTVYKVLVSVGRSEWFVFRRYAEFDKLYNTLKKQFPAMALKIPAKRIFGDNFDPDFIKQRRAGLNEFIQNLVRYPELYNHPDVRAFLQMDSPKHQSDPSEDEDERSSQKLHSTSQNINLGPSGNPHAKPTDFDFLKVIGKGSFGKVLLAKRKLDGKFYAVKVLQKKIVLNRKEQKHIMAERNVLLKNVKHPFLVGLHYSFQTTEKLYFVLDFVNGGELFFHLQRERSFPEHRARFYAAEIASALGYLHSIKIVYRDLKPENILLDSVGHVVLTDFGLCKEGIAISDTTTTFCGTPEYLAPEVIRKQPYDNTVDWWCLGAVLYEMLYGLPPFYCRDVAEMYDNILHKPLSLRPGVSLTAWSILEELLEKDRQNRLGAKEDFLEIQNHPFFESLSWADLVQKKIPPPFNPNVAGPDDIRNFDTAFTEETVPYSVCVSSDYSIVNASVLEADDAFVGFSYAPPSEDLFL

SEQ ID NO: 30615 - DNA, 1491 bp, Artificial Sequence
  derived and/or modified sequence
atgcagagggatcatacgatggactataaagaatcctgtccctcagtgagtatcccgagcagtgatgaacaccgggaaaaaaagaaacggttcaccgtgtataaggtgctcgtcagcgtgggccgctcggagtggtttgtcttcaggaggtacgctgaattcgataagctgtacaacacactgaagaagcagtttcctgcaatggccctgaagatccctgcaaaacgcatattcggggataatttcgatcctgatttcattaagcaacgccgggcaggcctgaatgagttcatacagaaccttgtaagatatcctgaactctataaccatcctgacgttagagccttcctgcagatggacagtcctaagcatcaatctgacccttcagaggatgaggatgagaggtccagtcagaaactgcattctacatcgcagaatattaacctaggtccatccggtaatcctcatgcaaaacctaccgactttgatttcctcaaagtgatcggtaaggggtcctttggcaaggtcttactggctaagagaaaattggatggaaaattctacgcggtgaaggtgctgcagaaaaaaattgtgcttaacaggaaggaacagaaacatattatggccgagaggaatgtgttgctgaagaatgtgaaacaccctttccttgtgggcctgcattattccttccagactactgaaaagttatacttcgttctagactttgttaatgggggagaactctttttccatctccagagagagagaagtttccccgaacaccgcgcgaggttttacgctgccgagatcgcctctgccctcggatacttgcactcaattaaaatcgtgtatcgagatctgaaaccagaaaatattctgctggactcggtggggcacgtagttctaaccgattttggcttatgcaaggagggcatcgccatcagcgacaccactactaccttctgcggaaccccagagtatctcgctccagaggtgatccgcaagcaaccttacgataacacggtggattggtggtgtctcggtgctgtgctgtacgaaatgttatatggtctgccccctttttattgccgtgatgtggcagagatgtatgataatatactccacaaacctctgtccttacgacccggggtctccttaacggcgtggtcgattctggaggagctgttggagaaggataggcaaaatcgtttgggcgccaaggaggatttcctcgagattcagaaccaccctttttttgagtccctgtcttgggcggatctcgtccagaaaaaaattccgcctccttttaaccccaacgtcgcgggcccggacgacatcagaaattttgacaccgcattcaccgaggaaaccgtaccgtacagtgtctgcgtgagtagcgattacagcatcgtcaatgcctccgtgctggaggctgatgatgcttttgtggggttttcatacgcccccccttcggaagatcttttcctctag

SEQ ID NO: 30616 - DNA, 1491 bp, Artificial Sequence
  derived and/or modified sequence
atgcagagggatcacacaatggattataaggaatcatgtccttcagtcagcatcccgtcttcagacgaacatagggagaagaagaagcgcttcactgtttataaggttctggtttccgtcggaaggtcagagtggttcgttttccggaggtacgctgagttcgataagttatacaacacactgaaaaagcaatttcccgccatggccctgaaaattcctgcaaaacgtatctttggcgacaacttcgacccagatttcatcaagcagagacgggcaggtctaaacgaattcatccagaacttagtacggtatcctgagttgtacaaccacccggacgtcagggccttcctgcagatggactccccgaaacaccaatctgatccgagcgaagacgaagacgagagatcatctcagaaactccacagcacttcgcagaacattaaccttggaccttctggaaacccacacgctaagccgacagacttcgattttctgaaagttatcgggaaaggctcctttggaaaagtgctgctcgctaaacggaaactcgatgggaagttctacgctgtcaaggtcctccagaagaagatcgtgttaaatcggaaggagcagaaacatataatggccgagaggaacgttcttctgaaaaacgtgaaacatccctttttggtgggcctgcactattcatttcagacgaccgaaaaactctacttcgttctggactttgttaacggtggtgagcttttcttccacctgcagagggaaagaagcttccccgaacaccgcgctaggttctatgcggcagaaattgcttctgccttgggataccttcattccattaaaatcgtctatcgggacctgaagccagagaatatcctgttagactcagttgggcacgtcgtgcttacagatttcggtctgtgcaaggagggtatcgcaatctccgacacaaccaccacattttgcggcacccctgagtacctggcacctgaggtaatcaggaaacagccctatgacaacacggtcgactggtggtgtctgggggcagtcctgtatgagatgctttacggcttaccaccattctactgcagagacgtggccgagatgtacgataacatcttgcacaaaccactgagtctgaggcctggtgtgtcgctcacagcctggtccatcctagaagagctgcttgagaaggatcggcaaaaccggctgggagctaaagaagattttctagagatccagaaccatcccttttttgagtcattgtcatgggccgaccttgttcagaagaagatccctccgcctttcaatcctaatgtagcaggccctgacgatatccgcaacttcgacaccgcctttacggaagaaacggtgccctacagcgtctgcgtttcttcagactatagcatagtgaacgccagcgtactcgaggctgatgatgccttcgttggattttcctatgctccaccttccgaagatctgttcctttag

SEQ ID NO: 30617 - DNA, 1491 bp, Artificial Sequence
  derived and/or modified sequence
atgcaaagggatcatacaatggactacaaagagtcgtgccccagtgtctcaattccaagcagcgatgagcacagagagaagaagaaacgtttcactgtatacaaagtgctcgtatcagttggcagaagtgagtggtttgtgtttaggcgctacgcggagttcgataaattatacaacacactcaaaaagcagttccccgcgatggccctgaaaatccctgccaagagaattttcggagacaattttgatcccgacttcatcaagcagaggagggctgggctgaatgaatttatccagaacctggtcagatatcctgagttatacaaccatccagacgtgagagccttccttcagatggactcaccaaagcatcaaagcgacccttccgaggatgaagatgaacgcagcagccagaagctccacagtaccagccagaatattaatctcggcccgagcggaaatcctcacgctaagcccacagacttcgatttcctcaaggttatcggcaaggggagcttcggcaaggtattgttagcgaagagaaagctggacgggaagttttacgcagtcaaggtgctacagaagaagattgtcctgaacaggaaggaacagaagcacattatggccgaaagaaacgtgctgctgaaaaacgtgaagcatcctttcctggtaggccttcattatagtttccaaacaacggagaagttgtatttcgtactggattttgtaaatgggggagagttattctttcacttacagagagaacggtctttccccgagcatcgcgcccgtttttatgctgcggagattgcaagtgctcttgggtacctgcattccatcaaaattgtatacagggacctaaaaccagagaatattctgctggactcagttggccacgtggtgttgacagacttcgggctgtgtaaagagggcatcgccatatccgacaccaccaccacattttgtggcacgccagagtacctagctccggaggtgatacggaagcagccatatgataacacagtagattggtggtgcttaggcgctgtgctgtatgaaatgctctacggcctcccccctttctactgtcgggatgtggctgaaatgtatgacaatatcctgcataaacctctgtccctcagaccaggggtgagccttactgcttggtcaatactcgaggagctactggagaaagaccgacaaaatagattgggggccaaggaggattttctggaaatccaaaaccacccattcttcgaaagtctctcatgggctgatttggtgcagaagaagattccaccccctttcaatcccaatgtcgccggcccagacgacatcagaaacttcgacaccgcatttaccgaggagacagtgccgtacagtgtgtgtgtgtcctccgactactcaatagtgaacgcctcggtactggaagccgatgatgctttcgtcggattctcttatgcccctccaagtgaggatctctttctttag

SEQ ID NO: 30618 - DNA, 1491 bp, Artificial Sequence
  derived and/or modified sequence
atgcagcgggatcacacaatggactataaggagtcctgccctagcgtgtccatcccctccagcgacgagcaccgggaaaaaaagaagcgctttacggtatataaggtcctagtgtctgtcgggcgcagtgagtggttcgttttcagaagatatgctgaattcgacaagctgtacaacactctgaagaaacaatttcccgcaatggctcttaaaatccccgctaagagaatctttggcgataacttcgatcccgacttcatcaaacaacggcgcgccggtcttaacgagtttattcaaaatttagttaggtatcccgagctgtacaatcacccagatgttagggctttcctccagatggattcccccaagcatcaaagtgaccctagtgaggatgaggatgagcgaagctcgcagaaactgcactccacgagccaaaacatcaacctgggcccctcaggaaacccacatgccaaacctaccgacttcgactttcttaaggtgataggaaaaggctcctttgggaaggtactcctggctaagcgcaagctcgatggcaagttctatgccgttaaggtgctccagaagaagatcgttttgaacaggaaggagcagaagcatatcatggcggagcgtaatgtcctgctgaagaatgtaaagcacccctttctcgtgggcttgcactactcattccaaaccaccgagaaactctatttcgtactggattttgtgaatgggggggagttattctttcacttgcagcgggagcgttcttttccggaacaccgggctagattttatgctgccgagatcgcttcggctctgggctacctgcactcaatcaagattgtctaccgcgatctgaaaccagaaaatatactattagatagcgtagggcacgttgttctcacagatttcggcctctgcaaagaaggaatcgctatctccgacaccaccaccacgttctgcgggaccccggagtatctggcccccgaggtgatccgtaaacagccttacgacaacacagttgattggtggtgcttgggtgcggtgctgtacgagatgctgtatgggcttccgccattctattgcagggatgtagcggaaatgtacgacaacattctgcataaaccactttcactcaggcctggcgtctccttgacagcctggtcgatcctggaggaactgttggaaaaagatcggcagaatcgactgggtgctaaagaagattttctggagatccaaaaccaccccttcttcgaatcattaagctgggcagacctcgtgcaaaagaagataccaccgccattcaatccaaatgttgccggccccgatgacatacggaatttcgataccgcattcacagaagagaccgtgccttacagtgtgtgcgtgtcttctgattactctatagtgaatgcttccgtcttggaggccgacgacgcttttgtgggattttcatacgccccgccaagcgaggacctcttcctctag

SEQ ID NO: 30619 - DNA, 1491 bp, Artificial Sequence
  derived and/or modified sequence
atgcagagagaccacaccatggactataaggaatcttgccccagcgtctccatcccttcgtctgatgagcatagagaaaagaaaaagcgcttcactgtttacaaagtgctggtaagcgtgggccgctctgagtggttcgtatttaggagatatgccgaatttgataaactttataacactctgaagaaacagtttcctgccatggccctcaaaattccagcaaagcggatctttggcgataacttcgaccctgacttcattaagcagcgaagggctggcctgaacgagtttattcagaacttggtgcgctaccctgaactgtacaaccacccggatgtgcgcgcatttctccagatggactcccccaagcatcagagtgatccttccgaggatgaagatgagcgatctagccagaagctgcactcgacatcacagaacattaacctgggtccaagcgggaaccctcacgccaaacccaccgattttgatttcctgaaggttatcggcaaagggagtttcggcaaagtgttgctcgcgaaaagaaaactggacggtaaattctacgccgtgaaagtattgcagaaaaagatcgtcctgaaccgtaaggagcagaaacacattatggccgaaagaaacgtgttgcttaagaatgtgaaacatcccttcctggttggtctccactactcattccaaacaaccgagaagctatattttgtcttagactttgtcaacggcggtgagctctttttccatttgcagcgcgagcggtccttccctgagcacagggcccggttctacgccgcagaaatcgcaagtgcactgggctatttgcacagcatcaagatcgtctacagagacttgaagcctgaaaacatcttgttggatagcgtcgggcacgttgttctaaccgatttcggcctgtgcaaggaagggattgcaatctctgacaccaccacaaccttctgcgggactccggagtatttagcacctgaggtgatcagaaagcagccctacgacaatacagtggactggtggtgtcttggggccgtgctatacgagatgctgtatggcttaccccctttctactgccgggacgtcgcggagatgtacgataacatcctgcacaagcctctctcacttcgccccggagtctctctcaccgcgtggtcaatcctggaggagctgctggaaaaggacagacagaaccggctgggagccaaggaagacttcctggagatccaaaaccacccattctttgagtctcttagctgggctgatctggtgcaaaagaagataccaccgccctttaatcccaacgtagccgggccggacgatatcaggaactttgacaccgccttcacagaggaaacagtgccttatagtgtgtgtgtctcatcagactatagcatcgttaacgcgtccgtgctggaagccgatgacgcctttgtggggttttcatatgcacccccctccgaagatctctttctgtag

SEQ ID NO: 30620 - DNA, 1491 bp, Artificial Sequence
  derived and/or modified sequence
atgcagcgggatcatacaatggactataaagaaagctgtccaagcgtgtcaataccgtcctcagatgagcaccgggagaagaagaagcgatttaccgtgtataaggttttagtctccgtcgggagatcggaatggttcgtgttcaggcggtatgccgagtttgacaaattgtataacacacttaagaaacagtttcccgctatggcattaaaaattccagccaagaggatctttggagataatttcgatcctgattttataaaacaacgcagggcagggctgaacgagtttattcagaatctggttaggtatccggaactctacaatcatccggatgtcagggcctttctccagatggacagccccaaacaccagtctgatcctagcgaagatgaggacgaaagatcctcccagaaactacacagcacaagccagaacattaatcttggccccagcggaaatccacacgccaagccaaccgattttgattttctgaaggttataggtaaaggctctttcggaaaggtgttgcttgctaaacgcaagcttgatggcaagttttatgctgtcaaggtgctccaaaagaagattgtattaaatcgcaaggagcagaaacatattatggcagaaaggaatgttctattaaagaacgtaaagcacccattcctcgtgggactgcactactccttccagaccaccgaaaaactttacttcgtactcgacttcgtcaacggtggtgagctgtttttccacttgcaaagagagcggagctttcccgaacaccgagcccggttctacgccgctgaaatcgcaagtgccctggggtacctgcactcaatcaagattgtctacagagacttgaagcccgagaatatcctgctggatagcgtggggcacgtcgtcctgactgactttggtctctgcaaagagggcatcgccatctccgacactaccacgaccttttgtgggaccccagagtatcttgcgccagaggtgattcgaaagcaaccctacgacaacacagtcgattggtggtgtctcggagccgtactgtatgagatgctgtatggtctgcctcctttctactgcagggacgtggcagagatgtatgataacatcctgcataagcctctgagtctgagaccaggggtttccctgaccgcgtggtccatactggaggagctattggaaaaagacaggcagaacagacttggagccaaggaggactttctcgaaatccagaatcacccattcttcgagtccctgtcatgggcagacctcgtgcagaagaaaattccccccccttttaatccgaatgtcgctggtcctgacgatattcggaacttcgacacagcattcacggaggaaacagttccctactccgtctgcgtgtcgtccgactacagcattgtcaatgcttccgtactggaagccgatgacgcgtttgtcggattcagctatgcgcccccgagcgaggatcttttcctgtag

SEQ ID NO: 30621 - DNA, 1491 bp, Artificial Sequence
  derived and/or modified sequence
atgcagagggaccacaccatggactacaaggagagctgccccagcgtgtccatccccagcagtgatgagcaccgggagaagaagaagcgcttcaccgtgtacaaggtgctggtgtctgtgggccgctctgagtggtttgtgttcagaagatatgcagagtttgacaagctgtacaacaccctgaagaagcagtttcctgccatggccctgaagatcccagccaagaggatctttggagacaactttgatcctgacttcatcaagcagaggcgggccggcctgaatgagttcatccagaacctggtgcgctacccagagctgtacaaccacccagatgtgcgggccttcctgcagatggacagccccaagcaccagagcgaccccagtgaagatgaagatgagaggagcagccagaagctgcacagcaccagccagaacatcaacctgggccccagcggcaacccccacgccaagcccacagactttgacttcctgaaggtgattggcaagggcagctttgggaaggtgctgctggccaagaggaagctggatggcaagttctatgctgtgaaggtgctgcagaagaagatcgtgctgaacaggaaggagcagaagcacatcatggccgagagaaatgtgctgctgaagaatgtgaagcaccccttcctggtgggcctgcactacagcttccagaccacagagaagctgtactttgtgctggactttgtgaatggaggagagctgttcttccacctgcagcgggagaggagcttccctgagcaccgggcccgcttctatgctgctgagatcgccagcgccctgggctacctgcacagcatcaagatcgtgtacagagacctgaagccagagaacatcctgctggacagcgtgggccacgtggtgctgacagactttggcctgtgcaaggagggcatcgccatcagtgacaccaccaccaccttctgtggcaccccagagtacctggcccctgaggtgatcaggaagcagccctatgacaacacagtggactggtggtgcctgggcgctgtgctgtatgagatgctgtatggcctgccccccttctactgcagagatgtggccgagatgtatgacaacatcctgcacaagcccctgagcctgcggcctggggtgtccctgacagcctggagcatcctggaggagctgctggagaaggaccggcagaaccggctgggcgccaaggaggacttcctggagatccagaaccaccccttctttgagagcctgtcctgggccgacctggtgcagaagaagatccccccacccttcaaccccaacgtggccggcccagatgacatccggaactttgacacagccttcacagaggagaccgtgccctacagcgtgtgtgtgtccagtgactacagcatcgtgaatgcctctgtgctggaggctgatgatgcctttgtgggcttctcctatgcccctccttctgaggacctcttcctgtag

SEQ ID NO: 30622 - DNA, 1491 bp, Artificial Sequence
  derived and/or modified sequence
atgcagcgggaccacaccatggactacaaggagagctgccccagcgtgtctattcccagttcagacgagcaccgcgaaaaaaaaaagagatttactgtttacaaagtattagtcagtgtgggtagaagcgaatggtttgtgttcagacgctacgctgagtttgacaaactgtataacactctcaagaaacagttcccagcaatggcactgaagatccctgcaaagaggattttcggagataacttcgatccagacttcataaagcagaggagggctgggcttaatgagttcatacaaaacctcgtgcggtatcctgaactgtacaatcacccagacgtgcgggccttcttgcagatggactcccccaaacaccaatcggatccgtccgaggacgaggacgagagaagctcccagaagcttcactctacttcacagaacattaatctcggaccctcagggaatcctcacgcgaagcccaccgattttgacttcctgaaagtgatcggtaagggcagcttcggaaaggtgctcctggctaagaggaagctggacggtaaattctacgcggtgaaggttttgcagaagaagatagtgttaaaccgcaaagagcagaagcatataatggcggagaggaatgtgctgctgaagaacgttaaacaccccttcctcgtcggcttgcactacagcttccagactacggagaagctgtatttcgtcttagacttcgtgaatggaggcgagctcttttttcacctgcaaagggagcggagcttccccgagcaccgggcacggttttacgcagcagaaatagcttctgcgcttggctacctccactctatcaagattgtctacagggacctgaaacccgagaacatcctgctggactccgtgggccatgtcgtgctaaccgattttggcctctgtaaagagggtatcgcgatcagcgataccactactactttttgcgggactccggaataccttgcacccgaagtcattcgcaagcagccatatgataataccgtggattggtggtgtctgggggctgtgctttacgagatgttgtacggcctaccccccttctactgtagggacgtagccgaaatgtatgataatatcctccataaacctctctctctgaggcctggtgtgagcttaactgcgtggagtatcttagaggagctgctggagaaggaccgccagaaccgtcttggcgcaaaagaagactttctggagatccagaaccacccttttttcgaaagtctgtcgtgggctgatctagttcagaaaaaaatccctcctcctttcaatccaaatgtcgccggccccgatgacatccggaacttcgatacagccttcactgaagaaaccgtgccgtactccgtgtgcgtgagttcagattactctattgttaatgcttccgtcctggaagctgatgatgcgtttgtgggtttctcttatgcccccccatctgaagacctgttcttgtag

SEQ ID NO: 30623 - DNA, 1491 bp, Artificial Sequence
  derived and/or modified sequence
atgcagcgggaccacaccatggactacaaggagagctgccccagcgtcagcattccgtcttcagacgagcacagagagaaaaaaaaaaggttcaccgtgtataaagtcctggtgtcagtcgggagatctgaatggttcgtgtttcgtcgctatgccgagtttgataagttgtacaacacgcttaaaaagcagttcccagctatggcactcaaaattcccgctaagagaatcttcggtgataactttgaccctgacttcattaagcaacgcagggccggtttgaatgaattcattcaaaatctggtccgatacccggagctatacaaccaccctgacgtgcgcgccttcctccaaatggattcccccaagcatcaatcagacccctcagaagatgaggacgagcggtcatctcagaaactgcactctacttcccagaatattaacctgggtccaagcggcaatcctcacgctaagcccacagactttgacttcctgaaggtcatcggaaaggggtcttttggcaaagtgctactggcaaagagaaagctggatggaaaattttacgcggttaaagtgctgcagaaaaaaatcgtcctgaaccgcaaagaacagaaacatatcatggccgagcggaatgtgttgctcaaaaatgtgaagcacccgttccttgtcggacttcattatagcttccaaactaccgaaaagctctattttgtcctggacttcgttaatgggggtgaactttttttccacctgcagcgtgagagaagctttccggaacaccgggctaggttctacgccgccgaaatagccagtgctctggggtacctgcattccattaagatcgtttacagagatctgaaaccagaaaacatcttattggatagtgtcggccacgtcgtgttgacggactttggactgtgcaaagaagggattgccatctctgataccacaaccacgttctgcggtacccctgagtacctggcccccgaagtaattcgaaagcagccgtatgataataccgttgattggtggtgtcttggggctgtattgtacgagatgctgtacgggttgcctcccttctattgtagagatgtggctgaaatgtatgataacattctgcataagccgctgagcctcagaccaggcgtgagcctgacagcctggtccattctcgaggaactgctggagaaggaccgtcagaacagactgggggccaaagaagattttctggagatccaaaatcacccatttttcgaaagcctttcctgggccgacctggtacagaaaaagatcccccctccattcaatcctaacgtcgccggaccagacgacattcgcaactttgacaccgccttcactgaggagacggtaccctactccgtgtgtgtatcatccgactacagtatcgtaaatgcttctgttctcgaagcggatgacgctttcgtgggcttctcctatgctcctcctagtgaagacctgttcctgtag

SEQ ID NO: 30624 - DNA, 1491 bp, Artificial Sequence
  derived and/or modified sequence
atgcagcgggaccacaccatggactacaaggagagctgccccagcgtatcaatcccttcgtcggacgagcatcgcgaaaaaaaaaaaagatttacggtttataaggtgctggtgtcagtgggccgttccgaatggttcgttttcaggcggtacgccgagttcgataaattgtataacactctgaagaagcagtttcccgccatggctctaaagattccggcaaaacgcattttcggagataattttgacccagacttcattaagcaacgcagagcaggtcttaacgagtttattcaaaatttagtgcgctacccagagctttataatcacccggatgtaagagcatttctccaaatggatagcccaaagcaccagtctgacccgtccgaggacgaagatgagcggtccagccagaagctccactctaccagtcagaatatcaatctgggaccgtctggcaatccacatgctaagcctactgacttcgacttcttgaaggttattggcaaggggagctttggcaaagtcctactggcgaagagaaagcttgatgggaaattctacgccgtgaaggtgctgcaaaaaaaaatcgtgttaaatcgcaaagagcagaagcacataatggctgaaagaaacgtcctgctcaaaaatgttaagcacccgtttctggtgggactgcactattcctttcagaccactgagaagttgtactttgtgttggattttgttaatgggggggaactttttttccatctccagagagagagaagttttcccgaacaccgagctagattttacgctgctgagatcgcctccgcgctggggtatctgcatagcattaagattgtctaccgggatctcaagcctgagaatatcttacttgactccgtgggccacgtagttttgaccgattttggtctgtgtaaagaaggaatagctatttcggataccaccacaactttttgtggcactcctgaatacctcgcgcctgaggtgatccgtaaacagccgtatgacaacaccgtagactggtggtgtctgggtgcagtgctgtacgagatgttatacggcttaccccccttctactgcagggatgtcgcagagatgtacgataacatactgcataaacccctgtctctgcgtccaggagttagcctgactgcctggtccatcctggaggaacttcttgagaaggatcgacaaaaccgcttgggggcaaaagaggatttcctcgagatacagaaccatccctttttcgagtcgctttcttgggccgatcttgtccagaagaagatcccgcctccatttaaccccaatgtggctgggcccgatgatatcagaaactttgatactgcctttaccgaggagaccgtcccctattcagtgtgtgtgtcatctgattactccattgtgaatgcttccgtgttagaggctgacgacgccttcgtaggattctcatacgctcccccgtccgaagacctctttttatag

SEQ ID NO: 30625 - DNA, 1491 bp, Artificial Sequence
  derived and/or modified sequence
atgcagcgggaccacaccatggactacaaggagagctgccccagcgtgtctatcccctcttcagacgagcaccgggagaagaagaagcggttcaccgtatacaaggtgctcgttagcgtgggacgtagcgaatggtttgtgtttcggcgatatgccgagttcgataagttatataatacactgaaaaaacagtttccagccatggctctaaaaatccccgctaaaaggatttttggggacaatttcgatccagattttattaaacagcggagggctggcctaaacgagttcatccaaaaccttgttcgctatccagagctgtataatcaccccgatgtgcgagcctttctccagatggactcccctaagcaccagagtgaccccagcgaggacgaagatgagcgctcttctcagaagctgcattcaacaagtcagaatattaacctcggcccgagcggcaacccgcacgccaaaccaactgacttcgatttcctaaaagtcattggtaagggatcatttggaaaggtgctgctggctaagcgtaagctggatggcaagttctatgctgtgaaggtgctgcaaaagaagatcgtcctgaataggaaggaacagaagcacattatggcagaaagaaacgtcctgctgaagaacgtgaaacatcccttcttagtgggtctgcactattcctttcagacaactgagaaactgtacttcgtcttagatttcgtaaatggtggtgagctgttcttccacttgcagagagagcgttcgtttcccgaacatagggctcgcttctacgctgctgaaatcgcgagtgctctgggatacctacactccatcaagatcgtctaccgagacctgaagcccgaaaatattttactggattccgtgggccacgtagttctcactgacttcggtctctgtaaggagggaatcgctatcagtgataccacaaccactttttgtggcacacccgagtacctggcacctgaagtcatcaggaaacaaccatatgacaacaccgtggactggtggtgcctcggcgctgtcctgtacgaaatgttatatggcctgccccccttctactgtcgagatgttgccgaaatgtacgacaacatccttcacaaaccgctctctttaagacctggtgtctccctgacagcctggtctattctcgaggagctgcttgagaaggatcgacagaaccgcttgggtgccaaggaggatttcctcgagattcagaatcaccccttcttcgagtcgctcagctgggccgacctggttcagaaaaaaattccaccgccctttaaccccaatgtggcaggtccagacgatataagaaatttcgacacagccttcacagaagaaaccgtgccctatagcgtgtgtgtgagcagcgattacagcatcgtgaatgcaagcgttttggaagcagatgatgctttcgtgggcttctcttatgctcccccctccgaagacctgttcctgtag

SEQ ID NO: 30626 - DNA, 1491 bp, Artificial Sequence
  derived and/or modified sequence
atgcagcgggaccacaccatggactacaaggagagctgccccagcgtttccataccatcatccgacgagcaccgcgagaaaaaaaagcgcttcaccgtgtacaaggtgttggtctctgtgggacgctctgaatggttcgtctttcgccgttacgctgagtttgacaagctttataataccctaaaaaagcagttccccgccatggcgctcaaaattccagctaaaaggatctttggggacaattttgatcccgactttattaaacagagacgagcaggcctgaacgagtttattcaaaacctcgtcaggtaccccgagctctataaccatcctgatgtacgagccttcctgcaaatggattctcctaagcatcagtcagacccatctgaggatgaagatgaaaggagctctcaaaagctgcattctacaagtcagaacatcaacctgggtccctccggcaacccccacgccaaacctacagatttcgatttcctcaaagtaattggcaaaggatcttttgggaaagttcttctcgctaaacgaaaattagacgggaagttctacgccgtgaaggttttgcagaaaaaaattgtgctgaataggaaggagcaaaagcacatcatggccgaaagaaacgtcctcttgaaaaacgttaaacacccatttctggtcggtctccactactcattccagactacagagaaactatacttcgtgctggacttcgtgaacggaggcgaactttttttccacctgcagcgagagcgttcctttccagagcaccgcgcccggttctacgccgcagagatcgcaagcgccctgggctatttgcatagtattaagatcgtttatagggacctgaaacccgaaaacatcctgttagattctgtcggccacgtggtgctgactgattttgggctctgtaaggaagggatagcaatcagtgacactacaacaacgttttgtgggacccccgagtacctggctcccgaggtcattcgcaagcagccctacgacaatactgtagactggtggtgcctgggcgccgtgttgtatgaaatgctgtatggccttccccctttttactgccgggatgtggcggagatgtacgacaatatactgcataagccactgagtttgagaccaggcgtgtctctcaccgcgtggtccatactggaagaacttctggagaaggaccggcagaatagactgggagctaaggaggactttctggagatccagaatcatccattttttgaatcattaagttgggccgatctcgtgcagaaaaaaatacccccccccttcaacccaaacgtggccggaccagacgatattcgaaatttcgacacggccttcacagaagaaacagtgccgtactcagtgtgtgtttcatctgattattcaattgtgaatgcatctgtgctggaggcggatgacgcttttgttggattttcttacgcaccaccctccgaagacctttttctctag

SEQ ID NO: 30627 - DNA, 1491 bp, Artificial Sequence
  derived and/or modified sequence
atgcagcgggaccacaccatggactacaaggagagctgccccagcgtctcaatcccctcctccgacgagcatagggaaaagaaaaagaggtttaccgtgtacaaggtgttggtgtcagtgggcagatcggagtggtttgttttccggcggtatgctgagttcgacaaactatataataccctgaaaaagcagttccccgcaatggccctcaagatccctgcaaaaaggatcttcggcgataacttcgaccctgacttcattaagcagaggcgcgcgggcctgaatgaattcattcagaatctggtccgctatccagagctctacaatcatcccgacgtgagggcgttcttgcaaatggactcaccaaagcaccagtccgatccctctgaggacgaggatgagagatctagccagaaactccactcaacttcccaaaatattaacctgggcccatcggggaatccacatgctaaaccaaccgacttcgactttttgaaggtaattggaaaaggatcattcggtaaagtgctactcgccaagaggaagctcgatgggaagttctacgccgtaaaggtcttgcagaaaaagattgtcctgaaccggaaggagcagaagcacataatggccgagcgcaacgtgttgttaaaaaacgtgaaacacccttttctcgtgggcctgcattactcattccaaacaaccgaaaaactctacttcgtgctggacttcgttaatggcggagaactgtttttccatctccagcgtgagaggtccttcccagagcaccgcgccaggttctacgctgccgagattgcctctgccctgggctacctgcatagtattaaaattgtgtacagagatcttaagccggagaacattctgctggattccgtcggccacgtcgtccttactgacttcggactgtgcaaagaaggcatagcaatttctgacactaccaccactttctgtggaacccctgaatacctggcccctgaggtaatcaggaagcagccgtacgacaataccgtcgactggtggtgtctgggagcagttctgtacgagatgctttatggattgccgcctttttactgcagggacgtcgctgagatgtacgacaatatcctccacaagcctctaagcctccgtccaggggtgtcattaaccgcttggtcaattctggaagagcttctagaaaaagacagacagaaccggctgggggctaaggaagacttcctagagatccagaaccatccctttttcgagtccttgtcctgggctgatctggtacaaaagaaaattccaccgcctttcaacccaaatgtggccggacccgacgacattcgcaactttgatacagcctttacagaagaaaccgtcccttattctgtttgtgtgagcagcgactactcaatcgtcaacgcctcagtgctggaggctgacgatgcgtttgtggggtttagctacgccccgcctagtgaggatctatttttgtag

SEQ ID NO: 30628 - DNA, 1491 bp, Artificial Sequence
  derived and/or modified sequence
atgcagcgggaccatacaatggattacaaagagtcatgtccgtccgtgtccatacctagctccgatgaacacagggaaaagaagaagagattcacagtgtataaggtgctggttagcgtaggcagaagcgaatggtttgtttttcgccgatatgcagagttcgataagctgtataacacgctgaagaagcagttccctgcaatggccctgaagatcccagcaaaaagaatatttggagataatttcgatcccgacttcattaaacagagaagagccggattgaacgagttcattcaaaacctagtccggtatcccgaactctacaatcatccggatgtgagagcctttttacagatggattctccaaagcaccagtcggacccaagcgaagacgaagatgagcgctcttcacagaagctgcattccacctctcagaacattaatctggggccttccggcaacccacacgccaaacccacggacttcgacttcctgaaggtgattggcaaggggtcctttggcaaagtgctcctagcaaagaggaaactggatggaaagttttacgcagttaaggtgctgcaaaaaaagattgtgcttaaccgtaaggagcaaaaacatattatggccgagcgcaatgtgctacttaagaacgtcaagcatccgtttttggtgggacttcactacagcttccaaactactgagaagctctacttcgtgctggacttcgtgaacggaggagagttatttttccacctgcagagggaaagatccttcccggagcaccgtgctcgcttctacgccgcagagatcgcctctgcattggggtaccttcacagtatcaaaatcgtctacagggatctgaaacccgagaacatcttgcttgacagtgtcggccatgtggtactgactgactttggactgtgcaaggaaggcattgctatttctgataccaccacaacattctgcggcacgcctgaatacctcgctcccgaggtgatccgaaaacagccctatgataacaccgtcgattggtggtgtctaggcgctgtgctctacgagatgctctatgggctgccacctttctactgcagagatgtggccgagatgtacgataatattttgcataaacctttgtcacttcgtccgggtgtgagcctgacggcttggtctattctcgaggagctgctcgaaaaggatagacaaaatcggttgggagctaaggaagattttctggagatccagaaccatccattctttgagtcactgtcgtgggccgaccttgttcagaagaaaatccccccacctttcaatccgaacgttgccggacccgatgatattcgcaacttcgacacggcatttactgaagaaactgtaccatatagcgtctgtgtgtccagcgactactctattgtgaacgcttccgtgctcgaagctgacgacgcattcgtcggattctcatatgcgccaccttcagaggacttgttcctgtag

SEQ ID NO: 30629 - DNA, 1491 bp, Artificial Sequence
  derived and/or modified sequence
atgcaacgcgatcacactatggactataaggaatcctgtccctcggtcagtataccttcctctgatgagcaccgagagaagaaaaaaaggtttacagtctataaagtcctggtcagtgtggggagatctgagtggttcgtgttcagacgttacgctgaattcgataaactctataatacactgaagaaacaattccctgcaatggcccttaaaatcccggcaaagcggatttttggcgacaactttgacccagacttcatcaaacaacggagagctggattgaacgaattcatccagaatttggtgaggtaccccgaactgtataaccacccagacgtgagggcattccttcagatggattccccgaaacaccagtcggatcccagcgaagatgaggacgagaggagcagccagaagctgcactctacatcccagaacataaaccttgggccttcggggaatcctcacgcgaaaccaaccgacttcgactttctgaaggtcattggaaaggggtcttttgggaaggttttacttgccaaaagaaagctcgacgggaagttctacgcggttaaagttctacagaagaaaatagtgctcaacaggaaagagcaaaaacacattatggccgagagaaatgtcttgctcaagaacgtaaaacacccatttctcgtgggactccactattcttttcagaccactgagaagctctacttcgtccttgactttgtgaacggcggagagcttttttttcacctccagcgcgaacgcagttttcccgagcacagagcgcgtttttacgccgcagaaatcgcctccgccttaggttatctacactctatcaagatagtatatcgggatttgaagccagaaaacattctcttggatagtgtgggacacgtagtcctcactgattttgggctctgcaaggaaggcattgctatctcagatactacgaccacattctgtggaacacctgagtatctcgcccctgaggtgatacgaaagcaaccctacgataacaccgttgattggtggtgtttaggggctgttttgtatgaaatgctgtacggcttaccacctttctattgccgcgatgtcgctgagatgtacgataacattctgcataagccactgtcactacggcctggggtttctctaaccgcttggtctatcctcgaggaactgctcgaaaaggaccgccagaaccgcctgggtgccaaagaggatttcctggagattcagaatcatccgttcttcgaatctctctcctgggctgacttggtccagaagaagatccctcccccatttaaccccaatgtagctggccctgatgatatccgcaactttgacaccgcatttaccgaggagaccgtaccatactcagtttgtgtgtccagtgattactcaatcgtgaacgcaagcgtgctcgaagcagacgacgccttcgtgggcttctcctacgccccaccgtcagaggacctgttcctgtag

SEQ ID NO: 30630 - DNA, 1491 bp, Artificial Sequence
  derived and/or modified sequence
atgcagagagaccacactatggactacaaggagtcttgtccatcggtgagtattcccagtagcgatgaacatagagaaaagaaaaagcgctttaccgtgtataaagtgctagtgtcagtcggcagaagtgagtggttcgttttccgtagatacgcagaatttgacaaactgtataacacgctgaaaaagcagttccccgctatggcccttaagattcctgccaagcggatattcggagataacttcgaccctgatttcattaaacagcgaagagccggtctgaacgaattcatccagaacctcgtccgttaccccgaactgtacaaccatcccgatgttcgagcattcctgcagatggactctccaaaacatcagtctgatcccagtgaggatgaggacgaaagatcaagccagaaactccatagtactagccagaatatcaatctgggaccatcgggcaacccgcatgccaaacctactgactttgacttccttaaggtgatcggcaagggcagtttcggtaaagtcctcttggccaagcggaagctggacggaaagttctacgccgtgaaggtcctccagaagaaaatcgtccttaacagaaaagagcaaaaacacattatggccgaaaggaacgtgctcctaaaaaacgtcaagcacccttttttggttggattgcactattcattccagaccaccgagaagctatacttcgtgttggatttcgttaacggaggagagttattcttccatttgcaacgcgaaagatccttcccagaacatcgagcccgtttctacgcagccgagattgcttcggccttgggttatttgcactcaattaagatagtgtacagggatctgaagcccgagaacatcttattggacagcgttggacacgtcgttctgactgactttggcctgtgtaaggaaggcatagccatatcagatacaactacaactttctgcggcaccccagagtatctcgctcctgaggtgatacgaaaacaaccctacgacaacacagtggactggtggtgccttggagccgtgctgtatgagatgctgtacggcctgcccccattctactgccgcgatgttgcggagatgtacgataatattttgcacaaacccttgagccttcggcctggcgtatccctaactgcctggtccatcctagaggaacttttggagaaagacaggcagaacaggctcggggcaaaagaggacttcctcgagatacaaaaccatcccttttttgaatctctgagttgggccgacctggtccagaagaaaatccccccaccgttcaatcctaacgttgccggaccagacgatattaggaactttgacactgccttcactgaagagacagtcccctattccgtctgcgtatcaagtgactactccatcgtcaacgcctcggtgctagaggcagacgatgctttcgtcggtttctcatacgctcccccatctgaggacctttttctttag

SEQ ID NO: 30631 - DNA, 1491 bp, Artificial Sequence
  derived and/or modified sequence
atgcagcgtgaccatactatggattataaggagtcatgtccctctgtttcgattccctcctccgatgaacacagggagaagaaaaaacgctttaccgtctataaagtattagtgagcgttggaagaagcgaatggtttgtatttcgtcgctatgccgaatttgataagttgtataacaccctcaaaaaacaattccctgctatggccctgaaaatcccagctaaaaggatcttcggggacaactttgatccagactttatcaagcagagaagagctgggttgaatgaattcattcagaatctcgtcaggtaccccgagctgtacaaccaccctgatgtaagagccttcctacagatggacagtcctaagcaccagagtgatccgagcgaggacgaggatgaaaggtctagccagaagctacactctacgagccagaatattaacctaggccctagcggcaatccccacgccaagccaacagactttgactttctgaaggttattggaaaggggagttttgggaaagtgctgttggccaaaagaaaactcgacggaaaattttatgccgtgaaggttctacagaaaaaaatcgtgctgaataggaaagaacagaagcatatcatggccgaaaggaatgtgctgttaaagaatgtgaagcatccctttctcgtcgggttgcactacagcttccagactacggagaagctttattttgtgctggattttgtaaatggtggggagctgttcttccacttacaacgcgaaaggtcttttcctgagcaccgagcgaggttctacgcagccgaaatcgcatctgctcttggatatctccacagcattaaaatcgtctatcgagatctgaaacccgaaaacatcctcttagattctgtgggtcacgtggtcctcacagactttggtctgtgcaaagagggcatcgcaatctccgataccacaactaccttttgcggaactcctgagtacttggctcctgaggtcatcagaaaacaaccttacgacaataccgtggactggtggtgtctgggagccgtgctatatgagatgttgtatggattgccaccgttctactgtagggatgttgcagagatgtacgacaacattctccacaaacccctgtctctgaggcccggtgtcagtctaactgcgtggtccattcttgaggagctgttagagaaggatcgccagaaccgactgggtgcaaaagaggacttccttgaaattcagaatcaccccttctttgaaagcctcagttgggccgacctggtccaaaaaaagatccctccaccgttcaaccctaacgtggcaggacccgacgacatccggaacttcgatactgcctttactgaggaaaccgtgccttattccgtttgcgtctcttccgattactcaattgtgaatgcctcagtcctggaggccgatgacgcatttgtcggtttttcatatgcaccccctagcgaggatctgtttctgtag

SEQ ID NO: 30632 - DNA, 1491 bp, Artificial Sequence
  derived and/or modified sequence
atgcagagagatcatactatggactacaaagagtcgtgccccagcgtttcaatacccagctcagatgaacaccgcgagaaaaagaagagatttacagtgtataaagtgctggtctcagtgggcagaagcgaatggttcgtgtttcgcagatatgccgagttcgataagctgtacaacacgctaaaaaagcagttccctgccatggctctcaagatccctgccaaaagaatttttggcgacaatttcgaccccgattttattaaacagaggagagcaggcctgaatgagttcattcagaatctggtccgctacccagaattgtataatcatcctgacgttagggcttttttgcagatggacagccccaaacaccagagcgatcctagcgaagatgaggacgagagatccagccagaagctacacagtacttcacagaacattaacctgggcccttcaggcaatcctcatgccaaacctaccgacttcgactttctcaaggtgataggtaagggcagcttcgggaaggtccttcttgcaaagaggaagctcgacgggaagttttatgcggtcaaggttctccagaagaagattgtccttaaccggaaggagcagaagcacatcatggctgagaggaatgtgctgctaaagaatgttaaacatccgtttctggtggggctccactactcatttcaaacgacagaaaaactctattttgtactagacttcgtgaacggcggagaattgttctttcacttacaaagggagcgttccttcccagagcatcgagcgagattttacgcggcagaaatcgcatcagctctgggctacttacattctattaaaattgtgtatcgtgatttgaaaccggagaatatcctcttagatagcgttggccatgtggtactgactgattttggcctctgtaaggagggaattgccattagcgacacgacaacaacattttgcggaacaccggaatatctcgcaccagaagtgataaggaagcaaccctacgacaacaccgtagattggtggtgtctgggagcagtgctatacgagatgctttatgggctgcctcctttctactgccgagatgtggccgagatgtacgataatatcctgcacaaacccctgagcctgaggccgggagtctctcttaccgcttggagcatcctggaagagctcttagagaaagataggcagaatcggcttggcgctaaagaggatttcttggagattcagaaccatcccttcttcgaatcccttagctgggcagatctagtgcagaagaagatccccccaccctttaatcctaacgtggctggccctgacgatatacgcaattttgataccgcgtttaccgaggagacggtgccctactcagtttgtgtctcctcagattacagtattgtcaatgcgtcggtactcgaggccgatgacgcattcgtcggattctcctacgctcctccaagtgaggacctctttttgtag

SEQ ID NO: 30633 - DNA, 1491 bp, Artificial Sequence
  derived and/or modified sequence
atgcagagagaccacactatggattataaagagagctgtccttctgtgagcatcccttccagcgatgagcaccgggagaagaaaaagagattcactgtctataaggtgctcgtaagcgttggtagaagcgagtggttcgtttttagaaggtatgctgagtttgataagctctacaatacattaaaaaagcaatttcctgctatggcattgaagatcccggctaaacggatcttcggggacaacttcgatcccgacttcattaagcagcggcgagcagggttaaatgagtttatccagaaccttgtgagataccctgagctatataatcatccagacgtcagggccttcttacagatggatagccccaagcaccagagcgacccaagtgaggatgaagatgaaaggagttcacaaaagctgcactccacgagccagaacatcaatttaggccctagcgggaacccacatgccaaacccactgattttgacttccttaaagtcataggcaaaggatctttcgggaaggtgctgctggccaagcgaaagctggacggaaagttctacgctgtgaaagtgcttcagaaaaaaatagtactgaacaggaaggaacagaagcatattatggccgagagaaacgttttactcaagaatgtcaagcaccctttcctggttgggctccattactcatttcagacaaccgagaagctatacttcgtattagactttgtcaatggcggtgagctgtttttccatctgcaacgtgaaagaagttttccagagcatagggccaggttctacgccgctgagattgcttcagccttgggatacctgcattctattaagatcgtttatcgtgacctgaagcctgagaatattcttctggatagtgttggtcatgtggtgctcacagatttcgggctttgcaaggaaggaatagcaatttcagacacaacgaccacgttctgcggcactccagagtaccttgcgcctgaagtgatacggaaacaaccatatgataatactgttgattggtggtgtcttggagccgtcctctatgagatgctgtatgggctgcctccattctactgtcgcgacgtggccgaaatgtatgataatatcctgcacaaacctttgtccttacgccctggcgtatctctgacagcctggtctatacttgaggagctactcgagaaagaccgccaaaacaggctgggggcaaaggaagacttcctggaaattcagaatcatccttttttcgagagcctgtcatgggctgacctggttcagaaaaaaatacctcccccattcaacccaaacgtggctggccctgatgatattcggaattttgacacagcctttactgaggagacagtcccgtatagcgtgtgcgtatcgtccgactactctatagtcaacgcctctgtgctagaagccgacgacgccttcgttggtttttcttatgctcccccatcggaggatctctttttgtag

SEQ ID NO: 30634 - DNA, 4220 bp, Artificial Sequence
  derived and/or modified sequence
gggatccggcgccttccccggctgtcctcggcctcccgcgcgctccgcgggaggagccgccagcggccgtgacgcgtcaaggaggaaacgccggcgcccggcggccctgccgggaaggaggaagcgcagtgcgttcggctccgcgcccgccgcgccgggagcagcaccgcggggccaggttgcatgatggaatttgaacattacttcaagaggttttgtattttggattagttaattgggtttgtcctctgctgactgtttcttcggatgcattttttggtgtgctcttgagggattaaatgcaaagagatcacaccatggactacaaggaaagctgcccaagtgtaagcattcccagctccgatgaacacagagagaaaaagaagaggtttactgtttataaagttctggtttcagtgggaagaagtgaatggtttgtcttcaggagatatgcagagtttgataaactttataacactttaaaaaaacagtttcctgctatggccctgaagattcctgccaagagaatatttggtgataattttgatccagattttattaaacaaagacgagcaggactaaacgaattcattcagaacctagttaggtatccagaactttataaccatccagatgtcagagcattccttcaaatggacagtccaaaacaccagtcagatccatctgaagatgaggatgaaagaagttctcagaagctacactctacctcacagaacatcaacctgggaccgtctggaaatcctcatgccaaaccaactgactttgatttcttaaaagttattggaaaaggcagctttggcaaggttcttcttgcaaaacggaaactggatggaaaattttatgctgtcaaagtgttacagaaaaaaatagttctcaacagaaaagagcaaaaacatattatggctgaacgtaatgtgctcttgaaaaatgtgaaacatccgtttttggttggattgcattattccttccaaacaactgaaaagctttattttgttctggattttgttaatggaggggagctttttttccacttacaaagagaacggtcctttcctgagcacagagctaggttttacgctgctgaaattgctagtgcattgggttacttacattccatcaaaatagtatacagagacttgaaaccagaaaatattcttttggattcagtaggacatgttgtcttaacagattttgggctttgtaaagaaggaattgctatttctgacaccactaccacattttgtgggacaccagagtatcttgcacctgaagtaattagaaaacagccctatgacaatactgtagattggtggtgccttggggctgttctgtatgaaatgctgtatggattgcctcctttttattgccgagatgttgctgaaatgtatgacaatatccttcacaaacccctaagtttgaggccaggagtgagtcttacagcctggtccattctggaagaactcctagaaaaagacaggcaaaatcgacttggtgccaaggaagactttcttgaaattcagaatcatcctttttttgaatcactcagctgggctgaccttgtacaaaagaagattccaccaccatttaatcctaatgtggctggaccagatgatatcagaaactttgacacagcatttacagaagaaacagttccatattctgtgtgtgtatcttctgactattctatagtgaatgccagtgtattggaggcagatgatgcattcgttggtttctcttatgcacctccttcagaagacttatttttgtgagcagtttgccattcagaaaccattgagcaaaataagtctatagatgggactgaaacttctatttgtgtgaatatattcaaatatgtataactagtgcctcatttttatatgtaatgatgaaaactatgaaaaaatgtattttcttctatgtgcaagaaaaatagggcatttcaaagagctgttttgattaaaatttatattcttgtttaataagcttatttttaaacaatttaaaagctattattcttagcattaacctatttttaaagaaaccttttttgctattgactgttttttccctctaagtttacactaacatctacccaagatagactgttttttaacagtcaatttcagttcagctaacatatattaatacctttgtaactctttgctatggcttttgttatcacaccaaaactatgcaattggtacatggttgtttaagaagaaaccgtatttttccatgataaatcactgtttgaaatatttggttcatggtatgatcgaaatgtaaaagcataattaacacattggctgctagttaacaattggaataactttattctgcagatcatttaagaagtaacaggccgggcgcggtggctcacgcctgtaatcccagcactttgggaggctgaggcgggcagatcacctgaggtcaggagttggagaccagcctgaccaacatggacaaaccccgtctctactaaaaatacaaaattggcagggtgtggtggcacatgcctataatcccagctacttgggaggctaaggcaggagaatcgcttgaacccgggaggcggaggttgcagtgagccgagatcgcaccattgcactcctgcctgggcaacaagagtgaaactccatctccaaaaaaaaaaagaaaaagtaacaaaaggaaattatttgtttttgaaataccagttcaactttgtggattatttttcctctgaaggaaaagaaaaggcttaatggttaggatttttaagtattcccaaagatctgaagggtaataaaatgtactggattttttaaggtggtaccaaaaatgaatgtctgtcatatatttatattacaaatacattatatttatgttctattcatcttttgaatgtttagtatgctattaagtcattctgaatctttgtatttgcttttgcaaataggtatttcaaagctcttttcctaactggttaagtaaaataaaaaattgagctttctagaatatttgcctaattgggaattaaaaagtaaaataataggccaggcatggtggctcatgcctataagcaccctgggaggccgaggcaggcagattatttgagctcaggagtttgagaccatcctgggcaacatggcgaaaccctatctctacaaaaaatacaaaaattagccagacatggtggcacatgcctttagtcccagctactctggaggctgaagttggaggatggcttgagcccacgagatggaagttgcagtgaactgaaattgtgccactgcacttttcagcctgggtgccacagcgagaccctagttaagagaaaaaaaaagtaaaaacaaattgtgggtcaaagtaaatgtatacagttttattacaatgtaacaaaagttgaaaatcaggcagatgtgtattcagtatccaattcaatatatcttagaaaaagcacaggaaacagaccttaaaattgtaacctaccaactaacttacatgcttataaaagtaaaggagaataactggccgggcacggtggctcatgcctataaaattccagcactttgggaggccaaggcaggaggatcacttgagcctatgagttcaagaccagcctaggcaatgtagtgacacctcatttctatttattttaaaaaaaagagagagtaactacagaagaactttaaaaaataaaaaataagcttaccttggattcttggcttagagtagaggttttttttaagttatggaggaaacatttttgtaaaagtttaatgacccactttagatgctccaagaacaagcatcccttccatgtatgtcttgagaaagaaatcacagaagcatttctcaccaatactctttggcttaaaatgttcagcagaattgggcagtgggggtgacttttcttatattaataatatttacatccaatacactgaatcttcctttagaggtaagactttaatatctatactgtaaatatttggtttatttggcactactgtaagttttgtttttcacaaagctcttattatgaagcaaaataaaaattctagtttcttgtatgattttttgtactcattcattcctgttaagctgccaaaaattaaagtgcaatattgtatatttttaagaacaaatttaaaatagaattttgatgtttctcagatcacaagaaatacaaatctatatagtataataaaatcagc

SEQ ID NO: 30635 - DNA, 4055 bp, Artificial Sequence
  derived and/or modified sequence
aggttgcatgatggaatttgaacattacttcaagaggttttgtattttggattagttaattgggtttgtcctctgctgactgtttcttcggatgcattttttggtgtgctcttgagggattaaatgcaaagagatcacaccatggactacaaggaaagctgcccaagtgtaagcattcccagctccgatgaacacagagagaaaaagaagaggtttactgtttataaagttctggtttcagtgggaagaagtgaatggtttgtcttcaggagatatgcagagtttgataaactttataacactttaaaaaaacagtttcctgctatggccctgaagattcctgccaagagaatatttggtgataattttgatccagattttattaaacaaagacgagcaggactaaacgaattcattcagaacctagttaggtatccagaactttataaccatccagatgtcagagcattccttcaaatggacagtccaaaacaccagtcagatccatctgaagatgaggatgaaagaagttctcagaagctacactctacctcacagaacatcaacctgggaccgtctggaaatcctcatgccaaaccaactgactttgatttcttaaaagttattggaaaaggcagctttggcaaggttcttcttgcaaaacggaaactggatggaaaattttatgctgtcaaagtgttacagaaaaaaatagttctcaacagaaaagagcaaaaacatattatggctgaacgtaatgtgctcttgaaaaatgtgaaacatccgtttttggttggattgcattattccttccaaacaactgaaaagctttattttgttctggattttgttaatggaggggagctttttttccacttacaaagagaacggtcctttcctgagcacagagctaggttttacgctgctgaaattgctagtgcattgggttacttacattccatcaaaatagtatacagagacttgaaaccagaaaatattcttttggattcagtaggacatgttgtcttaacagattttgggctttgtaaagaaggaattgctatttctgacaccactaccacattttgtgggacaccagagtatcttgcacctgaagtaattagaaaacagccctatgacaatactgtagattggtggtgccttggggctgttctgtatgaaatgctgtatggattgcctcctttttattgccgagatgttgctgaaatgtatgacaatatccttcacaaacccctaagtttgaggccaggagtgagtcttacagcctggtccattctggaagaactcctagaaaaagacaggcaaaatcgacttggtgccaaggaagactttcttgaaattcagaatcatcctttttttgaatcactcagctgggctgaccttgtacaaaagaagattccaccaccatttaatcctaatgtggctggaccagatgatatcagaaactttgacacagcatttacagaagaaacagttccatattctgtgtgtgtatcttctgactattctatagtgaatgccagtgtattggaggcagatgatgcattcgttggtttctcttatgcacctccttcagaagacttatttttgtgagcagtttgccattcagaaaccattgagcaaaataagtctatagatgggactgaaacttctatttgtgtgaatatattcaaatatgtataactagtgcctcatttttatatgtaatgatgaaaactatgaaaaaatgtattttcttctatgtgcaagaaaaatagggcatttcaaagagctgttttgattaaaatttatattcttgtttaataagcttatttttaaacaatttaaaagctattattcttagcattaacctatttttaaagaaaccttttttgctattgactgttttttccctctaagtttacactaacatctacccaagatagactgttttttaacagtcaatttcagttcagctaacatatattaatacctttgtaactctttgctatggcttttgttatcacaccaaaactatgcaattggtacatggttgtttaagaagaaaccgtatttttccatgataaatcactgtttgaaatatttggttcatggtatgatcgaaatgtaaaagcataattaacacattggctgctagttaacaattggaataactttattctgcagatcatttaagaagtaacaggccgggcgcggtggctcacgcctgtaatcccagcactttgggaggctgaggcgggcagatcacctgaggtcaggagttggagaccagcctgaccaacatggacaaaccccgtctctactaaaaatacaaaattggcagggtgtggtggcacatgcctataatcccagctacttgggaggctaaggcaggagaatcgcttgaacccgggaggcggaggttgcagtgagccgagatcgcaccattgcactcctgcctgggcaacaagagtgaaactccatctccaaaaaaaaaaagaaaaagtaacaaaaggaaattatttgtttttgaaataccagttcaactttgtggattatttttcctctgaaggaaaagaaaaggcttaatggttaggatttttaagtattcccaaagatctgaagggtaataaaatgtactggattttttaaggtggtaccaaaaatgaatgtctgtcatatatttatattacaaatacattatatttatgttctattcatcttttgaatgtttagtatgctattaagtcattctgaatctttgtatttgcttttgcaaataggtatttcaaagctcttttcctaactggttaagtaaaataaaaaattgagctttctagaatatttgcctaattgggaattaaaaagtaaaataataggccaggcatggtggctcatgcctataagcaccctgggaggccgaggcaggcagattatttgagctcaggagtttgagaccatcctgggcaacatggcgaaaccctatctctacaaaaaatacaaaaattagccagacatggtggcacatgcctttagtcccagctactctggaggctgaagttggaggatggcttgagcccacgagatggaagttgcagtgaactgaaattgtgccactgcacttttcagcctgggtgccacagcgagaccctagttaagagaaaaaaaaagtaaaaacaaattgtgggtcaaagtaaatgtatacagttttattacaatgtaacaaaagttgaaaatcaggcagatgtgtattcagtatccaattcaatatatcttagaaaaagcacaggaaacagaccttaaaattgtaacctaccaactaacttacatgcttataaaagtaaaggagaataactggccgggcacggtggctcatgcctataaaattccagcactttgggaggccaaggcaggaggatcacttgagcctatgagttcaagaccagcctaggcaatgtagtgacacctcatttctatttattttaaaaaaaagagagagtaactacagaagaactttaaaaaataaaaaataagcttaccttggattcttggcttagagtagaggttttttttaagttatggaggaaacatttttgtaaaagtttaatgacccactttagatgctccaagaacaagcatcccttccatgtatgtcttgagaaagaaatcacagaagcatttctcaccaatactctttggcttaaaatgttcagcagaattgggcagtgggggtgacttttcttatattaataatatttacatccaatacactgaatcttcctttagaggtaagactttaatatctatactgtaaatatttggtttatttggcactactgtaagttttgtttttcacaaagctcttattatgaagcaaaataaaaattctagtttcttgtatgattttttgtactcattcattcctgttaagctgccaaaaattaaagtgcaatattgtatatttttaagaacaaatttaaaatagaattttgatgtttctcagatcacaagaaatacaaatctatatagtataataaaatcagcaaaaagatcaa

SEQ ID NO: 30636 - DNA, 4135 bp, Artificial Sequence
  derived and/or modified sequence
gggagctggtggcgcggcgcaggtcccggccgagtgtggcgcagcagtggcggcgcttcccattcgccatgcgccgggggtgggtgcccgaaggttgcatgatggaatttgaacattacttcaagaggttttgtattttggattagttaattgggtttgtcctctgctgactgtttcttcggatgcattttttggtgtgctcttgagggattaaatgcaaagagatcacaccatggactacaaggaaagctgcccaagtgtaagcattcccagctccgatgaacacagagagaaaaagaagaggtttactgtttataaagttctggtttcagtgggaagaagtgaatggtttgtcttcaggagatatgcagagtttgataaactttataacactttaaaaaaacagtttcctgctatggccctgaagattcctgccaagagaatatttggtgataattttgatccagattttattaaacaaagacgagcaggactaaacgaattcattcagaacctagttaggtatccagaactttataaccatccagatgtcagagcattccttcaaatggacagtccaaaacaccagtcagatccatctgaagatgaggatgaaagaagttctcagaagctacactctacctcacagaacatcaacctgggaccgtctggaaatcctcatgccaaaccaactgactttgatttcttaaaagttattggaaaaggcagctttggcaaggttcttcttgcaaaacggaaactggatggaaaattttatgctgtcaaagtgttacagaaaaaaatagttctcaacagaaaagagcaaaaacatattatggctgaacgtaatgtgctcttgaaaaatgtgaaacatccgtttttggttggattgcattattccttccaaacaactgaaaagctttattttgttctggattttgttaatggaggggagctttttttccacttacaaagagaacggtcctttcctgagcacagagctaggttttacgctgctgaaattgctagtgcattgggttacttacattccatcaaaatagtatacagagacttgaaaccagaaaatattcttttggattcagtaggacatgttgtcttaacagattttgggctttgtaaagaaggaattgctatttctgacaccactaccacattttgtgggacaccagagtatcttgcacctgaagtaattagaaaacagccctatgacaatactgtagattggtggtgccttggggctgttctgtatgaaatgctgtatggattgcctcctttttattgccgagatgttgctgaaatgtatgacaatatccttcacaaacccctaagtttgaggccaggagtgagtcttacagcctggtccattctggaagaactcctagaaaaagacaggcaaaatcgacttggtgccaaggaagactttcttgaaattcagaatcatcctttttttgaatcactcagctgggctgaccttgtacaaaagaagattccaccaccatttaatcctaatgtggctggaccagatgatatcagaaactttgacacagcatttacagaagaaacagttccatattctgtgtgtgtatcttctgactattctatagtgaatgccagtgtattggaggcagatgatgcattcgttggtttctcttatgcacctccttcagaagacttatttttgtgagcagtttgccattcagaaaccattgagcaaaataagtctatagatgggactgaaacttctatttgtgtgaatatattcaaatatgtataactagtgcctcatttttatatgtaatgatgaaaactatgaaaaaatgtattttcttctatgtgcaagaaaaatagggcatttcaaagagctgttttgattaaaatttatattcttgtttaataagcttatttttaaacaatttaaaagctattattcttagcattaacctatttttaaagaaaccttttttgctattgactgttttttccctctaagtttacactaacatctacccaagatagactgttttttaacagtcaatttcagttcagctaacatatattaatacctttgtaactctttgctatggcttttgttatcacaccaaaactatgcaattggtacatggttgtttaagaagaaaccgtatttttccatgataaatcactgtttgaaatatttggttcatggtatgatcgaaatgtaaaagcataattaacacattggctgctagttaacaattggaataactttattctgcagatcatttaagaagtaacaggccgggcgcggtggctcacgcctgtaatcccagcactttgggaggctgaggcgggcagatcacctgaggtcaggagttggagaccagcctgaccaacatggacaaaccccgtctctactaaaaatacaaaattggcagggtgtggtggcacatgcctataatcccagctacttgggaggctaaggcaggagaatcgcttgaacccgggaggcggaggttgcagtgagccgagatcgcaccattgcactcctgcctgggcaacaagagtgaaactccatctccaaaaaaaaaaagaaaaagtaacaaaaggaaattatttgtttttgaaataccagttcaactttgtggattatttttcctctgaaggaaaagaaaaggcttaatggttaggatttttaagtattcccaaagatctgaagggtaataaaatgtactggattttttaaggtggtaccaaaaatgaatgtctgtcatatatttatattacaaatacattatatttatgttctattcatcttttgaatgtttagtatgctattaagtcattctgaatctttgtatttgcttttgcaaataggtatttcaaagctcttttcctaactggttaagtaaaataaaaaattgagctttctagaatatttgcctaattgggaattaaaaagtaaaataataggccaggcatggtggctcatgcctataagcaccctgggaggccgaggcaggcagattatttgagctcaggagtttgagaccatcctgggcaacatggcgaaaccctatctctacaaaaaatacaaaaattagccagacatggtggcacatgcctttagtcccagctactctggaggctgaagttggaggatggcttgagcccacgagatggaagttgcagtgaactgaaattgtgccactgcacttttcagcctgggtgccacagcgagaccctagttaagagaaaaaaaaagtaaaaacaaattgtgggtcaaagtaaatgtatacagttttattacaatgtaacaaaagttgaaaatcaggcagatgtgtattcagtatccaattcaatatatcttagaaaaagcacaggaaacagaccttaaaattgtaacctaccaactaacttacatgcttataaaagtaaaggagaataactggccgggcacggtggctcatgcctataaaattccagcactttgggaggccaaggcaggaggatcacttgagcctatgagttcaagaccagcctaggcaatgtagtgacacctcatttctatttattttaaaaaaaagagagagtaactacagaagaactttaaaaaataaaaaataagcttaccttggattcttggcttagagtagaggttttttttaagttatggaggaaacatttttgtaaaagtttaatgacccactttagatgctccaagaacaagcatcccttccatgtatgtcttgagaaagaaatcacagaagcatttctcaccaatactctttggcttaaaatgttcagcagaattgggcagtgggggtgacttttcttatattaataatatttacatccaatacactgaatcttcctttagaggtaagactttaatatctatactgtaaatatttggtttatttggcactactgtaagttttgtttttcacaaagctcttattatgaagcaaaataaaaattctagtttcttgtatgattttttgtactcattcattcctgttaagctgccaaaaattaaagtgcaatattgtatatttttaagaacaaatttaaaatagaattttgatgtttctcagatcacaagaaatacaaatctatatagtataataaaatcagc

SEQ ID NO: 30637 - DNA, 2949 bp, Artificial Sequence
  derived and/or modified sequence
agttatggcagtgggagtcgaagcgagggtctgaagttcacgactactagaaggggaggggagtggaaaggctctcagtgaaaaaggtattagaattatttctgaattatcagtctctcatttgtgctttggagaagcagaaaaggcaaaaggggtctttggccatcttctgctggagcttccagggaggatgtgtctccaagagaccagatgtaccgagtttgaaatcccagaagcccaagaggaaaagaatcacagggaggaaaagactgtccaaaggcttctggagtcttctgttctctaaccttggaaggttttgaacaatatttctcagaggatagcctttcacttattcatctgtccagcatgactcatccccgggagtgttgaatgtctcctgtcttcctccagcattcacaaaccaggaacggctagctttttgacctgttgcatgatggaatttgaacattacttcaagaggttttgtattttggattagttaattgggtttgtcctctgctgactgtttcttcggatgcattttttggtgtgctcttgagggattaaatgcaaagagatcacaccatggactacaaggaaagctgcccaagtgtaagcattcccagctccgatgaacacagagagaaaaagaagaggtttactgtttataaagttctggtttcagtgggaagaagtgaatggtttgtcttcaggagatatgcagagtttgataaactttataacactttaaaaaaacagtttcctgctatggccctgaagattcctgccaagagaatatttggtgataattttgatccagattttattaaacaaagacgagcaggactaaacgaattcattcagaacctagttaggtatccagaactttataaccatccagatgtcagagcattccttcaaatggacagtccaaaacaccagtcagatccatctgaagatgaggatgaaagaagttctcagaagctacactctacctcacagaacatcaacctgggaccgtctggaaatcctcatgccaaaccaactgactttgatttcttaaaagttattggaaaaggcagctttggcaaggttcttcttgcaaaacggaaactggatggaaaattttatgctgtcaaagtgttacagaaaaaaatagttctcaacagaaaagagcaaaaacatattatggctgaacgtaatgtgctcttgaaaaatgtgaaacatccgtttttggttggattgcattattccttccaaacaactgaaaagctttattttgttctggattttgttaatggaggggagctttttttccacttacaaagagaacggtcctttcctgagcacagagctaggttttacgctgctgaaattgctagtgcattgggttacttacattccatcaaaatagtatacagagacttgaaaccagaaaatattcttttggattcagtaggacatgttgtcttaacagattttgggctttgtaaagaaggaattgctatttctgacaccactaccacattttgtgggacaccagagtatcttgcacctgaagtaattagaaaacagccctatgacaatactgtagattggtggtgccttggggctgttctgtatgaaatgctgtatggattgcctcctttttattgccgagatgttgctgaaatgtatgacaatatccttcacaaacccctaagtttgaggccaggagtgagtcttacagcctggtccattctggaagaactcctagaaaaagacaggcaaaatcgacttggtgccaaggaagactttcttgaaattcagaatcatcctttttttgaatcactcagctgggctgaccttgtacaaaagaagattccaccaccatttaatcctaatgtggctggaccagatgatatcagaaactttgacacagcatttacagaagaaacagttccatattctgtgtgtgtatcttctgactattctatagtgaatgccagtgtattggaggcagatgatgcattcgttggtttctcttatgcacctccttcagaagacttatttttgtgagcagtttgccattcagaaaccattgagcaaaataagtctatagatgggactgaaacttctatttgtgtgaatatattcaaatatgtataactagtgcctcatttttatatgtaatgatgaaaactatgaaaaaatgtattttcttctatgtgcaagaaaaatagggcatttcaaagagctgttttgattaaaatttatattcttgtttaataagcttatttttaaacaatttaaaagctattattcttagcattaacctatttttaaagaaaccttttttgctattgactgttttttccctctaagtttacactaacatctacccaagatagactgttttttaacagtcaatttcagttcagctaacatatattaatacctttgtaactctttgctatggcttttgttatcacaccaaaactatgcaattggtacatggttgtttaagaagaaaccgtatttttccatgataaatcactgtttgaaatatttggttcatggtatgatcgaaatgtaaaagcataattaacacattggctgctagttaacaattggaataactttattctgcagatcatttaagaagtaacaggccgggcgcggtggctcacgcctgtaatcccagcactttgggaggctgaggcgggcagatcacctgaggtcaggagttggagaccagcctgaccaacatggacaaaccccgtctctactaaaaatacaaaattggcagggtgtggtggcacatgcctataatcccagctacttgggaggctaaggcaggagaatcgcttgaacccgggaggcggaggttgcagtgagccgagatcgcaccattgcactcctgcctgggcaacaagagtgaaactccatctccaaaaaaaaaaagaaaaa

SEQ ID NO: 30638 - DNA, 3000 bp, Artificial Sequence
  derived and/or modified sequence
actgcgggcggagcagagggaaacaccagagtctgtgactccagacaggacccactgtgtcctcttgaactttgcacagcgcgtgacgggggcagacggtgcaccgtggcccggcctttcgcgggggtcctcggggaagagagaggagcgcgggtttcctcggaggcctgagcgggacgcagcctgcagcccctccccgcacgggctgcccccggcccgccgctcgcgccgctctgctgggatccggcgccttccccggctgtcctcggcctcccgcgcgctccgcgggaggagccgccagcggccgtgacgcgtcaaggaggaaacgccggcgcccggcggccctgccgggaaggaggaagcgcagtgcgttcggctccgcgcccgccgcgccgggagcagcaccgcggggttgcatgatggaatttgaacattacttcaagaggttttgtattttggattagttaattgggtttgtcctctgctgactgtttcttcggatgcattttttggtgtgctcttgagggattaaatgcaaagagatcacaccatggactacaaggaaagctgcccaagtgtaagcattcccagctccgatgaacacagagagaaaaagaagaggtttactgtttataaagttctggtttcagtgggaagaagtgaatggtttgtcttcaggagatatgcagagtttgataaactttataacactttaaaaaaacagtttcctgctatggccctgaagattcctgccaagagaatatttggtgataattttgatccagattttattaaacaaagacgagcaggactaaacgaattcattcagaacctagttaggtatccagaactttataaccatccagatgtcagagcattccttcaaatggacagtccaaaacaccagtcagatccatctgaagatgaggatgaaagaagttctcagaagctacactctacctcacagaacatcaacctgggaccgtctggaaatcctcatgccaaaccaactgactttgatttcttaaaagttattggaaaaggcagctttggcaaggttcttcttgcaaaacggaaactggatggaaaattttatgctgtcaaagtgttacagaaaaaaatagttctcaacagaaaagagcaaaaacatattatggctgaacgtaatgtgctcttgaaaaatgtgaaacatccgtttttggttggattgcattattccttccaaacaactgaaaagctttattttgttctggattttgttaatggaggggagctttttttccacttacaaagagaacggtcctttcctgagcacagagctaggttttacgctgctgaaattgctagtgcattgggttacttacattccatcaaaatagtatacagagacttgaaaccagaaaatattcttttggattcagtaggacatgttgtcttaacagattttgggctttgtaaagaaggaattgctatttctgacaccactaccacattttgtgggacaccagagtatcttgcacctgaagtaattagaaaacagccctatgacaatactgtagattggtggtgccttggggctgttctgtatgaaatgctgtatggattgcctcctttttattgccgagatgttgctgaaatgtatgacaatatccttcacaaacccctaagtttgaggccaggagtgagtcttacagcctggtccattctggaagaactcctagaaaaagacaggcaaaatcgacttggtgccaaggaagactttcttgaaattcagaatcatcctttttttgaatcactcagctgggctgaccttgtacaaaagaagattccaccaccatttaatcctaatgtggctggaccagatgatatcagaaactttgacacagcatttacagaagaaacagttccatattctgtgtgtgtatcttctgactattctatagtgaatgccagtgtattggaggcagatgatgcattcgttggtttctcttatgcacctccttcagaagacttatttttgtgagcagtttgccattcagaaaccattgagcaaaataagtctatagatgggactgaaacttctatttgtgtgaatatattcaaatatgtataactagtgcctcatttttatatgtaatgatgaaaactatgaaaaaatgtattttcttctatgtgcaagaaaaatagggcatttcaaagagctgttttgattaaaatttatattcttgtttaataagcttatttttaaacaatttaaaagctattattcttagcattaacctatttttaaagaaaccttttttgctattgactgttttttccctctaagtttacactaacatctacccaagatagactgttttttaacagtcaatttcagttcagctaacatatattaatacctttgtaactctttgctatggcttttgttatcacaccaaaactatgcaattggtacatggttgtttaagaagaaaccgtatttttccatgataaatcactgtttgaaatatttggttcatggtatgatcgaaatgtaaaagcataattaacacattggctgctagttaacaattggaataactttattctgcagatcatttaagaaaaaaagtaacaaaaggaaattatttgtttttgaaataccagttcaactttgtggattatttttcctctgaaggaaaagaaaaggcttaatggttaggatttttaagtattcccaaagatctgaagggtaataaaatgtactggattttttaaggtggtaccaaaaatgaatgtctgtcatatatttatattacaaatacattatatttatgttctattcatcttttgaatgtttagtatgctattaagtcattctgaatctttgtatttgcttttgcaaataggtatttcaaagctcttttcctaactggttaagtaaaataaaaaattgagctttctagaatatttgcctaattgggaattaaaaagtaaaataataggccaggcatggtg

SEQ ID NO: 30639 - DNA, 3106 bp, Artificial Sequence
  derived and/or modified sequence
ggcgccgctgggagctggtggcgcggcgcaggtcccggccgagtgtggcgcagcagtggcggcgcttcccattcgccatgcgccgggggtgggtgcccgaagggatttagacatagtggactagtggctgttgcctgtttctagtgaggacttctgctgccctttctgttttgagttcccattctgcaaaccccccctcacatgcggcccctgccgttccctaccaaatatctaggttgcatgatggaatttgaacattacttcaagaggttttgtattttggattagttaattgggtttgtcctctgctgactgtttcttcggatgcattttttggtgtgctcttgagggattaaatgcaaagagatcacaccatggactacaaggaaagctgcccaagtgtaagcattcccagctccgatgaacacagagagaaaaagaagaggtttactgtttataaagttctggtttcagtgggaagaagtgaatggtttgtcttcaggagatatgcagagtttgataaactttataacactttaaaaaaacagtttcctgctatggccctgaagattcctgccaagagaatatttggtgataattttgatccagattttattaaacaaagacgagcaggactaaacgaattcattcagaacctagttaggtatccagaactttataaccatccagatgtcagagcattccttcaaatggacagtccaaaacaccagtcagatccatctgaagatgaggatgaaagaagttctcagaagctacactctacctcacagaacatcaacctgggaccgtctggaaatcctcatgccaaaccaactgactttgatttcttaaaagttattggaaaaggcagctttggcaaggttcttcttgcaaaacggaaactggatggaaaattttatgctgtcaaagtgttacagaaaaaaatagttctcaacagaaaagagcaaaaacatattatggctgaacgtaatgtgctcttgaaaaatgtgaaacatccgtttttggttggattgcattattccttccaaacaactgaaaagctttattttgttctggattttgttaatggaggggagctttttttccacttacaaagagaacggtcctttcctgagcacagagctaggttttacgctgctgaaattgctagtgcattgggttacttacattccatcaaaatagtatacagagacttgaaaccagaaaatattcttttggattcagtaggacatgttgtcttaacagattttgggctttgtaaagaaggaattgctatttctgacaccactaccacattttgtgggacaccagagtatcttgcacctgaagtaattagaaaacagccctatgacaatactgtagattggtggtgccttggggctgttctgtatgaaatgctgtatggattgcctcctttttattgccgagatgttgctgaaatgtatgacaatatccttcacaaacccctaagtttgaggccaggagtgagtcttacagcctggtccattctggaagaactcctagaaaaagacaggcaaaatcgacttggtgccaaggaagactttcttgaaattcagaatcatcctttttttgaatcactcagctgggctgaccttgtacaaaagaagattccaccaccatttaatcctaatgtggctggaccagatgatatcagaaactttgacacagcatttacagaagaaacagttccatattctgtgtgtgtatcttctgactattctatagtgaatgccagtgtattggaggcagatgatgcattcgttggtttctcttatgcacctccttcagaagacttatttttgtgagcagtttgccattcagaaaccattgagcaaaataagtctatagatgggactgaaacttctatttgtgtgaatatattcaaatatgtataactagtgcctcatttttatatgtaatgatgaaaactatgaaaaaatgtattttcttctatgtgcaagaaaaatagggcatttcaaagagctgttttgattaaaatttatattcttgtttaataagcttatttttaaacaatttaaaagctattattcttagcattaacctatttttaaagaaaccttttttgctattgactgttttttccctctaagtttacactaacatctacccaagatagactgttttttaacagtcaatttcagttcagctaacatatattaatacctttgtaactctttgctatggcttttgttatcacaccaaaactatgcaattggtacatggttgtttaagaagaaaccgtatttttccatgataaatcactgtttgaaatatttggttcatggtatgatcgaaatgtaaaagcataattaacacattggctgctagttaacaattggaataactttattctgcagatcatttaagaagtaacaggccgggcgcggtggctcacgcctgtaatcccagcactttgggaggctgaggcgggcagatcacctgaggtcaggagttggagaccagcctgaccaacatggacaaaccccgtctctactaaaaatacaaaattggcagggtgtggtggcacatgcctataatcccagctacttgggaggctaaggcaggagaatcgcttgaacccgggaggcggaggttgcagtgagccgagatcgcaccattgcactcctgcctgggcaacaagagtgaaactccatctccaaaaaaaaaaagaaaaagtaacaaaaggaaattatttgtttttgaaataccagttcaactttgtggattatttttcctctgaaggaaaagaaaaggcttaatggttaggatttttaagtattcccaaagatctgaagggtaataaaatgtactggattttttaaggtggtaccaaaaatgaatgtctgtcatatatttatattacaaatacattatatttatgttctattcatcttttgaatgtttagtatgctattaagtcattctgaatctttgtatttgcttttgcaaataggtatttcaaagctcttttcctaactggttaagtaaaataaaaaattgagctttctagaatatttgcctaattgggaattaaaaagtaaaa

SEQ ID NO: 30640 - DNA, 1491 bp, Artificial Sequence
  derived and/or modified sequence
atgcagagagaccacaccatggactacaaggagagctgccccagcgtgagcatccccagcagcgacgagcacagagagaagaagaagagattcaccgtgtacaaggtgctggtgagcgtgggcagaagcgagtggttcgtgttcagaagatacgccgagttcgacaagctgtacaacaccctgaagaagcagttccccgccatggccctgaagatccccgccaagagaatcttcggcgacaacttcgaccccgacttcatcaagcagagaagagccggcctgaacgagttcatccagaacctggtgagataccccgagctgtacaaccaccccgacgtgagagccttcctgcagatggacagccccaagcaccagagcgaccccagcgaggacgaggacgagagaagcagccagaagctgcacagcaccagccagaacatcaacctgggccccagcggcaacccccacgccaagcccaccgacttcgacttcctgaaggtgatcggcaagggcagcttcggcaaggtgctgctggccaagagaaagctggacggcaagttctacgccgtgaaggtgctgcagaagaagatcgtgctgaacagaaaggagcagaagcacatcatggccgagagaaacgtgctgctgaagaacgtgaagcaccccttcctggtgggcctgcactacagcttccagaccaccgagaagctgtacttcgtgctggacttcgtgaacggcggcgagctgttcttccacctgcagagagagagaagcttccccgagcacagagccagattctacgccgccgagatcgccagcgccctgggctacctgcacagcatcaagatcgtgtacagagacctgaagcccgagaacatcctgctggacagcgtgggccacgtggtgctgaccgacttcggcctgtgcaaggagggcatcgccatcagcgacaccaccaccaccttctgcggcacccccgagtacctggcccccgaggtgatcagaaagcagccctacgacaacaccgtggactggtggtgcctgggcgccgtgctgtacgagatgctgtacggcctgccccccttctactgcagagacgtggccgagatgtacgacaacatcctgcacaagcccctgagcctgagacccggcgtgagcctgaccgcctggagcatcctggaggagctgctggagaaggacagacagaacagactgggcgccaaggaggacttcctggagatccagaaccaccccttcttcgagagcctgagctgggccgacctggtgcagaagaagatccccccccccttcaaccccaacgtggccggccccgacgacatcagaaacttcgacaccgccttcaccgaggagaccgtgccctacagcgtgtgcgtgagcagcgactacagcatcgtgaacgccagcgtgctggaggccgacgacgccttcgtgggcttcagctacgccccccccagcgaggacctgttcctgtag

SEQ ID NO: 30641 - protein, 439 aa, Artificial Sequence
  derived and/or modified sequence
MRRAALRLCALGKGQLTPGRGLTQGPQNPKKQGIFHIHEVRDKLREIVGASTNWRDHVKAMEERKLLHSFLAKSQDGLPPRRMKDSYIEVLLPLGSEPELREKYLTVQNTVRFGRILEDLDSLGVLICYMHNKIHSAKMSPLSIVTALVDKIDMCKKSLSPEQDIKFSGHVSWVGKTSMEVKMQMFQLHGDEFCPVLDATFVMVARDSENKGPAFVNPLIPESPEEEELFRQGELNKGRRIAFSSTSLLKMAPSAEERTTIHEMFLSTLDPKTISFRSRVLPSNAVWMENSKLKSLEICHPQERNIFNRIFGGFLMRKAYELAWATACSFGGSRPFVVAVDDIMFQKPVEVGSLLFLSSQVCFTQNNYIQVRVHSEVASLQEKQHTTTNVFHFTFMSEKEVPLVFPKTYGESMLYLDGQRHFNSMSGPATLRKDYLVEP

SEQ ID NO: 30642 - DNA, 1320 bp, Artificial Sequence
  derived and/or modified sequence
atgcggcgggccgcccttcgtctgtgcgccctcggcaagggacagcttacgcccggccggggtctgacccaaggcccacaaaaccccaaaaaacagggcatttttcacatccatgaggtcagggataagttgcgggagattgtgggagcgtcaacaaattggcgcgatcacgttaaggccatggaagagcgtaaattgcttcactcgttcttagccaagtctcaggacggcttgccccctcggcggatgaaggatagctacatagaagtgctccttcccctcgggtcagagcctgagctccgcgagaaatacctgactgtgcagaatacagttcggtttggaaggattctcgaggatttggacagtcttggcgttctgatctgctacatgcacaacaaaatacacagtgctaagatgtcccctctcagcatagtaaccgctttagtggacaaaattgatatgtgcaagaagagcttatccccagaacaggatattaaattttccggacatgtttcatgggtaggcaaaactagtatggaggtgaaaatgcagatgttccagctgcatggtgatgaattttgtccggtactggatgcaacgtttgtgatggtcgcacgggactcagagaacaaaggaccggccttcgtcaatccactgatcccggagtccccagaggaagaagaactcttcagacagggggaattgaacaaaggacgcaggatcgcctttagcagtactagcctactgaagatggcgccaagtgcggaggaacgtacaacgatccatgagatgtttttgagcaccctcgacccgaagaccatcagcttccgcagccgggtcttgccatcgaacgctgtgtggatggagaacagcaagctgaaaagtttggaaatctgtcaccctcaggaacgcaacatcttcaatcgtatatttggcggatttctgatgcggaaggcgtatgagttggcatgggccaccgcctgttcctttggtggttctcgcccttttgtggtggccgtcgacgatattatgttccagaagccggtggaggtgggctccttgctgtttctctcaagtcaagtttgttttacacagaataattatatccaggtaagagtgcacagtgaggttgcttctctgcaggaaaaacagcacaccacgacaaacgtgttccactttaccttcatgagcgagaaggaggtcccgctggtgttccccaagacgtatggagaaagtatgctctaccttgatggccagagacactttaatagtatgagcggtcccgccacattaagaaaagactacctcgttgagccctag

SEQ ID NO: 30643 - DNA, 1320 bp, Artificial Sequence
  derived and/or modified sequence
atgaggcgggccgccctgcggctgtgtgccctgggcaagggccagctgaccccaggccggggcctgacccagggcccccagaaccccaagaagcagggcatcttccacatccacgaggtgcgggacaagctgcgggagatcgtgggcgccagcaccaactggagggaccacgtgaaggccatggaggagaggaagctgctgcacagcttcctggccaagagccaggacggcctgccccccaggaggatgaaggacagctacatcgaggtgctgctgcccctgggcagcgagcctgagctgcgggagaagtacctgactgtgcagaacacagtgcgcttcggccgcatcctggaggacctggacagcctgggcgtgctgatctgctacatgcacaacaagatccacagcgccaagatgagccccctgagcatcgtgacagccctggtggacaagattgacatgtgcaagaagagcctgagccctgagcaggacatcaagttcagcggccacgtgtcctgggtgggcaagacctccatggaggtgaagatgcagatgttccagctgcatggagatgagttctgccctgtgctggatgccacctttgtgatggtggcccgggacagtgaaaataaaggacctgcctttgtgaaccccctcatccctgagagccctgaggaggaggagctgttccggcagggcgagctgaacaagggcagaagaattgccttcagcagcaccagcctgctgaagatggcccccagcgctgaggagaggaccaccatccacgagatgttcctgagcaccctggaccccaagaccatctccttccgcagccgggtgctgcccagcaatgctgtgtggatggagaacagcaagctgaagagcctggagatctgccacccccaggagaggaacatcttcaaccgcatctttggaggcttcctgatgaggaaggcctatgagctggcctgggccacagcctgcagctttggaggcagccggccctttgtggtggccgtggatgacatcatgttccagaagcctgtggaggtgggcagcctgctcttcctgagcagccaggtgtgcttcacccagaacaactacatccaggtgcgggtgcacagcgaggtggccagcctgcaggagaagcagcacaccaccaccaacgtgttccacttcaccttcatgtctgagaaggaggtgcccctggtgttccccaagacctatggagagagcatgctgtacctggatggccagaggcacttcaacagcatgagcggccctgccaccctgaggaaggactacctggtggagccctag

SEQ ID NO: 30644 - DNA, 1320 bp, Artificial Sequence
  derived and/or modified sequence
atgcggcgggccgccctgcggctgtgcgccctgggcaagggccagctgacaccaggcagggggctgacccaggggccacagaacccaaagaaacagggcatttttcacatccacgaagtgcgcgataagctgagggaaatcgttggggccagcaccaattggcgggaccatgtgaaagctatggaggagaggaagctcttgcattcatttttagcaaaatcccaagacgggctccccccacgtagaatgaaagattcttatatcgaagtcctgctcccccttggttccgagccagaactgcgcgaaaagtacttaaccgtgcagaacacagttcggttcggcagaattctggaggacctggattctctgggggtcctgatatgttatatgcacaacaagatacattctgcgaagatgtctcccctaagcattgtaactgcactggttgataagattgatatgtgtaagaaatccttgtctcccgaacaagacatcaagttttccgggcacgtcagttgggtcggtaagacctccatggaggtgaagatgcagatgtttcagcttcatggcgacgaattctgccccgtgctggacgccaccttcgtcatggtcgctagggactcggaaaacaagggccccgcctttgtcaatcctctcatcccggagtccccagaggaggaggagttgttcaggcagggtgaattgaataagggcagacgcatcgcattctcctcaacatccctgctgaagatggcgccctcggcggaagagcggactactattcacgagatgttcctgagcacgttggacccaaaaacaatttccttcaggtccagagtactgccatcgaatgccgtttggatggaaaactcaaaactgaagtctctggaaatctgtcatccgcaggagcgaaacatctttaatcgcattttcggaggattcctaatgcgcaaggcttacgagctggcctgggccacagcctgctccttcgggggtagtagaccgtttgtggtggctgtggatgatatcatgttccagaagccagtggaagtgggcagcttgctcttccttagttctcaagtgtgctttacgcagaataactacatccaagtgcgggtgcacagcgaagtggcgtcgttgcaggagaaacaacacaccacaactaatgtgtttcacttcaccttcatgtccgagaaggaggtgcccctggtgttccccaagacatacggagaaagcatgctatacctggacgggcaacggcatttcaattcgatgtccggtccagcgaccttgaggaaagattatcttgttgagccatag

SEQ ID NO: 30645 - DNA, 1320 bp, Artificial Sequence
  derived and/or modified sequence
atgcggagggccgcattaagactatgcgccctgggcaaaggacagctgacacccggtcgagggttgacccagggaccccaaaaccccaaaaagcagggaatctttcacattcacgaagtacgtgataagctcagagagattgttggcgcatctacaaattggagggaccatgtcaaggccatggaggagcgcaaactccttcattcattcctggccaagtcccaggacggtttgccccctaggaggatgaaggacagttacatcgaggttctcctcccattgggctccgaaccggagctgcgggagaagtacctcactgtgcagaacactgtgcgctttggaagaatcctcgaggacctggacagcctcggggtgctgatttgttatatgcacaataagattcattccgcgaagatgagtcctctgagtatagtcacggctctggttgataagatagatatgtgcaagaagtccctgtcacctgaacaagacatcaagttctctggtcacgtctcctgggtagggaagacatccatggaagttaagatgcaaatgttccagctgcacggcgacgaattttgcccagtcctggacgccacctttgttatggtcgcgcgagacagcgagaacaaaggaccggctttcgttaaccccctgatccctgagagccccgaagaagaagaactgtttcggcagggggaattaaataaggggagacggattgccttcagttcgacctctctactcaagatggcaccttccgctgaagagagaacaactatccacgaaatgtttctatcaaccttggatccaaagacaatctcctttaggtcccgggtcctaccctcaaacgcagtctggatggagaattcaaagctcaaatctttggagatatgccaccctcaggagaggaacatctttaacaggatttttggcggttttctcatgcggaaggcctatgagctcgcttgggctaccgcctgttccttcggagggtcccggcctttcgtcgtcgctgtggacgacatcatgttccagaaacctgtagaggtcgggtccctgctgttcctgtcctcccaggtctgctttacccaaaataactacatccaggttagggttcatagcgaggtcgcttcccttcaggagaaacaacatactactaccaatgtgtttcactttacattcatgtctgaaaaggaagttcccctggtctttccaaagacgtacggtgagtctatgttgtatctagatggccagcgacactttaattccatgagcggtcccgcaacactgagaaaggattatctggtcgaaccatag

SEQ ID NO: 30646 - DNA, 1320 bp, Artificial Sequence
  derived and/or modified sequence
atgagaagagccgccctgagactgtgcgccctgggcaagggccagctgacccccggcagaggcctgacccagggcccccagaaccccaagaagcagggcatcttccacatccacgaggtgagagacaagctgagagagatcgtgggcgccagcaccaactggagagaccacgtgaaggccatggaggagagaaagctgctgcacagcttcctggccaagagccaggacggcctgccccccagaagaatgaaggacagctacatcgaggtgctgctgcccctgggcagcgagcccgagctgagagagaagtacctgaccgtgcagaacaccgtgagattcggcagaatcctggaggacctggacagcctgggcgtgctgatctgctacatgcacaacaagatccacagcgccaagatgagccccctgagcatcgtgaccgccctggtggacaagatcgacatgtgcaagaagagcctgagccccgagcaggacatcaagttcagcggccacgtgagctgggtgggcaagaccagcatggaggtgaagatgcagatgttccagctgcacggcgacgagttctgccccgtgctggacgccaccttcgtgatggtggccagagacagcgagaacaagggccccgccttcgtgaaccccctgatccccgagagccccgaggaggaggagctgttcagacagggcgagctgaacaagggcagaagaatcgccttcagcagcaccagcctgctgaagatggcccccagcgccgaggagagaaccaccatccacgagatgttcctgagcaccctggaccccaagaccatcagcttcagaagcagagtgctgcccagcaacgccgtgtggatggagaacagcaagctgaagagcctggagatctgccacccccaggagagaaacatcttcaacagaatcttcggcggcttcctgatgagaaaggcctacgagctggcctgggccaccgcctgcagcttcggcggcagcagacccttcgtggtggccgtggacgacatcatgttccagaagcccgtggaggtgggcagcctgctgttcctgagcagccaggtgtgcttcacccagaacaactacatccaggtgagagtgcacagcgaggtggccagcctgcaggagaagcagcacaccaccaccaacgtgttccacttcaccttcatgagcgagaaggaggtgcccctggtgttccccaagacctacggcgagagcatgctgtacctggacggccagagacacttcaacagcatgagcggccccgccaccctgagaaaggactacctggtggagccctag

SEQ ID NO: 30647 - DNA, 1675 bp, Artificial Sequence
  derived and/or modified sequence
gctgtccggctcccgggctgtcctcagcaagggcgcggtctggtactcgtgcgtcttttatcgcctcagtttccctccgccgactagcgcgcggggcccggttctccatcgcgcgcacggcagcctagcgcaatgaggcgggcagcactgcggctttgtgccttgggcaaagggcagcttactcctggaagaggactgactcaaggaccccagaaccccaagaaacagggaatcttccacattcatgaagttcgagataagttgcgggagatagtaggagcatccacaaactggagagaccatgtgaaggcaatggaagaaaggaaattacttcatagtttcttggctaaatcacaggatggactgcctcctaggagaatgaaggacagttatattgaagttctcttgcctttgggcagtgagcctgaattacgagagaaatatttgactgttcaaaacaccgtaagatttggcaggattcttgaggatcttgacagcttgggagttcttatttgttacatgcacaacaaaatccactccgccaagatgtctcctttatcgatagttacagccctggtggataagattgatatgtgtaagaagagcttgagcccagaacaggacattaagttcagtggccatgttagctgggtcgggaagacatccatggaagtgaagatgcaaatgttccagttacatggtgatgaattttgtcctgttttggatgcaacatttgtaatggtggctcgtgattctgaaaataaagggccggcatttgtaaatccactcatccctgaaagcccagaggaagaggagctctttagacaaggggaattgaacaaggggagaagaattgccttcagctccacgtcgttactgaaaatggcccccagcgctgaggagaggaccaccatacatgagatgtttctcagcacactggatccaaagactataagttttcggagtcgagttttaccctctaatgcagtgtggatggagaattcaaaactgaagagtttggaaatttgccaccctcaggagcggaacattttcaatcggatctttggtggtttccttatgaggaaggcatatgaacttgcgtgggctactgcttgtagctttggtggttctcgaccgtttgtggtagcagtagatgacatcatgtttcagaaacctgttgaggttggctcattgctctttctttcttcacaggtatgctttactcagaataattatattcaagtcagagtacacagtgaagtggcctccctgcaggagaagcagcatacaaccaccaatgtctttcatttcacgttcatgtcggaaaaagaagtgccattggttttcccaaaaacatatggagagtccatgttgtacttagatgggcagcggcatttcaactccatgagtggcccagcgaccttgagaaaggactaccttgtggagccctaagaacaccacatttgttgaaaactagcactctacccacagtgacgtggtatctgatgaagacctgatcgagtgtattgattttagtattgcttcgtgtcctccacacaggaggaggatgtattcagcctttaggatgatcagaaaagcagaaagagagagtggccggatggggctgaggggagaaagaattattaaacaataaatactttcaagacaattttaa

SEQ ID NO: 30648 - DNA, 2768 bp, Artificial Sequence
  derived and/or modified sequence
aagagcagtaacacaaacagggctgaaacacgccctcctcccgtccccacacccccgcgacttgccatgttgcgggtgatgtgaaggagagaagtgctgtggcccttcagggagcacagacctaggggctccctgagccagggctgtgacaccctctttggggctctgcggtttctggtatcttcaaacttccgggcaccactgcattccccttgtccagacacaggtgcccacagcagaagccgcttgtggttcatcagatccagctgcagacttgcatagaaccggcacctttgccggcgcctggagctgcctgcccagctgcagcagctggtgtgtccggctctgcgcagtggccagaccctgcgttcgctcgcctgcacacccctcgctgttccgtgcctggctcaccctcggcaggcgtggaatcctggctggtagcatgagctgagcacagcctgccaggccacgtcagtggaacaagtctggcgggcctgatcaaaactcaggcaaaggcaccactggtcacagagctttctagctggaaaagcaacacctgaaggatcccgtgacacaatcaacctgctaggagatccctgccaccctgagaggctgcaggaagctgcctccatccaggcctcttcacagaaggagaattgcagagaccgtaggatttttctactcacaggaacagatggtgtccggtcaggaaggtaaaatgcttcaagaaaagtgcaatagggattataatactgatgatctgagactctgataatgactctgagatgattcccaattctatgatgaatcatctcagaatgactccgagatgatgattcctgattctacgatgattgaggcagagctcactggttggtgaatctagttggtagagctgaggcaccgcaataccatcatttctttctgaggaaatctaaagatgaaagaattcatcactaaaactgtactacgagaaatgctaaaggaagttgttcaaactgatggaaaattataccagatggacacttgaatttgcccaaaggaatgaagagcaccagaaatggcaaatgtgtggtcttactgtatcttcatgtcagtgtcatatcaaggacaagacagcagaaatggtccactccagttgcagatagtaaagaccctgtagctccagcatcagctcacctttctggttttgaatttcatgcttattaccatcctgtcatcacctactgtttccatggtagacgggactaagagatgggctttgtgccttgggcaaagggcagcttactcctggaagaggactgactcaaggaccccagaaccccaagaaacagggaatcttccacattcatgaagttcgagataagttgcgggagatagtaggagcatccacaaactggagagaccatgtgaaggcaatggaagaaaggaaattacttcatagtttcttggctaaatcacaggatggactgcctcctaggagaatgaaggacagttatattgaagttctcttgcctttgggcagtgagcctgaattacgagagaaatatttgactgttcaaaacaccgtaagatttggcaggattcttgaggatcttgacagcttgggagttcttatttgttacatgcacaacaaaatccactccgccaagatgtctcctttatcgatagttacagccctggtggataagattgatatgtgtaagaagagcttgagcccagaacaggacattaagttcagtggccatgttagctgggtcgggaagacatccatggaagtgaagatgcaaatgttccagttacatggtgatgaattttgtcctgttttggatgcaacatttgtaatggtggctcgtgattctgaaaataaagggccggcatttgtaaatccactcatccctgaaagcccagaggaagaggagctctttagacaaggggaattgaacaaggggagaagaattgccttcagctccacgtcgttactgaaaatggcccccagcgctgaggagaggaccaccatacatgagatgtttctcagcacactggatccaaagactataagttttcggagtcgagttttaccctctaatgcagtgtggatggagaattcaaaactgaagagtttggaaatttgccaccctcaggagcggaacattttcaatcggatctttggtggtttccttatgaggaaggcatatgaacttgcgtgggctactgcttgtagctttggtggttctcgaccgtttgtggtagcagtagatgacatcatgtttcagaaacctgttgaggttggctcattgctctttctttcttcacaggtatgctttactcagaataattatattcaagtcagagtacacagtgaagtggcctccctgcaggagaagcagcatacaaccaccaatgtctttcatttcacgttcatgtcggaaaaagaagtgccattggttttcccaaaaacatatggagagtccatgttgtacttagatgggcagcggcatttcaactccatgagtggcccagcgaccttgagaaaggactaccttgtggagccctaagaacaccacatttgttgaaaactagcactctacccacagtgacgtggtatctgatgaagacctgatcgagtgtattgattttagtattgcttcgtgtcctccacacaggaggaggatgtattcagcctttaggatgatcagaaaagcagaaagagagagtggccggatggggctgaggggagaaagaattattaaacaataaatactttc

SEQ ID NO: 30649 - protein, 305 aa, Artificial Sequence
  derived and/or modified sequence
MEAESFPCLLRPFFKERSCALRPAFHTAKCEKLQKEKEELERRFEAEMARLQEEHGDQLLSIRCQHQEQVEDLTASHDAALLEMENNHTVAITILQDDHDHKVQELMSTHELEKKELEENFEKLRLSLQDQVDTLTFQSQSLRDRARRFEEALRKNTEEQLEIALAPYQHLEEDMKSLKQVLEMKNQQIHEQEKKILELEKLAEKNIILEEKIQVLQQQNEDLKARIDQNTVVTRQLSEENANLQEYVEKETQEKKRLSRTNEELLWKLQTGDPTSPIKLSPTSPVYRGSSSGPSSPARVSTTPR

SEQ ID NO: 30650 - protein, 1379 aa, Artificial Sequence
  derived and/or modified sequence
MASSPTKGLTMSVPVAPKKSCYTQLRDNRNAARNNNESILSLGDTNANQIMLEVSSSHDESKTCDLGDEIGNTNSSEPENRTHFHKEFHQLQGFGKGSQAGSASLKDFRLSSTIQRELNEEHTVERGTDSLQTTRSIQGPSLSSWRNVMSEASLDVLAKRDAEIPRHVPKDKLAKTLDNEELRRHSLERASSSVAAVGSLTPQHPQPLSLDSREARGQIPGGGEGPQKTLPDHAVPAAFPATDSTSEGKSVRHPKPSTSESKQSTPSETQTVGAHVLQVCSEHTSHSAHPEPALNLTLASKEIPSKLEAQLGQGKGEAKLDLKYVPPRRVEQEGKAAQEGYLGCHKEENLSALEGRDPCGEAHPEATDALGHLLNSDLHHLGVGRGNCEEKRGVNPGEQDSLHTTPKQGSASLGGADNQPTGKISPCAGEKLGERTSSSFSPGDSHVAFIPNNLTDSKPLDVIEEERRLGSGNKDSVMVLVFNPSVGENKTEVPEPLDPQSGRSEARESKEVTTSVAENRNLLENADKIESTSARADSVLNIPAPLHPETTVNMTYQPTTPSSSFQDVSVFGMDAGSPLVVPPPTDSARLLNTSPKVPDKNTCPSGIPKPVFTHSKDTPSSQEGMENYQVEKTEERTETKPIIMPKPKHVRPKIITYIRRNPQALGQVDASLVPVGLPYAPPTCTMPLPHEEKAAGGDLKPSANLYEKFKPDLQKPRVFSSGLMVSGIKPPGHPFSQMSEKFLQEVTDHPGKEEFCSPPYAHYEVPPTFYRSAMLLKPQLGLGAMSRLPSAKSRILIASQRSSASAIHPPGPITTATSLYSSDPSADLKKASSSNAAKSNLPKSGLRPPGYSRLPAAKLAAFGFVRSSSVSSVSSTQSGDSAQPEQGRPATRSTFGNEEQPVLKASLPSKDTPKGAGRVAPPASSSVTAPRRSLLPAPKSTSTPAGTKKDAQKDQDTNKPAVSSPKRVAASTTKLHSPGYPKQRTAAARNGFPPKPDPQAREAERQLVLRLKERCEQQTRQLGVAQGELKRAICGFDALAVATQHFFRKNESALVKEKELSIELANIRDEVAFHTAKCEKLQKEKEELERRFEDEVKRLGWQQQAELQELEERLQLQFEAEMARLQEEHGDQLLSIRCQHQEQVEDLTASHDAALLEMENNHTVAITILQDDHDHKVQELMSTHELEKKELEENFEKLRLSLQDQVDTLTFQSQSLRDRARRFEEALRKNTEEQLEIALAPYQHLEEDMKSLKQVLEMKNQQIHEQEKKILELEKLAEKNIILEEKIQVLQQQNEDLKARIDQNTVVTRQLSEENANLQEYVEKETQEKKRLSRTNEELLWKLQTGDPTSPIKLSPTSPVYRGSSSGPSSPARVSTTPR

SEQ ID NO: 30651 - DNA, 4140 bp, Artificial Sequence
  derived and/or modified sequence
atggccagcagccccaccaagggcctgaccatgagcgtgcccgtggcccccaagaagagctgctacacccagctgagagacaacagaaacgccgccagaaacaacaacgagagcatcctgagcctgggcgacaccaacgccaaccagatcatgctggaggtgagcagcagccacgacgagagcaagacctgcgacctgggcgacgagatcggcaacaccaacagcagcgagcccgagaacagaacccacttccacaaggagttccaccagctgcagggcttcggcaagggcagccaggccggcagcgccagcctgaaggacttcagactgagcagcaccatccagagagagctgaacgaggagcacaccgtggagagaggcaccgacagcctgcagaccaccagaagcatccagggccccagcctgagcagctggagaaacgtgatgagcgaggccagcctggacgtgctggccaagagagacgccgagatccccagacacgtgcccaaggacaagctggccaagaccctggacaacgaggagctgagaagacacagcctggagagagccagcagcagcgtggccgccgtgggcagcctgaccccccagcacccccagcccctgagcctggacagcagagaggccagaggccagatccccggcggcggcgagggcccccagaagaccctgcccgaccacgccgtgcccgccgccttccccgccaccgacagcaccagcgagggcaagagcgtgagacaccccaagcccagcaccagcgagagcaagcagagcacccccagcgagacccagaccgtgggcgcccacgtgctgcaggtgtgcagcgagcacaccagccacagcgcccaccccgagcccgccctgaacctgaccctggccagcaaggagatccccagcaagctggaggcccagctgggccagggcaagggcgaggccaagctggacctgaagtacgtgccccccagaagagtggagcaggagggcaaggccgcccaggagggctacctgggctgccacaaggaggagaacctgagcgccctggagggcagagacccctgcggcgaggcccaccccgaggccaccgacgccctgggccacctgctgaacagcgacctgcaccacctgggcgtgggcagaggcaactgcgaggagaagagaggcgtgaaccccggcgagcaggacagcctgcacaccacccccaagcagggcagcgccagcctgggcggcgccgacaaccagcccaccggcaagatcagcccctgcgccggcgagaagctgggcgagagaaccagcagcagcttcagccccggcgacagccacgtggccttcatccccaacaacctgaccgacagcaagcccctggacgtgatcgaggaggagagaagactgggcagcggcaacaaggacagcgtgatggtgctggtgttcaaccccagcgtgggcgagaacaagaccgaggtgcccgagcccctggacccccagagcggcagaagcgaggccagagagagcaaggaggtgaccaccagcgtggccgagaacagaaacctgctggagaacgccgacaagatcgagagcaccagcgccagagccgacagcgtgctgaacatccccgcccccctgcaccccgagaccaccgtgaacatgacctaccagcccaccacccccagcagcagcttccaggacgtgagcgtgttcggcatggacgccggcagccccctggtggtgcccccccccaccgacagcgccagactgctgaacaccagccccaaggtgcccgacaagaacacctgccccagcggcatccccaagcccgtgttcacccacagcaaggacacccccagcagccaggagggcatggagaactaccaggtggagaagaccgaggagagaaccgagaccaagcccatcatcatgcccaagcccaagcacgtgagacccaagatcatcacctacatcagaagaaacccccaggccctgggccaggtggacgccagcctggtgcccgtgggcctgccctacgccccccccacctgcaccatgcccctgccccacgaggagaaggccgccggcggcgacctgaagcccagcgccaacctgtacgagaagttcaagcccgacctgcagaagcccagagtgttcagcagcggcctgatggtgagcggcatcaagccccccggccaccccttcagccagatgagcgagaagttcctgcaggaggtgaccgaccaccccggcaaggaggagttctgcagccccccctacgcccactacgaggtgccccccaccttctacagaagcgccatgctgctgaagccccagctgggcctgggcgccatgagcagactgcccagcgccaagagcagaatcctgatcgccagccagagaagcagcgccagcgccatccacccccccggccccatcaccaccgccaccagcctgtacagcagcgaccccagcgccgacctgaagaaggccagcagcagcaacgccgccaagagcaacctgcccaagagcggcctgagaccccccggctacagcagactgcccgccgccaagctggccgccttcggcttcgtgagaagcagcagcgtgagcagcgtgagcagcacccagagcggcgacagcgcccagcccgagcagggcagacccgccaccagaagcaccttcggcaacgaggagcagcccgtgctgaaggccagcctgcccagcaaggacacccccaagggcgccggcagagtggccccccccgccagcagcagcgtgaccgcccccagaagaagcctgctgcccgcccccaagagcaccagcacccccgccggcaccaagaaggacgcccagaaggaccaggacaccaacaagcccgccgtgagcagccccaagagagtggccgccagcaccaccaagctgcacagccccggctaccccaagcagagaaccgccgccgccagaaacggcttcccccccaagcccgacccccaggccagagaggccgagagacagctggtgctgagactgaaggagagatgcgagcagcagaccagacagctgggcgtggcccagggcgagctgaagagagccatctgcggcttcgacgccctggccgtggccacccagcacttcttcagaaagaacgagagcgccctggtgaaggagaaggagctgagcatcgagctggccaacatcagagacgaggtggccttccacaccgccaagtgcgagaagctgcagaaggagaaggaggagctggagagaagattcgaggacgaggtgaagagactgggctggcagcagcaggccgagctgcaggagctggaggagagactgcagctgcagttcgaggccgagatggccagactgcaggaggagcacggcgaccagctgctgagcatcagatgccagcaccaggagcaggtggaggacctgaccgccagccacgacgccgccctgctggagatggagaacaaccacaccgtggccatcaccatcctgcaggacgaccacgaccacaaggtgcaggagctgatgagcacccacgagctggagaagaaggagctggaggagaacttcgagaagctgagactgagcctgcaggaccaggtggacaccctgaccttccagagccagagcctgagagacagagccagaagattcgaggaggccctgagaaagaacaccgaggagcagctggagatcgccctggccccctaccagcacctggaggaggacatgaagagcctgaagcaggtgctggagatgaagaaccagcagatccacgagcaggagaagaagatcctggagctggagaagctggccgagaagaacatcatcctggaggagaagatccaggtgctgcagcagcagaacgaggacctgaaggccagaatcgaccagaacaccgtggtgaccagacagctgagcgaggagaacgccaacctgcaggagtacgtggagaaggagacccaggagaagaagagactgagcagaaccaacgaggagctgctgtggaagctgcagaccggcgaccccaccagccccatcaagctgagccccaccagccccgtgtacagaggcagcagcagcggccccagcagccccgccagagtgagcaccacccccagatag

SEQ ID NO: 30652 - DNA, 4140 bp, Artificial Sequence
  derived and/or modified sequence
atggcttcctctcctacaaaagggcttaccatgtctgtaccggttgcccctaagaaatcctgttacacacagctcagagataaccgcaatgcagcccgaaataacaatgaatctatcctcagtttgggagacaccaacgccaaccagattatgctggaagtatcatcctcacatgacgagtctaaaacgtgcgatcttggcgacgagatcggtaacaccaatagtagcgagcccgaaaacagaacacacttccacaaggagtttcaccaactgcagggtttcggcaagggctctcaggctggttctgcttcccttaaggattttagactttctagcaccatccagcgggagcttaacgaggaacatacagtcgagcgcggcactgatagcctgcagaccacaaggtcaattcagggaccgagcctctcttcctggaggaatgtgatgtcggaggcttctcttgatgtgttggccaagagggatgcagagatccccaggcatgtccccaaggacaagctcgccaagacgctggataatgaggagttgaggcggcactctctagaacgggcctcctcgagtgttgctgcagttggaagtctgacgccgcaacatccacaaccactttcgctcgactctcgcgaagccagaggccaaatccccggaggaggagaagggccgcaaaagactctgccagatcatgccgtccccgccgcattccctgccaccgactccaccagcgaaggaaagtcagtccgccacccgaagcccagtacaagcgagagtaaacaatcgaccccatcagagacacagacagtcggcgcccacgtcttgcaggtttgttctgagcacacctcccactcagctcaccctgaacccgccctgaatctgacactggcttctaaagagattccttccaagctggaggcccagcttggccaagggaaaggcgaggcaaagttagaccttaagtacgtgccccctagacgcgtggagcaggaaggaaaagctgcccaggagggctacttgggctgtcacaaggaggaaaatcttagtgcactcgaaggcagggacccttgcggtgaggcacatccagaggccaccgatgctcttgggcacctgctcaattccgacttacaccacctaggcgttggacggggaaattgcgaagagaaaagaggcgtgaatcccggagaacaggattcattacacaccacccctaagcagggatcagccagccttggaggcgccgataatcagccaaccggcaaaattagcccatgtgccggtgagaagctgggcgagcggacatctagctccttctcacctggagatagccacgtggcattcataccaaacaacttaaccgattcaaagcccctggacgtgatcgaagaggaacggaggcttgggtccgggaacaaggactccgtgatggttcttgtgttcaatccttccgtgggcgagaataaaaccgaagtcccagagcccctcgacccccaatccggccggtccgaggcccgagagagtaaggaagtgaccacttcagtggccgaaaatagaaacttactggaaaatgcagataagattgagagtaccagcgcccgcgcagatagtgtcctcaatataccagccccgctccaccccgagacaacagttaatatgacttaccagcccaccacacccagctcaagcttccaagatgtcagtgtctttgggatggacgcaggaagtccgctagttgtccctcctccgacagattccgcgcgtctgcttaacacgagcccaaaggtcccagacaagaacacctgccccagtggtattccaaagcccgttttcacgcactcgaaagataccccctcttctcaggaaggcatggaaaactaccaggtcgagaagaccgaggagcgtacggaaacgaagcccatcattatgcccaagcccaagcacgtccggcctaagatcatcacctacattagaaggaacccacaggctctcggccaggttgacgcctccctcgtcccagtcggtctaccatatgcacctccaacatgcactatgccgctaccccacgaggagaaggccgcaggtggcgaccttaagccctccgcaaatctttatgagaagttcaagcctgatctccagaagcccagggtcttttcaagcggcctcatggtcagcggtattaaaccacccgggcatcccttttcccagatgtccgagaaatttctgcaggaggtaacagatcaccctgggaaagaagagttctgctctccgccctacgcccattacgaggtacctcccaccttttaccgttcagcaatgctcctgaagccgcagctcggcttaggagctatgtctcggctgccgtccgccaagtctcgtattctgatagcctcacaaagatccagcgctagtgccatccaccctccaggtcccatcacaaccgccaccagcctgtattcgagtgacccgagcgcagatttgaaaaaggcctcatctagcaacgcagcaaagagcaatttgcccaaatcaggcctccggccgccgggttattcacggcttccggcggccaaactggctgcgttcggcttcgtcaggtccagtagtgtgtcaagtgtaagctccacacagagcggcgactcggcacagccagagcagggccgccccgccacgcggtctacgttcggaaatgaggaacagccagtcctgaaggcttcactgccttccaaagacactccgaaaggagctggacgggtcgcaccccctgccagttccagtgtgactgctccacgccgctctctcctgccagcacctaaatcgacaagcaccccagccgggactaagaaagatgcacagaaggaccaggacacaaacaaacctgctgtgagctcccccaagcgggtggcggccagcaccaccaagctacacagccccggataccctaaacagcggactgccgcagcacggaatgggtttccaccgaagccagatccacaagctagggaagcggaaaggcaactggtgttgcgacttaaggagagatgtgagcagcaaactcgccagctcggggtggcacagggggagctgaaacgagctatctgcgggttcgatgctctggcggtcgctacccagcactttttccggaagaacgaatccgccctggtgaaggaaaaagaactgagcattgaactcgccaacattcgggatgaggtcgcttttcacacagctaaatgtgaaaagcttcagaaggagaaagaggaactggaaagaagattcgaggacgaggtgaagcggctgggatggcagcagcaagcggagttgcaggaacttgaggagaggctgcagctgcaattcgaagctgagatggcccgcctgcaggaggagcacggagaccagctgctttcaattagatgccaacaccaagagcaggtcgaagacctgaccgcttcacacgacgccgccctcctagagatggagaacaaccatactgtcgctattacaattctgcaggatgaccacgaccacaaggtccaggaactaatgtccacccatgagcttgaaaagaaggaactggaggaaaactttgagaagctaagactttctctgcaggaccaggtggataccctgacctttcagagtcagtcactgcgggatcgcgcccgacggtttgaagaggccctcagaaagaacacggaggagcagttggaaattgcgttagccccttaccagcacttggaggaggatatgaagagcctcaaacaggttcttgagatgaaaaatcagcagattcatgagcaggagaaaaagattctagaactcgagaagctggctgagaagaatattatcctcgaagagaaaattcaggtgctacagcagcaaaatgaggacctgaaggctcgcatagatcagaacactgtggtaacaagacaactgagcgaagaaaacgcaaatttacaagagtatgtagagaaggagacccaagaaaaaaaaaggctgtctcgcacaaatgaggaattgctttggaagcttcagactggcgaccctacgtcgcccattaagctgtcgcctacaagccccgtgtaccgtggcagctctagtggaccttcttcccccgcacgggtgtccaccacaccccgatag

SEQ ID NO: 30653 - DNA, 4140 bp, Artificial Sequence
  derived and/or modified sequence
atggccagcagccccaccaagggcctgaccatgtctgtgcctgtggcccccaagaagagctgctacacccagctgcgggacaacagaaatgctgccaggaacaacaatgaaagcatcctgagcctgggggacaccaatgccaaccagatcatgctggaggtgagcagcagccatgatgagagcaagacctgtgacctgggagatgagatcggcaacaccaacagcagcgagccagaaaatagaacccacttccacaaggagttccaccagctgcagggctttgggaagggcagccaggccggcagcgccagcctgaaggacttccggctgagcagcaccatccagcgggagctgaatgaggagcacacagtggagcggggcacagacagcctgcagaccaccaggagcatccagggccccagcctgagctcctggagaaatgtgatgtctgaggccagcctggatgtgctggccaagagagatgctgagatccccaggcatgtgcccaaggacaagctggccaagaccctggacaatgaggagctgcggcggcacagcctggagcgggccagcagctctgtggccgctgtgggcagcctgaccccccagcacccccagcccctgagcctggacagccgggaggcccggggccagatccctgggggcggggagggcccccagaagaccctgcctgaccatgctgtgcctgctgccttccctgccacagacagcaccagcgagggcaagtctgtgcgccaccccaagcccagcaccagcgagagcaagcagagcaccccatctgagacccagacagtgggcgcccacgtgctgcaggtgtgcagcgagcacaccagccacagcgcccaccctgagcccgccctgaacctgaccctggccagcaaggagatccccagcaagctggaggcccagctgggccagggcaaaggagaggccaagctggacctgaagtatgtgcccccccggcgggtggagcaggagggcaaggccgcccaggagggctacctgggctgccacaaggaggagaacctgagcgccctggagggccgggacccctgtggggaggcccaccctgaggccacagatgccctgggccacctgctgaacagcgacctgcaccacctgggcgtgggccggggcaactgtgaggagaagaggggcgtgaaccctggagagcaggacagcctgcacaccacccccaagcagggcagcgccagcctgggcggcgctgacaaccagcccaccgggaagatcagcccctgtgccggggagaagctgggggagaggaccagcagcagcttcagccctggggacagccacgtggccttcatccccaacaacctgacagacagcaagcccctggatgtgattgaggaggagcggcggctgggcagcggcaacaaggacagcgtgatggtgctggtgttcaaccccagcgtgggggagaacaagacagaggtgcctgagcccctggacccccagagcggccgctctgaggcccgggagagcaaggaggtgaccacctctgtggccgagaacagaaacctgctggagaatgctgacaagattgagagcaccagcgcccgggctgacagcgtgctgaacatcccagcccccctgcaccctgagaccaccgtgaacatgacctaccagcccaccacccccagcagcagcttccaggatgtgtctgtgtttggcatggatgctggcagccccctggtggtgcccccacccacagattctgcccggctgctgaacaccagccccaaggtgcctgacaagaacacctgccccagcggcatccccaagcctgtgttcacccacagcaaggacacccccagcagccaggagggcatggagaactaccaggtggagaagacagaggagaggacagagaccaagcccatcatcatgcccaagcccaagcacgtgcggcccaagatcatcacctacatcagaagaaacccccaggccctgggccaggtggatgccagcctggtgcctgtgggcctgccctatgccccacccacctgcaccatgcccctgccccatgaggagaaggctgctggaggagacctgaagcccagcgccaacctgtatgagaagttcaagccagacctgcagaagcccagggtcttcagcagcggcctgatggtgtctggcatcaagcccccaggccaccccttcagccagatgtctgagaagttcctgcaggaggtgacagaccaccctgggaaggaggagttctgcagccccccctatgcccactatgaggtgccccccaccttctaccgcagcgccatgctgctgaagccccagctgggcctgggcgccatgagccggctgcccagcgccaagagccgcatcctgattgccagccagaggagcagcgccagcgccatccaccccccaggccccatcaccacagccaccagcctgtacagcagtgaccccagcgctgacctgaagaaggccagcagcagcaatgctgccaagagcaacctgcccaagagcggcctgcggcccccaggctacagccggctgcctgctgccaagctggccgccttcggctttgtgcgcagcagctctgtgtcctctgtgagcagcacccagagcggggacagcgcccagcctgagcagggccgcccagccaccaggagcacctttggaaatgaggagcagcctgtgctgaaggccagcctgcccagcaaggacacccccaagggggccggccgggtggcccccccagccagcagctctgtgacagcccccaggaggagcctgctgcctgcccccaagagcaccagcaccccagctggcaccaagaaggatgcccagaaggaccaggacaccaacaagccagctgtgagcagccccaagagggtggccgccagcaccaccaagctgcacagccctggctaccccaagcagaggacagctgctgccagaaatggcttcccccccaagccagacccccaggcccgggaggccgagcggcagctggtgctgcggctgaaggagcgctgtgagcagcagacccggcagctgggcgtggcccagggcgagctgaagagggccatctgtggctttgatgccctggccgtggccacccagcacttcttcaggaagaatgaaagtgccctggtgaaggagaaggagctgagcattgagctggccaacatcagagatgaggtggccttccacacagccaagtgtgagaagctgcagaaggagaaggaggagctggagaggagatttgaagatgaggtgaagaggctgggctggcagcagcaggccgagctgcaggagctggaggagcggctgcagctgcagtttgaggccgagatggcccggctgcaggaggagcacggggaccagctgctgagcatccgctgccagcaccaggagcaggtggaggacctgacagccagccatgatgctgccctgctggagatggagaacaaccacacagtggccatcaccatcctgcaggatgaccatgaccacaaggtgcaggagctgatgagcacccatgagctggagaagaaggagctggaggagaactttgagaagctgcggctgagcctgcaggaccaggtggacaccctgaccttccagagccagagcctgcgggaccgggccaggagatttgaggaggccctgaggaagaacacagaggagcagctggagatcgccctggccccctaccagcacctggaggaggacatgaagagcctgaagcaggtgctggagatgaagaaccagcagatccacgagcaggagaagaagatcctggagctggagaagctggccgagaagaacatcatcctggaggagaagatccaggtgctgcagcagcagaatgaagacctgaaggccagaattgaccagaacacagtggtgacccggcagctgtctgaggagaatgccaacctgcaggagtatgtggagaaggagacccaggagaagaagaggctgagcaggaccaatgaggagctgctgtggaagctgcagacaggagaccccaccagccccatcaagctgagccccaccagccctgtgtaccggggcagcagcagcggccccagcagccctgcccgggtgtccaccaccccaagatag

SEQ ID NO: 30654 - DNA, 4140 bp, Artificial Sequence
  derived and/or modified sequence
atggccagcagccccaccaagggcctgaccatgagcgtgcccgtggctcctaaaaaaagctgctacacccaactgcgagacaatcgcaatgcggctcgaaacaacaacgagtcgatactaagtcttggcgatacaaacgcaaatcagataatgctagaggtgtctagctcccatgatgagtccaaaacttgtgatctaggcgacgaaatcggcaacaccaactccagtgagcccgaaaacaggacccactttcacaaggagtttcatcaactccaaggattcgggaaggggagccaagcaggttccgcctctctaaaggattttaggctgagttccacgatccagcgggagctgaacgaagagcataccgtcgagaggggcacagattctctccagacgaccagatctatccagggacctagcttaagcagttggaggaatgtgatgagcgaagcttccttggatgtactggcaaaacgcgacgccgaaataccacgccacgtccccaaagacaaactggccaagacactggataatgaggagctccgcagacacagtttggagagggcctcgtctagcgtggctgcagtaggcagtctgaccccacaacatccccagcccctcagcctggattctcgagaggctcgagggcaaattcctggcgggggcgagggccctcagaaaacactgcccgatcatgctgtgcccgctgccttcccggccactgactcaaccagtgaaggcaagagtgtccggcatcccaaaccaagcactagcgaaagtaagcaatccacacctagtgaaactcagacagtgggtgcccacgtcctccaagtgtgctctgaacacactagccattctgcccaccctgagccagccttaaatctgacactggccagcaaggagatcccttccaaattggaagcacaactaggccaaggaaagggggaggcaaaactggacctcaaatatgttccccccagacgtgtggaacaggagggcaaagccgcccaagaaggatatctcggttgtcataaagaagagaacctgtcagctttggaaggccgcgacccttgcggtgaggcacaccctgaagcaacagacgcgctgggacacctcctcaactccgatctacaccacttgggcgtcggaaggggaaattgtgaagagaagcgcggggtaaaccctggagagcaggatagtctccacactacccccaagcaggggagtgcatcattgggcggcgcagataaccagcccaccggtaaaatcagcccatgcgccggcgagaaactgggagagagaaccagctctagtttctctccgggcgacagtcacgtcgctttcattccgaacaatctcacggacagcaagcctctcgacgtcatcgaagaagaacgtagactgggaagcgggaataaagattccgtaatggtgctggtctttaacccatctgtcggtgaaaacaaaactgaggtacccgaacccctggacccacaatcggggcgcagtgaggctagagagtctaaggaggtgaccaccagcgtggctgagaacaggaatcttctcgagaatgcagacaagatcgaatccacaagtgccagagccgattcagtactgaatatccctgcgccactgcaccctgagaccaccgtaaatatgacatatcagcctaccaccccatcatcttccttccaggatgtgtccgtcttcggcatggacgcaggtagcccactggtggtcccaccccccacagattcagcccgactattgaatacgagcccaaaggttcccgataaaaacacctgtccctccggtattccgaaacctgtgtttacacactccaaagacaccccctctagccaggaaggcatggagaattatcaggtggagaaaactgaagagagaactgagacaaagccaatcatcatgcctaagcctaaacatgtacgacccaaaataattacttatataagacgaaacccacaggcccttggccaggtggatgcctcgcttgtgcctgttgggctgccttatgcgcccccaacatgcaccatgcctcttccgcatgaggagaaagcggccggcggggatctgaagcccagtgccaatctttacgaaaagttcaagcccgacttgcaaaagccgagggtgttctccagcggtctcatggtgagcgggattaaacccccaggtcatccttttagtcagatgagcgaaaaattcctgcaggaagtcaccgatcatccgggaaaagaggaattctgctcgcccccatatgcacattatgaagtacctccaactttttatcggtccgctatgctgctaaaaccccagctgggcttgggggccatgagtaggctcccatccgcaaagtcccgcattcttatcgccagtcagcgcagctctgcctcagctatacatcctcctggtcctataacgacagcaactagtctgtactcatcggatccgtctgccgacttgaaaaaagcgtcttcatccaatgcggcaaagagcaatctgccaaagtcaggactcaggcctccaggatatagcaggctacccgcagcaaaactcgccgcgttcggctttgtgagatcttcctcagtttctagcgtttcgtcaacacaaagcggggactccgcacaaccggagcaaggacgaccagccacccgctccacttttggaaacgaggaacagcccgtcctgaaggcctcgctgcccagcaaggacacacctaagggcgctggacgcgttgctcccccagcctcctcaagtgttactgcaccccgcagatcactactgcctgcgccgaagtctacaagcacacccgccgggacaaagaaagatgcacaaaaagatcaagacacaaataagcctgcggtgagctccccaaaacgggtagctgcctcaacaactaagctgcacagccccgggtatccaaagcagcgaacggctgccgcaaggaatggcttcccccccaaaccggatcctcaggcccgggaagctgagcgtcagctggtcctcagactgaaggagcgatgcgaacagcagacaaggcagctaggtgtggcacagggcgagctcaagcgagccatctgcggctttgacgcgttggctgttgctacccagcacttttttcggaaaaatgagtccgcattggtgaaagaaaaggaactgtccatcgaactggcaaatattagagacgaggtggccttccacacagctaagtgcgaaaagttgcagaaagaaaaggaggaattggagagacggttcgaggacgaggtgaaacgcctgggttggcaacaacaagccgaactgcaagaattggaagagcgcctgcaattgcaattcgaggcagagatggcgaggctgcaggaggaacatggagaccaacttctgtctatccggtgccaacaccaggagcaagtggaggacctgactgcttcacatgatgctgcgttgctggaaatggaaaacaaccacaccgtggcaatcactatactgcaggatgaccacgatcataaggtgcaggaactgatgtcaacacacgagctcgaaaagaaagagttggaagagaacttcgagaagctccgactgtccctgcaagaccaagtcgatacactgacgtttcagagccagtctttgagggaccgagctcggcgcttcgaagaggcacttcgaaaaaacaccgaagagcagttggagatcgctctcgcgccttaccagcatctggaggaagacatgaagtcactcaagcaggtgcttgagatgaaaaaccaacagatccatgagcaggagaagaaaatcctggagttggagaagcttgctgagaagaacatcattttggaagaaaagatccaagtgctccagcaacaaaacgaagatctcaaggcgaggattgatcagaacactgtcgtgacaaggcagctgagcgaggagaacgccaatctccaggagtacgtcgagaaagagacacaggagaagaagaggttatcccggacaaacgaagaactactatggaaactgcagaccggcgatcccactagtccgatcaagctctctccaacttcccccgtgtatcgaggaagttcaagcgggccatcctctcctgcacgcgtgtcaaccaccccccgctag

SEQ ID NO: 30655 - DNA, 4140 bp, Artificial Sequence
  derived and/or modified sequence
atggcctcaagcccaactaaaggtctaacaatgagcgtgcccgtggcacctaagaaaagctgttacactcagctccgcgataacaggaatgccgcaaggaacaacaacgagtctatcctcagtctcggcgacaccaatgcaaaccagataatgctcgaggtgtcctcttctcatgatgagtctaaaacctgtgatttgggagatgagattggcaatacaaacagctccgagcctgaaaaccggacacattttcacaaggagttccaccagctgcaaggcttcggcaaaggttctcaggccggatcagcttctttaaaagattttagattaagctctaccattcagcgcgaactgaatgaggagcatacggttgaaagagggaccgacagcttgcaaaccaccagatccattcaaggtccgagcctgagctcctggcgcaacgtgatgtccgaagcctctttggacgtgttggccaagcgtgacgccgaaattccaaggcacgtgcctaaagataagttggcaaaaacactggacaacgaggaactgagaaggcactccctggagcgggcatcctcctccgtggctgcagtcgggtctctcacaccgcaacatccccaacccctgtcattggactcgcgggaagcccgagggcagattccgggtgggggtgaaggccctcagaaaaccctccccgaccatgccgtcccagccgcattccctgccaccgattcaaccagcgagggaaaaagtgtgcggcatcctaaaccatcaaccagtgaatcaaagcagagcaccccgtcagaaacccaaaccgtgggggctcacgtgttgcaggtttgctctgagcacacatctcactcagcccacccagagcccgcattgaacctcacactcgcttctaaagagatacctagcaaactggaagcccagctcgggcagggcaaaggggaggccaaactggacttaaaatatgtgccaccaaggcgtgtggaacaagagggcaaagccgctcaggagggatacctgggctgtcataaagaagagaatttgtccgcactggaaggtcgagacccctgtggtgaggcccacccggaggcaacagatgccctcggacaccttctcaattcggatttgcatcacctaggagtgggaaggggaaattgtgaagaaaagcgcggagtaaaccccggtgaacaagatagcctccacacaactcctaagcaagggtctgctagcttgggcggagcggataatcagccaacgggaaagataagcccctgcgccggtgaaaagttgggcgaacgaacttctagttccttctcccccggtgactctcatgttgctttcatacctaataacttaactgattcgaagccccttgacgtcatcgaggaggagaggcggttagggtccgggaataaggatagcgtaatggtgcttgtgtttaatccttctgtgggcgagaacaagaccgaggtccctgaaccgctggacccccagagtggacgctctgaagccagagaaagcaaggaggtcactaccagtgtggcagagaatcggaatctcctcgaaaatgctgacaaaattgaatcaacaagtgcacgcgcagatagcgttttaaatatcccggcacccctccacccggagaccaccgtgaatatgacataccaaccgactaccccgagtagctcattccaagacgtgtctgtatttgggatggacgccggttccccccttgtggttccccctccaaccgacagtgctcgtctgcttaatacatcacctaaggtgcccgacaagaacacctgtccgtcaggaatccccaagccagtcttcacacattcaaaggacactccatccagtcaggagggaatggagaattaccaagtagaaaaaacagaggaacgtactgaaacaaagccgatcattatgccaaaacccaaacatgtcaggcctaagattatcacctacattaggagaaacccacaggcactggggcaggttgacgcttctctggtgccagtgggcctcccttatgcccctccaacctgcacaatgccccttccacacgaggagaaagccgctggcggtgatctgaagcccagtgccaatctgtatgagaaattcaaacccgaccttcagaagcctcgcgtgttttctagtgggctcatggtgagtggcatcaagcctcctggtcaccccttctctcaaatgtctgagaaattcctgcaggaagtcactgatcatcccggaaaagaggagttttgctctcccccatacgcccactacgaggttccccctacattctataggtccgctatgctgttgaagcctcaactaggtcttggagccatgagccggcttccaagtgccaagagccggatcctgattgcttcacagcgatccagcgctagcgctatccacccccctggcccaataactaccgccactagcctgtattctagcgatccttctgcagatctgaaaaaagcttccagctccaacgctgccaaatcaaatttaccgaaaagtggattgcgccctcctggctacagtcggctgcccgcagctaagctggccgctttcggcttcgtcagatccagtagcgtaagttccgtttcctctacacagagcggcgatagcgcccagcctgaacaggggagacctgccacacgtagtacattcggcaacgaagaacagcctgtcctcaaagcctccctcccctctaaggatacccccaagggcgctggtagagtcgcaccgccagcatccagttcggttacagcaccgagacgttcgttgctcccagccccaaaatcaacatccacaccagcagggaccaaaaaggacgctcagaaggatcaggatacaaataagcccgctgtgtcctccccaaagagggtcgccgcatcgacaaccaagttacattctccaggctacccaaaacaaagaaccgccgctgccagaaatggcttccccccaaagcccgacccccaggcccgtgaagctgaacgtcagttggttctgcgactaaaagaacgatgtgagcagcagactcggcagcttggggtcgctcaaggcgaactaaagcgtgctatttgcggcttcgatgcccttgccgtcgccacccaacacttcttcaggaagaatgaaagcgccctggtaaaagagaaagaactctctatcgagctggcgaacatacgtgacgaggtggctttccataccgcaaagtgcgaaaagcttcagaaagagaaagaagaacttgagagacggtttgaagacgaagtgaagcgccttggatggcaacagcaagctgagttacaagagctggaggagaggcttcagctgcagttcgaggccgagatggctaggctgcaggaggaacatggggatcaattactatcaatccgatgtcagcaccaggagcaagtcgaggacctcacagcctcacacgatgcagcgctgctagaaatggaaaacaaccacacagtagcaatcacaatactgcaggatgaccacgatcataaagtgcaagaactcatgtccacccatgaattggagaagaaggagctcgaggagaactttgaaaaattaaggctgagtttgcaagatcaggtcgataccctgacctttcaatcccagagtctgcgggatagagcacggcgattcgaagaagccctgaggaaaaacacggaggaacagttagagattgccctggcgccataccaacacctggaagaggacatgaagtcgttaaagcaagtgttagagatgaagaatcagcagatacacgaacaggaaaaaaaaatactggaattggagaaattggccgagaagaacatcatccttgaggagaagattcaggtgcttcagcagcagaatgaggatttgaaggcgagaatcgatcaaaataccgtggtgacgcgtcagcttagcgaggagaacgccaaccttcaggagtacgtcgaaaaggagacacaggagaaaaagcggttgagtcgcactaacgaagaactgttatggaagctccagacaggggaccctacctcgccaatcaagctatcacccacctcccccgtttacagaggaagctcctccgggccttccagccccgctagagtgtccactactcccaggtag

SEQ ID NO: 30656 - DNA, 4747 bp, Artificial Sequence
  derived and/or modified sequence
atttcctcttaatctgattgcagcttgaaggcagcccatttccattaagtaggactgcatggcaagcagccccaccaaagggttgacaatgagcgtcccagtggctcctaagaaatcatgttacactcagttgcgggacaacagaaatgcagcaagaaataataatgaaagcatcttaagtctgggagatacgaatgccaatcaaatcatgttggaggtcagctcctctcatgacgagtccaagacatgtgacctgggagatgaaattggaaatacaaattcaagtgagccagaaaaccgtacccatttccataaggaatttcaccaacttcagggctttgggaaaggctctcaggctggctctgccagcctgaaagattttagactttcttcaaccattcagagggaactcaatgaagagcacacagtggagagaggcacagatagcctgcagaccacgcggagtattcagggaccaagtctgtcgagttggaggaatgtgatgagtgaggccagtctagacgttttggctaaaagggatgctgaaattccccggcatgttcccaaggataaactggcaaagacccttgacaatgaggaactgaggaggcattctttggaaagagcaagcagctctgtagctgcagtcgggagcctgactccgcagcatccacagcctctatccctcgactcccgggaagcacggggtcagatacctgggggtggggaggggccacagaagacattgccagaccacgctgtcccggcagctttccctgcaactgacagtacctcagagggaaagagtgtgcgtcatcctaaaccatctacctcagaaagcaagcagagcactccctcagagacccaaacagtgggggcacatgtactgcaggtgtgcagtgagcacacatcacattccgcccatccagagcctgctctgaatttgactttggcatcgaaggaaatcccaagtaaactggaagcacaattaggtcagggaaagggagaggccaagctggatctgaaatatgttcctcccaggagagttgaacaggagggaaaggcagcccaggaagggtatctgggatgccacaaggaagagaatctgtcagccttggagggaagggatccatgtggggaagcacacccggaagccaccgatgcacttggccatctgctgaacagtgacctccaccaccttggggtgggaagaggcaactgtgaagagaagagaggagtcaacccaggggagcaggattctctccacaccacccccaaacagggctctgcttccttaggaggggctgataatcagcccactggcaaaatttcaccatgtgcaggtgagaagttgggtgaaaggacatccagcagcttttcaccaggtgacagtcatgtggcttttattcctaataatctgactgacagcaagcccttggatgtcattgaggaggaaaggcggttgggcagtgggaataaggacagtgttatggttttggtgttcaatccttctgttggagagaacaagacggaggtgcctgagcccctggaccctcaaagtggccgctcagaagcacgggaaagcaaagaggtcaccacatctgttgctgaaaacaggaaccttctagagaatgcagataagattgaaagcacctcagcaagagcagattcagttctcaatattccagcacccctccacccagagacaactgtgaacatgacctaccagcctacaacacccagtagcagttttcaggatgttagcgtgttcggtatggatgcggggtcccccttggtagttccaccccctactgatagtgcacgcttgttgaacacgtcccccaaagtgcctgacaagaacacttgccccagtgggatccccaagcctgtcttcacacattccaaggacacaccttcctcgcaggagggaatggagaactatcaggttgaaaaaacagaggagaggacagaaactaagcccatcattatgcccaagcccaagcatgtgaggcccaagatcatcacctacatcaggaggaatccccaggccctgggccaggtggacgcctcgctggttccagtggggcttccatatgccccgcccacatgtaccatgcctcttccccacgaagagaaggcagcaggtggtgacctgaagccatctgccaacctctatgagaaattcaagccagacctgcagaagccaagggtcttcagttccggattgatggtgtctggaatcaagcccccgggacatcctttcagtcaaatgagtgaaaagtttttgcaggaggttacagaccaccctggaaaagaagagttttgttctcctccctatgctcattatgaagtccctccaactttctatcggtcagccatgctccttaagccccagctaggattgggtgcaatgtcccgtttaccatctgcaaagagcaggattctgattgcaagtcagaggtcttcagcgagcgccatccacccaccaggacccataacaacagccaccagtctctacagttccgatccttcagcagatttaaagaaagcttccagttcaaatgctgcaaaatccaatctcccgaaatctggtctccgtcctcccggatactcacgtctcccggcagccaaactggcggcatttggctttgtccggagctccagcgtctcctcagtctccagcacccagtccggggacagtgcacagccagagcagggccggccagccacccgttcaacctttgggaatgaagaacagccagttctgaaggcatctctgccttctaaggacacacccaagggggccggccgggtggcccctccagcatcctccagtgtgacagcaccccgcaggagtttacttccagcgccaaaatccacttccacacccgctggaacaaagaaagatgctcagaaagatcaagatacgaataaacctgctgtttcatctcctaagagagtagcagcttcaaccaccaagcttcattcaccaggatacccaaagcagaggactgcggcagctcgaaatgggtttccgcccaagccggacccgcaggcccgtgaggctgagcggcagctggtgctgcggctgaaggagcggtgtgagcagcagaccagacagctgggcgttgcgcaaggggagctgaagagggccatctgcggctttgatgccctcgccgtggccacgcagcatttctttagaaagaatgaaagtgcccttgtgaaagaaaaagagctgtcaatcgaacttgcaaacatcagggatgaagttgccttccatacagcaaagtgcgagaaactacaaaaggagaaggaggagctggagaggcggttcgaggacgaggtgaagaggctgggctggcagcagcaggccgagctccaggagctggaggagcggctgcagctgcaattcgaggcggaaatggcgcgcctgcaggaggagcacggtgaccagctgctgagcatccggtgtcaacaccaggagcaggtggaagatctcaccgccagccatgatgctgctctcctagagatggaaaataaccacacagttgccatcacaatcctgcaggatgaccacgaccacaaagtccaagaattgatgtccactcatgagcttgaaaagaaagaattggaagaaaattttgaaaaactgcggctgtcattgcaggaccaggtggacacgctgaccttccagagccagtctctgcgggacagagcccgccgcttcgaagaggccttgaggaagaacacagaggagcagctggagattgcattggctccttatcagcacttggaagaagacatgaagagtctgaagcaggtattagaaatgaagaatcagcaaatacacgagcaagaaaagaagattcttgagctggaaaagctggcagaaaagaacattatcctagaagaaaagatccaggttctccaacagcagaacgaagacctcaaagcaaggattgaccaaaacacagttgtcaccagacagctgtcggaggaaaatgctaacctccaggaatatgttgagaaggaaacccaggagaagaagagattgagccgaaccaatgaagagctgctttggaagctccaaactggggacccgaccagtccgattaaactctcgcccacatctcccgtttaccgcggctcctcctcggggccctcctctccggccagagtcagcacaacacccagatgacgccactacacggcctgcgggagctccggcttctcgtcctccggtctccaccctgagggagcaccgacccggtgccgccggagctggccctgtgcgcatgctcagtagctgcgaatgcatcctaggcgcgtcctcctctgatccccgtgtaagactgccctggtgtcggcacttaggaatgtgtaaatggtaaagtctgatgtgcaaacgttttaccatagttagagccaaaagaaagacacttgcaattgttcttgagcaatgaactttcactgcagaatttcaggttagttacaaaaagctcagttttcaatatacattgaataatcattgtgtactgcaccgatatgtgtgtatatttagatatacgtatatacacatgctgcggttctgaatttcattttttataacatgaagtgctgacatattttagtgaaggtcagcagttttctaacttgtgcctaagaattattgggaaatgaaaatgcatttctatctagcttcccaggaatatttctacccaaaatagaaaaaggaaaaaaaaaaaga

SEQ ID NO: 30657 - protein, 852 aa, Artificial Sequence
  derived and/or modified sequence
MSLFKARDWWSTILGDKEEFDQGCLCLANVDNSGNGQDKIIVGSFMGYLRIFSPHPAKTGDGAQAEDLLLEVDLRDPVLQVEVGKFVSGTEMLHLAVLHSRKLCVYSVSGTLGNVEHGNQCQMKLMYEHNLQRTACNMTYGSFGGVKGRDLICIQSMDGMLMVFEQESYAFGRFLPGFLLPGPLAYSSRTDSFLTVSSCQQVESYKYQVLAFATDADKRQETEQQKLGSGKRLVVDWTLNIGEQALDICIVSFNQSASSVFVLGERNFFCLKDNGQIRFMKKLDWSPSCFLPYCSVSEGTINTLIGNHNNMLHIYQDVTLKWATQLPHIPVAVRVGCLHDLKGVIVTLSDDGHLQCSYLGTDPSLFQAPNVQSRELNYDELDVEMKELQKIIKDVNKSQGVWPMTEREDDLNVSVVVSPNFDSVSQATDVEVGTDLVPSVTVKVTLQNRVILQKAKLSVYVQPPLELTCDQFTFEFMSLNVLGIPRVIQCKFRLPLKLICLPGQPSKTASHKITIDTNKSPVSLLSLFPGFASQSDDDQVNVMGFHFLGGARITVLASKTSQRYRIQSEQFEDLWLITNELILRLQEYFEKQGVKDFACSFSGSIPLQEYFELIDHHFELRINGEKLEELLSERAVQFRAIQRRLLARFKDKTPAPLQHLDTLLDGTYKQVIALADAVEENQGNLFQSFTRLKSATHLVILLIALWQKLSADQVAILEAAFLPLQEDTQELGWEETVDAAISHLLKTCLSKSSKEQALNLNSQLNIPKDTSQLKKHITLLCDRLSKGGRLCLSTDAAAPQTMVMPGGCTTIPESDLEERSVEQDSTELFTNHRHLTAETPRPEVSPLQGVSE

SEQ ID NO: 30658 - protein, 852 aa, Artificial Sequence
  derived and/or modified sequence
MSLFKARDWWSTILGDKEEFDQGCLCLANVDNSGNGQDKIIVGSFMGYLRIFSPHPAKTGDGAQAEDLLLEVDLRDPVLQVEVGKFVSGTEMLHLAVLHSRKLCVYSVSGTLGNVEHGNQCQMKLMYEHNLQRTACNMTYGSFGGVKGRDLICIQSMDGMLMVFEQESYAFGRFLPGFLLPGPLAYSSRTDSFLTVSSCQQVESYKYQVLAFATDADKRQETEQQKLGSGKRLVVDWTLNIGEQALDICIVSFNQSASSVFVLGERNFFCLKDNGQIRFMKKLDWSPSCFLPYCSVSEGTINTLIGNHNNMLHIYQDVTLKWATQLPHIPVAVRVGCLHDLKGVIVTLSDDGHLQCSYLGTDPSLFQAPNVQSRELNYDELDVEMKELQKIIKDVNKSQGVWPMTEREDDLNVSVVVSPNFDSVSQATDVEVGTDLVPSVTVKVTLQNRVILQKAKLSVYVQPPLELTCDQFTFEFMNRNPDGIPRVIQCKFRLPLKLICLPGQPSKTASHKITIDTNKSPVSLLSLFPGFASQSDDDQVNVMGFHFLGGARITVLASKTSQRYRIQSEQFEDLWLITNELILRLQEYFEKQGVKDFACSFSGSIPLQEYFELIDHHFELRINGEKLEELLSERAVQFRAIQRRLLARFKDKTPAPLQHLDTLLDGTYKQVIALADAVEENQGNLFQSFTRLKSATHLVILLIALWQKLSADQVAILEAAFLPLQEDTQELGWEETVDAAISHLLKTCLSKSSKEQALNLNSQLNIPKDTSQLKKHITLLCDRLSKGGRLCLSTDAAAPQTMVMPGGCTTIPESDLEERSVEQDSTELFTNHRHLTAETPRPEVSPLQGVSE

SEQ ID NO: 30659 - DNA, 2559 bp, Artificial Sequence
  derived and/or modified sequence
atgagcctgttcaaggccagggattggtggtccaccatcctcggcgacaaggaagaattcgaccaaggctgcctttgcctggccaacgtagacaacagcggaaacgggcaggataagattatagttggctcgttcatgggttacctccgcatcttcagtcctcaccctgcaaaaaccggtgatggggcgcaagcggaagatctccttttggaagtggaccttagagatcccgtgttacaggtcgaagtgggcaaatttgtaagcggaactgaaatgttgcacctggcggttctgcattcacggaagctgtgcgtctactctgtttccggtactctcggaaatgtcgaacacggaaaccagtgtcaaatgaaattgatgtacgaacacaacttgcaacgtacagcatgtaatatgacctacggttcctttgggggcgtcaaagggcgcgatctgatctgtattcagtctatggatggcatgcttatggttttcgaacaagagtcatatgcctttggccgattcctgccagggtttttgctgccaggcccccttgcctactcctcacggacagattcatttttgacagtctcaagctgccagcaagtcgagtcatataagtaccaagtcctcgctttcgccaccgacgctgataagagacaagagactgaacagcagaaactggggagtgggaagcgcttggtggttgactggactttaaatatcggagagcaagcgctggacatttgcatagtgtctttcaatcagtccgcgtcctctgtcttcgttctgggagagaggaactttttctgcctcaaggacaacggacagatccgattcatgaagaaactggattggtcaccatcatgtttcctcccatattgttctgtttcggagggcacaataaatacccttataggcaaccataacaatatgcttcatatataccaggatgtgactcttaagtgggctactcaattgccacacataccggtggctgtgagggtgggatgcttacacgacttgaagggcgtcatcgtaacgctttcagacgacgggcacctccagtgttcttacctcggaacagatccatctctgtttcaggccccaaacgtgcagtccagagagctgaactacgacgagctggatgttgaaatgaaggaactgcagaaaatcatcaaagacgtcaataaatctcaaggcgtctggccaatgactgaacgagaggacgatctgaacgtgtccgttgtggtcagcccaaatttcgattccgtatcccaagcaacagatgtcgaagtgggtacagacctagtgcctagtgtcactgttaaagtgacccttcaaaatagagtgatcctccagaaggccaaactttctgtgtatgtccaaccaccactggagctgacctgcgaccaatttacgttcgaatttatgtccttgaatgtcctgggtattccacgtgtgatccagtgcaaatttcggttacccctcaaacttatttgtctgcctggccagccctccaaaacagcctcacataaaattacaatcgataccaacaagtcccccgtcagcctcctgtccctttttcccgggtttgcaagccagtctgacgacgatcaggtgaatgtgatgggattccattttctcggaggcgcccggatcacagtgttagcttccaagacaagtcaacgatatcgaattcagtccgagcagtttgaagatctgtggctcataacaaacgagttgatactaaggctccaggagtactttgagaagcagggagtgaaggatttcgcttgtagcttctccggtagcattcctctgcaggagtactttgaactgatcgatcaccatttcgagcttagaataaacggggagaaacttgaggaattgctttccgagagagcggtccaattccgcgctatacagaggagactcttggccagatttaaggataagacccccgccccactccagcatctggataccctgctggatgggacatacaagcaggtgattgctcttgcagacgctgtggaagaaaaccagggaaaccttttccagtccttcactcgactgaagtccgcaacacatttggtgatcctgttgatcgccctctggcagaagctgtcagccgatcaagtggcaatattagaagcagcttttctgcccctgcaggaggacacccaggagctcggatgggaggaaaccgtggacgcagccatctcccatctgctgaaaacatgcctcagcaagagttcaaaggaacaggcacttaacctgaactcccaattaaacatcccaaaagacacttctcaactcaaaaaacacattactttactatgcgaccgtctcagcaaaggcgggcgcctgtgtctctccaccgatgcggccgccccgcagacgatggtcatgcctggaggatgcaccacaatcccagagagcgatctggaggagcggagtgttgaacaggacagcaccgagctgtttactaatcaccgtcacctgaccgccgagaccccccgcccggaggtgagccccttacaaggggtgtccgaatag

SEQ ID NO: 30660 - DNA, 2559 bp, Artificial Sequence
  derived and/or modified sequence
atgagtctttttaaggcccgtgattggtggtccaccatcctcggcgacaaagaagagttcgatcaaggttgtttatgtctggccaatgttgacaatagtggtaacggccaagacaaaattatcgtcggatcattcatgggttatctccgcattttctccccgcatcccgctaaaactggggatggcgctcaagccgaagacctgttactggaggtggacctccgggaccccgtcctgcaagttgaagtgggcaaatttgtcagcggaactgaaatgctgcacctagctgttctgcactctcggaagctgtgcgtctattccgtcagtggcacgctggggaacgtggaacacggcaaccagtgccagatgaaacttatgtatgaacacaaccttcagaggactgcttgtaatatgacgtatggatccttcgggggggttaagggccgagacctgatatgtattcagtccatggacggaatgctgatggtgttcgagcaggagagctacgccttcggccgcttcctgcccgggttcctgctgcccggccccctcgcttattctagccgcacagactcattcctgaccgtttcgtcttgccagcaggtcgagagctacaagtaccaggtgcttgcctttgctactgacgcagataagaggcaggaaactgagcagcagaagctgggcagcggaaaaaggctggtggtcgattggaccctaaacataggcgagcaggctctcgatatctgcatcgtctccttcaatcaaagcgcaagttctgtgtttgtactaggtgagagaaactttttttgcctgaaggataacggccagattagatttatgaagaagctggactggtctccctcatgctttctgccatactgcagcgtctcagagggtaccattaatacgctaattggcaaccataacaacatgttacacatctaccaggacgttaccctgaaatgggctactcagctgcctcatatccctgtagcagtgagagtgggctgtctgcatgacttgaagggagtgatcgttacgctgagcgacgatgggcaccttcagtgcagttatttgggcacagatccctctctgttccaggcaccaaacgtacagagccgtgagctgaattacgatgagctggacgttgaaatgaaagagctacagaagattattaaggatgtaaataaatctcagggggtatggcccatgacagagagggaggacgacctgaatgtgagtgttgtggtgagcccgaacttcgactcagtgagccaggctacggatgttgaagtcggaaccgaccttgtaccgtctgtgaccgtgaaagtcacacttcagaatcgagtgatcctccagaaggcgaagttgagcgtgtacgtccagccccctcttgaactcacttgcgatcagtttacgttcgagttcatgaaccgcaatcccgacgggatcccaagagtgatacagtgcaagttcaggcttcccctcaaactgatctgccttcccgggcagccctctaagacagcttcccacaagataaccatagacaccaataagagcccagtgtccctgttgtctttgtttccgggcttcgcaagccagtccgacgatgatcaggttaatgtaatgggtttccacttcctaggaggtgccaggatcacggtgcttgcctcaaagacctctcaaaggtatagaattcaaagcgagcaatttgaagacctttggctgatcacgaatgaattgatcttacggctgcaggagtacttcgagaagcagggggtgaaggatttcgcctgttccttcagtggaagtatacctctgcaggagtatttcgagttgatcgatcatcactttgaacttcggatcaacggagagaaactggaggaactgctgtctgagcgggcagttcaattcagggccatacagcgtagactcctggctcgcttcaaggacaaaacacctgccccacttcagcatttggataccctgttggatggtacgtataagcaggtcattgctctcgctgacgcagtggaagaaaatcagggcaacttgtttcagtcttttacacgtctgaaatcagcaacccatcttgtcatcttacttatcgctctgtggcagaagttatctgccgatcaggttgccattctcgaagccgcctttttacccctgcaggaagacacacaggagctcgggtgggaagagacagttgacgcagcaatatcacacctgctgaagacttgtctgtccaagagctcaaaagaacaggcccttaatctaaactctcagctcaacataccaaaagatacgagccagctgaagaaacatattacgcttctgtgcgacaggctcagcaaaggagggagactgtgcctctctaccgacgcagcagcccctcaaactatggtgatgcctggaggctgcactacgattcccgaatccgatttagaagagaggagcgtggaacaggactcaactgagctgttcacgaatcatcgacatctcacagccgaaactccccggcccgaggtgagcccactgcagggggtgagcgagtag

SEQ ID NO: 30661 - DNA, 2559 bp, Artificial Sequence
  derived and/or modified sequence
atgagcctcttcaaggcccgggactggtggagcaccatcctgggggacaaggaggagtttgaccagggctgcctgtgcctggccaacgtggacaacagcggaaatggccaggacaagatcatcgtgggcagcttcatgggctacctgcgcatcttcagcccccacccagccaagacaggagatggagcccaggccgaggacctgctgctggaggtggacctgcgggaccctgtgctgcaggtggaggtgggcaagtttgtgtctggaacagagatgctgcacctggccgtgctgcacagcaggaagctgtgtgtgtacagcgtgtctggcaccctgggcaatgtggagcacggcaaccagtgccagatgaagctgatgtatgagcacaacctgcagaggacagcctgcaacatgacctacggcagctttggaggagtgaagggccgggacctgatctgcatccagagcatggatggcatgctgatggtgtttgagcaggagagctatgccttcggccgcttcctgcccggcttcctgctgcccggccccctggcctacagcagcaggacagacagcttcctgactgtgagcagctgccagcaggtggagagctacaagtaccaggtgctggcctttgccacagatgctgacaagaggcaggagacagagcagcagaagctgggcagcggcaagaggctggtggtggactggaccctgaacattggagagcaggccctggacatctgcatcgtgtccttcaaccagagcgccagctctgtgtttgtgctgggggagaggaacttcttctgcctgaaggacaatggccagatccgcttcatgaagaagctggactggagccccagctgcttcctgccctactgcagcgtgtctgagggcaccatcaacaccctgattggcaaccacaacaacatgctgcacatctaccaggatgtgaccctgaagtgggccacccagctgccccacatccctgtggccgtgcgggtgggctgcctgcatgacctgaagggcgtgattgtgaccctgagtgatgatggccacctgcagtgcagctacctgggcacagaccccagcctcttccaggcccccaacgtgcagagccgggagctgaactatgatgagctggatgtggagatgaaggagctgcagaagatcatcaaggatgtgaacaagagccagggcgtgtggcccatgacagagcgggaggatgacctgaatgtgtctgtggtggtgagccccaactttgattctgtgtcccaggccacagatgtggaggtgggcacagacctggtgcccagcgtgacagtgaaggtgaccctgcagaacagagtcatcctgcagaaggccaagctgtctgtgtatgtgcagccccccctggagctgacctgtgaccagttcacctttgagttcatgagcctgaatgtgctgggcatccccagggtcatccagtgcaagttccggctgcccctgaagctgatctgcctgcccggccagcccagcaagacagccagccacaagatcaccatcgacaccaacaagagccctgtgtccctgctgagcctcttccctggctttgccagccagagtgatgatgaccaggtgaatgtgatgggcttccacttcctgggcggggcccgcatcaccgtgctggccagcaagaccagccagcgctaccgcatccagagcgagcagtttgaggacctgtggctgatcaccaatgaactcatcctgcggctgcaggagtactttgagaagcagggcgtgaaggactttgcctgcagcttcagcggcagcatccccctgcaggagtactttgagctgattgaccaccactttgagctgcgcatcaatggagagaagctggaggagctgctgtctgaaagagctgtgcagttccgggccatccagaggcggctgctggcccgcttcaaggacaagaccccagcccccctgcagcacctggacaccctgctggatggcacctacaagcaggtgattgccctggctgatgctgtggaggagaaccagggcaacctcttccagagcttcacccggctgaagagcgccacccacctggtgatcctgctgattgccctgtggcagaagctgtctgctgaccaggtggccatcctggaggccgccttcctgcccctgcaggaggacacccaggagctgggctgggaggagaccgtggatgctgccatcagccacctgctgaagacctgcctgagcaagagcagcaaggagcaggccctgaacctgaacagccagctgaacatccccaaggacaccagccagctgaagaagcacatcaccctgctgtgtgaccggctgagcaagggcggccgcctgtgcctgagcacagatgctgctgccccccagaccatggtgatgcctgggggctgcaccaccatccctgagagtgacctggaggagaggtctgtggagcaggacagcacagagctgttcaccaaccaccgccacctgacagctgagacccccaggcctgaggtgagccccctgcagggcgtgtctgagtag

SEQ ID NO: 30662 - DNA, 2559 bp, Artificial Sequence
  derived and/or modified sequence
atgagcctcttcaaggcccgggactggtggagcaccatcctgggggacaaggaggagtttgaccagggctgcctgtgcctggccaacgtggacaacagcggaaatggccaggacaagatcatcgtgggcagcttcatgggctacctgcgcatcttcagcccccacccagccaagacaggagatggagcccaggccgaggacctgctgctggaggtggacctgcgggaccctgtgctgcaggtggaggtgggcaagtttgtgtctggaacagagatgctgcacctggccgtgctgcacagcaggaagctgtgtgtgtacagcgtgtctggcaccctgggcaatgtggagcacggcaaccagtgccagatgaagctgatgtatgagcacaacctgcagaggacagcctgcaacatgacctacggcagctttggaggagtgaagggccgggacctgatctgcatccagagcatggatggcatgctgatggtgtttgagcaggagagctatgccttcggccgcttcctgcccggcttcctgctgcccggccccctggcctacagcagcaggacagacagcttcctgactgtgagcagctgccagcaggtggagagctacaagtaccaggtgctggcctttgccacagatgctgacaagaggcaggagacagagcagcagaagctgggcagcggcaagaggctggtggtggactggaccctgaacattggagagcaggccctggacatctgcatcgtgtccttcaaccagagcgccagctctgtgtttgtgctgggggagaggaacttcttctgcctgaaggacaatggccagatccgcttcatgaagaagctggactggagccccagctgcttcctgccctactgcagcgtgtctgagggcaccatcaacaccctgattggcaaccacaacaacatgctgcacatctaccaggatgtgaccctgaagtgggccacccagctgccccacatccctgtggccgtgcgggtgggctgcctgcatgacctgaagggcgtgattgtgaccctgagtgatgatggccacctgcagtgcagctacctgggcacagaccccagcctcttccaggcccccaacgtgcagagccgggagctgaactatgatgagctggatgtggagatgaaggagctgcagaagatcatcaaggatgtgaacaagagccagggcgtgtggcccatgacagagcgggaggatgacctgaatgtgtctgtggtggtgagccccaactttgattctgtgtcccaggccacagatgtggaggtgggcacagacctggtgcccagcgtgacagtgaaggtgaccctgcagaacagagtcatcctgcagaaggccaagctgtctgtgtatgtgcagccccccctggagctgacctgtgaccagttcacctttgagttcatgaacagaaatccagatggcatccccagggtcatccagtgcaagttccggctgcccctgaagctgatctgcctgcccggccagcccagcaagacagccagccacaagatcaccatcgacaccaacaagagccctgtgtccctgctgagcctcttccctggctttgccagccagagtgatgatgaccaggtgaatgtgatgggcttccacttcctgggcggggcccgcatcaccgtgctggccagcaagaccagccagcgctaccgcatccagagcgagcagtttgaggacctgtggctgatcaccaatgaactcatcctgcggctgcaggagtactttgagaagcagggcgtgaaggactttgcctgcagcttcagcggcagcatccccctgcaggagtactttgagctgattgaccaccactttgagctgcgcatcaatggagagaagctggaggagctgctgtctgaaagagctgtgcagttccgggccatccagaggcggctgctggcccgcttcaaggacaagaccccagcccccctgcagcacctggacaccctgctggatggcacctacaagcaggtgattgccctggctgatgctgtggaggagaaccagggcaacctcttccagagcttcacccggctgaagagcgccacccacctggtgatcctgctgattgccctgtggcagaagctgtctgctgaccaggtggccatcctggaggccgccttcctgcccctgcaggaggacacccaggagctgggctgggaggagaccgtggatgctgccatcagccacctgctgaagacctgcctgagcaagagcagcaaggagcaggccctgaacctgaacagccagctgaacatccccaaggacaccagccagctgaagaagcacatcaccctgctgtgtgaccggctgagcaagggcggccgcctgtgcctgagcacagatgctgctgccccccagaccatggtgatgcctgggggctgcaccaccatccctgagagtgacctggaggagaggtctgtggagcaggacagcacagagctgttcaccaaccaccgccacctgacagctgagacccccaggcctgaggtgagccccctgcagggcgtgtctgagtag

SEQ ID NO: 30663 - DNA, 2559 bp, Artificial Sequence
  derived and/or modified sequence
atgagcctgttcaaggcccgggactggtggagcaccatcctgggcgataaagaggagttcgaccaaggatgcctgtgcttggcgaatgtggacaatagtggaaacggacaagataaaattatcgtaggctctttcatgggatacctgcgtattttttccccacacccagctaaaacgggggatggtgcccaagccgaagacctcctgctggaggtcgatcttagggaccccgtgctccaggttgaggttggcaagttcgtctccggcactgaaatgttgcacttagccgtactccacagtcgaaagctgtgtgtgtactcggtttctgggacactgggcaatgtcgaacatggcaaccagtgccagatgaagctaatgtatgagcataatctgcagagaactgcatgtaacatgacgtatgggagtttcggaggagtcaagggcagggatctcatatgcatccaaagcatggatggtatgctcatggtgtttgagcaggagtcctacgcgttcgggagatttctgccgggcttcctgctccctggacctctggcatactcttccagaaccgactcttttttgaccgtcagctcttgccagcaagtggagtcctataagtaccaggtgctggcttttgccactgacgccgataagcgtcaggagactgagcagcaaaaactggggagtggtaagaggctggtggtcgattggacgctgaacatcggggagcaggctctggatatatgtatagtttcatttaatcagtctgcctcatccgtattcgtgttgggcgagcgaaattttttttgtctgaaggataacggacagataaggttcatgaaaaaactcgattggtcacctagctgttttctgccctactgtagtgtcagcgagggtaccattaacacacttatcggtaatcacaataacatgctgcacatttatcaggacgttaccctcaaatgggcaacgcagttaccccatatacctgtggcggtgcgagtaggctgtctccatgacctcaagggggtgatcgttacactgagcgacgacgggcacctgcagtgttcctatctggggacagatccctctctgttccaggcccctaatgtgcagtctagagaacttaactacgacgaactggatgtggaaatgaaggagcttcaaaaaataatcaaagacgtgaataaatcccagggcgtgtggccaatgacggagagggaggacgatctgaacgtgtcggtagttgtcagcccgaattttgacagtgtgagccaggctacggatgttgaagtgggtactgacctcgtgccttccgtcactgtaaaggtaaccctgcagaatagagtgatcctgcaaaaagcaaagctcagcgtttacgtgcagcctcccctagagcttacatgtgaccagttcacatttgagtttatgtccttgaatgttcttggaatccctcgagtgattcaatgtaaattcagactgccacttaagctcatctgcctacccggtcaaccttccaagacggcctctcacaaaatcaccattgacaccaacaaaagcccagtgtcacttttaagccttttccccggatttgcatcacagagcgatgatgaccaggtgaacgtaatgggcttccacttcttagggggcgcacgcattacagttctggcatctaagactagtcagcgataccgcattcaaagcgaacagttcgaagatctttggctcattacaaatgagctgatactacggttgcaagagtatttcgagaagcagggggtcaaggacttcgcttgctcgtttagtgggtcgatacctttgcaggaatatttcgagctgatcgatcatcatttcgaactgaggatcaatggcgagaaactagaggagcttctctctgagagggccgtgcaattccgggctatccagcgtcggctgcttgctcgattcaaggacaagacccctgcacccctccagcacctggacactctgctggacgggacctacaagcaggtgattgccctggccgacgccgtggaggaaaatcaaggaaacctctttcagtctttcacaaggcttaaaagcgccacccacttggtcattctccttatcgccctctggcagaagctcagcgcggatcaagtagccatcctggaagctgccttcttgccactccaggaggacacccaggagttgggatgggaagagactgtcgatgcagcgattagtcacctgttgaagacttgcctctccaagagtagtaaagaacaggcactaaatttgaattcacaactgaatatccccaaagatactagccaactgaagaagcatatcacccttctgtgtgaccggctatctaaaggcgggcggctatgcttgtctacagacgccgcagcacctcagacgatggtaatgcctggggggtgcactacaattcccgaatcagaccttgaagaacggtcggtggagcaggactccaccgaattgttcacaaaccatcggcatctgaccgcggaaacaccgcgcccagaggtctcaccgcttcaaggggtcagcgaatag

SEQ ID NO: 30664 - DNA, 2559 bp, Artificial Sequence
  derived and/or modified sequence
atgagcctgttcaaggcccgggactggtggagcaccatcctgggcgataaagaagaattcgaccagggctgtctctgtctcgcaaacgttgacaattccgggaatggccaagataaaattatcgtgggctcctttatgggctatctaagaattttttctccacatccagcgaaaaccggagatggcgctcaagctgaagatcttctattggaagttgatctacgtgacccagtcctccaggtcgaggttggcaagttcgtctctggaaccgagatgctccatttggcggtgttgcactcgaggaaattgtgtgtgtatagcgtctcgggcacattggggaatgttgagcacgggaatcagtgtcaaatgaaacttatgtacgaacataaccttcagaggaccgcctgcaatatgacctacggctcctttggcggggtcaaaggtcgggacctgatctgtatccaaagcatggatggaatgctgatggtctttgaacaagagtcctatgccttcggccgattcttgcctggcttccttctgcctggccccctagcatatagcagtaggactgattcatttctcaccgtgtcatcatgtcagcaggtcgagtcctacaagtaccaggtgctagccttcgcaacagatgcagataagcgtcaggagacggagcaacaaaaactgggatccggaaagagactcgtggtggattggacgctgaatatcggagagcaggccttggacatctgtatagtgtcctttaatcagtcggcctctagcgtattcgtcttaggggagaggaactttttttgtctgaaggataacgggcagatccgcttcatgaagaaactcgactggtccccatcgtgctttctgccgtactgctctgttagcgaaggtaccatcaacacccttatcgggaaccataataacatgcttcatatctatcaggacgtgaccctcaaatgggctacacagttaccccatatacctgtagccgttcgggtgggctgcctccacgatctaaagggcgtgatcgtaaccttatcggacgacggtcatctccaatgctcctacctgggcacagacccatccctctttcaggccccaaatgttcaatctcgcgagctgaactacgatgagttagatgtcgagatgaaggagttgcaaaaaatcatcaaagacgtgaacaaatcacagggagtctggccaatgaccgagcgagaggatgatttgaacgtgtctgtcgtggtgtctccaaatttcgacagcgtttcccaggcaactgatgtcgaagtgggtaccgacctcgtgccttcggtcactgttaaggtgacactccagaaccgggtgatcttacagaaggcaaaattgtctgtctacgtccagccacctttagaactgacttgcgatcaatttactttcgaatttatgaacaggaatcctgacggtataccgagagttatacagtgtaagttccgtctgccactcaaactgatctgtcttccaggccagccaagcaaaaccgcttcccataaaatcacaatagacacaaacaagagtcccgtcagcttgttgagcctgttccccgggttcgcctctcaatcagatgacgatcaggtcaatgtgatgggcttccactttctggggggcgcgagaatcaccgtgctggcaagtaagacgagtcagcgctacaggatacagtcggagcagttcgaggatttgtggcttatcaccaatgaattgatcctgagactgcaggagtatttcgagaaacaaggagtcaaagacttcgcttgcagcttctccggatcgatcccactgcaggagtacttcgagctgattgaccaccactttgaattgcgcattaatggggaaaaactcgaggaactgctgtccgagcgagctgtgcagttcagggccatacagagacgccttctagcaagatttaaggacaaaactcccgcgccccttcaacatttggatacactgcttgatggaacgtataaacaggtaattgccctggccgacgccgtcgaagagaaccagggcaatctatttcaatctttcactaggttgaagtcagcgacacatcttgtgatcctgctcatcgctctttggcagaaactgagcgctgaccaggtagctattctcgaggctgcatttctgcccctccaagaggacacccaagaactggggtgggaggaaaccgtggacgctgcaataagtcacctccttaaaacttgcctctccaagtccagtaaggaacaggcgcttaatttgaactctcagctcaacattccaaaggatactagtcagctcaagaaacacatcacattactttgtgataggctgtcaaagggcggaagactgtgcctttccaccgatgctgccgcgccccagacgatggtgatgccgggaggatgcacgacaatccctgaatctgatctggaagagcgatccgtggaacaggactctacggagttgtttaccaaccataggcacctcacagctgagactccccggcctgaggtttctcccctacagggagtttcagagtag

SEQ ID NO: 30665 - DNA, 2559 bp, Artificial Sequence
  derived and/or modified sequence
atgagcctgtttaaggcccgagactggtggtctactatcctgggggacaaagaggagttcgaccagggttgcctgtgcctggctaacgtggacaactccggcaatgggcaggataaaatcatagtcggatcatttatgggatacctccggatattctctcctcaccccgctaaaaccggtgacggcgctcaggcagaggacctgctgctggaggtggatctccgggaccccgtgctgcaggtcgaggttggaaagtttgtcagcgggactgaaatgttacacctcgccgtcttgcatagtcgcaagctatgtgtttattccgtgtcggggaccctgggaaatgtggaacacggtaaccaatgtcagatgaaactgatgtacgagcacaatctccagagaaccgcctgtaacatgacctacggctcctttgggggtgtcaaaggccgagacctgatctgtattcaatcaatggacggcatgctgatggttttcgaacaagaatcatatgccttcggaagatttctgcccggattcctcttgcctgggccactggcctactcgtccagaaccgacagtttcctcaccgtgtcttcctgtcagcaagtcgaatcctataagtatcaggtgttggcattcgcaacggacgcagataagcggcaagagactgaacagcagaagctggggagcggcaagagactggtggtagattggactctgaacatcggcgaacaagccctggatatctgtatcgtaagcttcaatcagtccgcatcttcagtgtttgtcttgggggagagaaactttttctgtctgaaagacaacggacagattaggtttatgaagaagttggattggagcccaagttgtttcctgccttactgctccgtttcagaaggaactatcaacactctcatcggcaaccacaataacatgctgcacatttaccaggacgtgactctgaaatgggccacccagttgcctcacatcccggtcgcggtccgtgttggttgcctgcatgacctcaaaggtgtgatcgtgactcttagcgacgacggacatttgcagtgcagctacttgggaacagacccatccctcttccaggctcctaatgtgcagagcagggagctgaactatgacgagcttgatgtggaaatgaaggaattgcagaaaattataaaagacgtgaacaaaagtcagggggtgtggccgatgactgagagggaggacgaccttaatgtctctgttgttgtgagtcctaacttcgattcagtttcccaggcaaccgacgtggaagtgggcaccgatctggtgccatccgtcaccgtcaaggtaactctgcaaaatcgcgtcatcttacagaaggccaaactgagtgtgtatgtgcagcctccactggaattgacctgtgaccagtttacattcgaattcatgtccctcaatgtgttagggattcccagagtgatccagtgtaaattcagactcccactaaagctgatctgtcttcctggccagccctccaaaactgcctcacataagataactattgataccaacaagagccctgtcagccttttgtctctatttccgggattcgccagtcagtcagatgatgaccaggtcaacgtcatggggttccactttctaggaggcgctcgtataactgtcctggcatccaaaacatctcagcgctatagaattcagtcagagcagttcgaagacctgtggttgatcactaatgaactcatcctgcggctccaggaatactttgaaaaacagggagtgaaggattttgcttgctcattctcagggtccattcctctccaggagtatttcgagctgattgaccatcactttgaactgagaattaacggtgagaagttagaagagctgctaagtgaacgggcagtgcagtttcgcgctattcagaggaggcttctggctaggttcaaagataaaacaccagcgccacttcaacacttggacaccctgcttgacgggacttataagcaggtcattgccctcgccgatgctgttgaggaaaaccagggtaatctgttccagtccttcactaggttgaaaagcgccacccacctggtgatccttctaatcgctttgtggcaaaaattgagcgcagatcaggttgctatcctggaggccgcattcctgccactccaagaggacactcaagagctagggtgggaagagacagtcgatgccgcaatctcacacctgctgaaaacatgcctcagtaagagttctaaggagcaggccctaaacctgaactcacagctcaacatccccaaggatacctcccagttaaagaagcacatcaccttgttgtgcgatcgtctcagcaagggaggtcggctctgcctgtccaccgatgccgcagcacctcaaacgatggtcatgcctggaggttgcactactatccccgagtcggatctagaggagcggtcagttgaacaggactcgaccgagctcttcaccaatcataggcatctcactgccgagaccccccgtcctgaggtctccccgcttcaaggggtgtccgagtag

SEQ ID NO: 30666 - DNA, 2559 bp, Artificial Sequence
  derived and/or modified sequence
atgtcattgtttaaggcaagggactggtggtccacgattttaggggacaaagaggaattcgatcaagggtgcctgtgtctcgctaacgtggacaacagcggcaacgggcaggacaagatcatcgttggcagcttcatgggctatctgaggatcttcagtcctcatcctgctaaaaccggcgatggcgctcaggccgaggatctgctcctcgaggtggatctgcgtgaccctgtcctacaggtggaagttgggaagtttgtgagcgggacagagatgcttcatctcgcggtgcttcatagtagaaagctatgtgtctactccgtctccggcactctgggcaacgtggagcatggcaaccagtgccagatgaagctcatgtatgagcacaaccttcagcgaacggcatgtaacatgacttatggctcttttgggggagtgaagggtagagatctcatatgcatccaatcaatggacggcatgttgatggtgtttgagcaggaatcatacgcgtttggtcgatttctcccagggttcctactgccaggccctctagcgtacagctcccgtacagatagctttctaaccgtctccagctgccagcaagtcgaaagctacaagtatcaagtcttggcattcgcaaccgacgcagataaacggcaggaaacagaacagcagaaactgggaagcggcaagcggctggtagtggattggacactgaacattggtgaacaggctctggatatctgcatcgtcagtttcaatcagagtgctagcagtgtgttcgtgctcggagagagaaactttttttgtctgaaagataacggtcagattcgcttcatgaaaaaacttgattggagcccaagctgttttctcccctactgtagtgtgtctgagggcaccatcaatacgctgattggtaaccacaacaacatgctccacatttaccaggacgtaacattaaagtgggccacgcagcttccacatatccctgtggcggtacgggtgggatgccttcacgatctgaagggtgtgattgtcacactgagcgatgacggtcatctgcagtgttcctatctcgggaccgaccctagtttgttccaggccccaaatgttcagtcgagggagctgaactatgacgaactggatgtggagatgaaggaacttcagaaaatcatcaaagatgtaaataaaagccaaggcgtatggcccatgacagagagggaggatgatctcaacgtgagcgttgttgttagcccgaacttcgatagtgtctcccaggcaacagatgtggaggtgggaacagacctggtgccaagtgttaccgtcaaggttacgctccagaatcgggtaatactgcagaaggccaagctctccgtgtatgtgcaaccacccctggagttgacttgcgatcagtttaccttcgaatttatgaataggaatccagacgggattccaagagtcatccaatgtaagtttaggctgccgctgaagttgatctgcttgcccggtcagccctccaagactgcatcacacaagattaccatcgacaccaacaagtctcctgtttccctgctgtctctttttccaggattcgcctctcagtccgacgacgaccaggtcaatgtcatgggtttccatttcctggggggagcccgaataactgtgctcgctagcaaaacatctcagagatatagaatccagtctgagcagttcgaggatctctggttaatcaccaacgagttgatattgagactccaggaatacttcgagaaacagggggtgaaggatttcgcttgcagcttttcaggatccattcctctgcaggagtactttgaactgatcgaccatcacttcgagcttcggatcaacggggagaagttagaagagcttctgtccgagcgagctgtgcagttccgagctatacagcggagacttctcgcgcgattcaaggataaaacccccgctcctctgcaacatctcgacactctcctggatggtacttataagcaggtgatcgcacttgcggatgctgtggaagaaaaccagggaaatctttttcagtctttcaccagactgaaaagtgccacgcacttagtgattctgctaattgcactgtggcaaaagctgtccgcagaccaggtggcaatcctggaggcagccttcctgccgctccaggaggacacacaggagttgggatgggaagagacggtcgacgctgctataagtcacctcttgaaaacatgtttgtccaagagcagcaaagagcaagctctgaacctcaattcacagctcaacatacctaaggatacaagccagctgaagaagcatatcacactgctttgcgaccgacttagtaagggtgggagattatgtctgtcaacagacgcagctgccccacagactatggttatgccagggggttgcaccaccattcctgagtctgatctcgaggagcgttcggttgaacaggattctaccgagctatttaccaaccatcgccacctgacagccgaaacccccaggcccgaggttagtcctcttcaaggagtgagtgaatag

SEQ ID NO: 30667 - DNA, 3914 bp, Artificial Sequence
  derived and/or modified sequence
agtggcgtccgttgtaagtgctatgacaacagggcgaagatggctcagagttaggctggagaggggaggtgtcccttccgctgcggccgtcgggtttctgctacatcccattcaccgcctcctccatcctttcctcctcggtgtgagcagcaggacttgcatttgttctcgcctgcctagtgtcttccaagggatagatgccgtttcctctgctggtctctgggggtgacggggggcgcaggggagcttcttgggggaatcactccaactctgtggagctggtggtgctgcctggtggggctctctctttgcccgggacgtggaacaactttcagctggaggacgagagggaatagtgaagctaaaggttgcttttctctgcaccgtccgttcttgctccctctgctccatcactgggaccttgtcaggcgttcataaagcaaaatttgccgaacgagggttcgcagaaaggtggggcagagctcatctgacgtggcatcagtgtgaaagaaaatgtctttatttaaagcccgtgattggtggtctactattctgggagataaagaagaatttgatcaaggctgtttgtgtctggctaatgttgacaatagtggaaatggacaagataaaataattgtgggtagctttatgggatacctaaggatctttagcccccatcctgcaaaaacaggagatggagctcaagccgaagatttgcttctagaagtggatctacgagatccagtacttcaagtggaagtaggaaagtttgtttcaggtaccgaaatgctacatttggctgtgttacattctagaaaactttgtgtctactctgtctcaggaaccttgggtaatgtggaacatgggaaccaatgtcagatgaaattgatgtatgaacataatcttcagagaacagcctgcaatatgacctatggatcatttggtggtgtaaaaggtcgagatttaatttgcatccagtctatggatgggatgctgatggtatttgagcaggagagctatgcttttggaagatttctccctggctttcttctgcctggtcctcttgcctacagttcccgtacagattccttccttactgtctcttcctgccaacaagtggaaagttataagtaccaggtacttgcttttgcaacagatgcagataaaaggcaggagactgaacagcaaaaacttggttctggaaaaagactagttgtggattggactctaaatattggagagcaagcccttgacatatgtattgtctctttcaatcagtcggcatcctctgtttttgttcttggtgagagaaactttttttgccttaaggataatggacaaattcgattcatgaagaagcttgattggagcccaagttgttttctgccatattgctcagtttctgaaggaacaataaatactttgattggaaatcataataacatgctgcatatttatcaagatgtgacactgaagtgggccacccaacttccccacattcctgtagcagtaagagtgggctgtttgcatgatttaaagggagtgatagtcactctgagtgatgatggtcacttgcagtgttcatacctggggacagatccttctctgttccaagctccaaacgttcaatctcgagaactaaactatgatgaacttgatgtagaaatgaaagaacttcagaaaatcatcaaagatgttaacaaatcacaaggtgtttggcccatgactgagagagaagatgacttgaacgtttctgtcgtggtttctcctaactttgattcagtttctcaagcgaccgatgttgaggtgggaactgaccttgtcccttctgtcacggtgaaggtcacactgcagaacagagtgatattgcaaaaagccaaattatcagtctacgtgcaaccaccattagaattgacttgtgatcagttcacctttgaatttatgagtctgaatgttttaggcattccgcgagttatccaatgtaaatttagacttcccctaaagttaatttgcctaccaggtcagccttcaaaaactgcaagccacaaaattactattgataccaacaaatctccagtcagtcttcttagtctcttcccaggttttgccagtcagtcagatgatgatcaggtgaatgtaatgggttttcacttcttaggaggtgctcgaattactgttcttgcttccaaaacttctcaacgatatcgcattcagagtgaacaatttgaagatctttggctcataaccaatgagcttattcttcgccttcaagaatattttgaaaaacagggagtcaaagattttgcatgttctttttcgggatctataccccttcaagaatattttgagttgattgatcatcattttgagctacggataaatggtgaaaaattagaagaactcttatctgagagagctgtacaatttcgggccattcaacgccggctactagcaagattcaaagataaaactcctgcccctcttcaacacctggacaccttgttagatggaacctacaagcaggtaattgctctagcagatgcagtggaggaaaaccaaggcaatctgttccagtcattcaccaggctgaagagtgccacccatttggtgattctgctgatcgcgctgtggcagaagcttagtgctgaccaggttgctattctggaagcggcatttctgccgctacaagaagacactcaagaattgggctgggaagaaacggtggatgccgccatttcccacctgttgaagacttgcctgtcgaagagttctaaggagcaggctttgaacctcaacagccagctgaacatacccaaagacacaagccaactgaagaaacatatcaccttgctctgcgatagattatccaaaggtggccgtctctgcctaagtaccgatgcagcagccccacagaccatggtcatgccaggtggttgtactacaatcccagagtcagacctagaagaaagatcagtagaacaagactctacagaactgtttaccaaccacagacatctcactgcagagacacccaggcctgaagtttcacccctccaaggagtctcggaataattcaagtagagttgtttggttgagaggaacatccccatctcaaggccgaacctgtgtgaacctcatgccaagcacagatatagggctggcgcaggtgcttcctaaagctcaccttcctggagatgacatgcatagaaagaggggttgggactttttacttcactaggagaacttgtaacaccatggggaagtcagctgaaacttgtcttgttttgccaggaaaggaagtagttgcctttggtcatccatctgctaatagtcacagaatacagtgaaatgacatagttttgggttagattttataatgcaaagattcagatccaaaataatttcataccccattttttcacagaattcttatatagtaaatgtatcaagtttaataaagcatctcattgtcaaataatatcttggattttatttataattagagggatttatgagtgattgctctacattatttcttcaaaggaaaggaaaggaattgaagactttgctactctctggtaagacttgaatgtgattattttataaataaaagaaccactatgaaactttcatgtgatttgttctattaagctaaacgtggaagaagggaagttttctagtattgtatgaaaatgtttaaatattttcaaggaagctagtacattaacatccccttttcattaccccattgggtggcaccttttaaaaatccaggttattaaaggattcacactttattacagttaaaatttaaggtttttatgtgtaagaagtgaaagaaactttgctaatttcaagttcgaattacagttgtgagattgatttatttaaataaaaatatgcctttgccagtt

SEQ ID NO: 30668 - DNA, 3914 bp, Artificial Sequence
  derived and/or modified sequence
agtggcgtccgttgtaagtgctatgacaacagggcgaagatggctcagagttaggctggagaggggaggtgtcccttccgctgcggccgtcgggtttctgctacatcccattcaccgcctcctccatcctttcctcctcggtgtgagcagcaggacttgcatttgttctcgcctgcctagtgtcttccaagggatagatgccgtttcctctgctggtctctgggggtgacggggggcgcaggggagcttcttgggggaatcactccaactctgtggagctggtggtgctgcctggtggggctctctctttgcccgggacgtggaacaactttcagctggaggacgagagggaatagtgaagctaaaggttgcttttctctgcaccgtccgttcttgctccctctgctccatcactgggaccttgtcaggcgttcataaagcaaaatttgccgaacgagggttcgcagaaaggtggggcagagctcatctgacgtggcatcagtgtgaaagaaaatgtctttatttaaagcccgtgattggtggtctactattctgggagataaagaagaatttgatcaaggctgtttgtgtctggctaatgttgacaatagtggaaatggacaagataaaataattgtgggtagctttatgggatacctaaggatctttagcccccatcctgcaaaaacaggagatggagctcaagccgaagatttgcttctagaagtggatctacgagatccagtacttcaagtggaagtaggaaagtttgtttcaggtaccgaaatgctacatttggctgtgttacattctagaaaactttgtgtctactctgtctcaggaaccttgggtaatgtggaacatgggaaccaatgtcagatgaaattgatgtatgaacataatcttcagagaacagcctgcaatatgacctatggatcatttggtggtgtaaaaggtcgagatttaatttgcatccagtctatggatgggatgctgatggtatttgagcaggagagctatgcttttggaagatttctccctggctttcttctgcctggtcctcttgcctacagttcccgtacagattccttccttactgtctcttcctgccaacaagtggaaagttataagtaccaggtacttgcttttgcaacagatgcagataaaaggcaggagactgaacagcaaaaacttggttctggaaaaagactagttgtggattggactctaaatattggagagcaagcccttgacatatgtattgtctctttcaatcagtcggcatcctctgtttttgttcttggtgagagaaactttttttgccttaaggataatggacaaattcgattcatgaagaagcttgattggagcccaagttgttttctgccatattgctcagtttctgaaggaacaataaatactttgattggaaatcataataacatgctgcatatttatcaagatgtgacactgaagtgggccacccaacttccccacattcctgtagcagtaagagtgggctgtttgcatgatttaaagggagtgatagtcactctgagtgatgatggtcacttgcagtgttcatacctggggacagatccttctctgttccaagctccaaacgttcaatctcgagaactaaactatgatgaacttgatgtagaaatgaaagaacttcagaaaatcatcaaagatgttaacaaatcacaaggtgtttggcccatgactgagagagaagatgacttgaacgtttctgtcgtggtttctcctaactttgattcagtttctcaagcgaccgatgttgaggtgggaactgaccttgtcccttctgtcacggtgaaggtcacactgcagaacagagtgatattgcaaaaagccaaattatcagtctacgtgcaaccaccattagaattgacttgtgatcagttcacctttgaatttatgaatcgaaatcctgatggcattccgcgagttatccaatgtaaatttagacttcccctaaagttaatttgcctaccaggtcagccttcaaaaactgcaagccacaaaattactattgataccaacaaatctccagtcagtcttcttagtctcttcccaggttttgccagtcagtcagatgatgatcaggtgaatgtaatgggttttcacttcttaggaggtgctcgaattactgttcttgcttccaaaacttctcaacgatatcgcattcagagtgaacaatttgaagatctttggctcataaccaatgagcttattcttcgccttcaagaatattttgaaaaacagggagtcaaagattttgcatgttctttttcgggatctataccccttcaagaatattttgagttgattgatcatcattttgagctacggataaatggtgaaaaattagaagaactcttatctgagagagctgtacaatttcgggccattcaacgccggctactagcaagattcaaagataaaactcctgcccctcttcaacacctggacaccttgttagatggaacctacaagcaggtaattgctctagcagatgcagtggaggaaaaccaaggcaatctgttccagtcattcaccaggctgaagagtgccacccatttggtgattctgctgatcgcgctgtggcagaagcttagtgctgaccaggttgctattctggaagcggcatttctgccgctacaagaagacactcaagaattgggctgggaagaaacggtggatgccgccatttcccacctgttgaagacttgcctgtcgaagagttctaaggagcaggctttgaacctcaacagccagctgaacatacccaaagacacaagccaactgaagaaacatatcaccttgctctgcgatagattatccaaaggtggccgtctctgcctaagtaccgatgcagcagccccacagaccatggtcatgccaggtggttgtactacaatcccagagtcagacctagaagaaagatcagtagaacaagactctacagaactgtttaccaaccacagacatctcactgcagagacacccaggcctgaagtttcacccctccaaggagtctcggaataattcaagtagagttgtttggttgagaggaacatccccatctcaaggccgaacctgtgtgaacctcatgccaagcacagatatagggctggcgcaggtgcttcctaaagctcaccttcctggagatgacatgcatagaaagaggggttgggactttttacttcactaggagaacttgtaacaccatggggaagtcagctgaaacttgtcttgttttgccaggaaaggaagtagttgcctttggtcatccatctgctaatagtcacagaatacagtgaaatgacatagttttgggttagattttataatgcaaagattcagatccaaaataatttcataccccattttttcacagaattcttatatagtaaatgtatcaagtttaataaagcatctcattgtcaaataatatcttggattttatttataattagagggatttatgagtgattgctctacattatttcttcaaaggaaaggaaaggaattgaagactttgctactctctggtaagacttgaatgtgattattttataaataaaagaaccactatgaaactttcatgtgatttgttctattaagctaaacgtggaagaagggaagttttctagtattgtatgaaaatgtttaaatattttcaaggaagctagtacattaacatccccttttcattaccccattgggtggcaccttttaaaaatccaggttattaaaggattcacactttattacagttaaaatttaaggtttttatgtgtaagaagtgaaagaaactttgctaatttcaagttcgaattacagttgtgagattgatttatttaaataaaaatatgcctttgccagtt

SEQ ID NO: 30669 - DNA, 2559 bp, Artificial Sequence
  derived and/or modified sequence
atgagcctgttcaaggccagagactggtggagcaccatcctgggcgacaaggaggagttcgaccagggctgcctgtgcctggccaacgtggacaacagcggcaacggccaggacaagatcatcgtgggcagcttcatgggctacctgagaatcttcagcccccaccccgccaagaccggcgacggcgcccaggccgaggacctgctgctggaggtggacctgagagaccccgtgctgcaggtggaggtgggcaagttcgtgagcggcaccgagatgctgcacctggccgtgctgcacagcagaaagctgtgcgtgtacagcgtgagcggcaccctgggcaacgtggagcacggcaaccagtgccagatgaagctgatgtacgagcacaacctgcagagaaccgcctgcaacatgacctacggcagcttcggcggcgtgaagggcagagacctgatctgcatccagagcatggacggcatgctgatggtgttcgagcaggagagctacgccttcggcagattcctgcccggcttcctgctgcccggccccctggcctacagcagcagaaccgacagcttcctgaccgtgagcagctgccagcaggtggagagctacaagtaccaggtgctggccttcgccaccgacgccgacaagagacaggagaccgagcagcagaagctgggcagcggcaagagactggtggtggactggaccctgaacatcggcgagcaggccctggacatctgcatcgtgagcttcaaccagagcgccagcagcgtgttcgtgctgggcgagagaaacttcttctgcctgaaggacaacggccagatcagattcatgaagaagctggactggagccccagctgcttcctgccctactgcagcgtgagcgagggcaccatcaacaccctgatcggcaaccacaacaacatgctgcacatctaccaggacgtgaccctgaagtgggccacccagctgccccacatccccgtggccgtgagagtgggctgcctgcacgacctgaagggcgtgatcgtgaccctgagcgacgacggccacctgcagtgcagctacctgggcaccgaccccagcctgttccaggcccccaacgtgcagagcagagagctgaactacgacgagctggacgtggagatgaaggagctgcagaagatcatcaaggacgtgaacaagagccagggcgtgtggcccatgaccgagagagaggacgacctgaacgtgagcgtggtggtgagccccaacttcgacagcgtgagccaggccaccgacgtggaggtgggcaccgacctggtgcccagcgtgaccgtgaaggtgaccctgcagaacagagtgatcctgcagaaggccaagctgagcgtgtacgtgcagccccccctggagctgacctgcgaccagttcaccttcgagttcatgagcctgaacgtgctgggcatccccagagtgatccagtgcaagttcagactgcccctgaagctgatctgcctgcccggccagcccagcaagaccgccagccacaagatcaccatcgacaccaacaagagccccgtgagcctgctgagcctgttccccggcttcgccagccagagcgacgacgaccaggtgaacgtgatgggcttccacttcctgggcggcgccagaatcaccgtgctggccagcaagaccagccagagatacagaatccagagcgagcagttcgaggacctgtggctgatcaccaacgagctgatcctgagactgcaggagtacttcgagaagcagggcgtgaaggacttcgcctgcagcttcagcggcagcatccccctgcaggagtacttcgagctgatcgaccaccacttcgagctgagaatcaacggcgagaagctggaggagctgctgagcgagagagccgtgcagttcagagccatccagagaagactgctggccagattcaaggacaagacccccgcccccctgcagcacctggacaccctgctggacggcacctacaagcaggtgatcgccctggccgacgccgtggaggagaaccagggcaacctgttccagagcttcaccagactgaagagcgccacccacctggtgatcctgctgatcgccctgtggcagaagctgagcgccgaccaggtggccatcctggaggccgccttcctgcccctgcaggaggacacccaggagctgggctgggaggagaccgtggacgccgccatcagccacctgctgaagacctgcctgagcaagagcagcaaggagcaggccctgaacctgaacagccagctgaacatccccaaggacaccagccagctgaagaagcacatcaccctgctgtgcgacagactgagcaagggcggcagactgtgcctgagcaccgacgccgccgccccccagaccatggtgatgcccggcggctgcaccaccatccccgagagcgacctggaggagagaagcgtggagcaggacagcaccgagctgttcaccaaccacagacacctgaccgccgagacccccagacccgaggtgagccccctgcagggcgtgagcgagtag

SEQ ID NO: 30670 - DNA, 2559 bp, Artificial Sequence
  derived and/or modified sequence
atgagcctgttcaaggccagagactggtggagcaccatcctgggcgacaaggaggagttcgaccagggctgcctgtgcctggccaacgtggacaacagcggcaacggccaggacaagatcatcgtgggcagcttcatgggctacctgagaatcttcagcccccaccccgccaagaccggcgacggcgcccaggccgaggacctgctgctggaggtggacctgagagaccccgtgctgcaggtggaggtgggcaagttcgtgagcggcaccgagatgctgcacctggccgtgctgcacagcagaaagctgtgcgtgtacagcgtgagcggcaccctgggcaacgtggagcacggcaaccagtgccagatgaagctgatgtacgagcacaacctgcagagaaccgcctgcaacatgacctacggcagcttcggcggcgtgaagggcagagacctgatctgcatccagagcatggacggcatgctgatggtgttcgagcaggagagctacgccttcggcagattcctgcccggcttcctgctgcccggccccctggcctacagcagcagaaccgacagcttcctgaccgtgagcagctgccagcaggtggagagctacaagtaccaggtgctggccttcgccaccgacgccgacaagagacaggagaccgagcagcagaagctgggcagcggcaagagactggtggtggactggaccctgaacatcggcgagcaggccctggacatctgcatcgtgagcttcaaccagagcgccagcagcgtgttcgtgctgggcgagagaaacttcttctgcctgaaggacaacggccagatcagattcatgaagaagctggactggagccccagctgcttcctgccctactgcagcgtgagcgagggcaccatcaacaccctgatcggcaaccacaacaacatgctgcacatctaccaggacgtgaccctgaagtgggccacccagctgccccacatccccgtggccgtgagagtgggctgcctgcacgacctgaagggcgtgatcgtgaccctgagcgacgacggccacctgcagtgcagctacctgggcaccgaccccagcctgttccaggcccccaacgtgcagagcagagagctgaactacgacgagctggacgtggagatgaaggagctgcagaagatcatcaaggacgtgaacaagagccagggcgtgtggcccatgaccgagagagaggacgacctgaacgtgagcgtggtggtgagccccaacttcgacagcgtgagccaggccaccgacgtggaggtgggcaccgacctggtgcccagcgtgaccgtgaaggtgaccctgcagaacagagtgatcctgcagaaggccaagctgagcgtgtacgtgcagccccccctggagctgacctgcgaccagttcaccttcgagttcatgaacagaaaccccgacggcatccccagagtgatccagtgcaagttcagactgcccctgaagctgatctgcctgcccggccagcccagcaagaccgccagccacaagatcaccatcgacaccaacaagagccccgtgagcctgctgagcctgttccccggcttcgccagccagagcgacgacgaccaggtgaacgtgatgggcttccacttcctgggcggcgccagaatcaccgtgctggccagcaagaccagccagagatacagaatccagagcgagcagttcgaggacctgtggctgatcaccaacgagctgatcctgagactgcaggagtacttcgagaagcagggcgtgaaggacttcgcctgcagcttcagcggcagcatccccctgcaggagtacttcgagctgatcgaccaccacttcgagctgagaatcaacggcgagaagctggaggagctgctgagcgagagagccgtgcagttcagagccatccagagaagactgctggccagattcaaggacaagacccccgcccccctgcagcacctggacaccctgctggacggcacctacaagcaggtgatcgccctggccgacgccgtggaggagaaccagggcaacctgttccagagcttcaccagactgaagagcgccacccacctggtgatcctgctgatcgccctgtggcagaagctgagcgccgaccaggtggccatcctggaggccgccttcctgcccctgcaggaggacacccaggagctgggctgggaggagaccgtggacgccgccatcagccacctgctgaagacctgcctgagcaagagcagcaaggagcaggccctgaacctgaacagccagctgaacatccccaaggacaccagccagctgaagaagcacatcaccctgctgtgcgacagactgagcaagggcggcagactgtgcctgagcaccgacgccgccgccccccagaccatggtgatgcccggcggctgcaccaccatccccgagagcgacctggaggagagaagcgtggagcaggacagcaccgagctgttcaccaaccacagacacctgaccgccgagacccccagacccgaggtgagccccctgcagggcgtgagcgagtag

SEQ ID NO: 30671 - protein, 882 aa, Artificial Sequence
  derived and/or modified sequence
MSLFKARDWWSTILGDKEEFDQGCLCLANVDNSGNGQDKIIVGSFMGYLRIFSPHPAKTGDGAQAEDLLLEVDLRDPVLQVEVGKFVSGTEMLHLAVLHSRKLCVYSVSGTLGNVEHGNQCQMKLMYEHNLQRTACNMTYGSFGGVKGRDLICIQSMDGMLMVFEQESYAFGRFLPGFLLPGPLAYSSRTDSFLTVSSCQQVESYKYQVLAFATDADKRQETEQQKLGSGKRLVVDWTLNIGEQALDICIVSFNQSASSVFVLGERNFFCLKDNGQIRFMKKLDWSPSCFLPYCSVSEGTINTLIGNHNNMLHIYQDVTLKWATQLPHIPVAVRVGCLHDLKGVIVTLSDDGHLQCSYLGTDPSLFQAPNVQSRELNYDELDVEMKELQKIIKDVNKSQGVWPMTEREDDLNVSVVVSPNFDSVSQATDVEVGTDLVPSVTVKVTLQNRVILQKAKLSVYVQPPLELTCDQFTFEFMTPDLTRTVSFSVYLKRSYTPSELEGNAVVSYSRPTGIPRVIQCKFRLPLKLICLPGQPSKTASHKITIDTNKSPVSLLSLFPGFASQSDDDQVNVMGFHFLGGARITVLASKTSQRYRIQSEQFEDLWLITNELILRLQEYFEKQGVKDFACSFSGSIPLQEYFELIDHHFELRINGEKLEELLSERAVQFRAIQRRLLARFKDKTPAPLQHLDTLLDGTYKQVIALADAVEENQGNLFQSFTRLKSATHLVILLIALWQKLSADQVAILEAAFLPLQEDTQELGWEETVDAAISHLLKTCLSKSSKEQALNLNSQLNIPKDTSQLKKHITLLCDRLSKGGRLCLSTDAAAPQTMVMPGGCTTIPESDLEERSVEQDSTELFTNHRHLTAETPRPEVSPLQGVSE

SEQ ID NO: 30672 - protein, 97 aa, Artificial Sequence
  derived and/or modified sequence
MSLFKARDWWSTILGDKEEFDQGCLCLANVDNSGNGQDKIIVGSFMGYLRIFSPHPAKTGDGAQAEDLLLEVDLRDPVLQVEVGKFVSGTEMLHLAV

SEQ ID NO: 30673 - DNA, 2649 bp, Artificial Sequence
  derived and/or modified sequence
atgagtttatttaaggcacgggattggtggagcacgattttgggcgacaaagaggagtttgatcagggctgtctgtgtcttgcaaatgtggacaattcaggaaatggccaagacaagatcatcgtgggctcctttatgggctacttacgaatattctccccacaccctgcgaagaccggtgacggggctcaggcggaggacctgcttctcgaggtcgatttacgtgaccctgtgctccaagtcgaggtgggaaagtttgtttccggtacggagatgctgcaccttgctgtgttacacagccgcaagctgtgcgtctatagtgttagcggcactctcggtaatgtggagcacggcaatcagtgccagatgaaactgatgtatgaacacaacctgcagagaaccgcctgcaacatgacttatggttcattcggcggagtgaagggcagggatttaatctgtatccagtcaatggacggtatgctgatggttttcgaacaggagtcatacgcctttggccgctttctacccggcttcttgcttccggggcctcttgcatattcctcaagaaccgattccttcctgacggtttcttcctgtcagcaggttgagagttacaagtatcaggtgctcgcctttgctactgatgcagataaaaggcaggaaaccgagcagcagaagttaggtagtggcaaacggctggttgtagactggacactgaatattggggagcaagctcttgacatttgcattgtgtcttttaatcagagtgcgtcctccgtgttcgtgctaggagaacggaatttcttttgcctgaaagataacggacaaattcgattcatgaagaaactggattggtccccaagctgttttctcccttactgctccgtaagtgagggtacgataaataccctgattggcaaccacaacaatatgctgcacatatatcaggacgtgactcttaagtgggccacacagctgccgcatatcccggttgcagtccgagttggatgcctgcatgatctgaagggagtgattgtcaccctgagcgatgacggccacttacaatgttcatacctgggaactgacccaagcctttttcaggccccgaacgtccaaagcagggagctgaactatgatgagctggacgtagagatgaaggaactgcagaagataatcaaagatgttaataaatcacagggcgtctggcctatgactgagcgagaggatgaccttaatgtgagcgtcgtcgtgtcgccaaacttcgatagcgtctcacaggctaccgacgttgaagtgggtaccgacctggtgccaagcgtaacagtaaaagtgacccttcaaaacagagtaattttacagaaggcaaagttgagtgtttatgtgcagccaccactcgagcttacctgcgaccagttcaccttcgaattcatgactccagatctgacacgaaccgtctccttctctgtttatttaaagcgatcttatacgccgtcagaactcgaaggcaatgccgtagtcagctattccagacccactggtattcccagagtgattcagtgcaagttccgactgccccttaagttgatctgcctcccaggacagccctccaagaccgcctcccacaagattaccatcgacacaaataaatccccggtgtctttgctatccctgtttcctggttttgctagccaaagtgatgatgaccaagtgaacgtcatgggattccatttccttggcggagccaggataaccgtcctggccagcaagacttcacagcgctatcgcatccaatccgagcagttcgaggacctgtggctgattaccaacgaattgatactaaggcttcaagagtactttgaaaaacagggcgtcaaagatttcgcttgcagtttttcgggcagcatcccactgcaggagtatttcgagttaatcgatcaccactttgagctcagaatcaacggcgaaaaactcgaggaactcctgtcagagcgagcagttcagtttcgcgcgatccaacgtcggctgttagcgaggttcaaggacaagacccccgcgcccttacagcaccttgatactctcctggatggcacctataagcaagttattgccctggccgatgcagttgaggagaaccaggggaatctcttccaatccttcactagactgaaatcggccacgcatctggtgattctcttgatcgctctctggcagaagctgagcgctgaccaggtagcgatactcgaggcagccttcctgcccctgcaagaggacacacaggagttgggatgggaagagaccgttgacgctgctattagtcacctactgaagacgtgcctttcaaaatccagcaaggagcaagctttaaatctcaattcccagctcaacatacctaaagacacgagtcagctgaaaaaacacatcaccttactgtgtgataggctttccaagggcggaaggctctgcttgtctaccgatgcggccgctccccaaacaatggtgatgccaggcggttgcactaccattcctgagtctgatcttgaggagcggtcagtggaacaggatagcactgaacttttcacgaatcatcggcacctgaccgccgagactcctcgtcctgaggtgtcacccctgcagggagtctcagagtag

SEQ ID NO: 30674 - DNA, 2649 bp, Artificial Sequence
  derived and/or modified sequence
atgagcctcttcaaggcccgggactggtggagcaccatcctgggggacaaggaggagtttgaccagggctgcctgtgcctggccaacgtggacaacagcggaaatggccaggacaagatcatcgtgggcagcttcatgggctacctgcgcatcttcagcccccacccagccaagacaggagatggagcccaggccgaggacctgctgctggaggtggacctgcgggaccctgtgctgcaggtggaggtgggcaagtttgtgtctggaacagagatgctgcacctggccgtgctgcacagcaggaagctgtgtgtgtacagcgtgtctggcaccctgggcaatgtggagcacggcaaccagtgccagatgaagctgatgtatgagcacaacctgcagaggacagcctgcaacatgacctacggcagctttggaggagtgaagggccgggacctgatctgcatccagagcatggatggcatgctgatggtgtttgagcaggagagctatgccttcggccgcttcctgcccggcttcctgctgcccggccccctggcctacagcagcaggacagacagcttcctgactgtgagcagctgccagcaggtggagagctacaagtaccaggtgctggcctttgccacagatgctgacaagaggcaggagacagagcagcagaagctgggcagcggcaagaggctggtggtggactggaccctgaacattggagagcaggccctggacatctgcatcgtgtccttcaaccagagcgccagctctgtgtttgtgctgggggagaggaacttcttctgcctgaaggacaatggccagatccgcttcatgaagaagctggactggagccccagctgcttcctgccctactgcagcgtgtctgagggcaccatcaacaccctgattggcaaccacaacaacatgctgcacatctaccaggatgtgaccctgaagtgggccacccagctgccccacatccctgtggccgtgcgggtgggctgcctgcatgacctgaagggcgtgattgtgaccctgagtgatgatggccacctgcagtgcagctacctgggcacagaccccagcctcttccaggcccccaacgtgcagagccgggagctgaactatgatgagctggatgtggagatgaaggagctgcagaagatcatcaaggatgtgaacaagagccagggcgtgtggcccatgacagagcgggaggatgacctgaatgtgtctgtggtggtgagccccaactttgattctgtgtcccaggccacagatgtggaggtgggcacagacctggtgcccagcgtgacagtgaaggtgaccctgcagaacagagtcatcctgcagaaggccaagctgtctgtgtatgtgcagccccccctggagctgacctgtgaccagttcacctttgagttcatgaccccagacctgaccaggacagtgtccttctctgtgtacctgaagaggagctacacccccagcgagctggagggcaatgctgtggtgtcctacagccggcccaccggcatccccagggtcatccagtgcaagttccggctgcccctgaagctgatctgcctgcccggccagcccagcaagacagccagccacaagatcaccatcgacaccaacaagagccctgtgtccctgctgagcctcttccctggctttgccagccagagtgatgatgaccaggtgaatgtgatgggcttccacttcctgggcggggcccgcatcaccgtgctggccagcaagaccagccagcgctaccgcatccagagcgagcagtttgaggacctgtggctgatcaccaatgaactcatcctgcggctgcaggagtactttgagaagcagggcgtgaaggactttgcctgcagcttcagcggcagcatccccctgcaggagtactttgagctgattgaccaccactttgagctgcgcatcaatggagagaagctggaggagctgctgtctgaaagagctgtgcagttccgggccatccagaggcggctgctggcccgcttcaaggacaagaccccagcccccctgcagcacctggacaccctgctggatggcacctacaagcaggtgattgccctggctgatgctgtggaggagaaccagggcaacctcttccagagcttcacccggctgaagagcgccacccacctggtgatcctgctgattgccctgtggcagaagctgtctgctgaccaggtggccatcctggaggccgccttcctgcccctgcaggaggacacccaggagctgggctgggaggagaccgtggatgctgccatcagccacctgctgaagacctgcctgagcaagagcagcaaggagcaggccctgaacctgaacagccagctgaacatccccaaggacaccagccagctgaagaagcacatcaccctgctgtgtgaccggctgagcaagggcggccgcctgtgcctgagcacagatgctgctgccccccagaccatggtgatgcctgggggctgcaccaccatccctgagagtgacctggaggagaggtctgtggagcaggacagcacagagctgttcaccaaccaccgccacctgacagctgagacccccaggcctgaggtgagccccctgcagggcgtgtctgagtag

SEQ ID NO: 30675 - DNA, 2649 bp, Artificial Sequence
  derived and/or modified sequence
atgagcctgttcaaggcccgggactggtggagcaccatcctgggcgacaaggaagagttcgatcagggatgtctctgccttgccaacgtagataactccggcaacggccaagacaagattattgtggggtcctttatgggatatctgagaattttctcacctcatcctgccaagactggcgacggcgctcaggctgaagatctgctcctggaggtcgatctgcgggacccggtgctgcaggtagaagtgggtaagttcgtttccggcactgagatgctgcatctggccgtcctacacagtcgtaagctctgtgtctattccgtttccgggaccttggggaatgtcgaacacggtaaccaatgccagatgaagctgatgtatgaacacaatctccagcgcaccgcttgtaatatgacatatgggagctttgggggggtgaagggaagggacttgatatgcatccagtcaatggatggcatgctgatggttttcgagcaggaaagttacgcctttggccggttcctgcccggtttcctgctgccggggccattagcctattcaagccgaaccgactctttcctgacagtgagctcgtgccagcaggttgaaagctacaagtatcaggttctggccttcgcgactgacgctgataagcgccaggaaaccgagcagcagaaactcggatctgggaaacgcttggtagtggattggacacttaatattggggagcaggccctggacatctgtatcgtaagcttcaaccagagcgcctctagcgtctttgtcctgggcgaaaggaattttttttgcttgaaggacaatggacaaatccggtttatgaagaagctcgattggtcccccagttgctttctgccctattgcagcgtcagcgagggcacaatcaacaccctgattggtaaccacaacaatatgcttcacatttaccaagatgtcacgcttaagtgggcgacccagctgccccacatcccggtggcagtgcgcgttggatgcctgcacgacctgaagggagtgattgtcacactctcggatgatggccatttacagtgttcctatctgggaaccgatcccagcctgtttcaagctcccaatgtccaaagcagggaactaaactatgatgaactggatgtggagatgaaagagttacagaaaataatcaaagatgtgaacaagagtcaaggggtttggccaatgaccgagcgcgaagacgacctgaatgtctcagtcgtggtctcgcccaatttcgacagcgtctctcaggccacagatgtagaagtggggactgacctagtcccgagcgttaccgtcaaagtgacactacagaatagggtgatcctacaaaaggcaaagctaagtgtgtatgtgcaaccccccctggagctgacgtgtgaccaattcaccttcgagtttatgacccccgatttgactagaacggtcagtttctccgtttatctgaagagatcatatacccctagcgagctggaaggaaacgctgtggtgtcgtacagtagacctacggggatacctcgggtaattcagtgcaagttccgcttgccccttaagctaatctgtctccccggccagcctagcaaaaccgcaagccacaagatcaccatcgatactaacaagagtcccgtgtcactcctttcactgttcccagggtttgcgagtcaatccgacgacgatcaagtgaacgtcatgggatttcatttcctcgggggcgcaagaataactgtccttgcttcaaagacatctcagcgatacaggatacagtctgaacagttcgaagacctgtggctgatcaccaatgaattgatactaagactgcaggagtactttgaaaagcagggcgttaaggattttgcctgctccttttcaggatcaattcccctacaggagtattttgagttgatcgaccatcactttgaactgaggataaatggcgagaaattggaggagcttctttccgaaagagccgtgcaattcagagccatccagcgacggttactggctcggtttaaggataaaacaccggctccacttcagcatttagacaccttattagacggcacttacaaacaggtgattgctctcgcagacgcagtcgaagagaatcagggcaatctgttccaaagctttacccgcttgaaaagcgctactcacctagtgatcttacttattgccctgtggcagaaactctcggcggatcaggtggctatactcgaggccgctttcctgcctctgcaggaggatacgcaggagctcggatgggaggagacagtggacgccgccataagtcatctactcaagacatgcctgtccaagtcttccaaggagcaagccctcaatctgaatagccaactgaacatccctaaagatacctctcagttgaaaaagcatataacattgctctgtgatcggctgagcaagggtggtcgactgtgtctctcaaccgatgctgctgccccgcaaaccatggtgatgcctggcggctgcaccacgatccccgagagcgacttggaagagaggtctgttgagcaggactctacagagctattcacaaatcaccggcacctgaccgctgagacaccacgcccagaagtgtctcctcttcagggtgtgtcagagtag

SEQ ID NO: 30676 - DNA, 2649 bp, Artificial Sequence
  derived and/or modified sequence
atgtctttatttaaggcacgcgactggtggagtactatactgggagataaggaggaattcgaccagggctgcctttgcttggccaacgtcgataattctggaaacggccaggacaagattattgttgggtccttcatgggctatctccgtatattctctccccatcccgctaaaactggtgacggagctcaggctgaggacctgctgctcgaggtggaccttagggatccagttctgcaagttgaagtcggaaaattcgtgagcggaacagagatgctgcacctggccgtgcttcattctcggaagctgtgtgtctactctgtgtcgggaaccttaggcaatgtcgagcacggcaaccagtgtcagatgaaactgatgtatgagcacaatctccagcgcaccgcctgcaatatgacctacgggtcttttggtggagtgaagggtcgagacttaatttgtatccagtcgatggacggcatgctgatggtcttcgaacaggagagttatgcttttggacggtttctgccaggcttcctattgcccggaccactggcttactcttccagaactgactcgtttctgactgtgagtagttgtcagcaggtcgaatcttataaataccaggtgctggcttttgccacagacgcagacaagagacaggaaaccgaacagcaaaagctgggcagtggcaaaaggctggtggtggactggaccttaaatattggcgagcaggctttggatatctgcatcgtttcatttaaccaatccgcttcgagcgtgttcgtactgggcgagagaaattttttctgcttgaaagataacggacaaatcagattcatgaagaagctcgattggagtccttcttgttttcttccctattgttcagtgtcagaaggcacaattaatacattgatcggaaatcataataatatgctgcatatttaccaggacgtaacgctgaagtgggccacacaactgccccatatccccgtggctgtgcgcgtaggatgtttacatgacctaaaaggcgtgatcgttacactgtccgatgatggccacttacagtgctcgtatctgggcaccgacccttctctctttcaagctcctaatgtgcagagcagagaactgaattatgacgaactcgacgtcgagatgaaggagcttcagaagattataaaggatgtgaacaagagccagggggtgtggcctatgactgagcgtgaggacgaccttaacgtatctgtggtggtatccccgaattttgacagcgtttctcaggctactgacgtagaggtaggcactgacctagtgccgtccgtgacagtgaaggtgactttgcagaatcgtgtgattctccagaaggccaaattgtcagtttacgtccagcctccactagagctgacctgcgatcaattcactttcgaattcatgaccccggatttgacgagaacagtgtcatttagcgtgtatctgaagcggagttataccccatctgagcttgagggaaatgcggttgtctcttactcccgaccaacgggtatccccagggtcatccagtgcaaattccgccttccactcaagttgatttgcctgccgggacaaccaagcaagaccgccagtcacaagatcactatcgatacaaataaaagccccgtcagcctcctgagtctctttccaggatttgctagccagagtgatgatgaccaggtgaatgtgatgggcttccattttctgggaggcgcaagaatcacagtgctcgcaagcaaaacgtcccagaggtatagaatccagtcagagcagtttgaggatttgtggctgattaccaatgagctgatcctccgtttacaagagtattttgagaaacaaggagtaaaggacttcgcttgcagcttctccggatctatcccattacaggaatatttcgagctgatcgaccaccactttgagctgaggataaacggcgaaaaactggaagaactgctgtccgagcgcgcagttcaatttagagctatacagaggcggctcctcgctcgcttcaaagataaaactcctgccccactgcagcatctggatacactcctggacgggacttacaaacaggttatagctcttgctgacgccgtcgaggaaaaccagggcaatctgttccagagcttcacccgactcaagtcagccacacacctcgtgatactactgattgcattatggcagaaactgagcgcagatcaggttgctatcctggaagcggcttttcttcctctgcaggaagatacccaggaactcggttgggaggagactgttgatgcagctatttcccatctgctgaagacatgcttgtccaaaagttccaaggagcaagcccttaatttgaatagccagctgaatatccctaaggacacgtcacagcttaaaaagcacatcaccttgctgtgtgacaggctgtctaagggaggcagactttgtttgtccacagatgccgcagcccctcagaccatggttatgcccggtgggtgtacgacaatccctgaatctgacctggaagagcgctccgtagagcaggatagtactgagctgtttactaatcatcggcacctgaccgcagagacaccacgacctgaggtgtcaccattgcaaggcgtgagtgagtag

SEQ ID NO: 30677 - DNA, 4004 bp, Artificial Sequence
  derived and/or modified sequence
agtggcgtccgttgtaagtgctatgacaacagggcgaagatggctcagagttaggctggagaggggaggtgtcccttccgctgcggccgtcgggtttctgctacatcccattcaccgcctcctccatcctttcctcctcggtgtgagcagcaggacttgcatttgttctcgcctgcctagtgtcttccaagggatagatgccgtttcctctgctggtctctgggggtgacggggggcgcaggggagcttcttgggggaatcactccaactctgtggagctggtggtgctgcctggtggggctctctctttgcccgggacgtggaacaactttcagctggaggacgagagggaatagtgaagctaaaggttgcttttctctgcaccgtccgttcttgctccctctgctccatcactgggaccttgtcaggcgttcataaagcaaaatttgccgaacgagggttcgcagaaaggtggggcagagctcatctgacgtggcatcagtgtgaaagaaaatgtctttatttaaagcccgtgattggtggtctactattctgggagataaagaagaatttgatcaaggctgtttgtgtctggctaatgttgacaatagtggaaatggacaagataaaataattgtgggtagctttatgggatacctaaggatctttagcccccatcctgcaaaaacaggagatggagctcaagccgaagatttgcttctagaagtggatctacgagatccagtacttcaagtggaagtaggaaagtttgtttcaggtaccgaaatgctacatttggctgtgttacattctagaaaactttgtgtctactctgtctcaggaaccttgggtaatgtggaacatgggaaccaatgtcagatgaaattgatgtatgaacataatcttcagagaacagcctgcaatatgacctatggatcatttggtggtgtaaaaggtcgagatttaatttgcatccagtctatggatgggatgctgatggtatttgagcaggagagctatgcttttggaagatttctccctggctttcttctgcctggtcctcttgcctacagttcccgtacagattccttccttactgtctcttcctgccaacaagtggaaagttataagtaccaggtacttgcttttgcaacagatgcagataaaaggcaggagactgaacagcaaaaacttggttctggaaaaagactagttgtggattggactctaaatattggagagcaagcccttgacatatgtattgtctctttcaatcagtcggcatcctctgtttttgttcttggtgagagaaactttttttgccttaaggataatggacaaattcgattcatgaagaagcttgattggagcccaagttgttttctgccatattgctcagtttctgaaggaacaataaatactttgattggaaatcataataacatgctgcatatttatcaagatgtgacactgaagtgggccacccaacttccccacattcctgtagcagtaagagtgggctgtttgcatgatttaaagggagtgatagtcactctgagtgatgatggtcacttgcagtgttcatacctggggacagatccttctctgttccaagctccaaacgttcaatctcgagaactaaactatgatgaacttgatgtagaaatgaaagaacttcagaaaatcatcaaagatgttaacaaatcacaaggtgtttggcccatgactgagagagaagatgacttgaacgtttctgtcgtggtttctcctaactttgattcagtttctcaagcgaccgatgttgaggtgggaactgaccttgtcccttctgtcacggtgaaggtcacactgcagaacagagtgatattgcaaaaagccaaattatcagtctacgtgcaaccaccattagaattgacttgtgatcagttcacctttgaatttatgacaccagatttgactagaacagtaagcttttctgtttatctgaaaagaagttatacaccatcagaattggaaggaaatgctgttgtttcttattccagaccaacaggcattccgcgagttatccaatgtaaatttagacttcccctaaagttaatttgcctaccaggtcagccttcaaaaactgcaagccacaaaattactattgataccaacaaatctccagtcagtcttcttagtctcttcccaggttttgccagtcagtcagatgatgatcaggtgaatgtaatgggttttcacttcttaggaggtgctcgaattactgttcttgcttccaaaacttctcaacgatatcgcattcagagtgaacaatttgaagatctttggctcataaccaatgagcttattcttcgccttcaagaatattttgaaaaacagggagtcaaagattttgcatgttctttttcgggatctataccccttcaagaatattttgagttgattgatcatcattttgagctacggataaatggtgaaaaattagaagaactcttatctgagagagctgtacaatttcgggccattcaacgccggctactagcaagattcaaagataaaactcctgcccctcttcaacacctggacaccttgttagatggaacctacaagcaggtaattgctctagcagatgcagtggaggaaaaccaaggcaatctgttccagtcattcaccaggctgaagagtgccacccatttggtgattctgctgatcgcgctgtggcagaagcttagtgctgaccaggttgctattctggaagcggcatttctgccgctacaagaagacactcaagaattgggctgggaagaaacggtggatgccgccatttcccacctgttgaagacttgcctgtcgaagagttctaaggagcaggctttgaacctcaacagccagctgaacatacccaaagacacaagccaactgaagaaacatatcaccttgctctgcgatagattatccaaaggtggccgtctctgcctaagtaccgatgcagcagccccacagaccatggtcatgccaggtggttgtactacaatcccagagtcagacctagaagaaagatcagtagaacaagactctacagaactgtttaccaaccacagacatctcactgcagagacacccaggcctgaagtttcacccctccaaggagtctcggaataattcaagtagagttgtttggttgagaggaacatccccatctcaaggccgaacctgtgtgaacctcatgccaagcacagatatagggctggcgcaggtgcttcctaaagctcaccttcctggagatgacatgcatagaaagaggggttgggactttttacttcactaggagaacttgtaacaccatggggaagtcagctgaaacttgtcttgttttgccaggaaaggaagtagttgcctttggtcatccatctgctaatagtcacagaatacagtgaaatgacatagttttgggttagattttataatgcaaagattcagatccaaaataatttcataccccattttttcacagaattcttatatagtaaatgtatcaagtttaataaagcatctcattgtcaaataatatcttggattttatttataattagagggatttatgagtgattgctctacattatttcttcaaaggaaaggaaaggaattgaagactttgctactctctggtaagacttgaatgtgattattttataaataaaagaaccactatgaaactttcatgtgatttgttctattaagctaaacgtggaagaagggaagttttctagtattgtatgaaaatgtttaaatattttcaaggaagctagtacattaacatccccttttcattaccccattgggtggcaccttttaaaaatccaggttattaaaggattcacactttattacagttaaaatttaaggtttttatgtgtaagaagtgaaagaaactttgctaatttcaagttcgaattacagttgtgagattgatttatttaaataaaaatatgcctttgccagtt

SEQ ID NO: 30678 - DNA, 2649 bp, Artificial Sequence
  derived and/or modified sequence
atgagcctgttcaaggccagagactggtggagcaccatcctgggcgacaaggaggagttcgaccagggctgcctgtgcctggccaacgtggacaacagcggcaacggccaggacaagatcatcgtgggcagcttcatgggctacctgagaatcttcagcccccaccccgccaagaccggcgacggcgcccaggccgaggacctgctgctggaggtggacctgagagaccccgtgctgcaggtggaggtgggcaagttcgtgagcggcaccgagatgctgcacctggccgtgctgcacagcagaaagctgtgcgtgtacagcgtgagcggcaccctgggcaacgtggagcacggcaaccagtgccagatgaagctgatgtacgagcacaacctgcagagaaccgcctgcaacatgacctacggcagcttcggcggcgtgaagggcagagacctgatctgcatccagagcatggacggcatgctgatggtgttcgagcaggagagctacgccttcggcagattcctgcccggcttcctgctgcccggccccctggcctacagcagcagaaccgacagcttcctgaccgtgagcagctgccagcaggtggagagctacaagtaccaggtgctggccttcgccaccgacgccgacaagagacaggagaccgagcagcagaagctgggcagcggcaagagactggtggtggactggaccctgaacatcggcgagcaggccctggacatctgcatcgtgagcttcaaccagagcgccagcagcgtgttcgtgctgggcgagagaaacttcttctgcctgaaggacaacggccagatcagattcatgaagaagctggactggagccccagctgcttcctgccctactgcagcgtgagcgagggcaccatcaacaccctgatcggcaaccacaacaacatgctgcacatctaccaggacgtgaccctgaagtgggccacccagctgccccacatccccgtggccgtgagagtgggctgcctgcacgacctgaagggcgtgatcgtgaccctgagcgacgacggccacctgcagtgcagctacctgggcaccgaccccagcctgttccaggcccccaacgtgcagagcagagagctgaactacgacgagctggacgtggagatgaaggagctgcagaagatcatcaaggacgtgaacaagagccagggcgtgtggcccatgaccgagagagaggacgacctgaacgtgagcgtggtggtgagccccaacttcgacagcgtgagccaggccaccgacgtggaggtgggcaccgacctggtgcccagcgtgaccgtgaaggtgaccctgcagaacagagtgatcctgcagaaggccaagctgagcgtgtacgtgcagccccccctggagctgacctgcgaccagttcaccttcgagttcatgacccccgacctgaccagaaccgtgagcttcagcgtgtacctgaagagaagctacacccccagcgagctggagggcaacgccgtggtgagctacagcagacccaccggcatccccagagtgatccagtgcaagttcagactgcccctgaagctgatctgcctgcccggccagcccagcaagaccgccagccacaagatcaccatcgacaccaacaagagccccgtgagcctgctgagcctgttccccggcttcgccagccagagcgacgacgaccaggtgaacgtgatgggcttccacttcctgggcggcgccagaatcaccgtgctggccagcaagaccagccagagatacagaatccagagcgagcagttcgaggacctgtggctgatcaccaacgagctgatcctgagactgcaggagtacttcgagaagcagggcgtgaaggacttcgcctgcagcttcagcggcagcatccccctgcaggagtacttcgagctgatcgaccaccacttcgagctgagaatcaacggcgagaagctggaggagctgctgagcgagagagccgtgcagttcagagccatccagagaagactgctggccagattcaaggacaagacccccgcccccctgcagcacctggacaccctgctggacggcacctacaagcaggtgatcgccctggccgacgccgtggaggagaaccagggcaacctgttccagagcttcaccagactgaagagcgccacccacctggtgatcctgctgatcgccctgtggcagaagctgagcgccgaccaggtggccatcctggaggccgccttcctgcccctgcaggaggacacccaggagctgggctgggaggagaccgtggacgccgccatcagccacctgctgaagacctgcctgagcaagagcagcaaggagcaggccctgaacctgaacagccagctgaacatccccaaggacaccagccagctgaagaagcacatcaccctgctgtgcgacagactgagcaagggcggcagactgtgcctgagcaccgacgccgccgccccccagaccatggtgatgcccggcggctgcaccaccatccccgagagcgacctggaggagagaagcgtggagcaggacagcaccgagctgttcaccaaccacagacacctgaccgccgagacccccagacccgaggtgagccccctgcagggcgtgagcgagtag

SEQ ID NO: 30679 - protein, 193 aa, Artificial Sequence
  derived and/or modified sequence
MVAPKSHTDDWAPGPFSSKPQRSQLQIFSSVLQTSLLFLLMGLRASGKDSAPTVVSGILGGSVTLPLNISVDTEIENVIWIGPKNALAFARPKENVTIMVKSYLGRLDITKWSYSLCISNLTLNDAGSYKAQINQRNFEVTTEEEFTLFVYAPFIEKLSVHVIEGDHRTLLEGSGLESIISTLAEPRVSVREG

SEQ ID NO: 30680 - DNA, 582 bp, Artificial Sequence
  derived and/or modified sequence
atggtagcgcccaaatcacacaccgatgactgggcaccaggtcccttctcttctaaaccccagaggagtcaactacaaatcttttcctccgtgctgcaaacctcattgttgttcctgctgatgggcctccgtgcttctgggaaggactccgcgcctaccgtcgtgtccggcattcttgggggatccgtcactctcccgctgaatatatctgtcgatactgagattgaaaatgttatctggattggacccaagaacgctctcgcttttgcccgccccaaagaaaatgtgacgatcatggtgaagagctatttggggcggctagacatcactaaatggtcatactccttgtgtatttcaaacctgacactgaacgatgccggtagttacaaggcccagatcaatcagaggaatttcgaggtgacaacagaagaggaatttacactgttcgtgtatgcaccatttatagaaaaattgagcgtacacgtgatcgagggagatcatcggaccctgttggaaggatctggcctggaatcgataatctctacgctggctgaaccacgcgtgtctgtaagggaggggtag

SEQ ID NO: 30681 - DNA, 582 bp, Artificial Sequence
  derived and/or modified sequence
atggtggcccccaagagccacacagatgactgggcccctggccccttcagcagcaagccccagaggagccagctgcagatcttcagctctgtgctgcagaccagcctgctcttcctgctgatgggcctgcgggccagcggcaaggacagcgcccccaccgtggtgtctggcatcctgggcggctctgtgaccctgcccctgaacatctctgtggacacagaaattgaaaatgtcatctggattggccccaagaatgccctggcctttgcccggcccaaggaaaatgtgaccatcatggtgaagagctacctgggccgcctggacatcaccaagtggagctacagcctgtgcatcagcaacctgaccctgaatgatgctggcagctacaaggcccagatcaaccagaggaactttgaggtgaccacagaggaggagttcaccctgtttgtgtatgcccccttcatcgagaagctgtctgtgcacgtgattgaaggagaccacaggaccctgctggagggcagcggcctggagagcatcatcagcaccctggccgagccccgggtgtctgtgcgggagggctag

SEQ ID NO: 30682 - DNA, 1364 bp, Artificial Sequence
  derived and/or modified sequence
catggtggcaccaaagagtcacacagatgactgggctcctgggcctttctccagtaagccacagaggagtcagctgcaaatattctcttctgttctacagacctctctcctcttcctgctcatgggactaagagcctctggaaaggactcagccccaacagtggtgtcagggatcctagggggttccgtgactctccccctaaacatctcagtagacacagagattgagaacgtcatctggattggtcccaaaaatgctcttgctttcgcacgtcccaaagaaaatgtaaccattatggtcaaaagctacctgggccgactagacatcaccaagtggagttactccctgtgcatcagcaatctgactctgaatgatgcaggatcctacaaagcccagataaaccaaaggaattttgaagtcaccactgaggaggaattcaccctgttcgtctatgcaccatttattgaaaagttgtccgtccacgtcatcgagggtgaccaccgcacactcctggagggcagcggcctggagtccatcatcagcaccctggctgagccacgtgtgagcgtgcgggagggctaggccctcgcccccacctgccactggagaccgctccgccatccccacctcaccgccgcgcagcagagctggaagggtcctgccgatgggaccctgccaggcccagtgccactgccccccgaggctgctagacgtgggcgttaggcgtgtcccacccacccgccgcctcccatggcacgtcgggaacaccggagccgccaacttggagactcctggtctgtgaagagccgctgacgcccgcaggaaccgggctgggccttgtgtgccagtggggtttgtgcttggtctttctccgcttggatttgcttatttattgcattgctggtagagactcccaagcctgtccaccctgcaaagactcctcgggcagcatgcgggtcccgcacactgcacccatttcctggatgtcccctgcaggcgcgggaggccatccgggcctgctggctgcggccccctctcagccaggcctggctcagcccactgcgtgggaggtcaccggccactccccgaggagctgggatccccgggatgcaggcccacagtgcggggctgcacccatgatgcggagctggcctccaaccctgcgggccgcgccaggcaccaactcagtgtttgtcagtgtttgtttttccaagaaatggttcaaattgctgctcagatttttaaatttactgtagctgccagtgtacacgtgtggaccccattttatttttacaccaatttggtgaaaatgctgctttcctcagcctccccacaattaaactgcacatggtctctaaaaaaa

SEQ ID NO: 30683 - DNA, 582 bp, Artificial Sequence
  derived and/or modified sequence
atggtggcccccaagagccacaccgacgactgggcccccggccccttcagctccaagcctcagcggtctcagctgcagatcttctctagcgtgcttcagacatccctgctgttcctgctgatggggctccgggcatcggggaaggactctgctcccactgtggtctccggcatcttgggcggctctgtcactctccctctcaacatcagtgtcgacaccgaaattgaaaacgtgatatggattggaccaaagaatgcgctggctttcgctaggcccaaggagaatgtcacaatcatggtaaagtcttaccttgggagactggacattacaaagtggtcctatagtctgtgcatttcaaatcttaccctgaacgacgcaggctcatataaggcgcaaatcaatcaaagaaattttgaggttactacagaagaagaattcacgctcttcgtctacgctcccttcatcgaaaaattaagcgtccacgtgattgagggggatcacagaacgctcctggagggatccgggctggaatcaatcatctcaacgctagccgagcccagagtgtctgtaagggagggctag

SEQ ID NO: 30684 - DNA, 582 bp, Artificial Sequence
  derived and/or modified sequence
atggtggcaccaaagagtcacactgatgattgggcacctggacccttttcctcaaagcctcagagatctcaacttcagattttttctagcgtgctccagactagtttgctctttcttttgatgggactgcgcgcaagtggtaaagattccgcccctacagtggtctccggaatcctgggtggctcagtcacgctgccgctcaatatcagtgtagatactgagatcgagaatgttatatggataggtcctaagaacgccctggccttcgcacgcccaaaagaaaacgtcacaattatggtcaagagctatctgggacgtctcgatatcacgaagtggagttatagcttgtgcatctcgaacttaacattgaacgatgcgggatcttacaaagcccagataaatcagcggaatttcgaggtcaccacagaagaagaatttacactgtttgtttacgcacctttcatcgagaaactgtccgtgcacgtcatcgaaggagaccatcgtactcttctggaaggcagtggcctagaaagtatcataagtaccctggcagagccaagggtgtcggtacgcgagggatag

SEQ ID NO: 30685 - DNA, 582 bp, Artificial Sequence
  derived and/or modified sequence
atggtggcccccaagagccacaccgacgactgggcccccggccccttcagcagcaagccccagagaagccagctgcagatcttcagcagcgtgctgcagaccagcctgctgttcctgctgatgggcctgagagccagcggcaaggacagcgcccccaccgtggtgagcggcatcctgggcggcagcgtgaccctgcccctgaacatcagcgtggacaccgagatcgagaacgtgatctggatcggccccaagaacgccctggccttcgccagacccaaggagaacgtgaccatcatggtgaagagctacctgggcagactggacatcaccaagtggagctacagcctgtgcatcagcaacctgaccctgaacgacgccggcagctacaaggcccagatcaaccagagaaacttcgaggtgaccaccgaggaggagttcaccctgttcgtgtacgcccccttcatcgagaagctgagcgtgcacgtgatcgagggcgaccacagaaccctgctggagggcagcggcctggagagcatcatcagcaccctggccgagcccagagtgagcgtgagagagggctag

SEQ ID NO: 30686 - protein, 808 aa, Artificial Sequence
  derived and/or modified sequence
MGRKLDPTKEKRGPGRKARKQKGAETELVRFLPAVSDENSKRLSSRARKRAAKRRLGSVEAPKTNKSPEAKPLPGKLPKGAVQTAGKKGPQSLFNAPRGKKRPAPGSDEEEEEEDSEEDGMVNHGDLWGSEDDADTVDDYGADSNSEDEEEGEALLPIERAARKQKAREAAAGIQWSEEETEDEEEEKEVTPESGPPKVEEADGGLQINVDEEPFVLPPAGEMEQDAQAPDLQRVHKRIQDIVGILRDFGAQREEGRSRSEYLNRLKKDLAIYYSYGDFLLGKLMDLFPLSELVEFLEANEVPRPVTLRTNTLKTRRRDLAQALINRGVNLDPLGKWSKTGLVVYDSSVPIGATPEYLAGHYMLQGASSMLPVMALAPQEHERILDMCCAPGGKTSYMAQLMKNTGVILANDANAERLKSVVGNLHRLGVTNTIISHYDGRQFPKVVGGFDRVLLDAPCSGTGVISKDPAVKTNKDEKDILRCAHLQKELLLSAIDSVNATSKTGGYLVYCTCSITVEENEWVVDYALKKRNVRLVPTGLDFGQEGFTRFRERRFHPSLRSTRRFYPHTHNMDGFFIAKFKKFSNSIPQSQTGNSETATPTNVDLPQVIPKSENSSQPAKKAKGAAKTKQQLQKQQHPKKASFQKLNGISKGADSELSTVPSVTKTQASSSFQDSSQPAGKAEGIREPKVTGKLKQRSPKLQSSKKVAFLRQNAPPKGTDTQTPAVLSPSKTQATLKPKDHHQPLGRAKGVEKQQLPEQPFEKAAFQKQNDTPKGPQPPTVSPIRSSRPPPAKRKKSQSRGNSQLLLS

SEQ ID NO: 30687 - DNA, 2427 bp, Artificial Sequence
  derived and/or modified sequence
atggggcggaaactggatccaacgaaagaaaaaagaggccctggtagaaaggccagaaaacagaagggggcagagactgagttggtgcggttcttgcctgctgtttccgacgagaacagtaagcggctatccagtcgggctagaaagcgtgccgctaagcgccgactcggctcggtggaggcaccaaagaccaataagtcacccgaagcaaagccactgccaggaaagctgccaaaaggggccgtgcagaccgcagggaagaaaggcccacagagtctctttaacgccccacggggaaaaaagcgtcccgcaccaggctccgatgaagaggaagaggaagaggattccgaggaggacggaatggtaaaccatggagatctgtggggaagtgaagatgatgcggacactgtggacgactacggcgccgacagcaactcggaggacgaggaggagggcgaagcactgctcccgatagaacgggcggcgcggaaacagaaagcaagggaagctgctgccggcatccagtggtccgaggaggagacagaagatgaagaggaggaaaaggaggtgaccccggaaagtgggcccccaaaggtggaggaggcagatggcgggctgcagattaacgttgatgaagaaccattcgtgctccctccagcaggcgaaatggaacaggacgctcaggcacccgatctgcagcgcgtgcataagcgaatccaagacatcgtgggaattctgcgggattttggcgctcaacgcgaagaggggcgctcacggtccgaatacttgaaccgccttaaaaaagacctggctatctattattcttacggcgactttctgttgggcaagttgatggatctctttcccctgagcgaactggtggaattcctggaagcaaacgaagtgcccaggccagtaaccttacggactaacacactaaaaactcgtaggcgagacctcgcccaggcgctgattaaccgcggtgtcaatctggatcccctgggtaaatggtccaaaactgggcttgtggtgtatgattcttccgtacctataggcgccactcctgagtacttagctgggcactacatgctgcagggcgcctcatccatgctgcccgttatggccctcgctcctcaagagcacgaacggatactcgacatgtgttgtgccccgggggggaaaaccagctacatggcccaactcatgaaaaatactggggtcattctggccaacgacgccaatgccgaacgcctaaagagtgtcgtgggaaacctgcaccgccttggtgtgaccaacacaattatttctcattacgacggcagacaattcccaaaggtggtgggtggatttgaccgcgtgttactggatgctccttgcagtggcacaggagtgattagtaaggatccagccgtgaagacaaataaggatgagaaggacattctacggtgtgcacatttacaaaaggaactgctcttgagcgctattgatagcgtgaatgcaacctccaagaccggtggttacctcgtctactgcacgtgttcaattaccgtcgaggaaaatgagtgggtggtggattacgctttgaagaaaaggaatgtgcgcttggtccctacggggttggacttcggacaagaaggattcacaaggttcagggagcggcggttccacccatctttacgttcgacgagacggttctaccctcacacccataacatggatggctttttcattgccaagtttaagaaatttagcaactccataccacagtcacagaccggaaattcggagaccgctacccccaccaacgtcgatcttccccaggtgataccgaagtcagaaaactccagccagcctgccaaaaaggcgaaaggtgccgccaagaccaaacagcagctccagaaacagcagcatcctaagaaggcctcattccagaaactgaacggcattagcaaaggggctgattccgagctgtctactgtgcccagcgtgaccaagactcaggcctcttccagctttcaggactctagtcagccagccgggaaagctgaaggtattcgggagcccaaagttacgggcaaactgaagcagaggtcccccaaactccaatcgtctaagaaggtggcattcctgaggcagaatgctcctcccaagggcaccgatacccagaccccagctgtgctatctccctcaaaaacacaagccaccctgaagcccaaggaccaccatcagcccctggggagggccaagggcgtggaaaagcaacagcttccggagcaaccctttgagaaggccgcgttccagaagcaaaatgacacacctaagggacctcagccaccgactgtgtcccctatacggagttcgcggcctccacctgcaaagcgcaaaaagtctcaaagtagagggaatagccagcttctattgagctag

SEQ ID NO: 30688 - DNA, 2427 bp, Artificial Sequence
  derived and/or modified sequence
atgggacgcaaattggatccaacaaaagagaaaagaggacccggcaggaaggctagaaagcagaagggagctgaaacagagctggtgcgcttcctgcccgctgtgtccgacgagaattcaaagaggctttcatccagagcacgcaagcgagcggccaagcgtaggctagggtctgtggaggccccaaaaacaaacaaaagccccgaggctaaacctttgccagggaagttacctaaaggcgccgtgcagacggccggcaagaaaggcccccagtcgcttttcaacgctcctcggggtaaaaagcggcccgcgcccggcagcgatgaggaggaggaagaggaggattccgaagaggatggcatggtgaatcatggggacttgtggggcagtgaagacgacgctgacactgtggatgactatggggcagattctaattctgaagacgaagaggagggagaggccctgctgcccattgaacgagccgctcggaaacagaaagctcgcgaagcagcggccgggatccagtggagtgaagaggagactgaggatgaggaagaagagaaagaggtgacgcctgaaagcggccctcctaaggttgaagaggcggatggtgggttgcagatcaacgtggacgaagaaccgtttgtgctgcctccagctggtgaaatggaacaggacgcacaggcccctgacttgcagcgcgtccataagaggattcaggatattgtgggcattctgcgtgatttcggagcccaacgcgaagaggggagaagcagatctgagtatctgaaccggctgaaaaaggatctggcaatttactacagttacggcgattttttactgggaaaactcatggaccttttccctctgtccgaactggtagaatttctcgaggctaacgaggtgccgcggccggtgactttacgcactaatacacttaagactcggcgcagggatctggcccaagccctcattaaccggggggtgaacttagacccattgggcaagtggtcgaaaacaggccttgtagtgtatgatagctctgtcccgatcggcgcaacgccagagtatctggctggccattatatgctgcaaggggcctcctctatgctgcctgtaatggcgctcgccccacaagagcatgaacgcatactcgatatgtgctgcgcaccaggaggcaaaacgtcttacatggcacagctgatgaaaaacaccggagttatcctggcaaatgacgccaacgcagagaggttaaagtcagtggtaggtaatctgcaccggctcggtgtaaccaatacaatcatatcccactatgacggtcgtcaattccctaaagtcgtgggaggattcgacagagtgttgctggatgctccctgtagtgggacaggggttatttcaaaagacccagccgtgaaaacaaataaggatgagaaagatattttgcgttgcgcacacctccagaaggaattattgctcagtgccatcgattcagtaaatgcaacttcaaagaccggcggctacctggtttattgcacgtgctctattacagtggaagaaaacgagtgggttgtcgactacgctctgaaaaagcgcaatgttagacttgtgcccaccgggctggactttggtcaggagggttttacaaggttcagggagcgccggttccacccaagcctaaggagcactaggcgcttttaccctcacacacacaatatggacgggttttttatagcaaagtttaagaaattttctaactccattccccagtcgcaaaccggcaacagcgagaccgccacacccaccaacgtggacctacctcaggtaatcccaaagagtgagaattcatctcagcccgctaaaaaggccaaaggcgcggccaagacaaaacagcagctgcagaagcagcagcaccctaagaaggcctccttccagaagctgaacggcatcagcaagggggccgacagcgagctaagcaccgtgcctagcgttaccaaaactcaggcttctagttctttccaggactcgtctcagcctgccggcaaggccgaaggcatcagggaacctaaagtcactggcaaacttaagcagcgttctcctaagctccaatctagtaagaaggtggcctttctccggcagaatgccccacctaaaggcactgacactcagacacccgccgtgctaagcccgtccaagacacaggctactctgaaaccgaaggaccaccaccagccgttgggccgggcaaagggggtggagaaacaacagctccccgaacagccttttgaaaaggcagccttccagaaacaaaacgatactcctaagggcccccagcctcctactgtttcaccaatacggtctagtaggcccccgccagcgaaacgtaaaaagagtcagagccgcgggaactcccagcttttgctgtcttag

SEQ ID NO: 30689 - DNA, 2701 bp, Artificial Sequence
  derived and/or modified sequence
gagtgccggccgaaagctaggtccggattgcacgtggagggccgcccgaagggcactctcggacattaacccgcattctggtgggtctagaggaaattgggggacgaagagtggcagcactgacctggtctgggacgtggggagaaggtaccatggggcgcaagttggaccctacgaaggagaagcgggggccaggccgaaaggcccggaagcagaagggtgccgagacagaactcgtcagattcttgcctgcagtaagtgacgaaaattccaagaggctgtctagtcgtgctcgaaagagggcagccaagaggagattgggctctgttgaagcccctaagacaaataagtctcctgaggccaaaccattgcctggaaagctaccaaaaggagctgtccagacagctggtaagaagggaccccagtccctatttaatgctcctcgaggcaagaagcgcccagcacctggcagtgatgaggaagaggaggaggaagactctgaagaagatggtatggtgaaccacggggacctctggggctccgaggacgatgctgatacggtagatgactatggagctgactccaactctgaggatgaggaggaaggtgaagcgttgctgcccattgaaagagctgctcggaagcagaaggcccgggaagctgctgctgggatccagtggagtgaagaggagaccgaggacgaggaggaagagaaagaagtgacccctgagtcaggccccccaaaggtggaagaggcagatgggggcctgcagatcaatgtggatgaggaaccatttgtgctgccccctgctggggagatggagcaggatgcccaggctccagacctgcaacgagttcacaagcggatccaggatattgtgggaattctgcgtgattttggggctcagcgggaggaagggcggtctcgttctgaatacctgaaccggctcaagaaggatctggccatttactactcctatggagacttcctgcttggcaagctcatggacctcttccctctgtctgagctggtggagttcttagaagctaatgaggtgcctcggcccgtcaccctccggaccaataccttgaaaacccgacgccgagaccttgcacaggctctaatcaatcgtggggttaacctggatcccctgggcaagtggtcaaagactggactagtggtgtatgattcttctgtgcccattggtgctacccccgagtacctggctgggcactacatgctgcagggagcctccagcatgttgcccgtcatggccttggcaccccaggaacatgagcggatcctggacatgtgttgtgcccctggaggaaagaccagctacatggcccagctgatgaagaacacgggtgtgatccttgccaatgacgccaatgctgagcggctcaagagtgttgtgggcaacttgcatcggctgggagtcaccaacaccattatcagccactatgatgggcgccagttccccaaggtggtggggggctttgaccgagtactgctggatgctccctgcagtggcactggggtcatctccaaggatccagccgtgaagactaacaaggatgagaaggacatcctgcgctgtgctcacctccagaaggagttgctcctgagtgctattgactctgtcaatgcgacctccaagacaggaggctacctggtttactgcacctgttctatcacagtagaagagaatgagtgggtggtagactatgctctgaaaaagaggaatgtgcgactggtgcccacgggcctagactttggccaggaaggttttacccgctttcgagaaaggcgcttccaccccagtctgcgttctacccgacgcttctaccctcatacccacaatatggatgggttcttcattgccaagttcaagaaattttccaattctatccctcagtcccagacaggaaattctgaaacagccacacctacaaatgtagacttgcctcaggtcatccccaagtctgagaacagcagccagccagccaagaaagccaagggggctgcaaagacaaagcagcagctgcagaaacagcaacatcccaagaaggcctccttccagaagctgaatggcatctccaaaggggcagactcagaattgtccactgtaccttctgtcacaaagacccaagcttcctccagcttccaggatagcagtcagccagctggaaaagccgaagggatcagggagccaaaggtgactgggaagctaaagcaacgatcacctaaattacagtcctccaagaaagttgctttcctcaggcagaatgcccctcccaagggcacagacacacaaacaccggctgtgttatccccatccaagactcaggccaccctgaaacctaaggaccatcatcagccccttggaagggccaagggggttgagaagcagcagttgccagagcagccttttgagaaagctgccttccagaaacagaatgatacccccaaggggcctcagcctcccactgtgtctcccatccgttccagccgccccccaccagcaaagaggaagaaatctcagtccaggggcaacagccagctgctgctatcttagatggttgaaaactagacgggtggctcactgccattgtcaccaggttggaactcttgcctctgtgaggatgccttctctactgtgcatacccatgaaatttaatacacattttaaaacctctg

SEQ ID NO: 30690 - DNA, 3038 bp, Artificial Sequence
  derived and/or modified sequence
aaagtgctgggattacaggcgtgagccactgcgcccagcctggaattccgtgatcttgacgctggactagggcagtggatgcgagggagagggctccaatgtcgggccctggttcgaggagaaggtgcggctttcacccaacagaaaccggccgtgaggctaaaagccaactccatgagggaaggtcggtcaagctcaatggtttcgtcacattgctccctccacccgccgcgggtgtaagctgcgcgtctccttcgaattgccccctactcgccgccgccggctccgctggcgttcccagggcgagcgtaagttccgggtgcggcggccgactaggcgcaacaggaagaggcggggccgcgaggctagcgctacccgtgcgcctgcgtggaacgattctgtggcgagtgccggccgaaagctaggtccggattgcacgtggagggccgcccgaagggcactctcggacattaacccgcattctgtaccatggggcgcaagttggaccctacgaaggagaagcgggggccaggccgaaaggcccggaagcagaagggtgccgagacagaactcgtcagattcttgcctgcagtaagtgacgaaaattccaagaggctgtctagtcgtgctcgaaagagggcagccaagaggagattgggctctgttgaagcccctaagacaaataagtctcctgaggccaaaccattgcctggaaagctaccaaaaggagctgtccagacagctggtaagaagggaccccagtccctatttaatgctcctcgaggcaagaagcgcccagcacctggcagtgatgaggaagaggaggaggaagactctgaagaagatggtatggtgaaccacggggacctctggggctccgaggacgatgctgatacggtagatgactatggagctgactccaactctgaggatgaggaggaaggtgaagcgttgctgcccattgaaagagctgctcggaagcagaaggcccgggaagctgctgctgggatccagtggagtgaagaggagaccgaggacgaggaggaagagaaagaagtgacccctgagtcaggccccccaaaggtggaagaggcagatgggggcctgcagatcaatgtggatgaggaaccatttgtgctgccccctgctggggagatggagcaggatgcccaggctccagacctgcaacgagttcacaagcggatccaggatattgtgggaattctgcgtgattttggggctcagcgggaggaagggcggtctcgttctgaatacctgaaccggctcaagaaggatctggccatttactactcctatggagacttcctgcttggcaagctcatggacctcttccctctgtctgagctggtggagttcttagaagctaatgaggtgcctcggcccgtcaccctccggaccaataccttgaaaacccgacgccgagaccttgcacaggctctaatcaatcgtggggttaacctggatcccctgggcaagtggtcaaagactggactagtggtgtatgattcttctgtgcccattggtgctacccccgagtacctggctgggcactacatgctgcagggagcctccagcatgttgcccgtcatggccttggcaccccaggaacatgagcggatcctggacatgtgttgtgcccctggaggaaagaccagctacatggcccagctgatgaagaacacgggtgtgatccttgccaatgacgccaatgctgagcggctcaagagtgttgtgggcaacttgcatcggctgggagtcaccaacaccattatcagccactatgatgggcgccagttccccaaggtggtggggggctttgaccgagtactgctggatgctccctgcagtggcactggggtcatctccaaggatccagccgtgaagactaacaaggatgagaaggacatcctgcgctgtgctcacctccagaaggagttgctcctgagtgctattgactctgtcaatgcgacctccaagacaggaggctacctggtttactgcacctgttctatcacagtagaagagaatgagtgggtggtagactatgctctgaaaaagaggaatgtgcgactggtgcccacgggcctagactttggccaggaaggttttacccgctttcgagaaaggcgcttccaccccagtctgcgttctacccgacgcttctaccctcatacccacaatatggatgggttcttcattgccaagttcaagaaattttccaattctatccctcagtcccagacaggaaattctgaaacagccacacctacaaatgtagacttgcctcaggtcatccccaagtctgagaacagcagccagccagccaagaaagccaagggggctgcaaagacaaagcagcagctgcagaaacagcaacatcccaagaaggcctccttccagaagctgaatggcatctccaaaggggcagactcagaattgtccactgtaccttctgtcacaaagacccaagcttcctccagcttccaggatagcagtcagccagctggaaaagccgaagggatcagggagccaaaggtgactgggaagctaaagcaacgatcacctaaattacagtcctccaagaaagttgctttcctcaggcagaatgcccctcccaagggcacagacacacaaacaccggctgtgttatccccatccaagactcaggccaccctgaaacctaaggaccatcatcagccccttggaagggccaagggggttgagaagcagcagttgccagagcagccttttgagaaagctgccttccagaaacagaatgatacccccaaggggcctcagcctcccactgtgtctcccatccgttccagccgccccccaccagcaaagaggaagaaatctcagtccaggggcaacagccagctgctgctatcttagatggttgaaaactagacgggtggctcactgccattgtcaccaggttggaactcttgcctctgtgaggatgccttctctactgtgcatacccatgaaatttaatacacattttaaaacctctg

SEQ ID NO: 30691 - DNA, 2427 bp, Artificial Sequence
  derived and/or modified sequence
atgggcaggaagctggaccccaccaaggagaagaggggccctggcaggaaggccaggaagcagaagggagctgagacagagctggtgcgcttcctgcctgctgtgtctgatgagaacagcaagaggctgagcagccgggccaggaagagagctgccaagaggcggctgggctctgtggaggcccccaagaccaacaagagccctgaggccaagcccctgcccgggaagctgcccaagggagctgtgcagacagctgggaagaagggcccccagagcctcttcaatgccccccggggcaagaagaggcctgcccctggcagtgatgaggaggaggaggaggaggacagcgaggaggatggcatggtgaaccacggggacctgtggggctctgaagatgatgctgacacagtggatgattatggagctgacagcaacagtgaagatgaggaggagggggaggccctgctgcccatcgagagagctgccaggaagcagaaggcccgggaggccgccgccggcatccagtggagcgaggaggagacagaagatgaggaggaggagaaggaggtgaccccagagagcggcccccccaaggtggaggaggctgatggcggcctgcagatcaacgtggatgaggagccctttgtgctgcccccagctggggagatggagcaggatgcccaggccccagacctgcagagggtgcacaagaggatccaggacatcgtgggcatcctgcgggactttggagcccagcgggaggagggccgcagccgctctgagtacctgaaccggctgaagaaggacctggccatctactacagctatggagacttcctgctgggcaagctgatggacctcttccccctgtctgagctggtggagttcctggaggccaatgaggtgcccaggcctgtgaccctgcggaccaacaccctgaagaccaggagaagagacctggcccaggccctgatcaacagaggagtgaacctggaccccctgggcaagtggagcaagacaggcctggtggtgtatgacagctctgtgcccatcggggccaccccagagtacctggccggccactacatgctgcagggcgccagctccatgctgcctgtgatggccctggccccccaggagcacgagcgcatcctggacatgtgctgtgcccctgggggcaagaccagctacatggcccagctgatgaagaacacaggagtcatcctggccaatgatgccaatgctgagcggctgaagtctgtggtgggcaacctgcaccggctgggcgtgaccaacaccatcatcagccactatgatggccggcagttccccaaggtggtgggcggctttgacagagtgctgctggatgccccctgcagcggcaccggggtcatcagcaaggaccctgctgtgaagaccaacaaggatgagaaggacatcctgcgctgtgcccacctgcagaaggagctgctgctgagcgccattgattctgtgaatgccaccagcaagacaggaggctacctggtgtactgcacctgcagcatcaccgtggaggagaatgagtgggtggtggactatgccctgaagaagagaaatgtgcggctggtgcccaccggcctggactttggccaggagggcttcacccgcttccgggagcggcgcttccaccccagcctgcggagcacccggcgcttctacccccacacccacaacatggatggcttcttcatcgccaagttcaagaagttcagcaacagcatcccccagagccagacaggcaacagcgagacagccacccccaccaacgtggacctgccccaggtgatccccaagtctgagaacagcagccagcctgccaagaaggccaagggagctgccaagaccaagcagcagctgcagaagcagcagcaccccaagaaggccagcttccagaagctgaatggcatcagcaaaggagctgacagcgagctgagcacagtgcccagcgtgaccaagacccaggccagcagcagcttccaggacagcagccagcctgctgggaaggccgagggcatccgggagcccaaggtgacaggcaagctgaagcagaggagccccaagctgcagagcagcaagaaggtggccttcctgcggcagaatgccccacccaagggcacagacacccagaccccagctgtgctgagccccagcaagacccaggccaccctgaagcccaaggaccaccaccagcccctgggccgggccaagggcgtggagaagcagcagctgcctgagcagccctttgagaaggccgccttccagaagcagaatgacacccccaagggcccccagccccccaccgtgagccccatccgcagcagcaggcctcctccagccaagaggaagaagagccagagccggggcaacagccagctgctgctgtcctag

SEQ ID NO: 30692 - DNA, 2427 bp, Artificial Sequence
  derived and/or modified sequence
atgggccggaagctggaccccaccaaggagaagcggggccccggccggaaggcgagaaaacaaaaaggagcagaaaccgagctcgtaagattcctgccagcagtgtctgatgagaactccaagcgactctcatcgcgggctcggaaaagagctgccaagaggagattgggaagcgtcgaggcccctaaaaccaacaaatcccccgaagctaaacccctgccaggtaaactaccaaaaggtgccgtgcaaaccgccgggaagaaagggccgcaatcattatttaatgcccctcggggcaagaagaggccggcacctggaagcgacgaagaggaggaagaggaggacagcgaggaagacggcatggtgaaccacggggacctgtggggatccgaggacgacgccgatacagttgatgattacggcgccgacagcaacagcgaggatgaggaggagggtgaagctctcctccctattgagcgtgccgctcggaaacaaaaagcaagagaggcggccgccggcattcagtggagtgaggaggaaacggaagacgaagaggaggagaaagaggtgaccccagaatccggaccgcccaaagtagaagaggcagacggcgggctccagatcaacgtggacgaggagccgttcgttcttcccccagccggagagatggaacaggacgctcaagctcccgacttgcagcgtgtccataaaaggattcaggacatcgtgggcatactgcgagattttggggctcagcgagaagaaggcaggtcccgttctgaatacctgaacaggcttaagaaggacttggccatatattactcttacggcgactttctgcttggaaaactcatggaccttttccctctatcagaacttgtggaatttctggaggccaacgaagttcccagaccagtgacactgaggaccaataccctgaagacacgcagacgggacttagcccaggcactgattaacaggggggttaacctagacccgctgggaaagtggtccaagaccggactggtggtgtatgacagttccgtccccatcggagccacccccgagtatttagcaggccactacatgctgcagggcgcctcctcaatgctgcctgtgatggccctggcacctcaggagcatgagcgtatcctggatatgtgttgtgccccaggggggaagactagctatatggctcagttgatgaaaaataccggggtcattcttgcaaatgacgccaacgccgaacgtctcaagtcagttgtgggaaatctgcaccgactcggtgtaaccaataccatcatatcgcactatgacggccgacagttccccaaggtggttggcggattcgatcgcgtcctcttggatgctccatgcagcggaacaggagtaatctcaaaagacccagctgtgaagacgaacaaagacgagaaggacatactgcgctgcgctcacctccagaaagaactcctactatccgccatcgattccgtgaacgccacttccaaaaccggaggatatctcgtgtactgtacttgcagcattaccgttgaggaaaatgaatgggtggttgactatgcactgaagaaaagaaatgtgaggctggtgcccaccggccttgatttcggccaggaggggttcacaagattccgggagcggcgctttcatccatccctgcggagtactaggcgcttctacccccacacccacaatatggacggcttttttattgccaaattcaagaaattttctaactccatccctcaaagccagacggggaatagcgagaccgccacccctaccaatgtggacctcccacaagttatccccaaatctgaaaacagcagccagcccgctaaaaaggctaaaggtgcggctaagacaaagcagcagcttcagaaacaacagcatcctaaaaaggcctcattccaaaagctgaatggcatcagtaaaggcgccgatagtgagctttctaccgtgccttcagtgactaaaactcaggcatctagttccttccaggatagcagtcaacccgccggcaaggcagaaggtatcagggaaccaaaagtcacgggcaagctgaagcagcgttcccctaagcttcagtctagcaagaaggttgcatttctgcggcagaatgcccctcctaaaggtactgacactcaaactccagccgtcctctcaccatctaagactcaggccacacttaaaccaaaggatcatcatcagccccttggtcgagcgaaaggcgtggagaagcagcagctgcccgaacaacccttcgagaaagccgcatttcagaagcagaacgatacgcccaaggggcctcagcctccgactgtatcccctatccgttcatctaggccaccaccggccaaacggaaaaagagccaaagccgagggaactctcagttactactttcttag

SEQ ID NO: 30693 - DNA, 2427 bp, Artificial Sequence
  derived and/or modified sequence
atgggccggaagctggaccccaccaaggagaagcggggccccggccgcaaggctaggaagcagaagggcgcggaaaccgagcttgtcagattccttcctgctgtgtccgacgagaactctaagcgcctgtcaagccgagccaggaaacgcgctgctaaacgccgtttgggttctgtcgaggcacctaaaacaaacaagtccccggaggcgaagcccctgcccggaaaattgcctaaaggggcagtccagactgcggggaaaaaagggcctcagagcctgtttaatgcccccaggggaaaaaaaaggccggcgccagggtccgacgaagaggaggaggaggaagactctgaagaagacgggatggtaaatcacggagacttgtggggaagtgaggatgatgcagacaccgtcgatgattatggcgcggactcaaactctgaggatgaagaagagggtgaagcactcctgccaattgagcgcgccgcacgtaagcagaaagctcgcgaagctgcggccgggatccagtggtcagaagaggagaccgaggatgaagaggaggagaaagaagttacccctgaatccggtcctccaaaggtggaagaggctgatggcggacttcaaattaatgtagatgaggagcctttcgtgcttcccccagcgggcgaaatggagcaggacgcgcaggcacctgatctgcagcgcgtgcacaagcgtatacaggatattgtcggtatcctcagggacttcggggctcagcgcgaggaggggcgttcccgatctgagtacctcaacaggctcaaaaaagacctggccatctattattcctacggtgatttcctgctgggcaagctaatggacctgttccccctgagcgaactggtcgagttcctcgaggctaacgaagtgccccgcccagtcactcttcggacaaatacactgaagactagacgacgggacctagcccaagcccttataaatcggggagtcaacttggatccactgggtaaatggtccaagactggattagtggtgtatgactcgagtgtgcctatcggcgcgaccccagagtacctcgctggccactacatgcttcagggcgcctcgtcaatgcttcccgtgatggccctggccccacaggaacacgaaaggatacttgatatgtgctgtgcgccaggcggaaagactagctatatggcacagctcatgaagaacaccggagtcatattggctaatgatgccaacgcagagagactcaagtcggtcgtaggaaatttacatagattaggagtcaccaacaccattatatctcattatgatggacggcagttccccaaggtggttggagggttcgatagggttctactagatgccccgtgcagtggaactggtgttatttctaaggaccctgcggttaaaaccaacaaagacgaaaaagacattctgcgctgcgcacacctgcagaaggaactgttgctgagcgctatcgacagcgtaaatgccacatccaaaacaggcgggtatctcgtttattgtacctgtagcatcacagtcgaagaaaatgagtgggtggttgattacgccctaaagaagcgcaacgttaggcttgttcctaccggattggattttggacaggagggattcacgcggtttcgcgaacggcggttccacccatccttgcggagcacacgtaggttttacccgcacacccacaatatggacgggttttttatagcgaagtttaaaaaatttagcaacagcattcctcagtctcaaactggcaatagcgagacggcaacccccacaaacgtagaccttccccaggtcattcctaaatcagaaaattcctcacagcccgccaaaaaagcgaaaggagccgccaagacaaagcagcagctacaaaagcaacaacatccaaaaaaagcatctttccagaaactgaacggcatcagtaagggcgccgattctgagctgagtactgtcccgagcgtgaccaagacacaggctagctcatctttccaggatagctcccagccagccgggaaagccgagggtattcgagaacctaaggtgacaggaaagctgaaacagagatcccccaagctgcagtccagtaagaaggtagcatttctgaggcagaatgctccccccaaaggcacggatacacagactcctgcagtgttgagtccatccaagactcaggctacactgaagccgaaagatcatcatcagcccctcgggcgcgctaaaggcgtcgaaaagcaacaacttcctgaacaaccttttgaaaaggccgcattccagaagcagaacgatacgcccaagggaccccaaccacctacagtttcaccaatccggagctcacgcccaccgccagctaagcggaagaaatcccagagcagaggcaacagtcaactgttactcagttag

SEQ ID NO: 30694 - DNA, 2427 bp, Artificial Sequence
  derived and/or modified sequence
atgggtaggaaattggatcctacgaaggaaaaaaggggacccggacgaaaagcacgtaagcaaaagggcgcagaaacagaacttgtgagattccttcccgcagtgagcgacgagaattccaaaagattgagctccagggctcgaaagcgggcagctaagcggcgattggggtctgtggaggcacccaagacgaataaatccccggaggctaagccattacccggaaagctgccgaaaggagctgtgcagacagctggaaagaagggacctcagagtctgttcaacgccccacggggtaagaagcgccctgctcccggtagcgatgaggaagaggaagaagaggactctgaggaggacggcatggtgaaccacggtgacctgtggggctcagaagacgatgctgacaccgtagacgattacggtgctgattccaactccgaggacgaggaggaaggtgaggcgctgctgcccatagaaagggcagcgagaaagcagaaggccagagaggctgccgctggaatccaatggtcggaggaggagacagaagacgaagaggaagagaaggaggtgacccccgagtcagggccacctaaagttgaagaggctgacggcggactgcagatcaacgtggatgaagaacctttcgtccttccccctgcaggagagatggagcaggatgctcaggcaccggacttgcagagggttcacaaacggatacaggacatcgtgggcatcctgcgcgactttggcgctcagagagaggaaggcagatcgagatcagaatatctgaaccgcctgaagaaagacctggctatttattatagctacggcgactttttactcggcaagctgatggatctttttccactttcagagttggttgagttccttgaggccaatgaggttccacggcctgtaaccttgagaactaacaccttgaagacacgccgacgggatttggcccaagctcttataaacagaggtgtgaacctggaccctttggggaagtggagtaagaccggcctagtggtctatgattcttctgtgcccatcggggctactccggagtatttagcgggacactatatgttgcagggcgcatcctcaatgcttcccgtgatggcactcgcaccacaggagcacgagcgtatcctggacatgtgttgtgctccagggggaaaaacctcgtacatggctcagttgatgaagaacaccggcgtcatactggcaaatgatgccaatgcagaaaggctcaagtcggtcgtgggtaacctgcaccgccttggggtcacaaatacaatcatttctcactacgatggccgacagtttccaaaagttgttgggggtttcgacagagtgctcctggatgcaccctgtagcggcacgggggttatctcaaaggaccctgctgtgaaaactaataaggacgaaaaggatatcttgagatgcgcccatttgcaaaaggaactgttgctgtcggctatcgacagtgtgaacgctacatccaaaacaggtggctacctggtgtactgtacctgctcaatcaccgtggaggagaatgaatgggtggttgactatgccctgaagaagaggaacgtccggttggtgccgaccggtctggacttcggtcaagaaggcttcactcgcttcagagagaggaggttccaccctagcctaagatctacacgcagattctatcctcacacccacaacatggatggcttctttatcgcaaagttcaaaaaattcagtaactctatcccccagagccagacaggtaattctgagactgccacccccacaaacgtcgacctcccccaggttatccctaaaagcgagaattccagccagcccgctaagaaagcaaagggcgctgctaagacaaaacagcaactccagaaacagcaacatcccaagaaggcctcctttcagaaactgaatggaatttccaagggggctgacagtgaactgagcaccgtaccctctgtgactaagacccaggcttccagttcctttcaggattcatctcagccagcaggcaaggctgagggcatccgggagcctaaagtgactgggaaattgaaacagcgctcaccgaaattacagtcgtctaagaaggtcgctttcctgcgtcagaatgcccctcctaagggaacagatacgcagactcctgcggttttgagtccctccaagacgcaggcaaccttgaagccaaaggatcaccaccaaccgctgggcagggccaagggagtggaaaagcaacagttgcccgagcagccttttgaaaaagctgctttccagaagcaaaatgacactcctaagggtcctcaaccccctactgttagccctattcgatcatctcggccaccgccagccaaaaggaaaaagagtcagtccagagggaattctcagctcttactgtcttag

SEQ ID NO: 30695 - DNA, 2427 bp, Artificial Sequence
  derived and/or modified sequence
atgggacgaaaactggatcctacgaaggagaaacggggtccagggaggaaagccaggaaacagaagggcgctgaaactgagctggttaggttcctgccagccgtcagcgatgagaactccaagcggctttctagcagagcccgaaagcgagccgctaagcgacgccttgggtcagttgaagcgccaaagactaataagtctcccgaggcgaagcccctgcctggaaaactgcctaaaggcgcagtgcaaactgcaggcaaaaaaggtcctcagagcttatttaacgcccctagagggaagaaacgccctgcccctggctccgacgaggaggaggaagaggaagatagcgaggaagacggaatggtgaaccacggcgacctgtggggttctgaggacgatgccgatacagttgacgactatggagctgacagtaattccgaggatgaagaggagggcgaagccctgctacctatcgagagggcggctagaaagcagaaggccagagaggctgccgctggcattcagtggtctgaagaggaaacagaagatgaggaggaagaaaaggaggtaacccctgaatcaggaccccctaaagttgaagaggccgatggcggtctccagattaacgtggacgaggaaccgtttgtactgcctccagctggtgaaatggaacaggacgcccaggcgcctgacctgcaaagagtgcacaagcgaattcaggatattgttgggatcctgcgtgacttcggagcccagagagaggagggcaggtctagaagtgaatatctgaacagactgaagaaggatctcgcaatttactatagttacggcgatttccttctgggcaagctcatggacttattccccctcagtgagttggtggaatttctagaagccaacgaggtgcctcgtccagtgactctgagaacgaatacactgaagacacgccgtcgtgatcttgcacaggcgcttataaaccggggagttaacctcgaccctctgggaaagtggtccaagaccgggcttgtagtatacgactcaagtgtgcccatcggggcaactccagagtatcttgcagggcactatatgctccaaggagcttcttccatgctgcctgtcatggcactggcccctcaggagcatgagcgtatcttggatatgtgctgtgctcctggcggtaagacctcctatatggcccagcttatgaaaaataccggggtgatcctcgcaaacgatgccaatgccgaaagactgaagagcgtcgtcggcaatctgcataggctgggagtcaccaacacaattatcagccactatgatggacgtcaatttcccaaagtggtgggcggattcgaccgcgtactactggacgcaccctgcagcggtaccggcgtgatcagcaaggatccagcagtgaagactaataaggacgagaaagacatcttgaggtgtgcacacttacagaaggagctcctactttctgcaatcgacagtgttaacgccacctctaaaacggggggttacctcgtctattgcacttgtagcattactgtggaagaaaacgaatgggttgttgactatgccctcaaaaagcgtaatgtccgcctggtaccgacgggtctggactttggacaagaaggattcaccaggttccgcgagaggcggtttcatccgtctcttcggtcaacccggagattctatccacatacccacaacatggacggtttctttatcgctaaatttaaaaagtttagcaacagcattcctcagagccaaactggaaacagtgagactgctacccccaccaacgttgacctcccccaagtcattcccaaatctgagaattctagccagccggcaaaaaaggcaaaaggcgcagctaagacgaagcagcagcttcagaaacagcagcacccaaagaaagcgtcatttcaaaaactcaatgggatcagcaagggggctgacagtgagttaagcacggttcccagtgtcactaaaacacaggcaagcagctcatttcaggacagctctcagccagctgggaaggctgaaggtatcagagagcctaaggtcaccgggaaactaaaacaacgctcgccaaagctgcagtcaagtaaaaaggtcgctttcttgcggcaaaatgcccctcccaaagggacggacacccagactccagcagtattgtctccttctaaaacgcaggcaactctgaagcctaaggaccaccaccaacctctggggagagcgaaaggggtcgagaaacagcagctcccagagcaaccattcgaaaaggcggctttccaaaaacaaaatgatactccaaagggcccacagccaccaacggtttcgcccattcgatcctcaagaccccctcctgccaaacggaagaagtcccagtcccgcggaaattcacagcttctgctgagctag

SEQ ID NO: 30696 - DNA, 2427 bp, Artificial Sequence
  derived and/or modified sequence
atgggcagaaagctggaccccaccaaggagaagagaggccccggcagaaaggccagaaagcagaagggcgccgagaccgagctggtgagattcctgcccgccgtgagcgacgagaacagcaagagactgagcagcagagccagaaagagagccgccaagagaagactgggcagcgtggaggcccccaagaccaacaagagccccgaggccaagcccctgcccggcaagctgcccaagggcgccgtgcagaccgccggcaagaagggcccccagagcctgttcaacgcccccagaggcaagaagagacccgcccccggcagcgacgaggaggaggaggaggaggacagcgaggaggacggcatggtgaaccacggcgacctgtggggcagcgaggacgacgccgacaccgtggacgactacggcgccgacagcaacagcgaggacgaggaggagggcgaggccctgctgcccatcgagagagccgccagaaagcagaaggccagagaggccgccgccggcatccagtggagcgaggaggagaccgaggacgaggaggaggagaaggaggtgacccccgagagcggcccccccaaggtggaggaggccgacggcggcctgcagatcaacgtggacgaggagcccttcgtgctgccccccgccggcgagatggagcaggacgcccaggcccccgacctgcagagagtgcacaagagaatccaggacatcgtgggcatcctgagagacttcggcgcccagagagaggagggcagaagcagaagcgagtacctgaacagactgaagaaggacctggccatctactacagctacggcgacttcctgctgggcaagctgatggacctgttccccctgagcgagctggtggagttcctggaggccaacgaggtgcccagacccgtgaccctgagaaccaacaccctgaagaccagaagaagagacctggcccaggccctgatcaacagaggcgtgaacctggaccccctgggcaagtggagcaagaccggcctggtggtgtacgacagcagcgtgcccatcggcgccacccccgagtacctggccggccactacatgctgcagggcgccagcagcatgctgcccgtgatggccctggccccccaggagcacgagagaatcctggacatgtgctgcgcccccggcggcaagaccagctacatggcccagctgatgaagaacaccggcgtgatcctggccaacgacgccaacgccgagagactgaagagcgtggtgggcaacctgcacagactgggcgtgaccaacaccatcatcagccactacgacggcagacagttccccaaggtggtgggcggcttcgacagagtgctgctggacgccccctgcagcggcaccggcgtgatcagcaaggaccccgccgtgaagaccaacaaggacgagaaggacatcctgagatgcgcccacctgcagaaggagctgctgctgagcgccatcgacagcgtgaacgccaccagcaagaccggcggctacctggtgtactgcacctgcagcatcaccgtggaggagaacgagtgggtggtggactacgccctgaagaagagaaacgtgagactggtgcccaccggcctggacttcggccaggagggcttcaccagattcagagagagaagattccaccccagcctgagaagcaccagaagattctacccccacacccacaacatggacggcttcttcatcgccaagttcaagaagttcagcaacagcatcccccagagccagaccggcaacagcgagaccgccacccccaccaacgtggacctgccccaggtgatccccaagagcgagaacagcagccagcccgccaagaaggccaagggcgccgccaagaccaagcagcagctgcagaagcagcagcaccccaagaaggccagcttccagaagctgaacggcatcagcaagggcgccgacagcgagctgagcaccgtgcccagcgtgaccaagacccaggccagcagcagcttccaggacagcagccagcccgccggcaaggccgagggcatcagagagcccaaggtgaccggcaagctgaagcagagaagccccaagctgcagagcagcaagaaggtggccttcctgagacagaacgccccccccaagggcaccgacacccagacccccgccgtgctgagccccagcaagacccaggccaccctgaagcccaaggaccaccaccagcccctgggcagagccaagggcgtggagaagcagcagctgcccgagcagcccttcgagaaggccgccttccagaagcagaacgacacccccaagggcccccagccccccaccgtgagccccatcagaagcagcagacccccccccgccaagagaaagaagagccagagcagaggcaacagccagctgctgctgagctag

SEQ ID NO: 30697 - DNA, 1239 bp, Artificial Sequence
  derived and/or modified sequence
atgaccttcaccttccagagcgaggacctgaagagagactgcggcaagaagatgagccaccagcacgtgttcagcctggccatggaggaggacgtgaagaccgccgacaccaagaaggccagcagaatcctggaccacgagaaggagaacaccagaagcatctgcctgctggagcagaagagaaaggtggtgagcagcaacatcgacgtgccccccgccagaaagagcagcgaggagctggacatggacaaggtgaccgccgccatggtgctgaccagcctgagcaccagccccctggtgagaagcccccccgtgagacccaacgagagcctgagcggcagctggaaggagggcggctgcgtgcccagcagcaccagcagcagcggctactggagctggagcgcccccagcgaccagagcaaccccagcacccccagcccccccctgagcgccgacagcttcaagcccttcagaagccccgcccagcccgacgacggcatcgacgaggccgaggccagcaacctgctgttcgacgagcccatccccagaaagagaaagaacagcatgaaggtgatgttcaagtgcctgtggaagaactgcggcaaggtgctgagcaccgccgccggcatccagaagcacatcagaaccatccacctgggcagagtgggcgacagcgactacagcgacggcgaggaggacttctactacaccgagatcaagctgaacaccgacagcgtggccgacggcctgagcagcctggcccccgtgagccccagccagagcctggccagcccccccaccttccccatccccgacagcagcagaaccgagaccccctgcgccaagaccgagaccaagctgatgacccccctgagcagaagcgcccccaccaccctgtacctggtgcacaccgaccacgcctaccaggccaccccccccgtgaccatccccggcagcgccaagttcacccccaacggcagcagcttcagcatcagctggcagagcccccccgtgaccttcaccggcatccccgtgagccccacccaccaccccgtgggcaccggcgagcagagacagcacgcccacaccgtgctgagcagcccccccagaggcaccgtgagcctgagaaagcccagaggcgagggcaagaagtgcagaaaggtgtacggcatggagaacagagacatgtggtgcaccgcctgcagatggaagaaggcctgccagagattcctggactag

SEQ ID NO: 30698 - DNA, 1239 bp, Artificial Sequence
  derived and/or modified sequence
atgactttcaccttccagagcgaggacctaaagcgggactgcggcaagaaaatgtcccatcagcacgtgttctcattggcaatggaggaagacgttaagactgcggacactaaaaaggcctctagaattctggaccatgaaaaagagaataccaggagcatctgtctattggaacagaaacggaaagtcgtttcttccaatatagatgtgcctcccgcccgcaagtccagtgaggagctagacatggataaggtgacagctgcgatggttctgacttcacttagcacttccccattagtcaggagccctcctgtgcggcctaatgaatcattgtcaggatcatggaaggagggcggttgtgtcccgtctagtaccagctcttctggctattggagctggagtgctcctagtgaccagtccaaccctagtacccctagccccccattgagcgcagactctttcaaaccttttagaagtcctgcccagccagacgatggtatcgacgaggcagaagcttctaacctcctgtttgacgagcccatccctagaaaacggaagaatagcatgaaagttatgttcaagtgtctgtggaagaattgcggtaaagtcttatccactgccgccggaattcagaagcacattaggactatccacctggggagagttggagattcagattacagtgatggggaagaggatttttactacaccgagattaagctcaatactgatagcgttgcggacggcctgtcgtcactggctccggtctcgccatcgcagtccctggccagcccgcctacattcccaatccctgattcttctcggaccgaaacaccgtgtgccaaaacggagaccaaattaatgactcctctaagtcggagcgctcccacaaccctgtatttagtgcatactgaccatgcttatcaagcaacgcctcccgtgactatacctgggagcgccaagttcacccctaatggatcctctttctctatcagctggcaaagccctcctgtgaccttcaccggtattcccgtcagtcctacgcatcacccggtgggcacaggcgagcagaggcagcacgcccatactgtcttgagctccccaccaagaggcacagtcagtttgagaaagcctcggggggaaggcaaaaagtgtcgtaaagtgtatgggatggagaatcgggatatgtggtgtaccgcatgcagatggaagaaagcctgtcaacgctttctggactag

SEQ ID NO: 30699 - DNA, 1239 bp, Artificial Sequence
  derived and/or modified sequence
atgaccttcaccttccagagcgaggacctgaagagggactgtgggaagaagatgagccaccagcacgtgttcagcctggccatggaggaggatgtgaagacagctgacaccaagaaggccagccgcatcctggaccacgagaaggagaacaccaggagcatctgcctgctggagcagaagaggaaggtggtgagcagcaacattgatgtgcccccagccaggaagagcagcgaggagctggacatggacaaggtgacagctgccatggtgctgaccagcctgagcaccagccccctggtgcgcagcccccctgtgcggcccaatgaaagcctgagcggctcctggaaggagggcggctgtgtgcccagcagcaccagcagcagcggctactggagctggagcgcccccagcgaccagagcaaccccagcacccccagcccccccctgtctgctgacagcttcaagcccttccgcagccctgcccagccagatgatggcattgatgaggccgaggccagcaacctgctgtttgatgagcccatccccaggaagaggaagaacagcatgaaggtgatgttcaagtgcctgtggaagaactgtgggaaggtgctgagcacagctgctggcatccagaagcacatccgcaccatccacctgggccgggtgggggacagcgactacagtgatggagaggaggacttctactacacagagatcaagctgaacacagattctgtggctgatggcctgagcagcctggcccctgtgagccccagccagagcctggccagcccccccaccttccccatcccagacagcagcaggacagagaccccctgtgccaagacagagaccaagctgatgacccccctgagccgcagcgcccccaccaccctgtacctggtgcacacagaccacgcctaccaggccaccccacctgtgaccatccctggcagcgccaagttcaccccaaatggcagcagcttcagcatctcctggcagagcccccctgtgaccttcaccggcatccctgtgagccccacccaccaccctgtgggcaccggggagcagaggcagcacgcccacacagtgctgagcagccccccccggggcaccgtgtccctgaggaagcccagaggagagggcaagaagtgcaggaaggtgtatggcatggagaacagagacatgtggtgcacagcctgccgctggaagaaggcctgccagcgcttcctggactag

SEQ ID NO: 30700 - DNA, 1239 bp, Artificial Sequence
  derived and/or modified sequence
atgaccttcaccttccagagcgaggacctgaagcgggactgcggcaaaaagatgagccaccagcacgtcttttccttggctatggaggaggacgtcaaaacggccgataccaaaaaggcttctcgcatcttggatcatgagaaagagaatacgaggtctatttgccttcttgagcagaaacggaaggtagtgtcatccaatatcgatgtaccccccgctcgaaaaagcagtgaggagctcgacatggataaagtcacggcggctatggttctaacgtcactgtcaactagcccccttgtgcgctcaccccccgtccgccctaatgagagcctcagcggatcttggaaggagggcggttgcgtacctagtagtacatcctcttctggctactggtcttggtctgccccatccgaccagtcaaatccaagtactccatcccctccactgtctgcggactcctttaaaccgttccggtcacctgcccagccggacgacggcattgacgaggccgaggcaagtaacctcctcttcgacgaacctatcccgaggaaacgcaagaactctatgaaggtgatgttcaagtgtctgtggaaaaactgcggcaaagtcctgagcactgcggcaggcattcaaaagcacatccggacgatccatttaggccgggtgggggatagcgactattcagacggtgaagaagatttttattacactgagatcaagctgaacaccgattccgtggcagacggtctatcatcgctggcacctgtgtcaccaagtcagtcattggccagccctccaacttttcccatacctgacagcagtcgcaccgagaccccatgcgcaaaaaccgaaacaaaacttatgactcctctgtctcgcagcgcacccaccaccctttacctggtgcacactgaccatgcataccaggccaccccacctgtgactatcccaggcagtgccaaatttactcctaatggatcgtccttctctatcagctggcagtcacctcccgtaacttttaccggcatccctgtcagccccactcaccatcccgtgggaaccggcgaacagcgccagcacgcccacacggtcttaagtagccctcctcgcgggacagtgtctctgcggaagccaaggggagaggggaaaaaatgtcgcaaagtttatgggatggagaatcgggacatgtggtgtacagcatgtcgttggaagaaggcttgtcagcgattcctggactag

SEQ ID NO: 30701 - DNA, 1239 bp, Artificial Sequence
  derived and/or modified sequence
atgacatttacttttcagagtgaagacctcaagagagattgtgggaagaagatgtctcatcagcacgtttttagtctggcaatggaggaggacgttaagaccgccgatacaaagaaggcgtctaggatcttggatcacgaaaaggaaaatactaggtccatttgtctattggaacagaagagaaaagtggtctcttctaacatcgacgtcccccctgccagaaaatctagcgaggagctggacatggacaaagttacagcggctatggtcctaacctccctgtctacttcaccactggtgcgctccccgccagtgaggccgaacgagtcactctcagggtcatggaaagaaggtggatgtgtgccctcgtcaaccagtagcagcgggtactggtcctggtctgctcctagcgaccagtctaacccaagtactccaagtccaccactcagtgccgacagttttaaaccattccggtcacccgctcagccagacgatggcattgatgaggctgaagcctctaatctactatttgatgagcccatcccacggaaacgcaagaactctatgaaggtcatgttcaaatgtctgtggaaaaactgcggaaaagtgttgtccacggcagctggtatacaaaagcacatccggaccattcacttagggagagtcggggacagcgactacagcgacggtgaagaggacttctactacacagagatcaaactgaataccgatagcgtcgccgatgggctaagctcactggcccctgtgtccccaagccaaagcctcgcctccccccctacttttccaattccagattccagtcgcacggagaccccgtgcgccaagacagaaacaaaactaatgacccccctcagccgttctgccccaaccaccctgtatctggttcacacagaccacgcataccaggccacgccacccgtaacaataccaggcagcgctaaattcacccccaacgggagctcctttagcataagctggcagagtccacctgtcacttttacgggtattccagtctcgcccactcaccacccagttgggaccggggaacagagacagcacgcccataccgtgctgtcctcgcccccacggggaactgtgtcactcagaaaaccgagaggggaaggaaaaaaatgccgtaaagtgtacggcatggagaatcgagacatgtggtgtacagcatgtcgctggaaaaaggcctgccagaggttcctggactag

SEQ ID NO: 30702 - protein, 371 aa, Artificial Sequence
  derived and/or modified sequence
LTDRQTDTAPSPSYHLLPGRRRTVDAAASRGQGPEPAPGGGVEGVGARGVALKLFVQLLGCSRFGGAVVRAGEAEPSGAARSASSGREEPQPEEGEEEEEKEEERGPQWRLGARKPGSWTGEAAVCADSAPAARAPQALARASGRGGRVARRGAEESGPPHSPSRRGSASRAGPGRASETMNFLLSWVHWSLALLLYLHHAKWSQAAPMAEGGGQNHHEVVKFMDVYQRSYCHPIETLVDIFQEYPDEIEYIFKPSCVPLMRCGGCCNDEGLECVPTEESNITMQIMRIKPHQGQHIGEMSFLQHNKCECRPKKDRARQENPCGPCSERRKHLFVQDPQTCKCSCKNTDSRCKARQLELNERTCRSLTRKD

SEQ ID NO: 30703 - protein, 191 aa, Artificial Sequence
  derived and/or modified sequence
MNFLLSWVHWSLALLLYLHHAKWSQAAPMAEGGGQNHHEVVKFMDVYQRSYCHPIETLVDIFQEYPDEIEYIFKPSCVPLMRCGGCCNDEGLECVPTEESNITMQIMRIKPHQGQHIGEMSFLQHNKCECRPKKDRARQENPCGPCSERRKHLFVQDPQTCKCSCKNTDSRCKARQLELNERTCRSLTRKD

SEQ ID NO: 30704 - protein, 371 aa, Artificial Sequence
  derived and/or modified sequence
MTDRQTDTAPSPSYHLLPGRRRTVDAAASRGQGPEPAPGGGVEGVGARGVALKLFVQLLGCSRFGGAVVRAGEAEPSGAARSASSGREEPQPEEGEEEEEKEEERGPQWRLGARKPGSWTGEAAVCADSAPAARAPQALARASGRGGRVARRGAEESGPPHSPSRRGSASRAGPGRASETMNFLLSWVHWSLALLLYLHHAKWSQAAPMAEGGGQNHHEVVKFMDVYQRSYCHPIETLVDIFQEYPDEIEYIFKPSCVPLMRCGGCCNDEGLECVPTEESNITMQIMRIKPHQGQHIGEMSFLQHNKCECRPKKDRARQENPCGPCSERRKHLFVQDPQTCKCSCKNTDSRCKARQLELNERTCRSLTRKD

SEQ ID NO: 30705 - DNA, 3488 bp, Artificial Sequence
  derived and/or modified sequence
tcgcggaggcttggggcagccgggtagctcggaggtcgtggcgctgggggctagcaccagcgctctgtcgggaggcgcagcggttaggtggaccggtcagcggactcaccggccagggcgctcggtgctggaatttgatattcattgatccgggttttatccctcttcttttttcttaaacatttttttttaaaactgtattgtttctcgttttaatttatttttgcttgccattccccacttgaatcgggccgacggcttggggagattgctctacttccccaaatcactgtggattttggaaaccagcagaaagaggaaagaggtagcaagagctccagagagaagtcgaggaagagagagacggggtcagagagagcgcgcgggcgtgcgagcagcgaaagcgacaggggcaaagtgagtgacctgcttttgggggtgaccgccggagcgcggcgtgagccctcccccttgggatcccgcagctgaccagtcgcgctgacggacagacagacagacaccgcccccagccccagctaccacctcctccccggccggcggcggacagtggacgcggcggcgagccgcgggcaggggccggagcccgcgcccggaggcggggtggagggggtcggggctcgcggcgtcgcactgaaacttttcgtccaacttctgggctgttctcgcttcggaggagccgtggtccgcgcgggggaagccgagccgagcggagccgcgagaagtgctagctcgggccgggaggagccgcagccggaggagggggaggaggaagaagagaaggaagaggagagggggccgcagtggcgactcggcgctcggaagccgggctcatggacgggtgaggcggcggtgtgcgcagacagtgctccagccgcgcgcgctccccaggccctggcccgggcctcgggccggggaggaagagtagctcgccgaggcgccgaggagagcgggccgccccacagcccgagccggagagggagcgcgagccgcgccggccccggtcgggcctccgaaaccatgaactttctgctgtcttgggtgcattggagccttgccttgctgctctacctccaccatgccaagtggtcccaggctgcacccatggcagaaggaggagggcagaatcatcacgaagtggtgaagttcatggatgtctatcagcgcagctactgccatccaatcgagaccctggtggacatcttccaggagtaccctgatgagatcgagtacatcttcaagccatcctgtgtgcccctgatgcgatgcgggggctgctgcaatgacgagggcctggagtgtgtgcccactgaggagtccaacatcaccatgcagattatgcggatcaaacctcaccaaggccagcacataggagagatgagcttcctacagcacaacaaatgtgaatgcagaccaaagaaagatagagcaagacaagaaaatccctgtgggccttgctcagagcggagaaagcatttgtttgtacaagatccgcagacgtgtaaatgttcctgcaaaaacacagactcgcgttgcaaggcgaggcagcttgagttaaacgaacgtacttgcagatctctcaccaggaaagactgatacagaacgatcgatacagaaaccacgctgccgccaccacaccatcaccatcgacagaacagtccttaatccagaaacctgaaatgaaggaagaggagactctgcgcagagcactttgggtccggagggcgagactccggcggaagcattcccgggcgggtgacccagcacggtccctcttggaattggattcgccattttatttttcttgctgctaaatcaccgagcccggaagattagagagttttatttctgggattcctgtagacacacccacccacatacatacatttatatatatatatattatatatatataaaaataaatatctctattttatatatataaaatatatatattctttttttaaattaacagtgctaatgttattggtgtcttcactggatgtatttgactgctgtggacttgagttgggaggggaatgttcccactcagatcctgacagggaagaggaggagatgagagactctggcatgatcttttttttgtcccacttggtggggccagggtcctctcccctgcccaggaatgtgcaaggccagggcatgggggcaaatatgacccagttttgggaacaccgacaaacccagccctggcgctgagcctctctaccccaggtcagacggacagaaagacagatcacaggtacagggatgaggacaccggctctgaccaggagtttggggagcttcaggacattgctgtgctttggggattccctccacatgctgcacgcgcatctcgcccccaggggcactgcctggaagattcaggagcctgggcggccttcgcttactctcacctgcttctgagttgcccaggagaccactggcagatgtcccggcgaagagaagagacacattgttggaagaagcagcccatgacagctccccttcctgggactcgccctcatcctcttcctgctccccttcctggggtgcagcctaaaaggacctatgtcctcacaccattgaaaccactagttctgtccccccaggagacctggttgtgtgtgtgtgagtggttgaccttcctccatcccctggtccttcccttcccttcccgaggcacagagagacagggcaggatccacgtgcccattgtggaggcagagaaaagagaaagtgttttatatacggtacttatttaatatccctttttaattagaaattaaaacagttaatttaattaaagagtagggttttttttcagtattcttggttaatatttaatttcaactatttatgagatgtatcttttgctctctcttgctctcttatttgtaccggtttttgtatataaaattcatgtttccaatctctctctccctgatcggtgacagtcactagcttatcttgaacagatatttaattttgctaacactcagctctgccctccccgatcccctggctccccagcacacattcctttgaaataaggtttcaatatacatctacatactatatatatatttggcaacttgtatttgtgtgtatatatatatatatatgtttatgtatatatgtgattctgataaaatagacattgctattctgttttttatatgtaaaaacaaaacaagaaaaaatagagaattctacatactaaatctctctccttttttaattttaatatttgttatcatttatttattggtgctactgtttatccgtaataattgtggggaaaagatattaacatcacgtctttgtctctagtgcagtttttcgagatattccgtagtacatatttatttttaaacaacgacaaagaaatacagatatatcttaaaaaaaaaaaagcattttgtattaaagaatttaattctgatctcaaaaaaaaaaaaaaaaaa

SEQ ID NO: 30706 - DNA, 1113 bp, Artificial Sequence
  derived and/or modified sequence
ctgaccgaccgccagaccgacaccgcccccagccccagctaccacctgctgcccggccgccgccgcaccgtggacgccgccgccagccgcggccagggccccgagcccgcccccggcggcggcgtggagggcgtgggcgcccgcggcgtggccctgaagctgttcgtgcagctgctgggctgcagccgcttcggcggcgccgtggtgcgcgccggcgaggccgagcccagcggcgccgcccgcagcgccagcagcggccgcgaggagccccagcccgaggagggcgaggaggaggaggagaaggaggaggagcgcggcccccagtggcgcctgggcgcccgcaagcccggcagctggaccggcgaggccgccgtgtgcgccgacagcgcccccgccgcccgcgccccccaggccctggcccgcgccagcggccgcggcggccgcgtggcccgccgcggcgccgaggagagcggccccccccacagccccagccgccgcggcagcgccagccgcgccggccccggccgcgccagcgagaccatgaacttcctgctgagctgggtgcactggagcctggccctgctgctgtacctgcaccacgccaagtggagccaggccgcccccatggccgagggcggcggccagaaccaccacgaggtggtgaagttcatggacgtgtaccagcgcagctactgccaccccatcgagaccctggtggacatcttccaggagtaccccgacgagatcgagtacatcttcaagcccagctgcgtgcccctgatgcgctgcggcggctgctgcaacgacgagggcctggagtgcgtgcccaccgaggagagcaacatcaccatgcagatcatgcgcatcaagccccaccagggccagcacatcggcgagatgagcttcctgcagcacaacaagtgcgagtgccgccccaagaaggaccgcgcccgccaggagaacccctgcggcccctgcagcgagcgccgcaagcacctgttcgtgcaggacccccagacctgcaagtgcagctgcaagaacaccgacagccgctgcaaggcccgccagctggagctgaacgagcgcacctgccgcagcctgacccgcaaggac

SEQ ID NO: 30707 - DNA, 1116 bp, Artificial Sequence
  derived and/or modified sequence
ctgaccgacagacagaccgacaccgcccccagccccagctaccacctgctgcccggcagaagaagaaccgtggacgccgccgccagcagaggccagggccccgagcccgcccccggcggcggcgtggagggcgtgggcgccagaggcgtggccctgaagctgttcgtgcagctgctgggctgcagcagattcggcggcgccgtggtgagagccggcgaggccgagcccagcggcgccgccagaagcgccagcagcggcagagaggagccccagcccgaggagggcgaggaggaggaggagaaggaggaggagagaggcccccagtggagactgggcgccagaaagcccggcagctggaccggcgaggccgccgtgtgcgccgacagcgcccccgccgccagagccccccaggccctggccagagccagcggcagaggcggcagagtggccagaagaggcgccgaggagagcggccccccccacagccccagcagaagaggcagcgccagcagagccggccccggcagagccagcgagaccatgaacttcctgctgagctgggtgcactggagcctggccctgctgctgtacctgcaccacgccaagtggagccaggccgcccccatggccgagggcggcggccagaaccaccacgaggtggtgaagttcatggacgtgtaccagagaagctactgccaccccatcgagaccctggtggacatcttccaggagtaccccgacgagatcgagtacatcttcaagcccagctgcgtgcccctgatgagatgcggcggctgctgcaacgacgagggcctggagtgcgtgcccaccgaggagagcaacatcaccatgcagatcatgagaatcaagccccaccagggccagcacatcggcgagatgagcttcctgcagcacaacaagtgcgagtgcagacccaagaaggacagagccagacaggagaacccctgcggcccctgcagcgagagaagaaagcacctgttcgtgcaggacccccagacctgcaagtgcagctgcaagaacaccgacagcagatgcaaggccagacagctggagctgaacgagagaacctgcagaagcctgaccagaaaggactag

SEQ ID NO: 30708 - DNA, 1116 bp, Artificial Sequence
  derived and/or modified sequence
ctcactgaccgccagacagatacagcaccatcacctagttatcatctgctccccggacggcggcgaaccgtggacgccgccgcaagtagaggtcagggacccgagcccgcacctggcggcggcgttgaaggagtgggagcaagaggcgtcgctctcaaactatttgttcagctactgggatgctcacggtttggcggagcggtggtaagggccggcgaggccgagccgtccggcgccgcgcggagtgcttcctccggacgggaagagccacagcccgaagagggcgaggaggaggaagagaaggaggaggagagaggcccccaatggcgactgggcgcacgcaaacccggatcctggaccggagaggccgctgtgtgcgccgattccgcaccagctgctcgcgctccacaagcacttgcacgtgcatccggccggggcggccgcgtggctcggaggggcgccgaggagtccggcccgccccactcaccaagcagacgggggtctgctagtagagccggccctggccgagctagtgagaccatgaatttcctgctttcgtgggtgcattggagtctcgcactcttgctctacctgcaccacgccaagtggtcccaggcagccccgatggccgaaggagggggtcagaatcatcacgaggtggtaaagtttatggatgtctaccaaaggagctattgtcaccccatcgagactctggtggatatattccaggaatacccggatgaaatcgaatacatatttaagccaagctgtgtgccattgatgcgctgcggcggatgttgtaacgacgaaggtttggagtgtgtgcccaccgaggaatctaatattacgatgcagataatgcgtattaaaccgcatcagggccaacatatcggtgaaatgtcctttctacagcataataaatgtgagtgccggcccaaaaaggatcgcgcccggcaggagaacccctgcggaccatgctcagaacggcgcaaacatttgttcgtccaggaccctcagacctgtaagtgtagctgcaagaacaccgacagccgctgcaaagctagacaattggagctgaatgagcgtacttgcaggagcttgactagaaaagactag

SEQ ID NO: 30709 - DNA, 1116 bp, Artificial Sequence
  derived and/or modified sequence
ctgacagaccggcagacagacacagcccccagccccagctaccacctgctgcccggcagaagaagaacagtggatgctgctgccagccggggccagggccctgagcccgcccctgggggcggcgtggagggcgtgggcgcccggggcgtggccctgaagctgtttgtgcagctgctgggctgcagcagatttggaggagctgtggtgcgggccggggaggccgagcccagcggggccgcccggagcgccagcagcggccgggaggagccccagcctgaggagggggaggaggaggaggagaaggaggaggagcggggcccccagtggaggctgggcgccaggaagccaggctcctggacaggagaggccgctgtgtgtgccgacagcgccccagctgcccgggccccccaggccctggcccgggccagcggccggggcggccgggtggccaggagaggagctgaggagagcggccccccccacagccccagcagaagaggcagcgccagccgggccggccctggccgggccagcgagaccatgaacttcctgctgtcctgggtgcactggagcctggccctgctgctgtacctgcaccacgccaagtggagccaggccgcccccatggccgagggcggcggccagaaccaccacgaggtggtgaagttcatggatgtgtaccagaggagctactgccaccccatcgagaccctggtggacatcttccaggagtacccagatgaaattgagtacatcttcaagcccagctgtgtgcccctgatgagatgtggcggctgctgcaatgatgagggcctggagtgtgtgcccacagaggagagcaacatcaccatgcagatcatgaggatcaagccccaccagggccagcacatcggggagatgtccttcctgcagcacaacaagtgtgaatgtcggcccaagaaggaccgggcccggcaggagaacccctgtggcccctgcagcgagaggaggaagcacctgtttgtgcaggacccccagacctgcaagtgcagctgcaagaacacagacagccgctgcaaggcccggcagctggagctgaatgaaagaacctgccgcagcctgaccaggaaggactag

SEQ ID NO: 30710 - DNA, 1116 bp, Artificial Sequence
  derived and/or modified sequence
ctgaccgaccggcagaccgacaccgcccccagccccagctaccacctacttccaggccgccggcggaccgtggatgcagcggcgagccgcggtcagggcccagaacccgccccgggaggaggcgtagagggcgtgggcgccaggggggtggctcttaagctgtttgtgcagcttctgggatgcagtaggtttggcggagcggtggtcagagcaggagaggcagagcccagcggagccgcccgctcagcaagctctggcagagaggagccgcagcctgaagagggtgaagaggaggaagagaaggaggaggaaagaggaccgcagtggcgtttaggagcgcggaagcccggcagctggaccggagaggctgccgtctgtgccgattcagcgcccgcagcccgggcccctcaggctcttgctcgcgcgtccggccgaggtggcagagtcgctaggagaggagccgaagaatccgggccaccacactccccctccaggaggggttcagcctcgagagccggacctgggcgtgcatctgaaacaatgaactttctcttgagttgggtgcactggtcgctagctcttctgctgtatttgcatcatgcaaaatggagccaggcagctccgatggctgaaggcggtggacagaaccatcacgaggtcgttaagtttatggatgtctaccaaagaagctattgtcatcctatagagaccctcgtggatatttttcaagagtatcccgatgaaattgagtatatttttaagccatcttgcgtacctctgatgcgctgcggtgggtgttgtaatgacgagggcctggagtgtgtacccaccgaagaatcgaatatcactatgcagataatgcgtattaaaccacaccagggccagcacatcggagaaatgtcattcctccagcacaacaaatgcgaatgccgtcctaagaaggaccgcgcccgtcaggaaaatccctgcggaccttgctcggagcgtcgcaagcacttattcgtgcaggatccccagacctgcaaatgtagctgcaagaataccgactcccggtgtaaggcgcggcagctggaacttaatgagcgcacctgtcgcagtcttacccgaaaggactag

SEQ ID NO: 30711 - DNA, 1116 bp, Artificial Sequence
  derived and/or modified sequence
cttacggaccggcagacggacaccgcaccgtccccaagttatcatctattaccaggaagaagacggaccgtcgatgctgccgcttctcgcggacaggggcctgagcccgcaccgggtggtggggtcgagggagtaggggcaagaggagtggctctgaagctatttgtccaattgctgggttgtagccggttcggtggcgctgtggtccgggcaggtgaggccgagccttctggcgcagccaggtcggcttcttccggaagagaagagccacagcctgaagagggagaggaggaggaggagaaggaagaggaacgtggcccacagtggcgtcttggcgcaaggaagccgggatcgtggactggcgaagcagctgtgtgcgccgattcagccccagctgccagggccccacaagccttggctagggccagtggaagaggtggaagagtggcacggcgaggcgcagaagagtccggacctccccatagcccaagtaggcgagggtcagcctcacgagccggacctgggcgagcgagtgagaccatgaattttctgttgagttgggtgcactggagtttggccttactcctatacctacaccacgcaaagtggagccaagctgccccaatggcagagggaggaggacagaatcatcatgaagtggtcaagtttatggatgtctaccagcgtagctattgtcatcctatagagacactggtggatatcttccaggagtacccagatgaaattgagtatatttttaaacctagttgtgtgcctctcatgagatgtggtggctgttgtaacgacgaggggctcgaatgcgtgcccacagaagagagcaacattacaatgcagattatgaggattaagccccaccagggccagcatatcggggagatgtccttcctccagcacaacaagtgtgaatgcagacccaagaaagatcgggctcggcaggagaatccatgtggcccttgcagtgagcggcgtaagcaccttttcgtccaggatcctcaaacttgtaaatgcagttgtaagaatacggatagccggtgtaaggctaggcaacttgaactcaacgagcgaacctgcagatcactgactcgcaaggattag

SEQ ID NO: 30712 - DNA, 1116 bp, Artificial Sequence
  derived and/or modified sequence
ctgacagacaggcagactgataccgcaccttccccatcctaccacttgctaccagggcggaggagaactgtggatgctgcagcttccagagggcaagggccagagcccgcccctggagggggagttgagggagtgggtgctagaggggtcgctctgaagctgttcgtgcaattgctgggttgcagccgctttgggggggcagtcgtgcgagctggagaggcggaaccttcaggcgctgctcgctcagcatcatccggacgcgaggagccccaaccggaagagggagaggaagaggaggagaaagaagaagagcgggggccacagtggagactgggtgccagaaagcctggttcttggactggagaagctgctgtatgcgccgactccgcgcctgcggcccgcgcccctcaggcccttgccagggctagcggacgcggaggaagagtggcccggcgcggcgcagaagagtcaggacccccccatagtccatcccgccgcggcagtgcctcaagagccggcccaggccgggcaagtgaaacaatgaacttcctgctctcatgggtccactggtcactcgctcttctcctttatctgcatcatgctaaatggagccaggcggcccctatggccgaaggcggaggccagaaccatcacgaagtagttaaatttatggacgtgtatcagcgttcttattgtcacccaattgagactttggtggacatattccaagagtaccctgatgagatagaatacatttttaaaccctcctgtgtcccattgatgagatgcggaggttgttgtaacgacgaagggctcgagtgtgtgccaactgaggaatccaatattactatgcagatcatgcggataaaaccccaccagggacagcatatcggggaaatgagtttcttgcagcacaataagtgtgagtgtcgacctaaaaaggaccgagcacggcaggagaacccctgcggaccctgtagcgaaagacgcaagcatcttttcgtccaggacccacaaacatgcaaatgtagctgcaagaataccgatagccgatgtaaggcccggcagttagagctgaatgagcgtacatgcaggagcctgacgcgcaaggactag

SEQ ID NO: 30713 - DNA, 1116 bp, Artificial Sequence
  derived and/or modified sequence
ctcacggaccggcagaccgacacagcaccgtccccgtcataccacttactgcccggtcggagaaggacagtagatgcagccgccagcagaggccaggggccagagcctgcacccggaggcggtgtagaaggggtgggagccagaggggtcgctttgaagctctttgtacagctacttggttgctcgagatttggaggcgcagtagtgagagccggtgaggcagaaccgtcgggcgctgcaaggagcgcttccagcggccgagaggagccccagccagaggagggtgaggaagaggaagaaaaagaggaagagcgggggccacagtggcgtttaggggctcggaaacccggttcttggaccggagaggctgctgtgtgtgccgattccgccccagctgctcgcgctccacaagcccttgccagggcttccggtcgcggaggacgagtcgccaggcggggagctgaagagtctgggccaccccactctcccagccgtagaggtagcgccagtcgagccggccctgggcgagcctctgagacaatgaattttctccttagttgggtgcactggtcactagcacttcttctgtatctgcatcacgcaaaatggagtcaggcagcaccaatggccgaaggcggcggacaaaaccaccacgaagtagtgaaattcatggacgtctatcagcgatcatattgccatcctatagaaacactggtcgacatttttcaagagtatccggatgaaatcgagtatatcttcaagccatcctgcgtgcccctgatgcggtgcggcggctgttgtaacgacgaaggtttggaatgtgtgcctacagaagagtccaacattaccatgcaaatcatgcgaatcaaacctcatcagggtcagcatattggagagatgagcttcctccagcacaacaagtgtgaatgccgcccaaaaaaggaccgagcccgtcaggaaaacccatgtgggccatgcagtgaacggagaaaacacctttttgtacaggaccctcagacatgtaaatgtagctgcaagaacacggattctcgatgcaaagcacgccaactcgagttgaatgagagaacatgcaggtccctgaccagaaaagactag

SEQ ID NO: 30714 - DNA, 1146 bp, Artificial Sequence
  derived and/or modified sequence
ctgacggacagacagacagacaccgcccccagccccagctaccacctcctccccggccggcggcggacagtggacgcggcggcgagccgcgggcaggggccggagcccgcgcccggaggcggggtggagggggtcggggctcgcggcgtcgcactgaaacttttcgtccaacttctgggctgttctcgcttcggaggagccgtggtccgcgcgggggaagccgagccgagcggagccgcgagaagtgctagctcgggccgggaggagccgcagccggaggagggggaggaggaagaagagaaggaagaggagagggggccgcagtggcgactcggcgctcggaagccgggctcatggacgggtgaggcggcggtgtgcgcagacagtgctccagccgcgcgcgctccccaggccctggcccgggcctcgggccggggaggaagagtagctcgccgaggcgccgaggagagcgggccgccccacagcccgagccggagagggagcgcgagccgcgccggccccggtcgggcctccgaaaccatgaactttctgctgtcttgggtgcattggagccttgccttgctgctctacctccaccatgccaagtggtcccaggctgcacccatggcagaaggaggagggcagaatcatcacgaagtggtgaagttcatggatgtctatcagcgcagctactgccatccaatcgagaccctggtggacatcttccaggagtaccctgatgagatcgagtacatcttcaagccatcctgtgtgcccctgatgcgatgcgggggctgctgcaatgacgagggcctggagtgtgtgcccactgaggagtccaacatcaccatgcagattatgcggatcaaacctcaccaaggccagcacataggagagatgagcttcctacagcacaacaaatgtgaatgcagaccaaagaaagatagagcaagacaagaaaatccctgtgggccttgctcagagcggagaaagcatttgtttgtacaagatccgcagacgtgtaaatgttcctgcaaaaacacagactcgcgttgcaaggcgaggcagcttgagttaaacgaacgtacttgcagatctctcaccaggaaagactgatacagaacgatcgatacagaaaccacgctg

SEQ ID NO: 30715 - RNA, 1116 nt, Artificial Sequence
  derived and/or modified sequence
cugacagacaggcagacugauaccgcaccuuccccauccuaccacuugcuaccagggcggaggagaacuguggaugcugcagcuuccagagggcaagggccagagcccgccccuggagggggaguugagggagugggugcuagaggggucgcucugaagcuguucgugcaauugcuggguugcagccgcuuugggggggcagucgugcgagcuggagaggcggaaccuucaggcgcugcucgcucagcaucauccggacgcgaggagccccaaccggaagagggagaggaagaggaggagaaagaagaagagcgggggccacaguggagacugggugccagaaagccugguucuuggacuggagaagcugcuguaugcgccgacuccgcgccugcggcccgcgccccucaggcccuugccagggcuagcggacgcggaggaagaguggcccggcgcggcgcagaagagucaggacccccccauaguccaucccgccgcggcagugccucaagagccggcccaggccgggcaagugaaacaaugaacuuccugcucucauggguccacuggucacucgcucuucuccuuuaucugcaucaugcuaaauggagccaggcggccccuauggccgaaggcggaggccagaaccaucacgaaguaguuaaauuuauggacguguaucagcguucuuauugucacccaauugagacuuugguggacauauuccaagaguacccugaugagauagaauacauuuuuaaacccuccugugucccauugaugagaugcggagguuguuguaacgacgaagggcucgagugugugccaacugaggaauccaauauuacuaugcagaucaugcggauaaaaccccaccagggacagcauaucggggaaaugaguuucuugcagcacaauaagugugagugucgaccuaaaaaggaccgagcacggcaggagaaccccugcggacccuguagcgaaagacgcaagcaucuuuucguccaggacccacaaacaugcaaauguagcugcaagaauaccgauagccgauguaaggcccggcaguuagagcugaaugagcguacaugcaggagccugacgcgcaaggacuag

SEQ ID NO: 30716 - RNA, 1116 nt, Artificial Sequence
  derived and/or modified sequence
cucacggaccggcagaccgacacagcaccguccccgucauaccacuuacugcccggucggagaaggacaguagaugcagccgccagcagaggccaggggccagagccugcacccggaggcgguguagaaggggugggagccagaggggucgcuuugaagcucuuuguacagcuacuugguugcucgagauuuggaggcgcaguagugagagccggugaggcagaaccgucgggcgcugcaaggagcgcuuccagcggccgagaggagccccagccagaggagggugaggaagaggaagaaaaagaggaagagcgggggccacaguggcguuuaggggcucggaaacccgguucuuggaccggagaggcugcugugugugccgauuccgccccagcugcucgcgcuccacaagcccuugccagggcuuccggucgcggaggacgagucgccaggcggggagcugaagagucugggccaccccacucucccagccguagagguagcgccagucgagccggcccugggcgagccucugagacaaugaauuuucuccuuaguugggugcacuggucacuagcacuucuucuguaucugcaucacgcaaaauggagucaggcagcaccaauggccgaaggcggcggacaaaaccaccacgaaguagugaaauucauggacgucuaucagcgaucauauugccauccuauagaaacacuggucgacauuuuucaagaguauccggaugaaaucgaguauaucuucaagccauccugcgugccccugaugcggugcggcggcuguuguaacgacgaagguuuggaaugugugccuacagaagaguccaacauuaccaugcaaaucaugcgaaucaaaccucaucagggucagcauauuggagagaugagcuuccuccagcacaacaagugugaaugccgcccaaaaaaggaccgagcccgucaggaaaacccaugugggccaugcagugaacggagaaaacaccuuuuuguacaggacccucagacauguaaauguagcugcaagaacacggauucucgaugcaaagcacgccaacucgaguugaaugagagaacaugcaggucccugaccagaaaagacuag

SEQ ID NO: 30717 - protein, 218 aa, Artificial Sequence
  derived and/or modified sequence
MGRLLALVVGAALVSSACGGCVEVDSETEAVYGMTFKILCISCKRRSETNAETFTEWTFRQKGTEEFVKILRYENEVLQLEEDERFEGRVVWNGSRGTKDLQDLSIFITNVTYNHSGDYECHVYRLLFFENYEHNTSVVKKIHIEVVDKANRDMASIVSEIMMYVLIVVLTIWLVAEMIYCYKKIAAATETAAQENASEYLAITSESKENCTGVQVAE

SEQ ID NO: 30718 - protein, 345 aa, Artificial Sequence
  derived and/or modified sequence
MDKVVEILKPLCRSSQSTEPKYKPLGKLKRARTVHRDSEEEDDYLFDDPLPIPLRHKVPYPETFHPEVFSMTAVSEKQPEKLRQTPGCCRAECMQSSRFTNFVDCEESNSESEEEVGIPASLQGDLGSVLHLQKADGDVPQWEVFFKRNDEITDESLENFPSSTVAGGSQSPKLFSDSDGESTHISSQNSSQSTHITEQGSQGWDSQSDTVLLSSQERNSGDITSLDKADYRPTIKENIPASLMEQNVICPKDTYSDLKSRDKDVTIVPSTGEPTTLSSETHIPEEKSLLNLSTNADSQSSSDFEVPSTPEAELPKREHLQYLYEKLATGESIAVKKRKCSLLDT

SEQ ID NO: 30719 - protein, 692 aa, Artificial Sequence
  derived and/or modified sequence
MSSFEGQMAEYPTISIDRFDRENLRARAYFLSHCHKDHMKGLRAPTLKRRLECSLKVYLYCSPVTKELLLTSPKYRFWKKRIISIEIETPTQISLVDEASGEKEEIVVTLLPAGHCPGSVMFLFQGNNGTVLYTGDFRLAQGEAARMELLHSGGRVKDIQSVYLDTTFCDPRFYQIPSREECLSGVLELVRSWITRSPYHVVWLNCKAAYGYEYLFTNLSEELGVQVHVNKLDMFRNMPEILHHLTTDRNTQIHACRHPKAEEYFQWSKLPCGITSRNRIPLHIISIKPSTMWFGERSRKTNVIVRTGESSYRACFSFHSSYSEIKDFLSYLCPVNAYPNVIPVGTTMDKVVEILKPLCRSSQSTEPKYKPLGKLKRARTVHRDSEEEDDYLFDDPLPIPLRHKVPYPETFHPEVFSMTAVSEKQPEKLRQTPGCCRAECMQSSRFTNFVDCEESNSESEEEVGIPASLQGDLGSVLHLQKADGDVPQWEVFFKRNDEITDESLENFPSSTVAGGSQSPKLFSDSDGESTHISSQNSSQSTHITEQGSQGWDSQSDTVLLSSQERNSGDITSLDKADYRPTIKENIPASLMEQNVICPKDTYSDLKSRDKDVTIVPSTGEPTTLSSETHIPEEKSLLNLSTNADSQSSSDFEVPSTPEAELPKREHLQYLYEKLATGESIAVKKRKCSLLDT

SEQ ID NO: 30720 - protein, 434 aa, Artificial Sequence
  derived and/or modified sequence
MSSFEGQMAEYPTISIDRFDRENLRARAYFLSHCHKDHMKGLRAPTLKRRLECSLKVYLYCSPVTKELLLTSPKYRFWKKRIISIEIETPTQISLVDEASGEKEEIVVTLLPAGHCPGSVMFLFQGNNGTVLYTGDFRLAQGEAARMELLHSGGRVKDIQSVYLDTTFCDPRFYQIPSREECLSGVLELVRSWITRSPYHVVWLNCKAAYGYEYLFTNLSEELGVQVHVNKLDMFRNMPEILHHLTTDRNTQIHACRHPKAEEYFQWSKLPCGITSRNRIPLHIISIKPSTMWFGERSRKTNVIVRTGESSYRACFSFHSSYSEIKDFLSYLCPVNAYPNVIPVGTTMDKVVEILKPLCRSSQSTEPKYKPLGKLKRARTVHRDSGSHSVTQARMRWCHHDSLYPLTPGIKRSSCLSLLTSWITGAYRHAQLMI

SEQ ID NO: 30721 - DNA, 2079 bp, Artificial Sequence
  derived and/or modified sequence
atgagcagcttcgagggccagatggccgagtaccccaccatcagcatcgacagattcgacagagagaacctgagagccagagcctacttcctgagccactgccacaaggaccacatgaagggcctgagagcccccaccctgaagagaagactggagtgcagcctgaaggtgtacctgtactgcagccccgtgaccaaggagctgctgctgaccagccccaagtacagattctggaagaagagaatcatcagcatcgagatcgagacccccacccagatcagcctggtggacgaggccagcggcgagaaggaggagatcgtggtgaccctgctgcccgccggccactgccccggcagcgtgatgttcctgttccagggcaacaacggcaccgtgctgtacaccggcgacttcagactggcccagggcgaggccgccagaatggagctgctgcacagcggcggcagagtgaaggacatccagagcgtgtacctggacaccaccttctgcgaccccagattctaccagatccccagcagagaggagtgcctgagcggcgtgctggagctggtgagaagctggatcaccagaagcccctaccacgtggtgtggctgaactgcaaggccgcctacggctacgagtacctgttcaccaacctgagcgaggagctgggcgtgcaggtgcacgtgaacaagctggacatgttcagaaacatgcccgagatcctgcaccacctgaccaccgacagaaacacccagatccacgcctgcagacaccccaaggccgaggagtacttccagtggagcaagctgccctgcggcatcaccagcagaaacagaatccccctgcacatcatcagcatcaagcccagcaccatgtggttcggcgagagaagcagaaagaccaacgtgatcgtgagaaccggcgagagcagctacagagcctgcttcagcttccacagcagctacagcgagatcaaggacttcctgagctacctgtgccccgtgaacgcctaccccaacgtgatccccgtgggcaccaccatggacaaggtggtggagatcctgaagcccctgtgcagaagcagccagagcaccgagcccaagtacaagcccctgggcaagctgaagagagccagaaccgtgcacagagacagcgaggaggaggacgactacctgttcgacgaccccctgcccatccccctgagacacaaggtgccctaccccgagaccttccaccccgaggtgttcagcatgaccgccgtgagcgagaagcagcccgagaagctgagacagacccccggctgctgcagagccgagtgcatgcagagcagcagattcaccaacttcgtggactgcgaggagagcaacagcgagagcgaggaggaggtgggcatccccgccagcctgcagggcgacctgggcagcgtgctgcacctgcagaaggccgacggcgacgtgccccagtgggaggtgttcttcaagagaaacgacgagatcaccgacgagagcctggagaacttccccagcagcaccgtggccggcggcagccagagccccaagctgttcagcgacagcgacggcgagagcacccacatcagcagccagaacagcagccagagcacccacatcaccgagcagggcagccagggctgggacagccagagcgacaccgtgctgctgagcagccaggagagaaacagcggcgacatcaccagcctggacaaggccgactacagacccaccatcaaggagaacatccccgccagcctgatggagcagaacgtgatctgccccaaggacacctacagcgacctgaagagcagagacaaggacgtgaccatcgtgcccagcaccggcgagcccaccaccctgagcagcgagacccacatccccgaggagaagagcctgctgaacctgagcaccaacgccgacagccagagcagcagcgacttcgaggtgcccagcacccccgaggccgagctgcccaagagagagcacctgcagtacctgtacgagaagctggccaccggcgagagcatcgccgtgaagaagagaaagtgcagcctgctggacacctag

SEQ ID NO: 30722 - DNA, 2228 bp, Artificial Sequence
  derived and/or modified sequence
ggcttcagctgcggttttggggtcccggactctgggatcggcggcgctatgagttctttcgaggggcagatggccgagtatccaactatctccatagaccgcttcgatagggagaacctgagggcccgcgcctacttcctgtcccactgccacaaagatcacatgaaaggattaagagcccctaccttgaaaagaaggttggagtgcagatatctattgaaatcgagactcctacccagatatctttagtggatgaagcatcaggagaggtttttatttcagggcaataatggaactgtcctgtacacaggagacttcagattggcgcaaggagaagctgctagaatggagcttctgcactccgggggcagagtcaaagacatccaaagtgtatatttggatactacgttctgtgatccaagattttaccaaattccaagtcgggaggagtgtttaagtggagtcttagagctggtccgaagctggatcactcggagcccgtaccatgttgtgtggctgaactgcaaagcggcttatggctatgaatatctgttcaccaaccttagtgaagaattaggagtccaggttcatgtgaataagctagacatgtttaggaacatgcctgagatccttcatcatctcacaacagaccgcaacactcagatccatgcatgccggcatcccaaggcagaggaatattttcagtggagcaaattaccctgtggaattacttccagaaatagaattccactccacataatcagcattaagccatccaccatgtggtttggagaaaggagcagaaaaacaaatgtaattgtgaggactggagagagttcatacagagcttgtttttcttttcactcctcctacagtgagattaaagatttcttgagctacctctgtcctgtgaacgcatatccaaatgtcattccagttggcacaactatggataaagttgtcgaaatcttaaagcctttatgccggtcttcccaaagtacggagccaaagtataaaccactgggaaaactgaagagagctagaacagttcaccgagactcagaggaggaagatgactatctctttgatgatcctctgccaatacctttaaggcacaaagttccatacccggaaacttttcaccctgaggtattttcaatgactgcagtatcagaaaagcagcctgaaaaactgagacaaaccccaggatgctgcagagcagagtgtatgcagagctctcgtttcacaaactttgtagattgtgaagaatccaacagtgaaagtgaagaagaagtaggaatcccagcttcactgcaaggagatctgggctctgtacttcacctgcaaaaggctgatggggatgtaccccagtgggaagtattctttaaaagaaatgatgaaatcacagatgagagtttggaaaacttcccttcctccacagtggcagggggatctcagtcaccaaagcttttcagtgactctgatggagaatcaactcacatctcctcccagaattcttcccagtcaacacacataacagaacaaggaagtcaaggctgggacagccaatctgatactgttttgttatcttcccaagagagaaacagtggggatattacttccttggacaaagctgactacagaccaacaatcaaagagaatattcctgcctctctcatggaacaaaatgtaatttgcccaaaggatacttactctgatttgaaaagcagagataaagatgtgacaatagttcctagtactggagaaccaactactctaagcagtgagacacatatacccgaggaaaaaagtttgctaaatcttagcacaaatgcagattcccagagctcttctgattttgaagttccctcaactccagaagctgagttacctaaacgagagcatttacaatatttatatgagaagctggcaactggtgagagtatagcagtcaaaaaaagaaaatgctcactcttagatacctaagaattcaaagcgtttcaacctagagcaaccactaaaaaacctgcacagagatgacagtcaatattacaatagagaaaatacagtacttaaaaatgttcaaataacctggttgggtgtggtggctcacacttgtaatcccagcactttgaggtgggcaatggcttgagcccaggagttcgacaccagcctggccaacacagtgaaatgtgtctctacttacaaaaaaaaaaaaaaaaaaaaaa

SEQ ID NO: 30723 - DNA, 2485 bp, Artificial Sequence
  derived and/or modified sequence
gcggttttggggtcccggactctgggatcggcggcgctatgagttctttcgaggggcagatggccgagtatccaactatctccatagaccgcttcgatagggagaacctgagggcccgcgcctacttcctgtcccactgccacaaagatcacatgaaaggattaagagcccctaccttgaaaagaaggttggagtgcagacacacctgatcacatacaagcgcgtatttccaagtaacaatggtgagggaccactgttggaggaggtccagggacaccgtgtttccacccccaccttgtgctcttggtggcactgaaatggtgtgcatagcttgaaggtttatctatactgttcacctgtgactaaggagttgttgttaacgagcccgaaatacagattttggaagaaacgaattatatctattgaaatcgagactcctacccagatatctttagtggatgaagcatcaggagagaaggaagagattgttgtgactctcttaccagctggtcactgtccgggatcagttatgtttttatttcagggcaataatggaactgtcctgtacacaggagacttcagattggcgcaaggagaagctgctagaatggagcttctgcactccgggggcagagtcaaagacatccaaagtgtatatttggatactacgttctgtgatccaagattttaccaaattccaagtcgggaggagtgtttaagtggagtcttagagctggtccgaagctggatcactcggagcccgtaccatgttgtgtggctgaactgcaaagcggcttatggctatgaatatctgttcaccaaccttagtgaagaattaggagtccaggttcatgtgaataagctagacatgtttaggaacatgcctgagatccttcatcatctcacaacagaccgcaacactcagatccatgcatgccggcatcccaaggcagaggaatattttcagtggagcaaattaccctgtggaattacttccagaaatagaattccactccacataatcagcattaagccatccaccatgtggtttggagaaaggagcagaaaaacaaatgtaattgtgaggactggagagagttcatacagagcttgtttttcttttcactcctcctacagtgagattaaagatttcttgagctacctctgtcctgtgaacgcatatccaaatgtcattccagttggcacaactatggataaagttgtcgaaatcttaaagcctttatgccggtcttcccaaagtacggagccaaagtataaaccactgggaaaactgaagagagctagaacagttcaccgagactcagaggaggaagatgactatctctttgatgatcctctgccaatacctttaaggcacaaagttccatacccggaaacttttcaccctgaggtattttcaatgactgcagtatcagaaaagcagcctgaaaaactgagacaaaccccaggatgctgcagagcagagtgtatgcagagctctcgtttcacaaactttgtagattgtgaagaatccaacagtgaaagtgaagaagaagtaggaatcccagcttcactgcaaggagatctgggctctgtacttcacctgcaaaaggctgatggggatgtaccccagtgggaagtattctttaaaagaaatgatgaaatcacagatgagagtttggaaaacttcccttcctccacagtggcagggggatctcagtcaccaaagcttttcagtgactctgatggagaatcaactcacatctcctcccagaattcttcccagtcaacacacataacagaacaaggaagtcaaggctgggacagccaatctgatactgttttgttatcttcccaagagagaaacagtggggatattacttccttggacaaagctgactacagaccaacaatcaaagagaatattcctgcctctctcatggaacaaaatgtaatttgcccaaaggatacttactctgatttgaaaagcagagataaagatgtgacaatagttcctagtactggagaaccaactactctaagcagtgagacacatatacccgaggaaaaaagtttgctaaatcttagcacaaatgcagattcccagagctcttctgattttgaagttccctcaactccagaagctgagttacctaaacgagagcatttacaatatttatatgagaagctggcaactggtgagagtatagcagtcaaaaaaagaaaatgctcactcttagatacctaagaattcaaagcgtttcaacctagagcaaccactaaaaaacctgcacagagatgacagtcaatattacaatagagaaaatacagtacttaaaaatgttcaaataacctggttgggtgtggtggctcacacttgtaatcccagcactttgaggtgggcaatggcttgagcccaggagttcgacaccagcctggccaacacagtgaaatgtgtctctacttacaaaaaaaaaaaaaaaaa

SEQ ID NO: 30724 - DNA, 2807 bp, Artificial Sequence
  derived and/or modified sequence
gcggttttggggtcccggactctgggatcggcggcgctatgagttctttcgaggggcagatggccgagtatccaactatctccatagaccgcttcgatagggagaacctgagggcccgcgcctacttcctgtcccactgccacaaagatcacatgaaaggattaagagcccctaccttgaaaagaaggttggagtgcagacacacctgatcacatacaagcgcgtatttccaagtaacaatggtgagggaccactgttggaggaggtccagggacaccgtgtttccacccccaccttgtgctcttggtggcactgaaatggtgtgcatagcttgaaggtttatctatactgttcacctgtgactaaggagttgttgttaacgagcccgaaatacagattttggaagaaacgaattagcagtcacaacagcagggttgttcctgttgtctctggcattcagcttgaagttactacaggtcagcccggccagcagtcaggaaggaaagctggaagagaagtggaggggaacagagacaaactggaaggcagaatggcccactaggacagaccgaaacccacttctgtctctcacttcctctggcctcaatagtgctggtctcccgctttggctctgaagcacatgcacctgccccaggactcggaggagctgcacacgggcacccagcagaagctgatgttgctgcggccctgccccagactctgagttaagccagaagatatctattgaaatcgagactcctacccagatatctttagtggatgaagcatcaggagagaaggaagagattgttgtgactctcttaccagctggtcactgtccgggatcagttatgtttttatttcagggcaataatggaactgtcctgtacacaggagacttcagattggcgcaaggagaagctgctagaatggagcttctgcactccgggggcagagtcaaagacatccaaagtgtatatttggatactacgttctgtgatccaagattttaccaaattccaagtcgggaggagtgtttaagtggagtcttagagctggtccgaagctggatcactcggagcccgtaccatgttgtgtggctgaactgcaaagcggcttatggctatgaatatctgttcaccaaccttagtgaagaattaggagtccaggttcatgtgaataagctagacatgtttaggaacatgcctgagatccttcatcatctcacaacagaccgcaacactcagatccatgcatgccggcatcccaaggcagaggaatattttcagtggagcaaattaccctgtggaattacttccagaaatagaattccactccacataatcagcattaagccatccaccatgtggtttggagaaaggagcagaaaaacaaatgtaattgtgaggactggagagagttcatacagagcttgtttttcttttcactcctcctacagtgagattaaagatttcttgagctacctctgtcctgtgaacgcatatccaaatgtcattccagttggcacaactatggataaagttgtcgaaatcttaaagcctttatgccggtcttcccaaagtacggagccaaagtataaaccactgggaaaactgaagagagctagaacagttcaccgagactcagaggaggaagatgactatctctttgatgatcctctgccaatacctttaaggcacaaagttccatacccggaaacttttcaccctgaggtattttcaatgactgcagtatcagaaaagcagcctgaaaaactgagacaaaccccaggatgctgcagagcagagtgtatgcagagctctcgtttcacaaactttgtagattgtgaagaatccaacagtgaaagtgaagaagaagtaggaatcccagcttcactgcaaggagatctgggctctgtacttcacctgcaaaaggctgatggggatgtaccccagtgggaagtattctttaaaagaaatgatgaaatcacagatgagagtttggaaaacttcccttcctccacagtggcagggggatctcagtcaccaaagcttttcagtgactctgatggagaatcaactcacatctcctcccagaattcttcccagtcaacacacataacagaacaaggaagtcaaggctgggacagccaatctgatactgttttgttatcttcccaagagagaaacagtggggatattacttccttggacaaagctgactacagaccaacaatcaaagagaatattcctgcctctctcatggaacaaaatgtaatttgcccaaaggatacttactctgatttgaaaagcagagataaagatgtgacaatagttcctagtactggagaaccaactactctaagcagtgagacacatatacccgaggaaaaaagtttgctaaatcttagcacaaatgcagattcccagagctcttctgattttgaagttccctcaactccagaagctgagttacctaaacgagagcatttacaatatttatatgagaagctggcaactggtgagagtatagcagtcaaaaaaagaaaatgctcactcttagatacctaagaattcaaagcgtttcaacctagagcaaccactaaaaaacctgcacagagatgacagtcaatattacaatagagaaaatacagtacttaaaaatgttcaaataacctggttgggtgtggtggctcacacttgtaatcccagcactttgaggtgggcaatggcttgagcccaggagttcgacaccagcctggccaacacagtgaaatgtgtctctacttacaaaaaaaaaaaaaaaaa

SEQ ID NO: 30725 - DNA, 2463 bp, Artificial Sequence
  derived and/or modified sequence
tcagggctggccttggcttcagctgcggttttggggtcccggactctgggatcggcggcgctatgagttctttcgaggggcagatggccgagtatccaactatctccatagaccgcttcgatagggagaacctgagggcccgcgcctacttcctgtcccactgccacaaagatcacatgaaaggattaagagcccctaccttgaaaagaaggttggagtgcagatgaggaaactgaggaaccagagaggttaaattagttgcccagtgtcacacagccagtaagtggcaggaccaggattccagccagcttgaaggtttatctatactgttcacctgtgactaaggagttgttgttaacgagcccgaaatacagattttggaagaaacgaattatatctattgaaatcgagactcctacccagatatctttagtggatgaagcatcaggagagaaggaagagattgttgtgactctcttaccagctggtcactgtccgggatcagttatgtttttatttcagggcaataatggaactgtcctgtacacaggagacttcagattggcgcaaggagaagctgctagaatggagcttctgcactccgggggcagagtcaaagacatccaaagtgtatatttggatactacgttctgtgatccaagattttaccaaattccaagtcgggaggagtgtttaagtggagtcttagagctggtccgaagctggatcactcggagcccgtaccatgttgtgtggctgaactgcaaagcggcttatggctatgaatatctgttcaccaaccttagtgaagaattaggagtccaggttcatgtgaataagctagacatgtttaggaacatgcctgagatccttcatcatctcacaacagaccgcaacactcagatccatgcatgccggcatcccaaggcagaggaatattttcagtggagcaaattaccctgtggaattacttccagaaatagaattccactccacataatcagcattaagccatccaccatgtggtttggagaaaggagcagaaaaacaaatgtaattgtgaggactggagagagttcatacagagcttgtttttcttttcactcctcctacagtgagattaaagatttcttgagctacctctgtcctgtgaacgcatatccaaatgtcattccagttggcacaactatggataaagttgtcgaaatcttaaagcctttatgccggtcttcccaaagtacggagccaaagtataaaccactgggaaaactgaagagagctagaacagttcaccgagactcagaggaggaagatgactatctctttgatgatcctctgccaatacctttaaggcacaaagttccatacccggaaacttttcaccctgaggtattttcaatgactgcagtatcagaaaagcagcctgaaaaactgagacaaaccccaggatgctgcagagcagagtgtatgcagagctctcgtttcacaaactttgtagattgtgaagaatccaacagtgaaagtgaagaagaagtaggaatcccagcttcactgcaaggagatctgggctctgtacttcacctgcaaaaggctgatggggatgtaccccagtgggaagtattctttaaaagaaatgatgaaatcacagatgagagtttggaaaacttcccttcctccacagtggcagggggatctcagtcaccaaagcttttcagtgactctgatggagaatcaactcacatctcctcccagaattcttcccagtcaacacacataacagaacaaggaagtcaaggctgggacagccaatctgatactgttttgttatcttcccaagagagaaacagtggggatattacttccttggacaaagctgactacagaccaacaatcaaagagaatattcctgcctctctcatggaacaaaatgtaatttgcccaaaggatacttactctgatttgaaaagcagagataaagatgtgacaatagttcctagtactggagaaccaactactctaagcagtgagacacatatacccgaggaaaaaagtttgctaaatcttagcacaaatgcagattcccagagctcttctgattttgaagttccctcaactccagaagctgagttacctaaacgagagcatttacaatatttatatgagaagctggcaactggtgagagtatagcagtcaaaaaaagaaaatgctcactcttagatacctaagaattcaaagcgtttcaacctagagcaaccactaaaaaacctgcacagagatgacagtcaatattacaatagagaaaatacagtacttaaaaatgttcaaataacctggttgggtgtggtggctcacacttgtaatcccagcactttgaggtgggcaatggcttgagcccaggagttcgacaccagcctggccaacacagtgaaatgtgtctctacttacaaaaaaaaaaaaaaaaa

SEQ ID NO: 30726 - DNA, 2354 bp, Artificial Sequence
  derived and/or modified sequence
gcggttttggggtcccggactctgggatcggcggcgctatgagttctttcgaggggcagatggccgagtatccaactatctccatagaccgcttcgatagggagaacctgagggcccgcgcctacttcctgtcccactgccacaaagatcacatgaaaggattaagagcccctaccttgaaaagaaggttggagtgcagcttgaaggtttatctatactgttcacctgtgactaaggagttgttgttaacgagcccgaaatacagattttggaagaaacgaattatatctattgaaatcgagactcctacccagatatctttagtggatgaagcatcaggagagaaggaagagattgttgtgactctcttaccagctggtcactgtccgggatcagttatgtttttatttcagggcaataatggaactgtcctgtacacaggagacttcagattggcgcaaggagaagctgctagaatggagcttctgcactccgggggcagagtcaaagacatccaaagtgtatatttggatactacgttctgtgatccaagattttaccaaattccaagtcgggaggagtgtttaagtggagtcttagagctggtccgaagctggatcactcggagcccgtaccatgttgtgtggctgaactgcaaagcggcttatggctatgaatatctgttcaccaaccttagtgaagaattaggagtccaggttcatgtgaataagctagacatgtttaggaacatgcctgagatccttcatcatctcacaacagaccgcaacactcagatccatgcatgccggcatcccaaggcagaggaatattttcagtggagcaaattaccctgtggaattacttccagaaatagaattccactccacataatcagcattaagccatccaccatgtggtttggagaaaggagcagaaaaacaaatgtaattgtgaggactggagagagttcatacagagcttgtttttcttttcactcctcctacagtgagattaaagatttcttgagctacctctgtcctgtgaacgcatatccaaatgtcattccagttggcacaactatggataaagttgtcgaaatcttaaagcctttatgccggtcttcccaaagtacggagccaaagtataaaccactgggaaaactgaagagagctagaacagttcaccgagactcagaggaggaagatgactatctctttgatgatcctctgccaatacctttaaggcacaaagttccatacccggaaacttttcaccctgaggtattttcaatgactgcagtatcagaaaagcagcctgaaaaactgagacaaaccccaggatgctgcagagcagagtgtatgcagagctctcgtttcacaaactttgtagattgtgaagaatccaacagtgaaagtgaagaagaagtaggaatcccagcttcactgcaaggagatctgggctctgtacttcacctgcaaaaggctgatggggatgtaccccagtgggaagtattctttaaaagaaatgatgaaatcacagatgagagtttggaaaacttcccttcctccacagtggcagggggatctcagtcaccaaagcttttcagtgactctgatggagaatcaactcacatctcctcccagaattcttcccagtcaacacacataacagaacaaggaagtcaaggctgggacagccaatctgatactgttttgttatcttcccaagagagaaacagtggggatattacttccttggacaaagctgactacagaccaacaatcaaagagaatattcctgcctctctcatggaacaaaatgtaatttgcccaaaggatacttactctgatttgaaaagcagagataaagatgtgacaatagttcctagtactggagaaccaactactctaagcagtgagacacatatacccgaggaaaaaagtttgctaaatcttagcacaaatgcagattcccagagctcttctgattttgaagttccctcaactccagaagctgagttacctaaacgagagcatttacaatatttatatgagaagctggcaactggtgagagtatagcagtcaaaaaaagaaaatgctcactcttagatacctaagaattcaaagcgtttcaacctagagcaaccactaaaaaacctgcacagagatgacagtcaatattacaatagagaaaatacagtacttaaaaatgttcaaataacctggttgggtgtggtggctcacacttgtaatcccagcactttgaggtgggcaatggcttgagcccaggagttcgacaccagcctggccaacacagtgaaatgtgtctctacttacaaaaaaaaaaaaaaaaa

SEQ ID NO: 30727 - DNA, 2761 bp, Artificial Sequence
  derived and/or modified sequence
gcggttttggggtcccggactctgggatcggcggcgctatgagttctttcgaggggcagatggccgagtatccaactatctccatagaccgcttcgatagggagaacctgagggcccgcgcctacttcctgtcccactgccacaaagatcacatgaaaggattaagagcccctaccttgaaaagaaggttggagtgcagatgaggaaactgaggaaccagagaggttaaattagttgcccagtgtcacacagccagtaagtggcaggaccaggattccagccagcttgaaggtttatctatactgttcacctgtgactaaggagttgttgttaacgagcccgaaatacagattttggaagaaacgaattagcagtcacaacagcagggttgttcctgttgtctctggcattcagcttgaagttactacaggtcagcccggccagcagtcaggaaggaaagctggaagagaagtggaggggaacagagacaaactggaaggcagaatggcccactaggacagaccgaaacccacttctgtctctcacttcctctggcctcaatagtgctggtctcccgctttggctctgaagcacatgcacctgccccaggactcggaggagctgcacacgggcacccagcagaagctgatgttgctgcggccctgccccagactctgagttaagccagaagatatctattgaaatcgagactcctacccagatatctttagtggatgaagcatcaggagagaaggaagagattgttgtgactctcttaccagctggtcactgtccgggatcagttatgtttttatttcagggcaataatggaactgtcctgtacacaggagacttcagattggcgcaaggagaagctgctagaatggagcttctgcactccgggggcagagtcaaagacatccaaagtgtatatttggatactacgttctgtgatccaagattttaccaaattccaagtcgggaggagtgtttaagtggagtcttagagctggtccgaagctggatcactcggagcccgtaccatgttgtgtggctgaactgcaaagcggcttatggctatgaatatctgttcaccaaccttagtgaagaattaggagtccaggttcatgtgaataagctagacatgtttaggaacatgcctgagatccttcatcatctcacaacagaccgcaacactcagatccatgcatgccggcatcccaaggcagaggaatattttcagtggagcaaattaccctgtggaattacttccagaaatagaattccactccacataatcagcattaagccatccaccatgtggtttggagaaaggagcagaaaaacaaatgtaattgtgaggactggagagagttcatacagagcttgtttttcttttcactcctcctacagtgagattaaagatttcttgagctacctctgtcctgtgaacgcatatccaaatgtcattccagttggcacaactatggataaagttgtcgaaatcttaaagcctttatgccggtcttcccaaagtacggagccaaagtataaaccactgggaaaactgaagagagctagaacagttcaccgagactcagaggaggaagatgactatctctttgatgatcctctgccaatacctttaaggcacaaagttccatacccggaaacttttcaccctgaggtattttcaatgactgcagtatcagaaaagcagcctgaaaaactgagacaaaccccaggatgctgcagagcagagtgtatgcagagctctcgtttcacaaactttgtagattgtgaagaatccaacagtgaaagtgaagaagaagtaggaatcccagcttcactgcaaggagatctgggctctgtacttcacctgcaaaaggctgatggggatgtaccccagtgggaagtattctttaaaagaaatgatgaaatcacagatgagagtttggaaaacttcccttcctccacagtggcagggggatctcagtcaccaaagcttttcagtgactctgatggagaatcaactcacatctcctcccagaattcttcccagtcaacacacataacagaacaaggaagtcaaggctgggacagccaatctgatactgttttgttatcttcccaagagagaaacagtggggatattacttccttggacaaagctgactacagaccaacaatcaaagagaatattcctgcctctctcatggaacaaaatgtaatttgcccaaaggatacttactctgatttgaaaagcagagataaagatgtgacaatagttcctagtactggagaaccaactactctaagcagtgagacacatatacccgaggaaaaaagtttgctaaatcttagcacaaatgcagattcccagagctcttctgattttgaagttccctcaactccagaagctgagttacctaaacgagagcatttacaatatttatatgagaagctggcaactggtgagagtatagcagtcaaaaaaagaaaatgctcactcttagatacctaagaattcaaagcgtttcaacctagagcaaccactaaaaaacctgcacagagatgacagtcaatattacaatagagaaaatacagtacttaaaaatgttcaaataacctggttgggtgtggtggctcacacttgtaatcccagcactttgaggtgggcaatggcttgagcccaggagttcgacaccagcctggccaacacagtgaaatgtgtctctacttacaaaaaaaaaaaaaaaaa

SEQ ID NO: 30728 - DNA, 901 bp, Artificial Sequence
  derived and/or modified sequence
gactctgggatcggcggcgctatgagttctttcgaggggcagatggccgagtatccaactatctccatagaccgcttcgatagggagaacctgagggcccgcgcctacttcctgtcccactgccacaaagatcacatgaaaggattaagagcccctaccttgaaaagaaggttggagtgcagacacacctgatcacatacaagcgcgtatttccaagtaacaatggtgagggaccactgttggaggaggtccagggacaccgtgtttccacccccaccttgtgctcttggtggcactgaaatggtgtgcatagcttgaaggtttatctatactgttcacctgtgactaaggagttgttgttaacgagcccgaaatacagattttggaagaaacgaattatatctattgaaatcgagactcctacccagatatctttagtggatgaagcatcaggagagaaggaagagattgttgtgactctcttaccagctggtcactgtccgggatcagttatgagacttcagattggcgcaaggagaagctgctagaatggagcttctgcactccgggggcagagtcaaagacatccaaagtgtatatttggatactacgttctgtgatccaagattttaccaaattccaagtcgggaggagtgtttaagtggagtcttagagctggtccgaagctggatcactcggagcccgtaccatgttgtgtggctgaactgcaaagcggcttatggctatgaatatctgttcaccaaccttagtgaagaattaggagtccaggttcatgtgaataagctagacatgtttaggaacatgcctgagatccttcatcatctcacaacagaccgcaacactcagatccatgcatgccggcatcccaaggcagaggaat

SEQ ID NO: 30729 - DNA, 3674 bp, Artificial Sequence
  derived and/or modified sequence
gcttcccggaagtggcggcgcggtcagggctggccttggcttcagctgcggttttggggtcccggactctgggatcggcggcgctatgagttctttcgaggggcagatggccgagtatccaactatctccatagaccgcttcgatagggagaacctgagggcccgcgcctacttcctgtcccactgccacaaagatcacatgaaaggattaagagcccctaccttgaaaagaaggttggagtgcagcttgaaggtttatctatactgttcacctgtgactaaggagttgttgttaacgagcccgaaatacagattttggaagaaacgaattatatctattgaaatcgagactcctacccagatatctttagtggatgaagcatcaggagagaaggaagagattgttgtgactctcttaccagctggtcactgtccgggatcagttatgtttttatttcagggcaataatggaactgtcctgtacacaggagacttcagattggcgcaaggagaagctgctagaatggagcttctgcactccgggggcagagtcaaagacatccaaagtgtatatttggatactacgttctgtgatccaagattttaccaaattccaagtcgggaggagtgtttaagtggagtcttagagctggtccgaagctggatcactcggagcccgtaccatgttgtgtggctgaactgcaaagcggcttatggctatgaatatctgttcaccaaccttagtgaagaattaggagtccaggttcatgtgaataagctagacatgtttaggaacatgcctgagatccttcatcatctcacaacagaccgcaacactcagatccatgcatgccggcatcccaaggcagaggaatattttcagtggagcaaattaccctgtggaattacttccagaaatagaattccactccacataatcagcattaagccatccaccatgtggtttggagaaaggagcagaaaaacaaatgtaattgtgaggactggagagagttcatacagagcttgtttttcttttcactcctcctacagtgagattaaagatttcttgagctacctctgtcctgtgaacgcatatccaaatgtcattccagttggcacaactatggataaagttgtcgaaatcttaaagcctttatgccggtcttcccaaagtacggagccaaagtataaaccactgggaaaactgaagagagctagaacagttcaccgagactcagaggaggaagatgactatctctttgatgatcctctgccaatacctttaaggcacaaagttccatacccggaaacttttcaccctgaggtattttcaatgactgcagtatcagaaaagcagcctgaaaaactgagacaaaccccaggatgctgcagagcagagtgtatgcagagctctcgtttcacaaactttgtagattgtgaagaatccaacagtgaaagtgaagaagaagtaggaatcccagcttcactgcaaggagatctgggctctgtacttcacctgcaaaaggctgatggggatgtaccccagtgggaagtattctttaaaagaaatgatgaaatcacagatgagagtttggaaaacttcccttcctccacagtggcagggggatctcagtcaccaaagcttttcagtgactctgatggagaatcaactcacatctcctcccagaattcttcccagtcaacacacataacagaacaaggaagtcaaggctgggacagccaatctgatactgttttgttatcttcccaagagagaaacagtggggatattacttccttggacaaagctgactacagaccaacaatcaaagagaatattcctgcctctctcatggaacaaaatgtaatttgcccaaaggatacttactctgatttgaaaagcagagataaagatgtgacaatagttcctagtactggagaaccaactactctaagcagtgagacacatatacccgaggaaaaaagtttgctaaatcttagcacaaatgcagattcccagagctcttctgattttgaagttccctcaactccagaagctgagttacctaaacgagagcatttacaatatttatatgagaagctggcaactggtgagagtatagcagtcaaaaaaagaaaatgctcactcttagatacctaagaattcaaagcgtttcaacctagagcaaccactaaaaaacctgcacagagatgacagtcaatattacaatagagaaaatacagtacttaaaaatgttcaaataacctggttgggtgtggtggctcacacttgtaatcccagcactttgaggtgggcaatggcttgagcccaggagttcgacaccagcctggccaacacagtgaaatgtgtctctacttacaaaaaaaaaaaaaaaaaaaaaagccaggcatggtggtgggctactctggaggcccttgaggatcacttgagcccaggagattgaggctgcagtgagccatgactgtgccactgcacctctagtctgggtgacagagcaagaccctgtttaaaaaagaaaaaggccaggcacggtggctcatgcctgtaatcccagctacgcaggaggccaaggcaggagaatcacttgaacctgggaggtggtggttgcagtgagctgagattgtgtcattgcactccagcctgggcaacaagagcaaaactctgtctcaaaaaaaaaaaaaaaaaaaaagaaaaaaaaatggtagaactaaacccatacgtatcaatgattacattaaatgtaaatggtctaagtgcatcaatgacaagagacacggaaaaaaccaacataacccagtgatctgctgtctataaagaaagtcaattcaagtgattgataggttaaaaggatggaaaaaccatgtaaacaattaaaaatggagtggttatatggacagtttcctaatgataaaaggtctagttcaccaagaagacaaaataatcctaaacgtatatgcacctaacagctccaaaaatttatgaagctagaacagctgaaaagagacaaactaatgcacaattacagctagggattaatttaacatccctccttagtaacagaactagtatatacacattaatcagtaagaatatagaactgaaaatcataagccgactggattaaattgacatttatagaacacaccaccccaaactagcagaatgtatctcctgaagtacacatggaacattcagcatgatcatatctttgctcataaacacacctgatttaaattgacaaacttggatctagtatgataaactgatggctatagacaaaatcagcaccttatttatccccaaagatgttaagtcacttaaccttgatgtgaatacggtggccaaattagaagcggacaattagaatataaaagaaaatgctcaagaattaaatggtggccaggcacagtaactcctgcctgcaatcccagtactttgggaggctcgcttgagctcagggttttgagtccagcctgggcaacacacagggagaccctgtctccacaaaatgttagccagacatggtggtgtgcacctgtagtcctcgctacttggaaggcttaggtggcaggatggattgagcccaggaggttgaaactgcagtgagctgattgtgcccagcctgggcaacaaagcaagaccccatctc

SEQ ID NO: 30730 - DNA, 877 bp, Artificial Sequence
  derived and/or modified sequence
ggcggcgctatgagttctttcgaggggcagatggccgagtatccaactatctccatagaccgcttcgatagggagaacctgagggcccgcgcctacttcctgtcccactgccacaaagatcacatgaaaggattaagagcccctaccttgaaaagaaggttggagtgcagatgaggaaactgaggaaccagagaggttaaattagttgcccagtgtcacacagccagtaagtggcaggaccaggattccagccagcttgaaggtttatctatactgttcacctgtgactaaggagttgttgttaacgagcccgaaatacagattttggaagaaacgaattagcagtcacaacagcagggttgttcctgttgtctctggcattcagcttgaagttactacaggtcagcccggccagcagtcaggaaggaaagctggaagagaagtggaggggaacagagacaaactggaaggcagaatggcccactaggacagaccgaaacccacttctgtctctcacttcctctggcctcaatagtgctggtctcccgctttggctctgaagcacatgcacctgccccaggactcggaggagctgcacacgggcacccagcagaagctgatgttgctgcggccctgccccagactctgagttaagccagaagatatctattgaaatcgagactcctacccagatatctttagtggatgaagcatcaggagaggtttttatttcagggcaataatggaactgtcctgtacacaggagacttcagattggcgcaaggagaagctgctagaatggagcttctgcactccgggggcagagtcaaagacatccaaagtgtatatttggatactacgttctgtgatccaagat

SEQ ID NO: 30731 - DNA, 2079 bp, Artificial Sequence
  derived and/or modified sequence
atgtccagcttcgagggtcagatggccgagtatcctaccatctcaattgacaggttcgatagagaaaatttgcgggctagagcctacttcctcagccattgtcataaggaccatatgaagggactgcgggctccaaccttgaaacgccgcttggaatgcagcctgaaagtctacttatattgcagccccgtcacgaaggaactccttctcacatctccgaagtacaggttctggaaaaaacgaatcatctccatagaaatagaaaccccaacgcagatcagcctggtcgacgaagcatctggggaaaaggaagagattgtggtcacactattacccgcaggacactgtcctgggtcggtgatgttcctgtttcagggaaacaacgggaccgtcctgtacacaggtgacttccggcttgcccagggcgaagccgctagaatggagttgctgcattccgggggtcgcgtcaaggatattcagtctgtgtacctggacactaccttctgcgatccacgtttctatcaaatcccttctcgagaagagtgcttaagtggcgtgctggagttggtgcggtcatggatcacgaggagtccataccatgtggtctggctaaactgcaaggctgcctatgggtacgagtatctgtttaccaacctgagtgaggaactcggtgtccaggtgcatgtgaacaagctcgacatgttccgaaatatgcccgagatcctgcatcatcttaccacagatagaaatacgcaaatccacgcctgtaggcaccccaaggcggaagagtatttccaatggtccaaactgccctgcggcatcacttctcgaaaccggattccgttgcacatcatctctattaagccttccacaatgtggttcggcgagagatccaggaagacaaatgtcatcgtgcggactggtgaatcatcatatcgagcatgtttcagctttcattccagttacagtgaaatcaaggatttcctctcctatctgtgtccggtgaatgcctacccaaacgtgattcctgtgggaaccacaatggacaaagttgtggagatcttgaaacccctctgtaggagctctcagagcacagagcctaaatacaagcctcttgggaaactaaaacgcgcacgaactgtacacagggactcggaggaagaagatgattatctgttcgatgatccactgcccatccccttgcggcataaggtcccttatcccgagacctttcatccagaagtcttttcaatgacggccgtgagtgagaagcaacctgagaagctcagacagactccaggctgctgtcgggctgagtgcatgcagagcagccggttcactaattttgtggattgcgaggagtccaatagcgagagtgaggaggaagtggggatcccggcatccctgcagggcgatctgggcagcgtgctgcatctgcaaaaagccgacggcgacgtacctcaatgggaagtatttttcaagcgaaatgatgagattaccgacgagtctctggagaattttccttcttccacggtggcgggcggttcacagtctcctaaattattttctgactccgatggggagagcactcacatttctagtcagaactcctctcagtcgacacacatcactgagcaggggtctcaggggtgggattctcaatccgatacagtccttctctcttcgcaagaacggaattccggcgacattacctcgctggacaaggccgactatcgtccaaccatcaaggagaatatcccggcctcccttatggagcaaaatgttatttgcccaaaagatacctattctgacctaaaaagtagggacaaggatgtgaccattgttccctctaccggggagccaacaaccctgagctccgagacacacattccagaagagaaatctttgttgaacctgtcaactaatgcagactcccagagctcatccgacttcgaggtgcccagtaccccagaggccgagctgccgaagagagagcatcttcagtacctgtatgagaagctcgcaactggggaatcgattgctgtgaagaaaagaaaatgttctctgctcgacacctag

SEQ ID NO: 30732 - DNA, 2079 bp, Artificial Sequence
  derived and/or modified sequence
atgagcagctttgagggccagatggccgagtaccccaccatcagcattgacagatttgaccgggagaacctgcgggcccgggcctacttcctgagccactgccacaaggaccacatgaagggcctgcgggcccccaccctgaagaggcggctggagtgcagcctgaaggtgtacctgtactgcagccctgtgaccaaggagctgctgctgaccagccccaagtaccgcttctggaagaagaggatcatcagcattgaaattgagacccccacccagatcagcctggtggatgaggccagcggggagaaggaggagatcgtggtgaccctgctgcctgctggccactgccccggctctgtgatgttcctgttccagggcaacaacggcaccgtgctgtacaccggggacttccggctggcccagggcgaggccgccaggatggagctgctgcacagcggcggccgggtgaaggacatccagagcgtgtacctggacaccaccttctgtgacccccgcttctaccagatccccagccgggaggagtgcctgagcggcgtgctggagctggtgcgctcctggatcaccaggagcccctaccacgtggtgtggctgaactgcaaggccgcctacggctatgagtacctgttcaccaacctgtctgaggagctgggcgtgcaggtgcacgtgaacaagctggacatgttcaggaacatgcctgagatcctgcaccacctgaccacagacaggaacacccagatccacgcctgccgccaccccaaggccgaggagtacttccagtggagcaagctgccctgtggcatcaccagcaggaaccgcatccccctgcacatcatcagcatcaagcccagcaccatgtggtttggagagaggagcaggaagaccaacgtcatcgtgaggactggagagagcagctaccgggcctgcttctccttccacagcagctacagcgagatcaaggacttcctgagctacctgtgccctgtgaatgcctaccccaacgtcatccctgtgggcaccaccatggacaaggtggtggagatcctgaagcccctgtgccgcagcagccagagcacagagcccaagtacaagcccctgggcaagctgaagagggccaggacagtgcaccgggacagcgaggaggaggatgactacctgtttgatgaccccctgcccatccccctgcggcacaaggtgccctacccagagaccttccaccctgaggtgttctccatgacagctgtgtctgagaagcagcctgagaagctgcggcagaccccaggctgctgcagagctgagtgcatgcagagcagccgcttcaccaactttgtggactgtgaggagagcaacagcgagagcgaggaggaggtgggcatcccagccagcctgcagggcgacctgggctctgtgctgcacctgcagaaggcagatggagatgtgccccagtgggaggtgttcttcaagagaaatgatgagatcacagatgagagcctggagaacttccccagcagcacagtggccggcggcagccagagccccaagctgttcagtgacagtgatggagagagcacccacatcagcagccagaacagcagccagagcacccacatcacagagcagggcagccagggctgggacagccagagcgacacagtgctgctgagcagccaggagagaaattctggggacatcaccagcctggacaaggctgactaccggcccaccatcaaggagaacatcccagccagcctgatggagcagaatgtcatctgccccaaggacacctacagcgacctgaagagccgggacaaggatgtgaccatcgtgcccagcactggagagcccaccaccctgagcagcgagacccacatccctgaggagaagagcctgctgaacctgagcaccaatgctgacagccagagcagcagtgactttgaggtgcccagcaccccagaggccgagctgcccaagcgggagcacctgcagtacctgtatgagaagctggccaccggggagagcattgctgtgaagaagaggaagtgcagcctgctggacacctag

SEQ ID NO: 30733 - DNA, 2079 bp, Artificial Sequence
  derived and/or modified sequence
atgagcagcttcgagggccagatggccgagtaccccaccatcagcatcgaccgatttgacagagaaaacctccgggcacgcgcctattttctgtcccattgtcacaaagatcacatgaaaggcttgcgcgcccctacattaaagcgaagactggagtgttctctgaaggtgtatttgtactgttcacccgtcaccaaggagctgctgctgacaagcccgaaatataggttttggaaaaagagaataatttccatcgagattgaaacgccgactcaaatttctcttgtggacgaagcgagcggggaaaaggaggagatcgttgtgactctgctcccagccggccactgcccaggctctgtaatgttcttgtttcaagggaataatggtaccgttttgtataccggggactttagattagcacaaggcgaggctgccaggatggaattgctacactccggtggtagggtgaaggacatacagtccgtgtacctagatacgactttctgcgaccctagattttaccagatcccatccagagaggagtgcctgagtggggtgctcgagctcgtgcgttcatggatcacccggagtccttatcacgtcgtgtggctgaactgtaaagccgcctacggctatgagtacctgtttacaaatctctcggaagaactgggggtgcaagtgcacgtaaataaattggacatgttcagaaacatgcccgaaatattgcaccatctcactaccgaccgaaacacccaaattcatgcctgtagacaccctaaagctgaggagtactttcagtggtccaagcttccgtgcggtataacttcccggaataggatacccctccacatcatcagcattaaaccatcaactatgtggttcggggagagatcccggaagaccaacgtgatcgtgagaacgggggaatcatcctatcgggcctgtttttccttccattcttcttacagtgagatcaaagactttctgtcctatttgtgtcctgtgaacgcctatccaaacgtgatacccgttggcactaccatggacaaggtggtagagatccttaaacccttgtgtcgcagctcgcaaagcacagagccaaaatacaaaccactgggcaagctcaaaagggcccggaccgtgcatcgcgattctgaggaggaggacgactacttgtttgatgatcccctgccaattcccttgcgacacaaggtcccttacccagagacattccatcccgaggtgttctctatgaccgcagtctcagagaagcagccagagaagctgagacagacccccggttgttgcagggcagagtgtatgcagtcaagccgattcaccaatttcgtagactgtgaggagagtaacagcgagtccgaggaggaggtaggcataccagcttctctgcaaggcgacttgggctccgtcttgcacctgcagaaagcagacggagatgtgccacagtgggaggtgttttttaaacggaacgatgaaatcactgatgagtccctggagaacttcccctcttcaacagtggccggcggaagtcagagccccaaactgtttagcgattccgatggtgagtcaacacatatcagttcacagaacagtagtcagtccacccatatcactgagcagggctctcaaggttgggactctcagtctgacactgtcctgctatcttctcaggagaggaatagcggagacatcacatcccttgataaagccgattaccgcccaacaatcaaggagaacattcctgcctccctgatggaacaaaacgttatctgcccaaaggacacgtatagtgatctcaagagccgcgataaggacgtgaccattgtgccttccacgggggagccaacaaccttgtcttccgagacacacatcccagaggaaaaaagcctgctgaacttatccaccaacgccgatagtcagtcttccagcgattttgaggtgccaagcacccccgaggccgagctccccaagcgtgaacacctgcaatatctgtatgaaaaacttgctaccggcgagagtatcgctgtgaaaaagcggaagtgttccttgctcgatacatag

SEQ ID NO: 30734 - DNA, 2079 bp, Artificial Sequence
  derived and/or modified sequence
atgtcttcgttcgaaggccagatggccgagtatccgactatcagcattgacaggttcgaccgtgaaaacctgcgagccagagcttattttctttcccactgtcacaaggatcatatgaagggcttaagagcgcctaccttgaagagacgactcgaatgctcactaaaagtttacctatactgctctcctgtgactaaggagttgttgctaaccagcccaaagtatcgtttttggaagaagcgcattataagtatagaaatcgaaacccccacacagatcagcctggtcgacgaggcctccggggaaaaagaggagattgtagtgacacttttaccagccggacattgccctggctcagtcatgttcctgtttcagggcaacaacgggactgtgttgtatacaggagatttcaggctcgcccagggcgaggcagcgagaatggagctactgcacagtggcggtcgtgtgaaagatatccagtcagtgtacctggataccacattttgcgacccgcgattctatcaaatccccagccgcgaagagtgtctgagtggggtcctggagttggtgaggtcttggatcacaaggtctccataccatgtcgtttggctgaactgcaaagccgcttacggctacgaatacttatttactaatctaagcgaagaactgggggtgcaagtgcacgtgaacaagctggatatgtttaggaacatgcctgagatcctccaccatctgactactgaccgcaacacccaaattcacgcatgtagacacccaaaagcggaggagtattttcagtggtccaaactgccttgcggcattaccagccggaaccgcatcccgctgcatatcatctctataaaacccagcactatgtggtttggggaacggagcagaaagaccaatgttatcgttcgaaccggtgagtcatcttatcgcgcatgcttttctttccactcatcttattctgagataaaagactttttgtcgtacctgtgtccggtgaacgcgtacccaaacgttatccctgtggggacaactatggacaaagtggtcgaaattttgaagccgttgtgtaggtcatcacaatccacggaacccaaatataagccactcggtaaactgaagcgtgcgaggaccgtgcacagggactccgaagaggaagatgactacttattcgacgaccccttgcccatacccctgcggcacaaggtgccctatcccgagacctttcatcctgaggtattctcaatgactgccgtctcggaaaaacagccagagaagctgcgtcagacccccggttgctgccgtgccgagtgcatgcagtcctccagattcaccaacttcgttgactgtgaagaatccaactccgaatctgaagaggaagtgggcatccccgcatccctgcagggagatctcggaagtgtgctccacttgcagaaagctgatggagatgtgccccaatgggaagtattttttaaaaggaatgacgaaataactgacgagtccctggaaaactttccttcttccacagtggctggcggttctcaaagcccgaaacttttcagcgacagcgatggcgagagcacccatatcagtagccaaaattcttcccagtccactcacattacggagcagggaagccagggatgggattctcaatctgacacagtgctgttgtcaagtcaggagcgaaattccggagacattacatcgctggataaagccgattaccgccctacaatcaaggaaaatattcctgcatccctgatggaacagaacgtgatctgtccgaaagacacatattccgacctcaagtcccgcgacaaagacgtgaccattgtgcccagcactggggaacctacgaccctcagttcagagacacacataccagaggagaagtctcttcttaatttgagtactaatgctgactctcagtctagcagtgactttgaagttcctagtacccctgaagcggaacttcccaaacgggaacatctccagtacctgtacgaaaaactggctaccggggagtctatcgccgtgaagaaaagaaaatgctcgctgctggatacttag

SEQ ID NO: 30735 - DNA, 2079 bp, Artificial Sequence
  derived and/or modified sequence
atgagttctttcgaggggcagatggccgagtatccaactatctccatagaccgcttcgatagggagaacctgagggcccgcgcctacttcctgtcccactgccacaaagatcacatgaaaggattaagagcccctaccttgaaaagaaggttggagtgcagcttgaaggtttatctatactgttcacctgtgactaaggagttgttgttaacgagcccgaaatacagattttggaagaaacgaattatatctattgaaatcgagactcctacccagatatctttagtggatgaagcatcaggagagaaggaagagattgttgtgactctcttaccagctggtcactgtccgggatcagttatgtttttatttcagggcaataatggaactgtcctgtacacaggagacttcagattggcgcaaggagaagctgctagaatggagcttctgcactccgggggcagagtcaaagacatccaaagtgtatatttggatactacgttctgtgatccaagattttaccaaattccaagtcgggaggagtgtttaagtggagtcttagagctggtccgaagctggatcactcggagcccgtaccatgttgtgtggctgaactgcaaagcggcttatggctatgaatatctgttcaccaaccttagtgaagaattaggagtccaggttcatgtgaataagctagacatgtttaggaacatgcctgagatccttcatcatctcacaacagaccgcaacactcagatccatgcatgccggcatcccaaggcagaggaatattttcagtggagcaaattaccctgtggaattacttccagaaatagaattccactccacataatcagcattaagccatccaccatgtggtttggagaaaggagcagaaaaacaaatgtaattgtgaggactggagagagttcatacagagcttgtttttcttttcactcctcctacagtgagattaaagatttcttgagctacctctgtcctgtgaacgcatatccaaatgtcattccagttggcacaactatggataaagttgtcgaaatcttaaagcctttatgccggtcttcccaaagtacggagccaaagtataaaccactgggaaaactgaagagagctagaacagttcaccgagactcagaggaggaagatgactatctctttgatgatcctctgccaatacctttaaggcacaaagttccatacccggaaacttttcaccctgaggtattttcaatgactgcagtatcagaaaagcagcctgaaaaactgagacaaaccccaggatgctgcagagcagagtgtatgcagagctctcgtttcacaaactttgtagattgtgaagaatccaacagtgaaagtgaagaagaagtaggaatcccagcttcactgcaaggagatctgggctctgtacttcacctgcaaaaggctgatggggatgtaccccagtgggaagtattctttaaaagaaatgatgaaatcacagatgagagtttggaaaacttcccttcctccacagtggcagggggatctcagtcaccaaagcttttcagtgactctgatggagaatcaactcacatctcctcccagaattcttcccagtcaacacacataacagaacaaggaagtcaaggctgggacagccaatctgatactgttttgttatcttcccaagagagaaacagtggggatattacttccttggacaaagctgactacagaccaacaatcaaagagaatattcctgcctctctcatggaacaaaatgtaatttgcccaaaggatacttactctgatttgaaaagcagagataaagatgtgacaatagttcctagtactggagaaccaactactctaagcagtgagacacatatacccgaggaaaaaagtttgctaaatcttagcacaaatgcagattcccagagctcttctgattttgaagttccctcaactccagaagctgagttacctaaacgagagcatttacaatatttatatgagaagctggcaactggtgagagtatagcagtcaaaaaaagaaaatgctcactcttagatacctaa

SEQ ID NO: 30736 - protein, 633 aa, Artificial Sequence
  derived and/or modified sequence
MQAARMAASLGRQLLRLGGGSSRLTALLGQPRPGPARRPYAGGAAQESKSFAVGMFKGQLTTDQVFPYPSVLNEEQTQFLKELVEPVSRFFEEVNDPAKNDALEMVEETTWQGLKELGAFGLQVPSELGGVGLCNTQYARLVEIVGMHDLGVGITLGAHQSIGFKGILLFGTKAQKEKYLPKLASGETVAAFCLTEPSSGSDAASIRTSAVPSPCGKYYTLNGSKLWISNGGLADIFTVFAKTPVTDPATGAVKEKITAFVVERGFGGITHGPPEKKMGIKASNTAEVFFDGVRVPSENVLGEVGSGFKVAMHILNNGRFGMAAALAGTMRGIIAKAVDHATNRTQFGEKIHNFGLIQEKLARMVMLQYVTESMAYMVSANMDQGATDFQIEAAISKIFGSEAAWKVTDECIQIMGGMGFMKEPGVERVLRDLRIFRIFEGTNDILRLFVALQGCMDKGKELSGLGSALKNPFGNAGLLLGEAGKQLRRRAGLGSGLSLSGLVHPELSRSGELAVRALEQFATVVEAKLIKHKKGIVNEQFLLQRLADGAIDLYAMVVVLSRASRSLSEGHPTAQHEKMLCDTWCIEAAARIREGMAALQSDPWQQELYRNFKSISKALVERGGVVTSNPLGF

SEQ ID NO: 30737 - DNA, 1902 bp, Artificial Sequence
  derived and/or modified sequence
atgcaggctgctcgtatggccgcatcactgggccggcagcttctccgccttgggggcggcagctctcggctaaccgcgctgttgggccagccccgtccaggtcctgcgcggagaccgtatgcaggtggtgcagcacaggagagcaagagtttcgctgtcgggatgtttaagggtcaactgacgaccgatcaggtcttcccctatccgtcagtgttaaatgaggagcagacccagtttttgaaggagctggtggaaccggtgagtcggttctttgaggaagtgaatgacccagccaagaacgacgcgctggaaatggtcgaggaaaccacttggcaagggttgaaggagctgggagcatttggcctgcaggtgccaagcgaactaggtggagttggactgtgtaatactcagtacgcccggttggtggaaattgtgggtatgcatgatctcggggtcgggatcaccctgggggcccaccaatcaatcggctttaagggaatccttctgttcgggaccaaggctcagaaggagaagtacctccctaagctcgccagcggcgaaacggtcgctgccttctgtcttacggagcctagctccggctctgatgccgccagtatcagaacaagcgcagtgccatctccttgcgggaaatattataccctgaatggaagtaaattgtggatttctaacgggggtctggccgacattttcacagtctttgcaaaaactccggtgactgaccccgcgaccggcgctgttaaggagaaaataactgcgtttgttgtagagagagggtttggcggaatcactcacggtcctcctgaaaaaaagatggggattaaagcttccaatacagccgaagtgttctttgatggtgtccgagtccccagtgagaacgtgctcggcgaagtgggctctggatttaaagtggctatgcatatacttaacaatggcagattcgggatggcagccgccctggccggcaccatgcgagggatcatcgccaaggctgtggaccacgccacgaacaggacacaatttggtgaaaaaatacataacttcggcctcattcaagaaaagttggcgcgcatggtgatgcttcaatacgtgactgaaagcatggcctatatggtgtccgctaacatggatcagggagcaaccgacttccaaatcgaagcagctattagcaagatctttgggtccgaggccgcatggaaggtcacagatgagtgtatccagatcatggggggtatgggtttcatgaaagaaccaggagtcgagagggtgctgagggatctgcgcattttcagaatattcgaaggtactaatgacattcttcgcctctttgtcgctttacaagggtgcatggataaggggaaggagctgtccgggttgggatctgccctcaagaacccattcggaaatgctggcctgctcctgggagaggccggaaagcagctacgtcgccgtgctggtcttggatcaggtctgtcactcagtggtctggtacacccagagctgtcccgaagtggcgaattagcggtgcgcgctctggaacagttcgctacagtggttgaggccaaactgatcaagcacaaaaaggggattgtcaacgaacagttcctcctgcagaggctggctgacggtgctattgacctttatgccatggtggtcgtgttgtcacgggcttcccgatctttgtccgaaggccacccaacagcccaacatgaaaagatgttgtgtgatacttggtgcatcgaggctgcagccaggatccgggaaggcatggcagccttgcagtccgacccttggcagcaggagctctatcgtaatttcaaatccatctctaaagccctcgtggaaagaggtggggtggttacatctaaccccctggggttttag

SEQ ID NO: 30738 - DNA, 1902 bp, Artificial Sequence
  derived and/or modified sequence
atgcaggccgccaggatggccgccagcctgggccggcagctgctgcggctgggcggcggcagcagccggctgacagccctgctgggccagcccaggcctggccctgcccggcggccctatgccggcggggccgcccaggagagcaagagctttgctgtgggcatgttcaagggccagctgaccacagaccaggtgttcccctaccccagcgtgctgaatgaggagcagacccagttcctgaaggagctggtggagcctgtgagccgcttctttgaggaggtgaatgaccctgccaagaatgatgccctggagatggtggaggagaccacctggcagggcctgaaggagctgggcgccttcggcctgcaggtgcccagcgagctgggcggcgtgggcctgtgcaacacccagtatgcccggctggtggagatcgtgggcatgcatgacctgggcgtgggcatcaccctgggcgcccaccagagcatcggcttcaagggcatcctgctgtttggcaccaaggcccagaaggagaagtacctgcccaagctggccagcggggagaccgtggccgccttctgcctgacagagcccagcagcggcagtgatgctgccagcatccgcaccagcgctgtgcccagcccctgtgggaagtactacaccctgaatggcagcaagctgtggatcagcaatggaggcctggccgacatcttcaccgtgtttgccaagacccctgtgacagatcctgccaccggggctgtgaaggagaagatcacagcctttgtggtggagcggggctttggaggcatcacccacggccccccagagaagaagatgggcatcaaggccagcaacacagctgaggtgttctttgatggagtgcgggtgcccagtgaaaatgtgctgggggaggtgggcagcggcttcaaggtggccatgcacatcctgaacaacggccgcttcggcatggccgccgccctggccggcaccatgaggggcatcatcgccaaggctgtggaccacgccaccaacagaacccagtttggagagaagatccacaactttggcctcatccaggagaagctggccaggatggtgatgctgcagtatgtgacagagagcatggcctacatggtgtctgccaacatggaccagggcgccacagacttccagattgaagctgccatcagcaagatctttggaagtgaagctgcctggaaggtgacagatgagtgcatccagatcatgggcggcatgggcttcatgaaggagcccggggtggagcgggtgctgcgggacctgcgcatcttccgcatctttgagggcaccaatgacatcctgcggctgtttgtggccctgcagggctgcatggacaagggcaaggagctgagcggcctgggcagcgccctgaagaacccctttggaaatgccggcctgctgctgggggaggccggcaagcagctgcggaggagagctggcctgggcagcggcctgagcctgagcggcctggtgcaccctgagctgagccgcagcggggagctggccgtgcgggccctggagcagtttgccaccgtggtggaggccaagctgatcaagcacaagaagggcatcgtgaatgagcagttcctgctgcagaggctggctgatggagccatcgacctgtatgccatggtggtggtgctgagccgggccagccgcagcctgtctgagggccaccccacagcccagcacgagaagatgctgtgtgacacctggtgcatcgaggccgccgcccgcatccgggagggcatggccgccctgcagagcgacccctggcagcaggagctgtacagaaacttcaagagcatcagcaaggccctggtggagcggggcggcgtggtgaccagcaaccccctgggcttctag

SEQ ID NO: 30739 - DNA, 1902 bp, Artificial Sequence
  derived and/or modified sequence
atgcaggccgcccggatggccgccagcctgggccggcagctgctgaggttgggcgggggcagttcacgcttaacggcgctgctggggcagccccggcccggacccgcccgtcgtccatacgcgggaggggcagcacaggaatccaagagttttgcagtgggcatgttcaagggccagctgacaacggaccaagtctttccctatccttccgtgttaaatgaagaacagacgcagttcctgaaggaactcgttgaacctgtaagtcgctttttcgaagaagttaacgaccctgccaagaacgacgcattagaaatggttgaagaaacgacatggcagggactgaaggagctcggtgctttcggcctgcaggtccctagcgaacttggcggcgtggggctatgtaatacccaatacgcccgactggtcgagatcgttggcatgcatgatctgggagtgggcattacactgggggcgcaccagagtatcgggttcaagggaatcctgctgttcggcacgaaggctcaaaaggagaagtatttacctaagttggccagtggtgagactgtggccgccttctgtttaactgagccatcctctggttctgatgccgctagtattcgtacttctgcggttccctccccatgtgggaagtactacacacttaacgggagcaaactgtggatctctaacggaggactggccgatatctttaccgtttttgcaaagacacccgtcacggatcctgctactggggccgtgaaagaaaagatcaccgccttcgttgtggaacgaggctttgggggaataacccatgggccacctgagaagaaaatgggaattaaggcctccaatacggccgaagttttttttgacggcgttcgagtaccttctgagaatgtgctgggggaagtgggcagcggctttaaagtggctatgcacatcctgaataatgggagattcggtatggcagcagccctggccgggaccatgcgggggattatagccaaggccgtggaccacgcaacaaatcgtacccagtttggggagaagatacataatttcggcctcattcaggaaaagctggccaggatggttatgttgcaatatgtaaccgagtccatggcctacatggtatcagcgaacatggaccagggcgctacagacttccagattgaggcagctatctctaaaatattcggcagcgaagccgcctggaaagtaacagatgagtgcatacagatcatggggggaatgggattcatgaaggagcccggcgtggagcgggtactgcgggatctccggatctttcgtatctttgaaggtacaaacgatattttaaggctgttcgtggcactgcaaggatgtatggataaggggaaagagctctccggcttggggagtgccttgaagaatccatttgggaatgcaggactcctcctcggtgaggctggcaagcagctacgccgccgtgctggactggggagtggcctgtcgctgagcggtttagtgcacccagaactgtctcggtcaggtgagctcgcagtccgtgccctcgagcaatttgcaactgttgtcgaggctaaactgatcaaacataagaagggtatcgtcaatgaacagtttcttctgcaacgccttgccgacggcgcaattgacctttatgctatggtggtggtcttatccagggccagccggagcttgtccgagggccatccaaccgcccagcatgaaaagatgttgtgcgacacctggtgtatcgaagcggctgcaagaattagagagggaatggcagccctccaaagcgacccttggcagcaggagctgtatcgaaatttcaaaagcatctctaaggccttagttgagcgcggcggagtggtgaccagcaacccactggggttctag

SEQ ID NO: 30740 - DNA, 1902 bp, Artificial Sequence
  derived and/or modified sequence
atgcaggcagctcggatggcagcctctctgggccgtcagctcctccggctcggagggggatctagtcggctgactgcactgctgggtcagcctcggcctgggcctgctcgcagaccttacgccggtggcgctgcccaggagtctaaaagcttcgccgtaggcatgttcaaaggacagttgacaaccgaccaggtgttcccatacccgagcgtgttaaacgaagaacagactcagtttctcaaagagcttgtcgaacctgtttctcgattctttgaagaagtaaacgacccagcaaagaatgatgcactggaaatggtggaggagaccacctggcagggcctgaaggaattgggcgctttcggtctgcaggtgccatccgaactgggaggggtgggactgtgtaatacacagtatgccaggttagtggaaatcgtggggatgcacgacctgggcgtgggcatcacattaggggctcaccagagcattggatttaaaggaattctgttgttcgggaccaaagcacagaaggagaagtacctgcctaaactggccagtggtgaaaccgtcgccgctttttgtctgaccgaaccatcctctggtagcgatgctgcaagcattaggacctctgcagtccccagcccttgcggcaagtactacaccctgaacggctccaagctatggatatcgaatgggggacttgctgacatctttacggtcttcgccaagactcctgtgaccgatcctgcaaccggtgccgtcaaagagaagatcaccgcgtttgtagttgaacggggattcggaggcatcactcatggcccaccagaaaaaaaaatgggaatcaaggcatccaacaccgccgaggtgttcttcgacggagtaagagtcccctcagagaatgtgttgggagaggtgggcagcggattcaaggtcgctatgcatatactgaacaatgggagattcggcatggcggctgcgctggcaggcacgatgagagggattatcgcaaaggctgtggatcacgcgacgaacaggacccagttcggggaaaaaatccacaacttcgggctgatccaggagaagctagccagaatggtgatgctacagtatgtgaccgagtctatggcgtacatggtgagtgccaacatggatcagggagctaccgacttccagatcgaggccgcaattagcaaaattttcgggagtgaagcagcttggaaggtgaccgatgagtgtatccagattatgggcggaatggggttcatgaaagagcctggggtagagcgtgtgttgcgagacctccggatttttaggatatttgaagggaccaacgacatcctcagactatttgtggcactccaaggctgcatggacaaaggcaaggaactgtcagggctaggaagcgccctaaagaatcctttcggaaatgccggtctattgctaggtgaagcaggcaagcagctgaggcgtcgcgcaggattgggttcaggcttgagtttgtcgggcctggtgcaccccgagctgtccaggagcggagaacttgcagtgcgcgctctcgaacaattcgcaacggttgtggaagccaaactgattaaacacaaaaagggcattgtaaatgaacagtttctgctacagaggttggccgacggtgcaatcgacctgtatgctatggtcgtggttctttctcgcgcttcccggagtttatctgagggccatcctacggctcaacacgaaaaaatgctttgtgacacatggtgcattgaagccgctgctaggatacgtgagggtatggccgcactccagagcgacccgtggcagcaagagctctaccgcaatttcaaaagcatctctaaggcactggtcgaaagagggggagtcgtgacctccaatccacttggcttttag

SEQ ID NO: 30741 - DNA, 1902 bp, Artificial Sequence
  derived and/or modified sequence
atgcaggccgccagaatggccgccagcctgggcagacagctgctgagactgggcggcggcagcagcagactgaccgccctgctgggccagcccagacccggccccgccagaagaccctacgccggcggcgccgcccaggagagcaagagcttcgccgtgggcatgttcaagggccagctgaccaccgaccaggtgttcccctaccccagcgtgctgaacgaggagcagacccagttcctgaaggagctggtggagcccgtgagcagattcttcgaggaggtgaacgaccccgccaagaacgacgccctggagatggtggaggagaccacctggcagggcctgaaggagctgggcgccttcggcctgcaggtgcccagcgagctgggcggcgtgggcctgtgcaacacccagtacgccagactggtggagatcgtgggcatgcacgacctgggcgtgggcatcaccctgggcgcccaccagagcatcggcttcaagggcatcctgctgttcggcaccaaggcccagaaggagaagtacctgcccaagctggccagcggcgagaccgtggccgccttctgcctgaccgagcccagcagcggcagcgacgccgccagcatcagaaccagcgccgtgcccagcccctgcggcaagtactacaccctgaacggcagcaagctgtggatcagcaacggcggcctggccgacatcttcaccgtgttcgccaagacccccgtgaccgaccccgccaccggcgccgtgaaggagaagatcaccgccttcgtggtggagagaggcttcggcggcatcacccacggcccccccgagaagaagatgggcatcaaggccagcaacaccgccgaggtgttcttcgacggcgtgagagtgcccagcgagaacgtgctgggcgaggtgggcagcggcttcaaggtggccatgcacatcctgaacaacggcagattcggcatggccgccgccctggccggcaccatgagaggcatcatcgccaaggccgtggaccacgccaccaacagaacccagttcggcgagaagatccacaacttcggcctgatccaggagaagctggccagaatggtgatgctgcagtacgtgaccgagagcatggcctacatggtgagcgccaacatggaccagggcgccaccgacttccagatcgaggccgccatcagcaagatcttcggcagcgaggccgcctggaaggtgaccgacgagtgcatccagatcatgggcggcatgggcttcatgaaggagcccggcgtggagagagtgctgagagacctgagaatcttcagaatcttcgagggcaccaacgacatcctgagactgttcgtggccctgcagggctgcatggacaagggcaaggagctgagcggcctgggcagcgccctgaagaaccccttcggcaacgccggcctgctgctgggcgaggccggcaagcagctgagaagaagagccggcctgggcagcggcctgagcctgagcggcctggtgcaccccgagctgagcagaagcggcgagctggccgtgagagccctggagcagttcgccaccgtggtggaggccaagctgatcaagcacaagaagggcatcgtgaacgagcagttcctgctgcagagactggccgacggcgccatcgacctgtacgccatggtggtggtgctgagcagagccagcagaagcctgagcgagggccaccccaccgcccagcacgagaagatgctgtgcgacacctggtgcatcgaggccgccgccagaatcagagagggcatggccgccctgcagagcgacccctggcagcaggagctgtacagaaacttcaagagcatcagcaaggccctggtggagagaggcggcgtggtgaccagcaaccccctgggcttctag

SEQ ID NO: 30742 - DNA, 2221 bp, Artificial Sequence
  derived and/or modified sequence
tacagctcccagcatgccccggggcccgcaaccgtccgccgcccggtgcactgtggacgatgagtcagggttaggggcgccaggacgtgggcgtgcaggacgccagagctgggtcagagctcgagccagcggcgcccggagagattcggagatgcaggcggctcggatggccgcgagcttggggcggcagctgctgaggctcgggggcggaagctcgcggctcacggcgctcctggggcagccccggcccggccctgcccggcggccctatgccgggggtgccgctcaggaatctaagtcctttgctgtgggaatgttcaaaggccagctcaccacagatcaggtgttcccatacccgtccgtgctcaacgaagagcagacacagtttcttaaagagctggtggagcctgtgtcccgtttcttcgaggaagtgaacgatcccgccaagaatgacgctctggagatggtggaggagaccacttggcagggcctcaaggagctgggggcctttggtctgcaagtgcccagtgagctgggtggtgtgggcctttgcaacacccagtacgcccgtttggtggagatcgtgggcatgcatgaccttggcgtgggcattaccctgggggcccatcagagcatcggtttcaaaggcatcctgctctttggcacaaaggcccagaaagaaaaatacctccccaagctggcatctggggagactgtggccgctttctgtctaaccgagccctcaagcgggtcagatgcagcctccatccgaacctctgctgtgcccagcccctgtggaaaatactataccctcaatggaagcaagctttggatcagtaatgggggcctagcagacatcttcacggtctttgccaagacaccagttacagatccagccacaggagccgtgaaggagaagatcacagcttttgtggtggagaggggcttcgggggcattacccatgggccccctgagaagaagatgggcatcaaggcttcaaacacagcagaggtgttctttgatggagtacgggtgccatcggagaacgtgctgggtgaggttgggagtggcttcaaggttgccatgcacatcctcaacaatggaaggtttggcatggctgcggccctggcaggtaccatgagaggcatcattgctaaggcggtagatcatgccactaatcgtacccagtttggggagaaaattcacaactttgggctgatccaggagaagctggcacggatggttatgctgcagtatgtaactgagtccatggcttacatggtgagtgctaacatggaccagggagccacggacttccagatagaggccgccatcagcaaaatctttggctcggaggcagcctggaaggtgacagatgaatgcatccaaatcatggggggtatgggcttcatgaaggaacctggagtagagcgtgtgctccgagatcttcgcatcttccggatctttgaggggacaaatgacattcttcggctgtttgtggctctgcagggctgtatggacaaaggaaaggagctctctgggcttggcagtgctctaaagaatccctttgggaatgctggcctcctgctaggagaggcaggcaaacagctgaggcggcgggcagggctgggcagcggcctgagtctcagcggacttgtccacccggagttgagtcggagtggcgagctggcagtacgggctctggagcagtttgccactgtggtggaggccaagctgataaaacacaagaaggggattgtcaatgaacagtttctgctgcagcggctggcagacggggccatcgacctctatgccatggtggtggttctctcgagggcctcaagatccctgagtgagggccaccccacggcccagcatgagaaaatgctctgtgacacctggtgtatcgaggctgcagctcggatccgagagggcatggccgccctgcagtctgacccctggcagcaagagctctaccgcaacttcaaaagcatctccaaggccttggtggagcggggtggtgtggtcaccagcaacccacttggcttctgaatactcccggccagggcctgtcccagttatgtgccttccctcaagccaaagccgaagcccctttccttaaggccctggtttgtcccgaaggggcctagtgttcccagcactgtgcctgctctcaagagcacttactgcctcgcaaataataaaaatttctagccagtc

SEQ ID NO: 30743 - protein, 97 aa, Artificial Sequence
  derived and/or modified sequence
MTSLLTTPSPREELMTTPILQPTEALSPEDGASTALIAVVITVVFLTLLSVVILIFFYLYKNKGSYVTYEPTEGEPSAIVQMESDLAKGSEKEEYFI

SEQ ID NO: 30744 - DNA, 294 bp, Artificial Sequence
  derived and/or modified sequence
atgaccagcctgctgaccacccccagccccagagaggagctgatgaccacccccatcctgcagcccaccgaggccctgagccccgaggacggcgccagcaccgccctgatcgccgtggtgatcaccgtggtgttcctgaccctgctgagcgtggtgatcctgatcttcttctacctgtacaagaacaagggcagctacgtgacctacgagcccaccgagggcgagcccagcgccatcgtgcagatggagagcgacctggccaagggcagcgagaaggaggagtacttcatctag

SEQ ID NO: 30745 - DNA, 294 bp, Artificial Sequence
  derived and/or modified sequence
atgactagcttgctaaccactccctcaccccgagaggagctgatgaccacacctatattacagcctacagaggccttaagtcctgaggacggagcctcgaccgcactcatcgctgtagttattactgtggtctttcttacacttctgagcgtggtcatcctgatattcttctacttgtataagaacaaaggaagctatgtgacatacgaacccaccgaaggcgagccctcggccatcgtacagatggaatcagacctcgcaaaaggctccgagaaggaggagtacttcatatag

SEQ ID NO: 30746 - DNA, 294 bp, Artificial Sequence
  derived and/or modified sequence
atgactagcctgctgaccacaccctctccccgagaggaattgatgacgactcctattctccagcctacagaggctctgtcaccggaagatggagcctctacagctttgattgcggtggtcattaccgtggtgtttcttactttgctgtcagttgttatactcatttttttttacttgtacaaaaataagggatcatacgtgacttatgaacccaccgagggcgagccctccgccatcgtccagatggaatccgatctggctaaaggctctgagaaggaggagtatttcatctag

SEQ ID NO: 30747 - DNA, 294 bp, Artificial Sequence
  derived and/or modified sequence
atgaccagcctgctgaccacccccagcccccgggaggagctgatgaccacccccatcctgcagcccacagaggccctgagcccagaagatggagccagcacagccctgattgctgtggtgatcaccgtggtgttcctgaccctgctgtctgtggtgatcctgatcttcttctacctgtacaagaacaagggcagctatgtgacctatgagcccacagaaggagagcccagcgccatcgtgcagatggagagtgacctggccaagggcagcgagaaggaggagtacttcatctag

SEQ ID NO: 30748 - DNA, 294 bp, Artificial Sequence
  derived and/or modified sequence
atgaccagcctgctgaccacccccagcccccgggaggagctgatgacgacacccatcctgcagcctaccgaagcgttgtctcccgaagacggagccagtacggcacttattgctgtcgtgataactgtggtattcctgaccctgctgagtgtcgtaatcctcatcttcttctacctttataaaaataaagggtcatacgtcacatacgagcccaccgagggggagccttcagccattgtgcaaatggagtccgatctggccaagggctccgaaaaagaggagtacttcatatag

SEQ ID NO: 30749 - DNA, 294 bp, Artificial Sequence
  derived and/or modified sequence
atgaccagcctgctgaccacccccagcccccgggaggagctgatgactaccccaatcctgcagccgacggaggcactgagccccgaggacggtgcaagcactgccctgattgccgtggtaattactgtggtcttccttaccctgctgagtgtcgtgattctgattttcttctacctgtacaagaacaagggcagctacgtcacttacgaacccaccgaaggggaaccgtcagcaatagttcagatggagtccgacctggctaagggatccgagaaggaggagtactttatatag

SEQ ID NO: 30750 - DNA, 294 bp, Artificial Sequence
  derived and/or modified sequence
atgacatcactgctcacaacccccagtccaagggaagaactgatgactacaccgatcctacagcccaccgaagcactgtctccggaagatggcgcttcaacagctttgattgcggtcgtgatcaccgtggtattcctcacacttctttcggtggtgatcctcatcttcttctatctgtataagaataagggaagctacgtaacctatgagcctaccgaaggtgagccctctgctatcgtgcagatggagtcagatctcgcaaagggttccgaaaaggaagaatacttcatttag

SEQ ID NO: 30751 - DNA, 294 bp, Artificial Sequence
  derived and/or modified sequence
atgacctcactcttaacaactcccagcccacgggaagaacttatgaccacccctatattgcagccaactgaggcgctgtctcccgaagacggggctagcactgcactgatcgctgtggtaattactgtggtgttcctgacccttttgtccgttgtgatattgattttcttctatctgtacaagaacaaaggctcttatgtgacgtatgagcctactgaaggggaaccgtccgcaatcgtgcagatggagtctgatctcgctaagggcagtgagaaggaggagtacttcatttag

SEQ ID NO: 30752 - DNA, 1087 bp, Artificial Sequence
  derived and/or modified sequence
ggcctctgcgccaaccccgcgcgccacccgcggcttcctccgctcggggtcctcgttcggcctctgctggcctccgcgactccgcggtgcccgcccccgttgagttcaaaaggacgcgcggagcggcgccggcccttcaccagcagcccgtccgactggaaagatctgcctcttctccaagaaactcaaccactagtgacaatgaccagcctcctgactactccttctccaagagaagaactgatgaccaccccaattttacagcccactgaggccctgtccccagaagatggagccagcacagcactcattgcagttgttatcaccgttgtcttcctcaccctgctctcggtcgtgatcttgatcttcttttacctgtacaagaacaaaggcagctacgtcacctatgaacctacagaaggtgagcccagtgccatcgtccagatggagagtgacttggccaagggcagcgagaaagaggaatatttcatctaatgactcccaggccccaaggagcttattcctggctccatcgctaacacgttgactgcttattatgggaaagttttctctgaagccagggagaagcattgattgatgtgggcaaatccaagctccagccaggtcgcagtcccaaatgccgacatcactgactccagggaccagggacatggagaaagctgtttatgatatctttaaccaggccctcttactagagctggtgtttgtgactggccaacaagatgtggctatgccaggggacatctgagtatgtgcccagtcatcttttttcacaggttgaagggagagaaaagattttgagttaaggtcattggctgctctactctgtcccctacctggtcacctagtgatagccccagtggagatactgtccatacaaggtcttcccagaggctggataccacagtaaaaggccaggccaggaggggtaggagactatggagatcttacctcctgataaatgtgctacaccccctaatctgagcccttcctttccgtgttccccaacaacctcatgcttacgtgatttttattcaaattaaaaattttcattgctacagaaatc

SEQ ID NO: 30753 - DNA, 1076 bp, Artificial Sequence
  derived and/or modified sequence
acattcgccgcagccacctcggccgtggcaggaaccgaaacccggagcggccgaagctcagcgctccgctggggcagagggtcgcggcggctgggaacgccgctccccgacgcaccggccgcccccagcgcagcgcgctccgcggggtgctgatctgcctcttctccaagaaactcaaccactagtgacaatgaccagcctcctgactactccttctccaagagaagaactgatgaccaccccaattttacagcccactgaggccctgtccccagaagatggagccagcacagcactcattgcagttgttatcaccgttgtcttcctcaccctgctctcggtcgtgatcttgatcttcttttacctgtacaagaacaaaggcagctacgtcacctatgaacctacagaaggtgagcccagtgccatcgtccagatggagagtgacttggccaagggcagcgagaaagaggaatatttcatctaatgactcccaggccccaaggagcttattcctggctccatcgctaacacgttgactgcttattatgggaaagttttctctgaagccagggagaagcattgattgatgtgggcaaatccaagctccagccaggtcgcagtcccaaatgccgacatcactgactccagggaccagggacatggagaaagctgtttatgatatctttaaccaggccctcttactagagctggtgtttgtgactggccaacaagatgtggctatgccaggggacatctgagtatgtgcccagtcatcttttttcacaggttgaagggagagaaaagattttgagttaaggtcattggctgctctactctgtcccctacctggtcacctagtgatagccccagtggagatactgtccatacaaggtcttcccagaggctggataccacagtaaaaggccaggccaggaggggtaggagactatggagatcttacctcctgataaatgtgctacaccccctaatctgagcccttcctttccgtgttccccaacaacctcatgcttacgtgatttttattcaaattaaaaattttcattgctacagaaatc

SEQ ID NO: 30754 - protein, 89 aa, Artificial Sequence
  derived and/or modified sequence
MNAKVVVVLVLVLTALCLSDGKPVSLSYRCPCRFFESHVARANVKHLKILNTPNCALQIVARLKNNNRQVCIDPKLKWIQEYLEKALNK

SEQ ID NO: 30755 - protein, 119 aa, Artificial Sequence
  derived and/or modified sequence
MNAKVVVVLVLVLTALCLSDGKPVSLSYRCPCRFFESHVARANVKHLKILNTPNCALQIVARLKNNNRQVCIDPKLKWIQEYLEKALNKGRREEKVGKKEKIGKKKRQKKRKAAQKRKN

SEQ ID NO: 30756 - protein, 90 aa, Artificial Sequence
  derived and/or modified sequence
MNAKVVVVLVLVLTALCLSDGKPVSLSYRCPCRFFESHVARANVKHLKILNTPNCALQIVARLKNNNRQVCIDPKLKWIQEYLEKALNNC

SEQ ID NO: 30757 - protein, 392 aa, Artificial Sequence
  derived and/or modified sequence
MMEDDGQPRTLYVGNLSRDVTEVLILQLFSQIGPCKSCKMITEQPDSRRVNSSVGFSVLQHTSNDPYCFVEFYEHRDAAAALAAMNGRKILGKEVKVNWATTPSSQKKDTSNHFHVFVGDLSPEITTEDIKSAFAPFGKISDARVVKDMATGKSKGYGFVSFYNKLDAENAIVHMGGQWLGGRQIRTNWATRKPPAPKSTQENNTKQLRFEDVVNQSSPKNCTVYCGGIASGLTDQLMRQTFSPFGQIMEIRVFPEKGYSFVRFSTHESAAHAIVSVNGTTIEGHVVKCYWGKESPDMTKNFQQVDYSQWGQWSQVYGNPQQYGQYMANGWQVPPYGVYGQPWNQQGFGVDQSPSAAWMGGFGAQPPQGQAPPPVIPPPNQAGYGMASYQTQ

SEQ ID NO: 30758 - DNA, 2187 bp, Artificial Sequence
  derived and/or modified sequence
ttgtcccgggatcgctccgtcgcacccaccatgatggaagacgacgggcagccccggactctatacgtaggtaacctttccagagatgtgacagaagtccttatacttcagttgttcagtcagattggaccctgtaaaagctgtaaaatgataacagagcaacccgatagcagaagggtcaactcttctgttggattttctgttttgcagcatacaagcaatgacccatattgctttgtggaattttatgaacacagagatgcagctgctgcattagctgctatgaatgggagaaaaattttgggaaaggaggtcaaagtaaactgggcaaccacaccaagtagccagaaaaaagatacttccaatcacttccatgtgtttgttggggatttgagtccagaaattacaacagaagatatcaaatcagcatttgccccctttggtaaaatatcggatgcccgggtagttaaagacatggcaactggaaaatccaaaggctatggttttgtatctttttataacaaactggatgcagaaaatgcgattgtgcatatgggcggtcagtggttgggtggtcgtcaaatccgaaccaattgggccactcgtaaaccacctgcacctaaaagtacacaagaaaacaacactaagcagttgagatttgaagatgtagtaaaccagtcaagtccaaaaaattgtactgtgtactgtggaggaattgcgtctgggttaacagatcagcttatgagacagacattctcaccatttggacaaattatggaaataagagttttcccagaaaagggctattcatttgtcagattttcaacccatgaaagtgcagcccatgccattgtttcggtgaacggtactacgattgaaggacatgtggttaaatgctattggggtaaagaatctcctgatatgactaaaaacttccaacaggttgactatagtcaatggggccaatggagccaagtgtatggaaacccacaacagtatggacagtatatggcaaatgggtggcaagtaccgccttatggagtatacgggcaaccatggaatcaacaaggatttggagtagatcaatcaccttctgctgcttggatgggtggatttggtgctcagcctccccaaggacaagctcctccccctgtaatacctcctcctaaccaagccggatatggtatggcaagttaccaaacacagtgagccgggactctaaaaaaaaattgtaattcatgataggcttcgatttcctgtgacactctgaagacatgaaagtagacatcggaaaatgaaaatatttattttaaaaattgaaatgtttggaacctttagcacagatttgctttggtgaaggacacgtgtcttctagttctgcctttttaagtttttgttcatgatggatatgaacatgatttttctttatgtacaaaaactaaaataaagtcaataaagacaattctgactacaaattttgatataataggaaaaatggctaatacattttgattcttagatactattccatttttatcttgctgttcagtattttaactcactgtgtttttaaaagagcaaaaaagggaggatcgtgaaaacctgggaatcacatataagttcatcctgaatcctgatactcccctccccttccctgaggtggaccacatttgaagtcagcagagaaaaagtgtgatattcagaagaaatgcgtgattttggagtcgctttggaggaaatattttctttctctatgcctaaagaaactgaagccagactgaagttttgcaccctaaaaaaggaacagcattgtttgagttacttgagcaaatgttggtggtccacgttaagacatatttttaaaacttccaaaagtgtcgattattaaaattgtagtattttacatttcattttggggggaaatccaagtatggtgtttgtattgaagtcagacagtcatacttgtgcttttacatgaagtttaaatgatacatattgtaaatattcaataactacagtgtttaaaaagcatgcttcaacatagaagtagcagcaatgtaattatttgaagtaacacttaacacactccgctgcattgaatgcagtggattgatcagaatgttaagactgacatttccaaggttggctactatgtaaaattaaaattacacaaattgtgcagaaaaa

SEQ ID NO: 30759 - DNA, 1179 bp, Artificial Sequence
  derived and/or modified sequence
atgatggaggacgacggccagcccagaaccctgtacgtgggcaacctgagcagagacgtgaccgaggtgctgatcctgcagctgttcagccagatcggcccctgcaagagctgcaagatgatcaccgagcagcccgacagcagaagagtgaacagcagcgtgggcttcagcgtgctgcagcacaccagcaacgacccctactgcttcgtggagttctacgagcacagagacgccgccgccgccctggccgccatgaacggcagaaagatcctgggcaaggaggtgaaggtgaactgggccaccacccccagcagccagaagaaggacaccagcaaccacttccacgtgttcgtgggcgacctgagccccgagatcaccaccgaggacatcaagagcgccttcgcccccttcggcaagatcagcgacgccagagtggtgaaggacatggccaccggcaagagcaagggctacggcttcgtgagcttctacaacaagctggacgccgagaacgccatcgtgcacatgggcggccagtggctgggcggcagacagatcagaaccaactgggccaccagaaagccccccgcccccaagagcacccaggagaacaacaccaagcagctgagattcgaggacgtggtgaaccagagcagccccaagaactgcaccgtgtactgcggcggcatcgccagcggcctgaccgaccagctgatgagacagaccttcagccccttcggccagatcatggagatcagagtgttccccgagaagggctacagcttcgtgagattcagcacccacgagagcgccgcccacgccatcgtgagcgtgaacggcaccaccatcgagggccacgtggtgaagtgctactggggcaaggagagccccgacatgaccaagaacttccagcaggtggactacagccagtggggccagtggagccaggtgtacggcaacccccagcagtacggccagtacatggccaacggctggcaggtgcccccctacggcgtgtacggccagccctggaaccagcagggcttcggcgtggaccagagccccagcgccgcctggatgggcggcttcggcgcccagcccccccagggccaggcccccccccccgtgatccccccccccaaccaggccggctacggcatggccagctaccagacccagtag

SEQ ID NO: 30760 - DNA, 1179 bp, Artificial Sequence
  derived and/or modified sequence
atgatggaagatgatggtcagcccagaacactgtacgtgggtaatctgagccgcgatgtgaccgaggtgttaatcctccagctgttcagccagataggtccatgtaagagttgcaagatgatcacagagcaaccagacagtcgaagggttaacagctcagtgggctttagcgtcctacagcatacaagcaatgacccctattgcttcgtggaattttatgagcatagagacgcagctgctgcactggcggccatgaatgggagaaagatcctggggaaggaagtgaaggtcaactgggccacgactccgagcagtcagaaaaaagatacatctaatcattttcacgtttttgtgggtgacctgtcaccggaaattactaccgaggatatcaagagcgccttcgcgccattcggcaaaatttcggacgcacgggttgttaaagatatggctaccggcaagtctaaagggtatggattcgtgtctttctacaacaaactggatgccgaaaacgcgatagtacatatgggagggcagtggttaggaggacgccagattcgcaccaactgggcgacacgcaaaccccctgcacccaagtctactcaggagaacaataccaaacaattgcggtttgaagatgttgtgaatcagagctctcctaaaaattgtacagtttattgcggtggcatagcttctggccttactgaccagcttatgcggcagaccttctctccttttggtcagatcatggagattagggttttccctgaaaagggttattctttcgtgaggtttagcacccacgagtccgcagcccatgctatcgtgagtgtgaacggcactaccatagaaggccatgtcgtcaaatgctattggggcaaggaatcccctgatatgaccaagaatttccagcaagtggattacagccagtggggacaatggagccaggtctacggaaatcctcagcagtatggccagtacatggcgaacggatggcaggttccaccgtatggtgtctatggccagccatggaaccaacagggtttcggtgtggaccagtcgccttcagcagcttggatgggcggcttcggcgctcagcccccccaggggcaggctccacccccagtgataccgccgcctaaccaagccggctacggaatggcatcttatcaaactcagtag

SEQ ID NO: 30761 - DNA, 1179 bp, Artificial Sequence
  derived and/or modified sequence
atgatggaggatgatggccagcccaggaccctgtatgtgggcaacctgagcagagatgtgacagaggtgctgatcctgcagctgttcagccagatcggcccctgcaagagctgcaagatgatcacagagcagcctgacagccggcgggtgaacagctctgtgggcttctctgtgctgcagcacaccagcaatgacccctactgctttgtggagttctatgagcacagagatgctgctgctgccctggccgccatgaatggaaggaagatcctgggcaaggaggtgaaggtgaactgggccaccacccccagcagccagaagaaggacaccagcaaccacttccacgtgtttgtgggggacctgagccctgagatcaccacagaggacatcaagagcgcctttgccccctttgggaagatcagtgatgcccgggtggtgaaggacatggccaccgggaagagcaagggctacggctttgtgtccttctacaacaagctggatgctgaaaatgccatcgtgcacatgggcggccagtggctgggcggccggcagatccgcaccaactgggccaccaggaagcccccagcccccaagagcacccaggagaacaacaccaagcagctgcgctttgaagatgtggtgaaccagagcagccccaagaactgcaccgtgtactgcggcggcatcgccagcggcctgacagaccagctgatgaggcagaccttcagccccttcggccagatcatggagatccgggtcttccctgagaagggctacagctttgtgcgcttcagcacccatgaatctgctgcccacgccatcgtgtctgtgaatggcaccaccatcgagggccacgtggtgaagtgctactggggcaaggagagcccagacatgaccaagaacttccagcaggtggactacagccagtggggccagtggagccaggtgtatggcaacccccagcagtatggccagtacatggccaacggctggcaggtgcccccctacggcgtgtatggccagccctggaaccagcagggcttcggcgtggaccagagccccagcgctgcctggatgggcggctttggagcccagcccccccagggccaggcccctcctcctgtgattcctccacccaaccaggccggctacggcatggccagctaccagacccagtag

SEQ ID NO: 30762 - DNA, 1179 bp, Artificial Sequence
  derived and/or modified sequence
atgatggaggacgacggccagccccggaccctgtacgtgggcaacctaagccgggatgtaacagaagtccttattttgcagcttttctcccaaatcggtccctgtaaatcatgtaagatgatcacagaacagccagactccagacgagttaatagctccgtgggcttttccgtgctgcagcatacctctaatgacccatactgcttcgtagagttctacgaacaccgcgatgcagcagccgcactggcggcaatgaatggcagaaagatccttggcaaagaagttaaagtgaattgggctaccacaccaagtagtcagaagaaggatacaagtaaccacttccacgtcttcgttggcgacctgtcccctgaaatcactactgaagacataaaaagcgccttcgcccctttcggaaagatcagtgacgccagggtcgtcaaagatatggctaccggcaagagcaaaggatatggtttcgttagtttctataacaagcttgacgccgaaaatgccatcgtccacatgggcgggcagtggctcggaggccgccagatacggacaaattgggcaacaagaaagccaccagcccccaagagtactcaagaaaacaatacaaagcagcttaggtttgaggacgtcgtgaaccaatcttcacctaagaattgcaccgtctactgcgggggaattgcatctggtctgacggatcagcttatgagacagacattttctcccttcgggcagattatggaaattcgcgttttccctgagaagggatacagctttgtgcggttttctacacatgagtcagcagcccatgcaatcgtgtcagtgaatgggacaactatagaaggtcacgttgtgaaatgttattggggtaaggaatcaccagatatgacaaaaaattttcagcaggttgattacagtcagtggggacagtggagccaagtatatggcaatcctcagcaatatgggcagtacatggctaatgggtggcaggtccctccctatggggtatacggccagccttggaaccagcaaggctttggagtggaccaatctccaagcgctgcctggatgggcgggttcggagcccagcctccacaggggcaggcacctcctccggtcatccccccacctaaccaggcagggtatggaatggctagctaccagactcagtag

SEQ ID NO: 30763 - DNA, 1179 bp, Artificial Sequence
  derived and/or modified sequence
atgatggaggatgatggccagccccgtacactgtacgtcggcaatctgtccagagacgttacggaggtcctgattcttcagttgttttctcagattggtccctgcaagagttgcaagatgatcacagagcagcctgattctaggagagttaattcaagcgtgggcttcagtgtgctgcaacacacctccaatgatccatactgtttcgttgaattctatgaacatagggatgcggcagcggctctggccgcaatgaacggcaggaagatcctgggcaaggaggtcaaagtcaactgggcgacaaccccttcatctcagaagaaagatactagcaatcatttccacgtgtttgtgggtgacctcagccctgaaatcacaacggaggatattaaaagtgcattcgctccgtttggaaaaatatctgatgctcgagttgtcaaggatatggcgactggaaagtccaaagggtatggtttcgtctcattttacaacaagcttgatgctgaaaacgccattgttcacatggggggacagtggctcggcggaagacagatccgcaccaactgggccactcggaaacctcctgctccaaaaagtacccaagaaaacaacactaagcagctacggtttgaggacgttgtaaaccagagttccccaaagaattgcacggtgtattgcggcggaattgcttcaggactgactgaccagttaatgagacagacatttagcccattcggacaaataatggagattagagtgtttcccgagaaaggttattcctttgtcagatttagcacccacgaatcagcagcacacgccattgtgtcggtcaatgggacaacaattgaaggccacgtcgtgaagtgttattggggaaaggaatctccagacatgaccaaaaattttcagcaggtcgattattcccagtgggggcagtggtcacaggtttacgggaatccccaacaatacggccaatacatggccaatggttggcaggtacctccttatggcgtgtatggacagccatggaatcagcaggggttcggggtggaccagagcccaagcgcagcttggatgggcggatttggggctcaaccccctcaggggcaggcgcctcctccagttataccacccccaaaccaagctggctacggaatggcaagctaccagacccagtag

SEQ ID NO: 30764 - protein, 128 aa, Artificial Sequence
  derived and/or modified sequence
MGFQKFSPFLALSILVLLQAGSLHAAPFRSALESSPADPATLSEDEARLLLAALVQNYVQMKASELEQEQEREGSRIIAQKRACDTATCVTHRLAGLLSRSGGVVKNNFVPTNVGSKAFGRRRRDLQA

SEQ ID NO: 30765 - DNA, 387 bp, Artificial Sequence
  derived and/or modified sequence
atggggtttcagaaattttctccctttttagccttgagcatccttgtcctgctccaggctggatcactacacgctgccccttttaggtcagccctcgagagttccccagctgaccctgctaccttatctgaggatgaggcgcgcctgcttctggccgccttggttcagaactacgtccaaatgaaagcttctgaactcgaacaggagcaagaaagagaaggctcacggatcatcgcacaaaagcgggcctgcgatactgctacttgcgtgacacacagactcgccggacttctctctcggtccggtggtgtggtgaagaacaactttgttcctactaacgtcggcagtaaggccttcggtcggaggaggcgagacttacaggcatag

SEQ ID NO: 30766 - DNA, 387 bp, Artificial Sequence
  derived and/or modified sequence
atgggcttccaaaagttttcccctttcctggcactgtcaatcctggtgcttctgcaggccggaagtctccatgctgctccctttcgtagcgcattagagtccagtcccgccgatcctgcaaccctgtctgaggacgaggctagactcctactggcagctctggtacaaaattatgtccaaatgaaggctagcgagctggaacaggaacaggaacgcgaggggtccagaattatcgctcagaaacgggcttgcgatacagccacctgtgttacccaccgtttggctggcctgctgtcaaggagtggaggcgtcgtgaagaataactttgtcccaaccaacgtcggcagcaaggcctttggacgcaggcgccgggacttacaggcctag

SEQ ID NO: 30767 - DNA, 387 bp, Artificial Sequence
  derived and/or modified sequence
atgggcttccagaagttcagccccttcctggccctgagcatcctggtgctgctgcaggccggcagcctgcatgctgcccccttccgcagcgccctggagagcagccctgctgaccctgccaccctgtctgaagatgaggcccggctgctgctggccgccctggtgcagaactacgtgcagatgaaggccagcgagctggagcaggagcaggagcgggagggcagccgcatcatcgcccagaagagggcctgtgacacagccacctgtgtgacccaccggctggccggcctgctgagccgctctggaggagtggtgaagaacaactttgtgcccaccaacgtgggcagcaaggcctttggaagaagaagaagagacctgcaggcctag

SEQ ID NO: 30768 - DNA, 387 bp, Artificial Sequence
  derived and/or modified sequence
atgggcttccagaagttcagccccttcctggccctgagcatcctggtgctcctccaggctggatccctgcacgcagcgccgttccggtcagctcttgagtcttcgcctgccgatcccgctaccctgtccgaggacgaagctcgtctgctgcttgctgcgctcgtgcaaaattatgttcaaatgaaggcctctgaactggagcaggagcaagagcgcgaagggtcccggattatcgctcagaaacgcgcgtgcgatactgccacgtgcgtgacccatcgactggccgggctgcttagccggtctggaggagtggtgaaaaacaattttgttccgaccaatgtcggtagtaaagcatttggccgcaggagaagagacctccaggcttag

SEQ ID NO: 30769 - DNA, 387 bp, Artificial Sequence
  derived and/or modified sequence
atgggcttccagaagttcagccccttcctggccctgagcatcctggtcctgctccaggccggctctctgcacgctgcacccttcaggagcgccctggaaagcagccctgctgatcccgccacactctctgaggatgaggcgcgcctgttgcttgccgcactcgtgcaaaattatgtccagatgaaggcatcagaactcgaacaggaacaagagagagaagggtccagaatcatagcacagaagagggcttgcgacaccgcaacatgcgtaactcatcgcctggctggtctgctcagcaggagcggcggcgtggtcaagaataatttcgtgcccacaaatgtcgggagtaaggcattcggcaggaggagacgagacctgcaggcatag

SEQ ID NO: 30770 - DNA, 387 bp, Artificial Sequence
  derived and/or modified sequence
atgggcttccagaagttctccccatttctggccctatcaatcctggtcctgcttcaggctggctccctgcacgccgcaccctttcgaagcgccttggagagtagccccgcagaccccgctactttatcagaggacgaggctcgcctactattagccgcattggtccagaattacgtgcagatgaaagcatctgaattagagcaggagcaagagagagagggcagccgcattatcgcgcaaaagcgagcctgtgataccgccacctgtgtgacccatcgcctggcaggactcctgtctcgctcaggcggtgtggtcaaaaacaattttgtgcccacaaacgtgggcagtaaagcttttggcaggagacggcgagacttgcaggcatag

SEQ ID NO: 30771 - DNA, 387 bp, Artificial Sequence
  derived and/or modified sequence
atgggcttccaaaaattctccccatttcttgccttgagcatcctggtcttgttgcaggcaggatcactgcacgctgcaccttttcgaagcgctttggagtcctctcctgctgatcccgctacgctaagtgaagacgaagctcggctgctattggccgcactcgtacagaactacgtgcaaatgaaggcaagcgagctcgagcaggaacaagagcgtgaaggctccagaatcatcgctcagaaacgcgcatgtgacacagcgacgtgtgttacgcaccgccttgccggactcctcagtcgatcgggaggagtggtcaagaacaattttgtccctactaatgtgggttcgaaggcattcggcagacgcaggagggacctgcaggcatag

SEQ ID NO: 30772 - DNA, 916 bp, Artificial Sequence
  derived and/or modified sequence
ccgccgctgccaccgcctctgatccaagccacctcccgccaggtgagccccgagatcctggctcagagaggtgtcatgggcttccaaaagttctcccccttcctggctctcagcatcttggtcctgttgcaggcaggcagcctccatgcagcaccattcaggtctgccctggagagcagcccagcagacccggccacgctcagtgaggacgaagcgcgcctcctgctggctgcactggtgcagaactatgtgcagatgaaggccagtgagctggagcaggagcaagagagagagggctccagaatcattgcccagaagagagcctgtgacactgccacctgtgtgactcatcggctggcaggcttgctgagcagatcagggggtgtggtgaagaacaactttgtgcccaccaatgtgggttccaaagcctttggcaggcgccgcagggaccttcaagcctgagcagctgaatgactcaagaaggtcacaataaagctgaactccttttaatgtgtaatgaaagcaatttgtaggaaaggctccatggaagacatacatataggcatccttcttgatactgaaaactatcttctttgtttgaaaggaactattgctaaatgcagaacaagctcattgcagttacctattgtgcatctttttaaatacttgattatgtaaccataaatctgacagcatgtctcattggcttatctggtagcaaatctaggccccgtcagccaccctattgacattggtggctctgctaaacctcagggggacatgaaatcactgcctcttgggcatctggggacacatggtaatgctgtgccttgacagaagtatttgtttaaagaaatgtcaatgctgtcatttgtgaactctatcaaaattaaaaatgtattttctatacccttca

SEQ ID NO: 30773 - DNA, 851 bp, Artificial Sequence
  derived and/or modified sequence
agaggtgtcatgggcttccaaaagttctcccccttcctggctctcagcatcttggtcctgttgcaggcaggcagcctccatgcagcaccattcaggtctgccctggagagcagcccagcagacccggccacgctcagtgaggacgaagcgcgcctcctgctggctgcactggtgcagaactatgtgcagatgaaggccagtgagctggagcaggagcaagagagagagggctccagaatcattgcccagaagagagcctgtgacactgccacctgtgtgactcatcggctggcaggcttgctgagcagatcagggggtgtggtgaagaacaactttgtgcccaccaatgtgggttccaaagcctttggcaggcgccgcagggaccttcaagcctgagcagctgaatgactcaagaaggtcacaataaagctgaactccttttaatgtgtaatgaaagcaatttgtaggaaaggctccatggaagacatacatataggcatccttcttgatactgaaaactatcttctttgtttgaaaggaactattgctaaatgcagaacaagctcattgcagttacctattgtgcatctttttaaatacttgattatgtaaccataaatctgacagcatgtctcattggcttatctggtagcaaatctaggccccgtcagccaccctattgacattggtggctctgctaaacctcagggggacatgaaatcactgcctcttgggcatctggggacacatggtaatgctgtgccttgacagaagtatttgtttaaagaaatgtcaatgctgtcatttgtgaactctatcaaaattaaaaatgtattttctatacccttcaa

SEQ ID NO: 30774 - DNA, 387 bp, Artificial Sequence
  derived and/or modified sequence
atgggcttccagaagttcagccccttcctggccctgagcatcctggtgctgctgcaggccggcagcctgcacgccgcccccttcagaagcgccctggagagcagccccgccgaccccgccaccctgagcgaggacgaggccagactgctgctggccgccctggtgcagaactacgtgcagatgaaggccagcgagctggagcaggagcaggagagagagggcagcagaatcatcgcccagaagagagcctgcgacaccgccacctgcgtgacccacagactggccggcctgctgagcagaagcggcggcgtggtgaagaacaacttcgtgcccaccaacgtgggcagcaaggccttcggcagaagaagaagagacctgcaggcctag

SEQ ID NO: 30775 - protein, 53 aa, Artificial Sequence
  derived and/or modified sequence
MAAAVPRAAFLSPLLPLLLGFLLLSAPHGGSGLHTKGALPLDTVTFYKIMVTS

SEQ ID NO: 30776 - DNA, 162 bp, Artificial Sequence
  derived and/or modified sequence
atggcagccgccgtgccaagggccgcctttcttagtccactgttgcctcttctactggggttcctcctgttgtccgctccgcatgggggcagcggtctccacaccaaaggagccctacctctggataccgtgaccttttataaaattatggttacctcctag

SEQ ID NO: 30777 - DNA, 162 bp, Artificial Sequence
  derived and/or modified sequence
atggctgctgctgtgccccgggccgccttcctgagccccctgctgcccctgctgctgggcttcctgctgctgagcgccccccacggcggcagcggcctgcacaccaagggggccctgcccctggacacagtgaccttctacaagatcatggtgaccagctag

SEQ ID NO: 30778 - DNA, 162 bp, Artificial Sequence
  derived and/or modified sequence
atggccgccgccgtgccccgggccgccttcctgagccccctgctgcctctccttcttggcttccttttgctcagtgctcctcacggcggatccggcctgcacaccaaaggagctctgccactggacactgtgaccttttataaaatcatggtcacctcgtag

SEQ ID NO: 30779 - DNA, 162 bp, Artificial Sequence
  derived and/or modified sequence
atggcagcagccgtgcctcgggcagctttcttatctcccctgcttccactgttgctgggtttcctgcttctgtccgccccacacggaggcagcggcctccacacaaagggggctctaccactggacactgtcacattttacaaaatcatggtcacatcatag

SEQ ID NO: 30780 - DNA, 162 bp, Artificial Sequence
  derived and/or modified sequence
atggccgccgccgtgcccagagccgccttcctgagccccctgctgcccctgctgctgggcttcctgctgctgagcgccccccacggcggcagcggcctgcacaccaagggcgccctgcccctggacaccgtgaccttctacaagatcatggtgaccagctag

SEQ ID NO: 30781 - protein, 523 aa, Artificial Sequence
  derived and/or modified sequence
MAAVAVAVREDSGSGMKAELPPGPGAVGREMTKEEKLQLRKEKKQQKKKRKEEKGAEPETGSAVSAAQCQVGPTRELPESGIQLGTPREKVPAGRSKAELRAERRAKQEAERALKQARKGEQGGPPPKASPSTAGETPSGVKRLPEYPQVDDLLLRRLVKKPERQQVPTRKDYGSKVSLFSHLPQYSRQNSLTQFMSIPSSVIHPAMVRLGLQYSQGLVSGSNARCIALLRALQQVIQDYTTPPNEELSRDLVNKLKPYMSFLTQCRPLSASMHNAIKFLNKEITSVGSSKREEEAKSELRAAIDRYVQEKIVLAAQAISRFAYQKISNGDVILVYGCSSLVSRILQEAWTEGRRFRVVVVDSRPWLEGRHTLRSLVHAGVPASYLLIPAASYVLPEVSKVLLGAHALLANGSVMSRVGTAQLALVARAHNVPVLVCCETYKFCERVQTDAFVSNELDDPDDLQCKRGEHVALANWQNHASLRLLNLVYDVTPPELVDLVITELGMIPCSSVPVVLRVKSSDQ

SEQ ID NO: 30782 - DNA, 1792 bp, Artificial Sequence
  derived and/or modified sequence
agtgcggggcggggcctcggggcccgtcggaaattgtagtccgattggggctgcgcgcttcgcttctgcggctcagcctccagcccaggtggcgctgtggaccctgcagccgcggagcgaggcagcggggcggctccgtgaccacggcgggcggagcctaggactgagggcgatggctgctgtggccgtggctgttcgcgaggactcgggatccgggatgaaggcggagcttccccctgggcctggggcagtggggagggaaatgaccaaagaagaaaagctgcagcttcggaaggaaaagaaacagcagaagaagaaacggaaggaagaaaagggggcagaaccagagactggctctgctgtatctgcagcccaatgtcaagtaggcccaaccagagaactgccagaatcgggcattcagttgggcactcctcgggagaaagttccagctggtcggagtaaggccgaacttcgggctgagcgtcgagccaagcaggaggccgagcgggccctgaaacaggcaagaaaaggggaacaaggaggaccacctcctaaggccagccccagcacagctggagaaaccccctcaggagtgaagcgtctccctgagtaccctcaggttgatgacctacttctgagaaggcttgttaaaaaaccagagcgtcaacaggttcctacacgaaaggattatggatccaaagtcagtctcttctctcacctaccccagtacagcagacaaaactctctgacccagtttatgagcatcccatcctctgtgatccacccagccatggtgcgactcggcctgcagtactcccagggcctggtcagtggctccaatgcccggtgtattgccctgcttcgtgccttgcagcaggtgattcaggattacacaacaccgcctaatgaagaactctccagggatctagtgaataaactaaaaccctacatgagcttcctgactcagtgccgtcccctgtcagcgagcatgcacaacgccatcaagttccttaacaaggaaatcaccagtgtgggcagttccaagcgggaagaggaggccaagtcagaacttcgagcagccattgatcggtatgtgcaagagaagattgtgctagcagctcaggcaatttcacgctttgcttaccagaagatcagtaatggagatgtgatcctggtatatggatgctcatctctggtatcacgaattcttcaggaggcttggacagagggccggcggtttcgggtggtagtggtggacagccggccatggctggaaggaaggcacacactacgttctctagtccatgctggtgtcccagcctcctacctgctgattcctgcagcctcctatgtgctcccagaggtttccaaggtgctattgggagctcatgcactcttggccaacgggtctgtgatgtcacgggtagggacagcacagttagccctggtggctcgagcccataatgtaccagtgctggtttgctgtgaaacatacaagttctgtgagcgtgtgcagactgatgcctttgtctctaatgagctagatgaccctgatgatctgcaatgtaagcggggagaacatgttgcgctggctaactggcagaaccacgcatccctacggttgttgaatctagtctatgatgtgactcccccagagcttgtggatctggtgatcacggagctggggatgatcccttgcagttctgtacctgttgttctacgagtcaagagcagtgaccagtgacgggggaaacacagggttaataaatgccatactccctaccctcagcaa

SEQ ID NO: 30783 - DNA, 1572 bp, Artificial Sequence
  derived and/or modified sequence
atggcagccgtggcagtggccgtacgggaagatagtggatccggcatgaaagccgaactcccccctgggcccggggcagtggggagggaaatgacaaaagaggagaagttacaactcagaaaagaaaaaaaacaacaaaagaagaaacgtaaagaggagaagggcgccgaacctgagaccgggagtgctgtgagtgccgctcagtgtcaggtggggcccactagggaactgcctgagtccggcattcagttaggtactccgcgagagaaagtgccggccggcagatccaaggctgagctgcgggccgagagaagagccaaacaagaggccgagcgggcactcaagcaggctagaaagggggagcaagggggtccccctcccaaagcaagccccagtaccgcaggcgagacaccatccggcgtgaagcggttacccgaatatccgcaggtcgacgaccttctactgcgcagactggtcaaaaaaccagagcgacagcaagttcctacacgtaaagactatggcagtaaggtcagcctgttctcgcatcttcctcagtattctagacaaaatagcctgacacaattcatgtctatccccagttccgtgatacatcccgccatggtgagactggggttgcagtacagtcaagggttagtgtccggaagcaacgcacgatgcattgctttactccgtgcattgcagcaggtgatacaggattacactaccccacctaacgaggagttgtccagggatctcgtcaataagctgaaaccctacatgtctttcctgacccaatgccgccccttgtctgcaagcatgcacaatgccattaagtttctgaataaggagattacgagtgtcggtagcagtaaacgcgaagaggaagccaagtccgaactgagagcagcaatcgaccgctacgtacaggaaaaaatcgttctggccgcacaggccatttctcgatttgcttaccagaagattagtaacggagatgtcatcttggtttacggatgctcttccttggtgagcagaattctgcaggaggcatggaccgagggcagaaggtttagagtggttgtggtggattcaagaccatggttagaggggcggcatacactcagatctctggtgcacgccggcgtgccagccagctatttattgattcctgccgcgtcatacgttctccccgaggtcagtaaagtcttgctcggcgcccacgcccttttggccaatggaagtgttatgagtcgcgtgggcactgctcagttggccttggtggcaagggctcataacgtccccgtgctcgtctgttgcgagacatacaaattttgcgagcgagtgcagacagatgctttcgtcagtaatgaactggatgatcctgacgacctgcagtgcaaaaggggagaacatgttgctttggccaattggcaaaaccacgcatcattgcggcttctcaacttggtgtacgatgtaacccctcctgaactggtggacttggtaatcaccgagctcggcatgatcccctgtagttccgtacccgtggtattgcgcgtgaaatctagcgaccagtag

SEQ ID NO: 30784 - DNA, 1572 bp, Artificial Sequence
  derived and/or modified sequence
atggctgctgtggccgtggccgtgcgggaggacagcggcagcggcatgaaggccgagctgcccccaggccctggagctgtgggccgggagatgaccaaggaggagaagctgcagctgaggaaggagaagaagcagcagaagaagaagaggaaggaggagaagggagctgagcctgagaccggcagcgctgtgtctgctgcccagtgccaggtgggccccacccgggagctgcctgagagcggcatccagctgggcaccccccgggagaaggtgcctgctggccgcagcaaggccgagctgcgggcagagcggcgggccaagcaggaggccgagcgggccctgaagcaggccaggaaaggagagcagggcggccccccacccaaggccagccccagcacagctggggagaccccatctggagtgaagaggctgcctgagtacccccaggtggatgacctgctgctgcggcggctggtgaagaagccagagcggcagcaggtgcccaccaggaaggactatggcagcaaggtgtccctcttcagccacctgccccagtacagccggcagaacagcctgacccagttcatgagcatccccagcagcgtcatccacccagccatggtgcggctgggcctgcagtacagccagggcctggtgtctggcagcaatgcccgctgcatcgccctgctgcgggccctgcagcaggtgatccaggactacaccaccccaccaaatgaggagctgagccgggacctggtgaacaagctgaagccctacatgtccttcctgacccagtgccggcccctgagcgcctccatgcacaatgccatcaagttcctgaacaaggagatcacctctgtgggcagcagcaagcgggaggaggaggccaagtctgagctgcgggccgccatcgacagatatgtgcaggagaagatcgtgctggccgcccaggccatcagcagatttgcctaccagaagatcagcaatggagatgtgatcctggtgtatggctgcagcagcctggtgagccgcatcctgcaggaggcctggacagagggccgccgcttccgggtggtggtggtggacagccggccctggctggagggccgccacaccctgcggagcctggtgcatgctggggtgcctgccagctacctgctgatcccagctgccagctatgtgctgcctgaggtgtccaaggtgctgctgggcgcccacgccctgctggccaatggatctgtgatgagccgggtgggcacagcccagctggccctggtggcccgggcccacaacgtgcctgtgctggtgtgctgtgagacctacaagttctgtgagcgggtgcagacagatgcctttgtgtccaatgagctggatgatcctgatgacctgcagtgcaagagaggagagcacgtggccctggccaactggcagaaccacgccagcctgcggctgctgaacctggtgtatgatgtgaccccacctgagctggtggacctggtgatcacagagctgggcatgatcccctgcagctctgtgcctgtggtgctgcgggtgaagagcagtgaccagtag

SEQ ID NO: 30785 - DNA, 1572 bp, Artificial Sequence
  derived and/or modified sequence
atggccgccgtggccgtggccgtgcgggaggacagcggcagcggcatgaaagctgaacttcctcctgggcccggagcggtgggaagggaaatgactaaagaggaaaagctgcagcttaggaaagagaagaaacagcagaagaaaaagcgcaaagaagagaagggggccgagcccgagacaggcagcgctgtgtcggctgcccagtgtcaggtgggccctactcgcgaactccccgaaagtggcatccaattggggactccacgcgaaaaggtgcccgctggtcgatcgaaagccgaattgagagcggaaaggagggcgaagcaggaggccgagagagcactgaaacaggcccggaaaggcgagcaaggaggccctcctcctaaagcctccccttctaccgcaggagagaccccgagcggagtgaagcgcctccccgaatatcctcaggtggacgacttactcttaagacgacttgtgaagaaacctgagaggcaacaggtccctacgcgtaaagactatggcagcaaagtttctctgttctcacatctgcctcagtacagccggcagaacagcctcactcagtttatgtccattccgtcatctgtgatccaccccgcgatggtgcggttagggctacagtatagccaggggctggtctctggctccaatgcaagatgcattgccctgcttcgggccctccagcaagtaatccaagattacaccacgcccccaaacgaagaactttcccgggatttggtaaataaactgaagccttacatgagttttctgacccagtgtcgtccgctgtctgccagtatgcataacgccataaaatttttgaataaagaaatcacctcagtgggatcaagcaaacgggaggaagaagccaagtcggagcttagagcagcaattgacaggtacgtgcaggagaagatcgtgctcgccgcccaggccatctcaagattcgcatatcagaaaatttcaaatggggacgtcatacttgtctacggatgttctagcttggtctcacgtattttgcaggaagcctggactgagggacgcagatttcgggtcgttgtggtcgatagcaggccatggctggagggtagacatacacttcggtctctggtgcatgcaggagtgccggcaagttacctcttgatcccggctgcctcttatgtgctccctgaggtgtccaaggtgcttctgggcgcacatgccttgcttgcaaatggctctgtgatgtccagagtggggaccgcccaacttgccctggtcgctcgcgctcacaacgtgcctgtcttggtctgctgcgagacatacaaattctgtgagcgcgtccaaactgatgcttttgtgtcaaatgaactcgatgatcccgacgatctccaatgtaagagaggagagcatgtcgcccttgcaaactggcagaaccacgcctccctgagattactaaatctcgtgtacgatgttacacctcccgagcttgtagatctcgtaatcacagaactggggatgatcccctgttcgtccgtgcccgtggtcctccgcgttaaatcatccgaccagtag

SEQ ID NO: 30786 - DNA, 1572 bp, Artificial Sequence
  derived and/or modified sequence
atggctgccgtagctgtggctgtgagagaggattctggctctgggatgaaagcagagctcccgccaggtcctggagccgttggtagagaaatgaccaaggaagagaaactccagctgcgcaaggagaaaaagcagcagaagaaaaaacgcaaagaggaaaaaggggctgaacctgagaccggctcagctgtttccgccgcacagtgccaggtgggtcccacacgtgaacttcccgagtctggtatccaactgggaacacccagggaaaaggtacccgctgggaggtccaaagctgagcttagagcagaacgacgtgccaaacaggaggcagagcgggctctgaaacaggcccgtaagggtgaacagggaggcccacctccgaaggcctcccccagcacagctggtgagaccccttctggggtgaaacgcttgccagagtatccccaagtagacgacttattgttaagacgcctggtaaagaaacccgagagacagcaggtcccaacccggaaggattacgggagcaaagtgtctttatttagccacctcccgcagtacagtcgacagaactcccttacacagtttatgtctatccccagctcggtgatccacccggcaatggttcgcctgggactgcagtactctcagggattggtgtctgggtcaaacgccaggtgcatcgccctgctacgcgcactgcagcaggtgatccaggactatactacaccacccaatgaggaattgtcaagggatttggtaaataagcttaagccatacatgtccttcctcacccagtgcagacccctctccgcctcgatgcataatgcaatcaaatttttaaataaggaaataacatctgtgggttcatccaaacgcgaggaagaagccaagtctgagctccgcgcagccatcgataggtacgtgcaggagaagatcgtcttagctgctcaggccatctcccgattcgcataccagaaaatctccaacggagacgtaattctggtttacgggtgtagcagccttgtgtctaggattctacaggaagcatggaccgagggacgaagatttagagtggttgttgtagactcacggccttggttggagggtcgacacacactcagatcattagttcatgctggagtgcccgcatcatatctcctaattccagccgcatcttacgtattaccagaagtcagcaaggtcttactcggggcacatgctctactcgcgaatggatcagtcatgtcgcgggtggggacagcccagctggcactggtggcccgagctcataacgtaccagtgctggtctgctgtgagacttataaattttgtgagcgcgttcagacagatgcattcgttagtaacgaactggacgacccagatgacctgcaatgtaaacggggtgagcacgtagctctggctaattggcaaaatcacgcatcactgagacttctgaatttggtgtacgacgtgacacctcccgaactagtcgatctagtgattactgagctaggcatgatcccatgtagttcagtccccgttgtgttgagggttaaatctagcgatcagtag

SEQ ID NO: 30787 - DNA, 1572 bp, Artificial Sequence
  derived and/or modified sequence
atggccgccgtggccgtggccgtgagagaggacagcggcagcggcatgaaggccgagctgccccccggccccggcgccgtgggcagagagatgaccaaggaggagaagctgcagctgagaaaggagaagaagcagcagaagaagaagagaaaggaggagaagggcgccgagcccgagaccggcagcgccgtgagcgccgcccagtgccaggtgggccccaccagagagctgcccgagagcggcatccagctgggcacccccagagagaaggtgcccgccggcagaagcaaggccgagctgagagccgagagaagagccaagcaggaggccgagagagccctgaagcaggccagaaagggcgagcagggcggccccccccccaaggccagccccagcaccgccggcgagacccccagcggcgtgaagagactgcccgagtacccccaggtggacgacctgctgctgagaagactggtgaagaagcccgagagacagcaggtgcccaccagaaaggactacggcagcaaggtgagcctgttcagccacctgccccagtacagcagacagaacagcctgacccagttcatgagcatccccagcagcgtgatccaccccgccatggtgagactgggcctgcagtacagccagggcctggtgagcggcagcaacgccagatgcatcgccctgctgagagccctgcagcaggtgatccaggactacaccaccccccccaacgaggagctgagcagagacctggtgaacaagctgaagccctacatgagcttcctgacccagtgcagacccctgagcgccagcatgcacaacgccatcaagttcctgaacaaggagatcaccagcgtgggcagcagcaagagagaggaggaggccaagagcgagctgagagccgccatcgacagatacgtgcaggagaagatcgtgctggccgcccaggccatcagcagattcgcctaccagaagatcagcaacggcgacgtgatcctggtgtacggctgcagcagcctggtgagcagaatcctgcaggaggcctggaccgagggcagaagattcagagtggtggtggtggacagcagaccctggctggagggcagacacaccctgagaagcctggtgcacgccggcgtgcccgccagctacctgctgatccccgccgccagctacgtgctgcccgaggtgagcaaggtgctgctgggcgcccacgccctgctggccaacggcagcgtgatgagcagagtgggcaccgcccagctggccctggtggccagagcccacaacgtgcccgtgctggtgtgctgcgagacctacaagttctgcgagagagtgcagaccgacgccttcgtgagcaacgagctggacgaccccgacgacctgcagtgcaagagaggcgagcacgtggccctggccaactggcagaaccacgccagcctgagactgctgaacctggtgtacgacgtgaccccccccgagctggtggacctggtgatcaccgagctgggcatgatcccctgcagcagcgtgcccgtggtgctgagagtgaagagcagcgaccagtag

SEQ ID NO: 30788 - protein, 307 aa, Artificial Sequence
  derived and/or modified sequence
MPFMRKILSNMIDSEAHEKRPPILTSSKQDISPHITNVGEMKHYLCGCCAAFNNVAITYPIQKVLFRQQLYGIKTRDAVLQLRRDGFRNLYRGILPPLMQKTTTLALMFGLYEDLSCLLRKHVRAPEFATHGVAAVLAGTAEAIFTPLERVQTLLQNHKHHDKFTNTYQAFKALKCHGIGEYYRGLVPILFRNGLSNVLFFGLRGPIKEHLPTATTHSAHLVNDFIGGGLLGAMLGFLCFPINVVKTRLQSQIGGEFQSFPKVFQKIWLERDRKLINLFRGAHLNYHRSLISWGIINATYEFLLKFI

SEQ ID NO: 30789 - protein, 297 aa, Artificial Sequence
  derived and/or modified sequence
MIDSEAHEKRPPILTSSKQDISPHITNVGEMKHYLCGCCAAFNNVAITYPIQKVLFRQQLYGIKTRDAVLQLRRDGFRNLYRGILPPLMQKTTTLALMFGLYEDLSCLLRKHVRAPEFATHGVAAVLAGTAEAIFTPLERVQTLLQNHKHHDKFTNTYQAFKALKCHGIGEYYRGLVPILFRNGLSNVLFFGLRGPIKEHLPTATTHSAHLVNDFIGGGLLGAMLGFLCFPINVVKTRLQSQIGGEFQSFPKVFQKIWLERDRKLINLFRGAHLNYHRSLISWGIINATYEFLLKFI

SEQ ID NO: 30790 - DNA, 924 bp, Artificial Sequence
  derived and/or modified sequence
atgcccttcatgagaaagatcctgagcaacatgatcgacagcgaggcccacgagaagagaccccccatcctgaccagcagcaagcaggacatcagcccccacatcaccaacgtgggcgagatgaagcactacctgtgcggctgctgcgccgccttcaacaacgtggccatcacctaccccatccagaaggtgctgttcagacagcagctgtacggcatcaagaccagagacgccgtgctgcagctgagaagagacggcttcagaaacctgtacagaggcatcctgccccccctgatgcagaagaccaccaccctggccctgatgttcggcctgtacgaggacctgagctgcctgctgagaaagcacgtgagagcccccgagttcgccacccacggcgtggccgccgtgctggccggcaccgccgaggccatcttcacccccctggagagagtgcagaccctgctgcagaaccacaagcaccacgacaagttcaccaacacctaccaggccttcaaggccctgaagtgccacggcatcggcgagtactacagaggcctggtgcccatcctgttcagaaacggcctgagcaacgtgctgttcttcggcctgagaggccccatcaaggagcacctgcccaccgccaccacccacagcgcccacctggtgaacgacttcatcggcggcggcctgctgggcgccatgctgggcttcctgtgcttccccatcaacgtggtgaagaccagactgcagagccagatcggcggcgagttccagagcttccccaaggtgttccagaagatctggctggagagagacagaaagctgatcaacctgttcagaggcgcccacctgaactaccacagaagcctgatcagctggggcatcatcaacgccacctacgagttcctgctgaagttcatctag

SEQ ID NO: 30791 - DNA, 894 bp, Artificial Sequence
  derived and/or modified sequence
atgatcgacagcgaggcccacgagaagagaccccccatcctgaccagcagcaagcaggacatcagcccccacatcaccaacgtgggcgagatgaagcactacctgtgcggctgctgcgccgccttcaacaacgtggccatcacctaccccatccagaaggtgctgttcagacagcagctgtacggcatcaagaccagagacgccgtgctgcagctgagaagagacggcttcagaaacctgtacagaggcatcctgccccccctgatgcagaagaccaccaccctggccctgatgttcggcctgtacgaggacctgagctgcctgctgagaaagcacgtgagagcccccgagttcgccacccacggcgtggccgccgtgctggccggcaccgccgaggccatcttcacccccctggagagagtgcagaccctgctgcagaaccacaagcaccacgacaagttcaccaacacctaccaggccttcaaggccctgaagtgccacggcatcggcgagtactacagaggcctggtgcccatcctgttcagaaacggcctgagcaacgtgctgttcttcggcctgagaggccccatcaaggagcacctgcccaccgccaccacccacagcgcccacctggtgaacgacttcatcggcggcggcctgctgggcgccatgctgggcttcctgtgcttccccatcaacgtggtgaagaccagactgcagagccagatcggcggcgagttccagagcttccccaaggtgttccagaagatctggctggagagagacagaaagctgatcaacctgttcagaggcgcccacctgaactaccacagaagcctgatcagctggggcatcatcaacgccacctacgagttcctgctgaagttcatctag

SEQ ID NO: 30792 - DNA, 924 bp, Artificial Sequence
  derived and/or modified sequence
atgcccttcatgcgcaagatcctgtctaacatgatagactctgaggcacacgagaagcgacccccaattttgacctctagcaagcaggatattagcccacatatcacaaatgtgggcgaaatgaaacactacctctgcgggtgctgcgccgcattcaacaacgtcgcaatcacgtatccaattcagaaggtgctgttccggcagcagttgtacgggattaagacgcgggatgctgtcctccaacttagaagggacgggttcaggaacctgtataggggtattctgccacctctaatgcaaaagacaacaactctggctttgatgttcgggttgtacgaggacctgagttgtctcctgagaaagcacgttcgggccccagagttcgctacacacggtgtggcagcggtcctggccgggacagcagaagccatattcactcccctcgaaagagtgcagactttgctgcagaatcataagcaccacgacaaatttaccaacacgtaccaggcctttaaagccttaaaatgtcatggcattggagagtattaccgcgggctcgtgccgattctattccgcaatgggctcagcaacgttctgtttttcgggcttaggggtcctattaaggagcatcttccgactgccactacccacagtgctcacctggtaaatgattttatcggcgggggtttattaggcgcaatgttgggctttctctgctttccaatcaatgtcgtgaaaacgagactgcagagtcaaatagggggtgagtttcaaagctttccaaaagtgtttcaaaagatttggctggaacgcgatagaaaattgatcaatttgttcaggggcgcccacttgaactatcacagatcactgatatcttggggcatcattaacgccacgtatgagtttctgctgaagttcatttag

SEQ ID NO: 30793 - DNA, 894 bp, Artificial Sequence
  derived and/or modified sequence
atgatagacagtgaagcccacgaaaagcgccctcctattctcaccagcagcaaacaagacatttcgccacatattaccaatgtgggcgaaatgaaacactacttatgtggttgttgtgctgccttcaacaatgtcgccattacgtatcccatccagaaggtgttgttccggcaacagctgtatggcatcaagacaagagacgcagttcttcagttgcgaagggatggctttagaaacctctacagagggattctccctccccttatgcagaagacaactaccttagcactgatgtttggactgtatgaggacttatcatgtctcctgcgcaaacatgtccgcgcgccagagttcgctacccatggcgtggcagccgttttagccggcactgccgaagcaattttcactcctctagaaagagtgcagaccctcctacagaaccacaagcatcacgacaagttcaccaatacttaccaggctttcaaagccctaaagtgtcacggcatcggtgaatactataggggcctggtacctatcctctttcgcaatgggctgtccaacgtcttatttttcggcctgcggggcccaatcaaggaacatcttccaacggcgactacgcattcggctcatcttgtgaatgactttataggtggcggtctgttgggagccatgctgggttttctctgctttcccatcaacgtggttaagacacgccttcagtcgcagatcggtggcgagttccagtcgtttcctaaggtatttcagaaaatttggctggaaagagacaggaagctcatcaatttattccgaggcgcacaccttaattatcaccgctcactgatctcctgggggatcatcaatgccacctatgaatttcttctgaagttcatctag

SEQ ID NO: 30794 - DNA, 894 bp, Artificial Sequence
  derived and/or modified sequence
atgatagatagcgaagcgcatgagaagaggccgccaattctcactagctcgaagcaggatatttctccgcacattacaaatgttggagagatgaaacattacctgtgcggatgctgcgctgccttcaataatgttgcgattacgtacccaattcagaaggtcctatttcgacagcagctctacggaatcaagaccagggacgccgttctacaactgcgcagagatggctttaggaatctgtaccggggtatcctgccacctctcatgcaaaaaacgactactcttgctctcatgtttggattatacgaggatctgtcttgcctgcttcgcaagcatgtcagggctccggagttcgcaacgcacggggtcgcagccgttctcgccggtactgctgaggccatctttacccccctggagcgagtgcagactttgctgcagaaccacaagcaccatgataagtttacaaacacatatcaagcgtttaaagccttaaagtgccatggaatcggtgagtattaccggggccttgtaccaatactcttccgcaacgggctgtcaaatgttcttttttttgggctgcgggggcccattaaggagcatcttcctaccgctacaactcactcggctcacctcgtaaacgatttcattggaggaggcctcctgggcgccatgctcggatttctgtgttttcccattaacgtcgtgaaaacacgcctgcagtcacagataggtggggagttccagtcttttcccaaggtctttcaaaagatatggctggaaagggacagaaagctgattaatctgtttcgtggggctcacttaaattaccacaggagcctcatttcctggggcattatcaacgccacctatgagttcctcctcaagtttatatag

SEQ ID NO: 30795 - DNA, 924 bp, Artificial Sequence
  derived and/or modified sequence
atgcccttcatgaggaagatcctgagcaacatgattgacagcgaggcccacgagaagaggcctcccatcctgaccagcagcaagcaggacatcagcccccacatcaccaacgtgggggagatgaagcactacctgtgtggctgctgtgccgccttcaacaacgtggccatcacctaccccatccagaaggtgctcttccggcagcagctgtatggcatcaagaccagagatgctgtgctgcagctgcggagagatggcttcaggaacctgtaccggggcatcctgccccccctgatgcagaagaccaccaccctggccctgatgtttggcctgtatgaggacctgagctgcctgctgaggaagcacgtgcgggcccctgagtttgccacccatggagtggccgctgtgctggccggcacagctgaggccatcttcacccccctggagcgggtgcagaccctgctgcagaaccacaagcaccacgacaagttcaccaacacctaccaggccttcaaggccctgaagtgccacggcattggagagtactaccggggcctggtgcccatcctcttcagaaatggcctgagcaatgtgctcttcttcggcctgcggggccccatcaaggagcacctgcccacagccaccacccacagcgcccacctggtgaatgacttcatcggcggcggcctgctgggcgccatgctgggcttcctgtgcttccccatcaacgtggtgaagacccggctgcagagccagattggaggagagttccagagcttccccaaggtgttccagaagatctggctggagcgggacaggaagctgatcaacctcttccggggggcccacctgaactaccacaggagcctcatctcctggggcatcatcaatgccacctatgagttcctgctgaagttcatctag

SEQ ID NO: 30796 - DNA, 894 bp, Artificial Sequence
  derived and/or modified sequence
atgattgacagcgaggcccacgagaagaggcctcccatcctgaccagcagcaagcaggacatcagcccccacatcaccaacgtgggggagatgaagcactacctgtgtggctgctgtgccgccttcaacaacgtggccatcacctaccccatccagaaggtgctcttccggcagcagctgtatggcatcaagaccagagatgctgtgctgcagctgcggagagatggcttcaggaacctgtaccggggcatcctgccccccctgatgcagaagaccaccaccctggccctgatgtttggcctgtatgaggacctgagctgcctgctgaggaagcacgtgcgggcccctgagtttgccacccatggagtggccgctgtgctggccggcacagctgaggccatcttcacccccctggagcgggtgcagaccctgctgcagaaccacaagcaccacgacaagttcaccaacacctaccaggccttcaaggccctgaagtgccacggcattggagagtactaccggggcctggtgcccatcctcttcagaaatggcctgagcaatgtgctcttcttcggcctgcggggccccatcaaggagcacctgcccacagccaccacccacagcgcccacctggtgaatgacttcatcggcggcggcctgctgggcgccatgctgggcttcctgtgcttccccatcaacgtggtgaagacccggctgcagagccagattggaggagagttccagagcttccccaaggtgttccagaagatctggctggagcgggacaggaagctgatcaacctcttccggggggcccacctgaactaccacaggagcctcatctcctggggcatcatcaatgccacctatgagttcctgctgaagttcatctag

SEQ ID NO: 30797 - DNA, 1319 bp, Artificial Sequence
  derived and/or modified sequence
gcagtcctgcggggcgccggcggcgatgggttggggaaatggacgcctggagaacggaaatccagttatcaaaatggactcgggaagagagaacctaacagaacaataacaatggaagaaattgggaacattatcacaaagctatcatcctgccaaactccaggctcagatgatgtcacaggttaaaaaatgcccttcatgagaaagatcttaagcaacatgatagattcagaagctcatgaaaagaggccaccaatacttacatcttcaaaacaagatatatcacctcatattacaaatgttggtgaaatgaagcattacttgtgtggctgctgtgcagccttcaacaacgtcgcaatcacatatcccattcagaaggtcctctttcggcaacagctgtatggcatcaaaacccgggatgcagtacttcagttgagaagggatggatttcgaaatttgtatcgtggaatccttcccccattgatgcagaagacaactacgcttgcacttatgtttggtctgtatgaggatttatcctgccttctccggaagcatgtccgtgctccagagtttgcaacccatggcgtggcggcagtgcttgcagggacagcagaagcaattttcactccactggaaagagttcagacattgcttcaaaaccacaagcatcatgacaaatttaccaacacttatcaggctttcaaggcactgaaatgtcatggaattggagagtattatcgaggcttggtgcccattcttttccggaatggactcagcaatgtcttgtttttcggccttcgaggtcccattaaggagcatctgcctaccgcaacgactcacagtgctcatttggtcaatgattttatcggtggaggtctattgggtgccatgttgggattcttgtgttttccaattaatgttgtaaaaactcgcctacagtctcagattggtggggaatttcagtctttccccaaggttttccaaaaaatctggctggaacgggacagaaaactgataaatcttttcagaggtgcccatctgaattaccatcggtccctcatctcttggggcataatcaatgcaacttatgagttcttgttaaaatttatatgaaaaaaaaccatcagttaagtgccatttatcaactgaatagaccttctaagaagaatgcagtttggcctctttcttaattggccaaatacaagttcgtgtcataactccaggccacagtgagttacgggcaaagctgttttccttaagcatcaacaaaacagaataaaaggttccaataggaaaatgtaagggtttttttttgtttt

SEQ ID NO: 30798 - DNA, 894 bp, Artificial Sequence
  derived and/or modified sequence
atgatagattcagaagctcatgaaaagaggccaccaatacttacatcttcaaaacaagatatatcacctcatattacaaatgttggtgaaatgaagcattacttgtgtggctgctgtgcagccttcaacaacgtcgcaatcacatatcccattcagaaggtcctctttcggcaacagctgtatggcatcaaaacccgggatgcagtacttcagttgagaagggatggatttcgaaatttgtatcgtggaatccttcccccattgatgcagaagacaactacgcttgcacttatgtttggtctgtatgaggatttatcctgccttctccggaagcatgtccgtgctccagagtttgcaacccatggcgtggcggcagtgcttgcagggacagcagaagcaattttcactccactggaaagagttcagacattgcttcaaaaccacaagcatcatgacaaatttaccaacacttatcaggctttcaaggcactgaaatgtcatggaattggagagtattatcgaggcttggtgcccattcttttccggaatggactcagcaatgtcttgtttttcggccttcgaggtcccattaaggagcatctgcctaccgcaacgactcacagtgctcatttggtcaatgattttatcggtggaggtctattgggtgccatgttgggattcttgtgttttccaattaatgttgtaaaaactcgcctacagtctcagattggtggggaatttcagtctttccccaaggttttccaaaaaatctggctggaacgggacagaaaactgataaatcttttcagaggtgcccatctgaattaccatcggtccctcatctcttggggcataatcaatgcaacttatgagttcttgttaaaatttatatga

SEQ ID NO: 30799 - DNA, 924 bp, Artificial Sequence
  derived and/or modified sequence
atgcccttcatgcggaagatcctgagcaacatgatcgacagcgaggcacacgaaaagaggccgccaatcctgacatcctccaaacaggatataagcccccacatcacgaatgttggtgagatgaaacactatctttgcggctgctgtgcagccttcaataacgttgccattacgtatcctattcaaaaggttctgtttcgccagcagttatacggtatcaagacacgtgacgccgttctgcagttaaggcgcgacggctttaggaatctttacagggggatactgccacccctcatgcaaaagactaccacactcgcgctcatgtttggactgtatgaggatctgtcctgtcttttgaggaaacatgtcagggcaccagaatttgcaacacatggcgtagccgcggtgttggctggcaccgcggaagctatttttaccccactagaacgagtccagacattgctgcagaatcataaacaccacgataaatttactaacacctaccaggcctttaaggccctcaaatgtcacggaattggagaatactatcgaggacttgtacccattctcttccggaacggcttgtccaatgtgctcttttttggacttagaggaccaattaaggagcacctgcccaccgcaaccacccatagcgctcatctcgtgaatgatttcatcggtggtggactgctgggcgctatgttaggctttctgtgtttcccgatcaacgttgtcaagacacgcctgcagtctcagatcggtggagaattccagtccttcccaaaagtttttcaaaaaatctggctcgaacgcgaccgaaagcttatcaacctgttccggggggcacacctgaactaccatcgcagtctgatctcgtggggaataattaacgccacatatgaattcctgcttaagttcatttag

SEQ ID NO: 30800 - DNA, 894 bp, Artificial Sequence
  derived and/or modified sequence
atgatcgacagcgaggcccacgagaagcggccccccatcctgacctcctccaaacaagacatctccccccacatcaccaacgtgggcgaaatgaaacactacctgtgcgggtgctgtgctgctttcaataacgtggcaattacttatcccatacagaaagtactgttccgccagcagttatatggcattaagactagagacgctgtacttcagttgcgccgcgacggctttagaaacttgtatcgcgggatcctccctcctctcatgcagaagactacaactcttgccctcatgtttggcctgtacgaggacctgtcatgtctgttacgcaaacatgtcagagctcctgaattcgccacacacggcgtcgcagcagtactggcagggaccgccgaggccatcttcacccctcttgaaagagttcagaccctgctgcaaaatcacaagcaccatgataagttcaccaacacataccaagccttcaaagctctgaaatgccacgggattggcgaatactataggggtctggttccaatcctgttccgtaacgggctgtccaacgtgctattttttggtctgcgggggccaatcaaagagcacctgccgacggctaccactcatagcgcccacctggtcaacgatttcattgggggagggttactgggtgctatgttgggttttttgtgtttccctataaacgtagttaagacccgcttacagtcacagatcgggggtgaatttcagtcatttccaaaggttttccagaagatatggcttgaaagagaccggaagttaatcaaccttttcaggggagcacatctcaactatcaccggagcctcatcagttggggaattattaacgcaacttacgaattcctcttaaagttcatttag

SEQ ID NO: 30801 - DNA, 894 bp, Artificial Sequence
  derived and/or modified sequence
atgatcgacagcgaggcccacgagaagcggccccccatcctgacctcttccaagcaggatattagtccacatattaccaacgtcggagaaatgaaacactatctgtgcggatgctgcgccgcttttaacaatgtagccatcacttaccccattcagaaggttttgtttcgccaacagctttacgggattaaaacacgtgacgctgtcctgcagctgcgcagggacgggtttcgaaatttgtacagagggatccttccgccgctgatgcaaaaaaccaccaccctggcacttatgttcggcctctatgaggatttatcatgtctgcttaggaagcacgtgcgcgcacccgagttcgccacccatggggtggctgcagtactggccgggactgccgaggccatcttcacccccttagagagagtccagaccttgctgcagaatcataagcatcatgacaagttcactaatacctatcaagccttcaaggccctgaagtgtcacggaatcggggaatactatagaggtctcgtgcccatcctatttcgtaatggattgtcaaatgtcctgttctttggtctcagagggcctattaaagagcatctgccaaccgcaaccacccatagcgcacacctggtgaacgactttatcggtggcggactgctgggcgctatgctcggcttcttgtgctttcctatcaacgtcgttaagacgcgcttgcaaagccagatcggcggagaattccagtcttttccaaaagtctttcaaaagatttggctggagcgggaccgcaaactcatcaatcttttcaggggcgcccacctcaactaccatcgcagcctcatcagttgggggattatcaacgctacctatgagtttctactcaagtttatctag

SEQ ID NO: 30802 - DNA, 924 bp, Artificial Sequence
  derived and/or modified sequence
atgcctttcatgaggaagattctgtctaacatgatcgactccgaggcccatgaaaaacggcctcccattcttacttcatcaaaacaggacatttccccacatattacaaatgtgggggaaatgaagcactacttgtgtggctgttgcgccgcttttaacaatgtggccattacatatccaatacagaaagttttattcagacagcagctgtacggaattaaaacaagagacgcagtgctccaacttcggagagacggctttagaaacctatatcgaggcattctgcctcctttgatgcagaagactacaacgctggcgctcatgtttggtctctatgaagacctttcatgcctgctacgtaagcacgtaagggctccagaattcgccactcatggcgtcgcagccgtgttagctgggactgcagaggccatctttactccattggaaagagtgcaaaccctgctccagaaccacaagcatcacgacaaattcacgaacacataccaagccttcaaagcgctcaagtgccatggaatcggcgagtattatcgcggtctggtcccaatcctgttcagaaacggcttatctaacgtactgttcttcggacttaggggccctatcaaggaacatctgcccacggcaaccactcattcggcacacctggtgaacgatttcattgggggtggattactgggagccatgttagggttcctctgtttccctataaacgtagtcaagacgcggctgcagagtcagatcggaggggaattccagtcttttccaaaggtctttcagaagatctggctggagagggaccggaaactaataaacctctttaggggtgcgcatctgaattatcaccgcagtctgatcagctgggggattatcaatgccacctatgagttcctcctcaagttcatatag

SEQ ID NO: 30803 - DNA, 894 bp, Artificial Sequence
  derived and/or modified sequence
atgattgatagtgaggcccatgagaaaagacccccaatacttacaagctcaaagcaggacattagtcctcacataaccaacgtgggcgaaatgaagcactacctgtgcggctgctgtgctgcatttaacaacgtcgccattacataccccatacagaaggtattattcaggcagcaactgtacggcatcaaaacacgggacgctgttcttcaactgcgcagagatggattccgaaatctgtaccgcggtatcctcccacccctgatgcaaaagactaccactttggccctcatgtttggactttacgaggacctgagttgtctgctgcgtaagcacgtcagagccccagagtttgcgacccatggtgtggcggctgtcttggcaggcactgctgaggccatcttcacacctctggagcgtgtccaaactctcctgcaaaaccacaagcaccacgataagttcacaaatacttatcaggcgttcaaggcattgaaatgtcacgggataggggagtactacaggggtctggtccccatcctgttcagaaacggcctgtcaaacgtgttattcttcggcctgaggggtccaatcaaggaacatcttcccacagctacaactcactctgcgcatttagtgaacgattttattggtggaggactcctcggcgctatgcttggcttcttgtgtttccctatcaatgtggttaagacccggctgcaatcccaaattggaggcgaattccagtcatttcccaaagtattccaaaagatttggttggaaagagatcggaaattaattaacctgtttcgaggggctcacctcaattaccataggtccctaatttcttggggcattatcaacgccacctatgagtttttactgaaattcatttag

SEQ ID NO: 30804 - DNA, 894 bp, Artificial Sequence
  derived and/or modified sequence
atgatcgattcggaagctcatgaaaaaagaccccctattctcactagctcaaagcaggacatctcaccgcacatcaccaacgtcggcgagatgaaacattatctttgcggatgttgtgccgctttcaataacgttgccatcacctaccccatccaaaaagtgctattccggcagcaactgtatgggataaagacaagagatgccgttctgcaattgcgacgcgacggctttagaaatctttatagaggcatattacccccactgatgcagaaaacgaccaccttagccttgatgtttgggctgtatgaggacttatcctgtttgcttcgtaaacacgtgagagccccagaattcgccactcacggagtggctgcggtgctggcgggtactgctgaggcaatcttcactccactggagcgggtgcaaactctactccagaatcacaagcaccatgacaagtttactaatacttatcaggcgttcaaggcactaaagtgtcacggaatcggcgaatactacagggggctggtcccgattctgttccgcaacggtctgagtaatgtcctgttctttggtctccggggtccaatcaaggagcacctgccaacggcaaccacgcattccgcccacctcgttaacgattttatcggaggcggactcttaggtgcaatgcttggctttctgtgctttccgattaacgttgtgaaaactcggcttcagtcccagataggcggtgaatttcagtcgttccccaaagtttttcaaaaaatctggttggagcgcgaccggaaacttataaacctgtttaggggagctcatttgaattatcatcggtccctcatctcctgggggatcatcaatgcaacgtacgaatttctccttaaattcatctag

SEQ ID NO: 30805 - protein, 188 aa, Artificial Sequence
  derived and/or modified sequence
MNGDDAFARRPRDDAQISEKLRKAFDDIAKYFSKKEWEKMKSSEKIVYVYMKLNYEVMTKLGFKVTLPPFMRSKRAADFHGNDFGNDRNHRNQVERPQMTFGSLQRIFPKIMPKKPAEEENGLKEVPEASGPQNDGKQLCPPGNPSTLEKINKTSGPKRGKHAWTHRLRERKQLVVYEEISDPEEDDE

SEQ ID NO: 30806 - DNA, 1250 bp, Artificial Sequence
  derived and/or modified sequence
acacgccgatttgcccttttgattcttccacaatcagggtgagactgctcccagtgccatgaacggagacgacgcctttgcaaggagacccagggatgatgctcaaatatcagagaagttacgaaaggccttcgatgatattgccaaatacttctctaagaaagagtgggaaaagatgaaatcctcggagaaaatcgtctatgtgtatatgaagctaaactatgaggtcatgactaaactaggtttcaaggtcaccctcccacctttcatgcgtagtaaacgggctgcagacttccacgggaatgattttggtaacgatcgaaaccacaggaatcaggttgaacgtcctcagatgactttcggcagcctccagagaatcttcccgaagatcatgcccaagaagccagcagaggaagaaaatggtttgaaggaagtgccagaggcatctggcccacaaaatgatgggaaacagctgtgccccccgggaaatccaagtaccttggagaagattaacaagacatctggacccaaaagggggaaacatgcctggacccacagactgcgtgagagaaagcagctggtggtttatgaagagatcagcgaccctgaggaagatgacgagtaactcccctcggggatatgacacatgcccatgatgagaagcagaacgtggtgacctttcacgaacatgggcatggctgcggacccctcgtcatcaggtgcatagcaagtgaaagcaagtgttcacaacagtgaaaagttgagcgtcatttttcttagtgtgccaagagttcgatgttggcgtttccgctgtattttcttgcagtgtgccattctgttagacattagcgttttcgttgatgagcaagacatgcttaatgcatatttcggcttgtgtatccatgcacctacctcagaaaacaagtattgtcaggtattctctccatagaacagcactaccctcctctctccccagatgtgactactgaggggaggtctgagtgtttaatttccgattttttcctctgcatttacacacacaccacacacgcacacacacacaccaagtaccagtataagcatctcccatctgcttttctccattgccatgcgacctggtcaagcccccctcactctgtttcctgttcagcatgtactcccctcatccgattccgttgtatcagtcactgacagttaataaacctttgcaaacgttcaaaaaaaaaaaaaaaaaaaaaaaaaaaaaaaaa

SEQ ID NO: 30807 - DNA, 567 bp, Artificial Sequence
  derived and/or modified sequence
atgaacggcgatgatgcctttgctagaaggccaagagacgacgctcagatctctgagaagctgcgcaaagcctttgatgacatcgcaaagtacttctccaagaaggagtgggagaagatgaagtcttcagaaaaaatagtatacgtctacatgaaactgaactacgaggtaatgacaaagctggggttcaaggtgaccttaccaccattcatgcgctctaagagggccgcagactttcacggtaacgatttcggtaacgaccgcaatcataggaatcaggtggagcgacctcagatgacctttgggtccttgcagcgcatcttcccgaagattatgcccaaaaaaccggcagaggaggaaaacgggctgaaggaggtgccagaagcgtctggcccgcagaatgatggcaagcagctttgccctccagggaatccatccaccttggaaaagattaataagacctcaggccccaagcgcggaaaacacgcctggactcaccgcctgcgggaaagaaaacagctcgtggtgtatgaggagatctcagaccctgaggaagacgatgagtag

SEQ ID NO: 30808 - DNA, 567 bp, Artificial Sequence
  derived and/or modified sequence
atgaatggagatgatgcctttgcccggcggcccagagatgatgcccagatcagcgagaagctgaggaaggcctttgatgacatcgccaagtacttcagcaagaaggagtgggagaagatgaagagcagcgagaagatcgtgtatgtgtacatgaagctgaactatgaggtgatgaccaagctgggcttcaaggtgaccctgccccccttcatgaggagcaagagagctgctgacttccacggcaatgactttggaaatgacaggaaccacaggaaccaggtggagcggccccagatgaccttcggcagcctgcagaggatcttccccaagatcatgcccaagaagccagctgaggaggagaatggcctgaaggaggtgcctgaggccagcggcccccagaatgatggcaagcagctgtgccccccaggcaaccccagcaccctggagaagatcaacaagaccagcggccccaagaggggcaagcacgcctggacccaccggctgcgggagaggaagcagctggtggtgtatgaggagatcagtgaccctgaagaagatgatgaatag

SEQ ID NO: 30809 - DNA, 567 bp, Artificial Sequence
  derived and/or modified sequence
atgaacggcgacgacgccttcgcccggcggccccgggacgacgcccagatctctgagaaactgcgaaaggcgtttgatgacatcgcaaagtactttagcaagaaagaatgggaaaagatgaagagctctgagaagatcgtgtatgtatatatgaaactgaactacgaggtgatgactaaactcggatttaaagtcaccctccctccatttatgcgctctaaacgtgcagccgacttccatgggaacgactttgggaatgaccgaaaccatcgtaatcaggtcgagcggccgcagatgacgttcgggtcgttacagcgcatcttcccaaaaattatgcctaagaaaccagccgaagaggagaatgggttaaaggaagtgccggaggccagcggacctcagaacgacgggaaacaactgtgtccccccggaaacccaagcacattggaaaagattaacaaaacctctggccccaagaggggtaagcacgcctggacccacagactccgagaacggaagcagctagtggtgtatgaagaaatcagcgacccggaggaagatgatgagtag

SEQ ID NO: 30810 - DNA, 1217 bp, Artificial Sequence
  derived and/or modified sequence
acacgccgatttgcccttttgattcttccacaatcagggtgagactgctcccagtgccatgaacggagacgacgcctttgcaaggagacccagggatgatgctcaaatatcagagaagttacgaaaggccttcgatgatattgccaaatacttctctaagaaagagtgggaaaagatgaaatcctcggagaaaatcgtctatgtgtatatgaagctaaactatgaggtcatgactaaactaggtttcaaggtcaccctcccacctttcatgcgtagtaaacgggctgcagacttccacgggaatgattttggtaacgatcgaaaccacaggaatcaggttgaacgtcctcagatgactttcggcagcctccagagaatcttcccgaagatcatgcccaagaagccagcagaggaagaaaatggtttgaaggaagtgccagaggcatctggcccacaaaatgatgggaaacagctgtgccccccgggaaatccaagtaccttggagaagattaacaagacatctggacccaaaagggggaaacatgcctggacccacagactgcgtgagagaaagcagctggtggtttatgaagagatcagcgaccctgaggaagatgacgagtaactcccctcggggatatgacacatgcccatgatgagaagcagaacgtggtgacctttcacgaacatgggcatggctgcggacccctcgtcatcaggtgcatagcaagtgaaagcaagtgttcacaacagtgaaaagttgagcgtcatttttcttagtgtgccaagagttcgatgttggcgtttccgctgtattttcttgcagtgtgccattctgttagacattagcgttttcgttgatgagcaagacatgcttaatgcatatttcggcttgtgtatccatgcacctacctcagaaaacaagtattgtcaggtattctctccatagaacagcactaccctcctctctccccagatgtgactactgaggggaggtctgagtgtttaatttccgattttttcctctgcatttacacacacaccacacacgcacacacacacaccaagtaccagtataagcatctcccatctgcttttctccattgccatgcgacctggtcaagcccccctcactctgtttcctgttcagcatgtactcccctcatccgattccgttgtatcagtcactgacagttaataaacctttgcaaacgttc

SEQ ID NO: 30811 - DNA, 567 bp, Artificial Sequence
  derived and/or modified sequence
atgaatggtgatgatgcttttgcaagaaggcctagggacgatgcccagattagcgaaaaactgaggaaggcatttgatgacattgcaaagtacttctctaaaaaggagtgggaaaagatgaagtcttcagagaaaattgtgtatgtctacatgaaattgaattatgaagttatgacgaagctgggcttcaaagttaccctgcccccatttatgagatccaagagagccgctgactttcacggaaatgattttggcaatgaccgtaaccacaggaaccaggtggagcgccctcagatgactttcggtagcttgcagcgaatcttcccgaaaatcatgcctaagaaacctgcggaggaggagaacggactgaaggaggttccagaagcctccggaccacagaacgacgggaagcagttgtgccccccaggaaacccctccaccctagagaagatcaacaagacctccggccctaagagaggaaagcatgcctggactcaccgtctaagagaacgaaaacagttggttgtgtacgaggaaatcagcgatcccgaggaagatgacgaatag

SEQ ID NO: 30812 - DNA, 567 bp, Artificial Sequence
  derived and/or modified sequence
atgaacggcgacgacgccttcgccagaagacccagagacgacgcccagatcagcgagaagctgagaaaggccttcgacgacatcgccaagtacttcagcaagaaggagtgggagaagatgaagagcagcgagaagatcgtgtacgtgtacatgaagctgaactacgaggtgatgaccaagctgggcttcaaggtgaccctgccccccttcatgagaagcaagagagccgccgacttccacggcaacgacttcggcaacgacagaaaccacagaaaccaggtggagagaccccagatgaccttcggcagcctgcagagaatcttccccaagatcatgcccaagaagcccgccgaggaggagaacggcctgaaggaggtgcccgaggccagcggcccccagaacgacggcaagcagctgtgcccccccggcaaccccagcaccctggagaagatcaacaagaccagcggccccaagagaggcaagcacgcctggacccacagactgagagagagaaagcagctggtggtgtacgaggagatcagcgaccccgaggaggacgacgagtag

SEQ ID NO: 30813 - DNA, 567 bp, Artificial Sequence
  derived and/or modified sequence
atgaacggagatgacgcgtttgcgaggcgaccacgggacgacgcccagatttctgaaaaactgagaaaggcgtttgacgacatcgccaaatacttttccaagaaagagtgggagaaaatgaagtcctcagagaagatcgtatacgtctacatgaagttgaactatgaggtcatgactaagctgggcttcaaggtcactcttccccctttcatgcgctctaaaagggccgctgatttccacggtaacgattttggaaacgataggaaccatagaaaccaggttgagcgcccccaaatgacatttgggagtctgcaacgaatattccccaaaattatgccgaagaagccagccgaagaagaaaacggtttgaaagaggtccctgaggcttctgggccccagaacgatgggaaacaactctgccccccaggcaacccctccactctggagaaaatcaacaaaacatcaggtcctaagcggggcaaacacgcctggacgcacaggttgcgcgaacggaagcagctggtcgtgtacgaagagatttccgaccctgaggaggacgatgaatag

SEQ ID NO: 30814 - DNA, 567 bp, Artificial Sequence
  derived and/or modified sequence
atgaacggcgacgacgccttcgcccggcggccccgggacgacgcccagatctcagaaaaactgaggaaagcattcgatgacatcgcaaaatacttctctaagaaagagtgggaaaagatgaaatcctcagagaaaatagtgtacgtgtacatgaagctgaactacgaagttatgaccaagctgggatttaaggtcactctcccccctttcatgaggagcaaacgcgccgccgacttccacggaaatgattttggcaacgataggaatcataggaaccaagtggaacgcccacagatgacgttcgggtctctgcagaggatcttccccaagattatgccgaaaaagccagccgaagaggaaaacggccttaaggaagtgcctgaagcctcaggcccacagaatgacggcaaacagctctgccccccaggaaacccaagtacacttgagaaaataaataagacaagtggaccgaaaagaggaaagcacgcatggacccaccgcctgagggagagaaagcaactggtggtgtatgaggaaatctccgatccagaagaggatgatgaatag

SEQ ID NO: 30815 - DNA, 567 bp, Artificial Sequence
  derived and/or modified sequence
atgaatggcgacgacgctttcgctcgccgtccgagagacgacgcccagatttccgaaaagctacgaaaggcttttgatgacatagctaagtacttttcaaagaaggaatgggagaagatgaaaagttctgaaaaaatcgtctacgtctatatgaaactgaactatgaggttatgactaaacttggctttaaagtgactctgcctccttttatgagatccaagcgggctgcagacttccacggaaatgatttcggtaacgatcggaaccacaggaaccaggttgagcgacctcagatgaccttcgggtctctccaacgaatcttcccgaagatcatgcctaagaagcccgcagaggaggagaacggactgaaagaggttccagaagcttctggcccacagaacgacggcaaacaactgtgtcccccaggaaacccgtcaaccctggagaaaattaataaaacgagcgggccaaagcgcggtaaacacgcctggactcaccggttgcgcgagcgcaagcagttagtggtgtatgaggaaatcagcgatcctgaggaggacgatgagtag

SEQ ID NO: 30816 - DNA, 1322 bp, Artificial Sequence
  derived and/or modified sequence
ccaggctctagggacagaaccttcccaaggcgggggggaggggagactctgattttcccgccgaaagcgtccccttggattggctactttaaattcagagtacgcacacgccgatttgcccttttgattcttccacaatcagggtgagactgctcccagtgccatgaacggagacgacgcctttgcaaggagacccagggatgatgctcaaatatcagagaagttacgaaaggccttcgatgatattgccaaatacttctctaagaaagagtgggaaaagatgaaatcctcggagaaaatcgtctatgtgtatatgaagctaaactatgaggtcatgactaaactaggtttcaaggtcaccctcccacctttcatgcgtagtaaacgggctgcagacttccacgggaatgattttggtaacgatcgaaaccacaggaatcaggttgaacgtcctcagatgactttcggcagcctccagagaatcttcccgaagatcatgcccaagaagccagcagaggaagaaaatggtttgaaggaagtgccagaggcatctggcccacaaaatgatgggaaacagctgtgccccccgggaaatccaagtaccttggagaagattaacaagacatctggacccaaaagggggaaacatgcctggacccacagactgcgtgagagaaagcagctggtggtttatgaagagatcagcgaccctgaggaagatgacgagtaactcccctcggggatatgacacatgcccatgatgagaagcagaacgtggtgacctttcacgaacatgggcatggctgcggacccctcgtcatcaggtgcatagcaagtgaaagcaagtgttcacaacagtgaaaagttgagcgtcatttttcttagtgtgccaagagttcgatgttggcgtttccgctgtattttcttgcagtgtgccattctgttagacattagcgttttcgttgatgagcaagacatgcttaatgcatatttcggcttgtgtatccatgcacctacctcagaaaacaagtattgtcaggtattctctccatagaacagcactaccctcctctctccccagatgtgactactgaggggaggtctgagtgtttaatttccgattttttcctctgcatttacacacacaccacacacgcacacacacacaccaagtaccagtataagcatctcccatctgcttttctccattgccatgcgacctggtcaagcccccctcactctgtttcctgttcagcatgtactcccctcatccgattccgttgtatcagtcactgacagttaataaacctttgcaaacgttc

SEQ ID NO: 30817 - protein, 90 aa, Artificial Sequence
  derived and/or modified sequence
MTKIKADPDGPEAQAEACSGERTYQELLVNQNPIAQPLASRRLTRKLYKCIKKAVKQKQIRRGVKEVQKFVNKGEKGTWVQPQAPSAPPV

SEQ ID NO: 30818 - DNA, 273 bp, Artificial Sequence
  derived and/or modified sequence
atgaccaagatcaaggccgaccccgacggccccgaggcccaggccgaggcctgcagcggcgagagaacctaccaggagctgctggtgaaccagaaccccatcgcccagcccctggccagcagaagactgaccagaaagctgtacaagtgcatcaagaaggccgtgaagcagaagcagatcagaagaggcgtgaaggaggtgcagaagttcgtgaacaagggcgagaagggcacctgggtgcagccccaggcccccagcgccccccccgtgtag

SEQ ID NO: 30819 - DNA, 273 bp, Artificial Sequence
  derived and/or modified sequence
atgaccaagataaaagccgaccctgacggccccgaggcacaggccgaagcctgcagcggcgaaaggacgtatcaggagctgctggtgaatcagaatccaatcgcccagcccctggccagtagacgactcacgaggaaactatacaaatgcataaaaaaggccgtcaaacagaaacaaattaggcgtggcgtgaaggaagtccagaaattcgtgaataaaggtgagaagggcacttgggtgcaacctcaagctcctagcgcccctcctgtttag

SEQ ID NO: 30820 - DNA, 273 bp, Artificial Sequence
  derived and/or modified sequence
atgaccaagatcaaggctgaccctgatggccctgaggcccaggccgaggcctgcagcggggagaggacctaccaggagctgctggtgaaccagaaccccatcgcccagcccctggccagccggcggctgaccaggaagctgtacaagtgcatcaagaaggctgtgaagcagaagcagatcagaagaggagtgaaggaggtgcagaagtttgtgaacaagggggagaagggcacctgggtgcagccccaggcccccagcgcccctcctgtgtag

SEQ ID NO: 30821 - DNA, 273 bp, Artificial Sequence
  derived and/or modified sequence
atgaccaagatcaaggccgaccccgacggccccgaggcccaggccgaggcttgctccggtgagcgaacatatcaggagctgctggtgaaccagaaccccatcgcacagcctctggccagccggaggctgaccagaaaactctataaatgcattaaaaaggctgttaagcagaagcaaatccgccgaggtgtgaaagaagtgcagaaattcgtgaacaagggtgagaaaggcacatgggtccaaccacaggccccatcagccccaccagtgtag

SEQ ID NO: 30822 - DNA, 273 bp, Artificial Sequence
  derived and/or modified sequence
atgacaaaaattaaggctgaccccgacggaccagaagcccaggccgaagcttgttcaggagaacgcacataccaagagcttctcgtgaaccagaaccctatagcccaacctcttgcatcccgacgtttaacccggaagctatacaagtgtattaaaaaagcggtgaagcagaaacagatccgcagaggagtcaaggaagtccagaaattcgtgaataagggcgagaagggaacctgggtgcagccccaggctccttcagcgcctcccgtgtag

SEQ ID NO: 30823 - protein, 236 aa, Artificial Sequence
  derived and/or modified sequence
MAELVPFAVPIESDKTLLVWELSSGPTAEALHHSLFTAFSQFGLLYSVRVFPNAAVAHPGFYAVIKFYSARAAHRAQKACDRKQLFQKSPVKVRLGTRHKAVQHQALALNSSKCQELANYYFGFNGCSKRIIKLQELSDLEERENEDSMVPLPKQSLKFFCALEVVLPSCDCRSPGIGLVEEPMDKVEEGPLSFLMKRKTAQKLAIQKALSDAFQKLLIVVLGKTVLIILEVLQFQ

SEQ ID NO: 30824 - protein, 213 aa, Artificial Sequence
  derived and/or modified sequence
MHLLVPPPQHSLFTAFSQFGLLYSVRVFPNAAVAHPGFYAVIKFYSARAAHRAQKACDRKQLFQKSPVKVRLGTRHKAVQHQALALNSSKCQELANYYFGFNGCSKRIIKLQELSDLEERENEDSMVPLPKQSLKFFCALEVVLPSCDCRSPGIGLVEEPMDKVEEGPLSFLMKRKTAQKLAIQKALSDAFQKLLIVVLGKTVLIILEVLQFQ

SEQ ID NO: 30825 - DNA, 711 bp, Artificial Sequence
  derived and/or modified sequence
atggccgaattggtaccatttgctgttcccatcgaaagcgataagactttgcttgtttgggagctcagttctgggcccacagccgaggctcttcaccattcccttttcactgccttctcgcagtttggcttgctgtatagcgtaagagtattcccaaacgccgcggtagcccatccaggcttttacgcagtgattaagttctattcagcaagagctgcacatcgcgcccagaaggcctgcgatagaaaacaattgtttcagaaatctccagttaaggtacgcctgggtactcgccataaggccgtacagcaccaggcgctcgctttaaattccagtaagtgtcaggagctcgctaattattattttggttttaacgggtgctcaaagcgcattatcaaactgcaggaactgagcgacctggaagaacgtgaaaatgaggactcgatggtgccattacctaaacagagcctcaaatttttttgcgcactcgaggtagtgctgcccagttgtgattgcagaagccctggtataggcctagtcgaggagcctatggacaaggtggaagaagggccgttgtctttcctcatgaagaggaagaccgcacagaagttagcgatccagaaggcactttcggacgccttccaaaagcttctcatcgtggtcttggggaagactgtgctcataatcctggaagtcctgcagttccaatag

SEQ ID NO: 30826 - DNA, 642 bp, Artificial Sequence
  derived and/or modified sequence
atgcacctcttagtcccacccccacaacactccctgtttacggccttctcccagttcgggctactatactcagtgcgggtatttcccaatgcggctgtggcccaccctggcttctacgctgtgattaaattttattccgcaagggctgcccatcgcgcacaaaaagcatgcgatcggaaacagctcttccagaagtcaccagtcaaggtcagactgggcactagacacaaagccgtacagcaccaggctctcgctctcaactccagcaagtgccaagagctggctaattactacttcgggttcaatggatgttccaagcgaatcattaaactgcaagaactgtccgacctcgaagaaagggaaaacgaggattccatggtgccactgcctaagcaatctctgaagttcttttgtgccctggaggtcgtgttgccatcttgcgattgtcgcagccctgggataggcctggtggaagagcccatggacaaggtggaggaaggaccactttcatttcttatgaagcggaagactgcacagaaactggccatccagaaggcattgagcgatgcttttcaaaagctcttaatagtggtccttggcaagacagtgctgattatattggaggtgctgcagtttcagtag

SEQ ID NO: 30827 - DNA, 711 bp, Artificial Sequence
  derived and/or modified sequence
atggccgagctggtgccctttgctgtgcccattgaaagtgacaagaccctgctggtgtgggagctgagcagcggccccacagctgaggccctgcaccacagcctcttcaccgccttcagccagtttggcctgctgtacagcgtgcgggtcttccccaatgctgctgtggcccaccctggcttctatgctgtgatcaagttctacagcgcccgggccgcccaccgggcccagaaggcctgtgacaggaagcagctgttccagaagagccctgtgaaggtgcggctgggcaccaggcacaaggctgtgcagcaccaggccctggccctgaacagcagcaagtgccaggagctggccaactactacttcggcttcaacggctgcagcaagaggatcatcaagctgcaggagctgagtgacctggaggagcgggagaatgaagacagcatggtgcccctgcccaagcagagcctgaagttcttctgtgccctggaggtggtgctgcccagctgtgactgccgcagccctggcatcggcctggtggaggagcccatggacaaggtggaggagggccccctgtccttcctgatgaagaggaagacagcccagaagctggccatccagaaggccctgagtgatgccttccagaagctgctgattgtggtgctgggcaagacagtgctgatcatcctggaggtgctgcagttccagtag

SEQ ID NO: 30828 - DNA, 642 bp, Artificial Sequence
  derived and/or modified sequence
atgcacctgctggtgcccccaccccagcacagcctcttcaccgccttcagccagtttggcctgctgtacagcgtgcgggtcttccccaatgctgctgtggcccaccctggcttctacgccgtcatcaagttctacagcgcccgggccgcccaccgggcccagaaggcctgtgacaggaagcagctgttccagaagagccctgtgaaggtgcggctgggcaccaggcacaaggctgtgcagcaccaggccctggccctgaacagcagcaagtgccaggagctggccaactactacttcggcttcaacggctgcagcaagaggatcatcaagctgcaggagctgagtgacctggaggagagagaaaatgaagattccatggtgcccctgcccaagcagagcctgaagttcttctgtgccctggaggtggtgctgcccagctgtgactgccgcagccctggcatcggcctggtggaggagcccatggacaaggtggaggagggccccctgtccttcctgatgaagaggaagacagcccagaagctggccatccagaaggccctgagtgatgccttccagaagctgctgattgtggtgctgggcaagacagtgctgatcatcctggaggtgctgcagttccagtag

SEQ ID NO: 30829 - DNA, 711 bp, Artificial Sequence
  derived and/or modified sequence
atggccgagctggtgcccttcgccgtgcccatcgagagcgacaagactctcctggtgtgggaactctctagcggaccaaccgctgaggcactgcatcactctctgttcacagcgttttcacaattcggcctgctatattccgtgcgggtatttcctaacgccgcagtggcgcacccaggcttctatgccgtgatcaaattttacagtgcacgggccgcccatcgggcacagaaggcttgtgatcggaagcagctgttccagaagtctcctgtgaaagtgcgtctgggaactcgtcacaaagccgtgcaacaccaagccctggcactgaactcatccaagtgtcaggaattggcgaactactattttgggtttaacgggtgtagtaagcgtatcattaaacttcaagagttgagtgatctggaagaacgagaaaacgaggactctatggtgccccttccaaaacagagtttgaagtttttctgtgcattggaagtggtgctgccttcttgtgactgcagatcccctggaattggcttagtagaggaaccaatggacaaagtcgaagaagggcccttgagtttcctgatgaaaaggaaaaccgcacagaaactggccatccagaaggcgctgagtgacgcctttcaaaagttgctgatagtagttctaggaaagaccgtgctgattattcttgaggttctgcagttccagtag

SEQ ID NO: 30830 - DNA, 642 bp, Artificial Sequence
  derived and/or modified sequence
atgcacctgctggtgccccccccccagcacagcctgttcaccgcctttagccagttcggcttactgtacagtgtgagggtcttccctaacgccgccgtggcccaccccggattctacgctgttattaaattctattcagcacgtgccgctcacagggctcaaaaagcttgtgaccggaaacaactgtttcaaaaaagccccgtaaaagttagactcggtacacgacataaggccgttcagcatcaggcactggccctgaatagctctaagtgtcaggagcttgccaactattactttggcttcaatggatgttctaagcgaataattaagttgcaggaattgtcggacctggaagaaagagagaatgaagattccatggtgcctctgcctaaacagagcctgaaatttttctgcgccttagaagtggtactgccatcttgcgactgcaggagccccggcatcggcttggtagaagagcctatggacaaagtagaggagggcccactctctttcctgatgaaaagaaaaactgcccaaaaattagcaatccaaaaggccctgtccgacgccttccagaaacttctaatcgtggtcctggggaaaacagtgctgattattctggaggtactgcaattccagtag

SEQ ID NO: 30831 - DNA, 711 bp, Artificial Sequence
  derived and/or modified sequence
atggctgaactcgtgcccttcgcagtaccaatcgaaagcgataaaaccttactcgtttgggagttgagctccggcccaacagctgaggccctccaccattctctatttaccgccttctcacagttcgggctcctgtattccgtacgggtgttcccaaatgctgccgtagcccatccgggattttatgccgtgatcaaattctattcggccagagctgctcacagagcacagaaggcttgtgataggaaacagttgttccagaagtctccagtgaaagtgcgcctgggtacccggcacaaagcagtgcagcatcaagcactcgctctgaactctagtaagtgccaagagctggccaattactactttggcttcaatggctgtagcaagaggatcattaaattgcaggagctgtccgacctggaagagagagaaaatgaagactcaatggtgccactgcccaaacagagcctgaaattcttctgcgccctggaggtcgttctgccctcctgtgattgtcgctctccaggcattggcttagtagaagagccgatggataaggtggaagaggggcctctgagttttctgatgaaacggaagaccgctcagaagttggcgatccagaaagctttgagtgatgcatttcaaaaactccttattgtggtgcttggtaagaccgtcctcattatattagaagttctgcaattccaatag

SEQ ID NO: 30832 - DNA, 642 bp, Artificial Sequence
  derived and/or modified sequence
atgcatctgctggttcctcccccacagcattcactgtttacggctttcagccagttcggactgctgtactctgtaagagtcttcccaaacgctgccgtcgcacatcccggtttctacgctgtgataaaattctacagcgccagggccgcacacagggctcaaaaggcgtgcgataggaaacagttgtttcagaagtctccagtgaaagtgcggctgggaaccaggcataaagccgtccagcaccaggctttggcgctcaacagttccaaatgtcaagaactggctaattattacttcggatttaacgggtgtagcaagaggattattaagttacaagaattatccgacctggaggagcgagaaaacgaagacagtatggttccattgccaaaacagtcactcaagtttttttgtgctctggaagtggtgcttccaagctgtgactgtcgcagcccaggcatcgggttagtggaagagccaatggataaggttgaagaaggacccctctcattcctcatgaaaaggaagaccgcacagaagctggctatccagaaggctctgagtgacgcctttcagaagttgctgatcgttgttctggggaaaaccgtactgatcatcctggaagttctccaattccagtag

SEQ ID NO: 30833 - DNA, 779 bp, Artificial Sequence
  derived and/or modified sequence
cggtgaagggaggatggcggagttggtaccttttgcggttcccatcgagagtgacaaaaccttgctagtgtgggagctgagctccggacccacggccgaggctttgcatcattctctgttcacagcattttctcagtttggccttctgtattcagtccgggtcttcccaaatgctgcagtggcccatcctggtttctatgccgtcattaagttttattctgcaagggctgcccacagagcccaaaaggcatgcgaccggaagcagctttttcagaaatctccagtcaaggttcgtcttggcaccagacataaggcagttcaacatcaagcccttgccctgaacagttccaaatgccaagaactggcgaattactactttggtttcaatgggtgttccaaaaggatcatcaagcttcaggagctttctgaccttgaagaaagggaaaatgaagatagcatggtgccacttccgaagcaaagcctgaagttcttctgtgctttagaagtggtgttgccatcctgtgattgcaggagtcctggcattggcttggtggaggagcctatggataaggtggaggaaggaccattatcattccttatgaaaaggaagacagcccagaagcttgctattcagaaggctttgtcagatgcattccagaaactgttgattgttgttctaggtaagactgtcttgatcatccttgaagtacttcagtttcagtaagcaaataaactcattttgaaaagttaattgaataaaaatattgatatctaaagca

SEQ ID NO: 30834 - DNA, 1491 bp, Artificial Sequence
  derived and/or modified sequence
agccgcgcaggtgcggtgaagggaggatggcggagttggtaccttttgcggttcccatcgagagtgacaaaaccttgctagtgtgggagctgagctccggacccacggccgaggctttgcatgtgagccggggccaggatggagggagggatggagaaagctgcccacccgctgactgggagttccggagtcctgcctcagaccctcacctgcctgagcctccgctgaaggactcttaattataaaggggatcccaactgacaactgacgacccccaacagatttttagagtcccggagaggtatctctccaccttcagaacgttttaccttccagtgcttcttaaagtttaggattttaagaggaaaacctgttgattaagtgggaagtgttttgaatcgcatccttcgcgaagagaggtttggggaatatgagggcatgtgcggttttgttttctgggcgtgagatttcatgcatttacttgtcccacccccacagcattctctgttcacagcattttctcagtttggccttctgtattcagtccgggtcttcccaaatgctgcagtggcccatcctggtttctatgccgtcattaagttttattctgcaagggctgcccacagagcccaaaaggcatgcgaccggaagcagctttttcagaaatctccagtcaaggttcgtcttggcaccagacataaggcagttcaacatcaagcccttgccctgaacagttccaaatgccaagaactggcgaattactactttggtttcaatgggtgttccaaaaggatcatcaagcttcaggagctttctgaccttgaagaaagggaaaatgaagatagcatggtgccacttccgaagcaaagcctgaagttcttctgtgctttagaagtggtgttgccatcctgtgattgcaggagtcctggcattggcttggtggaggagcctatggataaggtggaggaaggaccattatcattccttatgaaaaggaagacagcccagaagcttgctattcagaaggctttgtcagatgcattccagaaactgttgattgttgttctaggtaagactgtcttgatcatccttgaagtacttcagtttcagtaagcaaataaactcattttgaaaagttaattgaataaaaatattgatatctaaagcactctatagtatgctttcatttgctaaattatttcacaccaacaggctcaaatttgttctgtgtgacatttgtgaaaaaaaatgacagcaaatattgtccccagtttacagatgtgaaaagacttgcctcagttcccacagaaaatgtttaagccaggtcttctttaattgcttacctatcatacagaatagtgattataagttttggacgcatggatttgagtcctaactctgtctcttagatttttaatgcaattaggccgggcgcggtggctcacgcctgtaatcccagcactttgggaggccgagatgggcggatcacga

SEQ ID NO: 30835 - DNA, 711 bp, Artificial Sequence
  derived and/or modified sequence
atggccgagctggtgcccttcgccgtgcccatcgagagcgacaagaccctgctggtgtgggagctgagcagcggccccaccgccgaggccctgcaccacagcctgttcaccgccttcagccagttcggcctgctgtacagcgtgagagtgttccccaacgccgccgtggcccaccccggcttctacgccgtgatcaagttctacagcgccagagccgcccacagagcccagaaggcctgcgacagaaagcagctgttccagaagagccccgtgaaggtgagactgggcaccagacacaaggccgtgcagcaccaggccctggccctgaacagcagcaagtgccaggagctggccaactactacttcggcttcaacggctgcagcaagagaatcatcaagctgcaggagctgagcgacctggaggagagagagaacgaggacagcatggtgcccctgcccaagcagagcctgaagttcttctgcgccctggaggtggtgctgcccagctgcgactgcagaagccccggcatcggcctggtggaggagcccatggacaaggtggaggagggccccctgagcttcctgatgaagagaaagaccgcccagaagctggccatccagaaggccctgagcgacgccttccagaagctgctgatcgtggtgctgggcaagaccgtgctgatcatcctggaggtgctgcagttccagtag

SEQ ID NO: 30836 - DNA, 642 bp, Artificial Sequence
  derived and/or modified sequence
atgcacctgctggtgccccccccccagcacagcctgttcaccgccttcagccagttcggcctgctgtacagcgtgagagtgttccccaacgccgccgtggcccaccccggcttctacgccgtgatcaagttctacagcgccagagccgcccacagagcccagaaggcctgcgacagaaagcagctgttccagaagagccccgtgaaggtgagactgggcaccagacacaaggccgtgcagcaccaggccctggccctgaacagcagcaagtgccaggagctggccaactactacttcggcttcaacggctgcagcaagagaatcatcaagctgcaggagctgagcgacctggaggagagagagaacgaggacagcatggtgcccctgcccaagcagagcctgaagttcttctgcgccctggaggtggtgctgcccagctgcgactgcagaagccccggcatcggcctggtggaggagcccatggacaaggtggaggagggccccctgagcttcctgatgaagagaaagaccgcccagaagctggccatccagaaggccctgagcgacgccttccagaagctgctgatcgtggtgctgggcaagaccgtgctgatcatcctggaggtgctgcagttccagtag

SEQ ID NO: 30837 - protein, 227 aa, Artificial Sequence
  derived and/or modified sequence
MGAVMGTFSSLQTKQRRPSKDIAWWYYQYQRDKIEDELEMTMVCHRPEGLEQLEAQTNFTKRELQVLYRGFKNECPSGVVNEDTFKQIYAQFFPHGDASTYAHYLFNAFDTTQTGSVKFEDFVTALSILLRGTVHEKLRWTFNLYDINKDGYINKEEMMDIVKAIYDMMGKYTYPVLKEDTPRQHVDVFFQKMDKNKDGIVTLDEFLESCQEDDNIMRSLQLFQNVM

SEQ ID NO: 30838 - DNA, 684 bp, Artificial Sequence
  derived and/or modified sequence
atgggtgctgtgatgggcacttttagctccctgcagaccaaacagagacggcctagcaaggatattgcttggtggtactaccaatatcagcgggataagattgaagacgagctagaaatgacaatggtgtgtcaccgccctgaggggttggagcagctggaagcacagacaaacttcacaaagagggagctacaagtactttatagaggtttcaagaatgaatgccccagcggcgtggtcaacgaagatacatttaaacaaatttatgcacagttctttccccacggagatgcatctacctatgcccactatctctttaacgcctttgacaccactcagactggatctgttaaatttgaggacttcgtaactgccttgtctatcctgctgcggggaacagtacacgagaagctacgctggacgttcaacctgtacgatatcaacaaagatggttatataaacaaggaggaaatgatggatattgttaaagccatttacgatatgatgggtaaatacacatatcccgtcctcaaagaggacacaccccgacagcacgtggacgtattcttccagaaaatggacaaaaacaaagacggtatcgtgacattggatgaattcctggagtcctgccaggaagacgataatataatgcggagcctgcagttattccagaacgtgatgtag

SEQ ID NO: 30839 - DNA, 684 bp, Artificial Sequence
  derived and/or modified sequence
atgggggccgtcatgggcaccttctcatctctgcaaaccaaacaaaggcgaccctcgaaagacatcgcctggtggtattaccagtatcagagagataagattgaagatgagctggagatgaccatggtttgccatcggcccgagggactggagcagctcgaggcccagaccaacttcaccaagagggagctgcaggtcctttatcgaggcttcaaaaatgagtgccccagtggtgtggtcaacgaagacacattcaagcagatctatgctcagtttttccctcatggagatgccagcacgtatgcccattacctcttcaatgccttcgacaccactcagacaggctccgtgaagttcgaggactttgtaaccgctctgtcgattttattgagaggaactgtccacgagaaactaaggtggacatttaatttgtatgacatcaacaaggacggatacataaacaaagaggagatgatggacattgtcaaagccatctatgacatgatggggaaatacacatatcctgtgctcaaagaggacactccaaggcagcatgtggacgtcttcttccagaaaatggacaaaaataaagatggcatcgtaactttagatgaatttcttgaatcatgtcaggaggacgacaacatcatgaggtctctccagctgtttcaaaatgtcatgtaa

SEQ ID NO: 30840 - DNA, 684 bp, Artificial Sequence
  derived and/or modified sequence
atgggagctgtcatgggcacattctcttccctccaaaccaaacagcgccgcccttccaaagatatcgcttggtggtactatcaataccagagagataagatcgaagacgaattggaaatgaccatggtttgccaccgacccgagggtctagaacagctagaagctcaaaccaatttcacaaaacgggaactgcaggtgttatatcgagggtttaaaaatgaatgccccagcggcgtggttaacgaggacacctttaaacaaatctatgcccagtttttccctcatggggacgctagtacatacgcccattatctgttcaatgctttcgacacaactcaaacagggagcgtcaagtttgaagactttgtaacagccctgagcattttattgaggggcaccgtgcacgagaaactacgctggacgttcaacttatacgacatcaacaaggatggatatattaacaaagaggagatgatggacatcgtgaaggcaatttatgatatgatgggcaaatacacttatccggttctgaaagaggatacaccccggcaacacgttgacgtattttttcagaagatggacaaaaataaagacggtatcgtgactctggacgagtttcttgagtcttgccaggaagatgataatattatgcgttcccttcagttgttccagaatgtaatgtag

SEQ ID NO: 30841 - DNA, 684 bp, Artificial Sequence
  derived and/or modified sequence
atgggagctgtaatgggcactttctcctcactccaaactaaacagagaaggccgagcaaggatatcgcctggtggtattaccagtatcaacgcgacaagattgaagacgaattagagatgacaatggtatgtcaccggcctgaaggcttggaacagctggaagcgcagaccaacttcactaaaagagagctgcaggtgctttatcgaggctttaagaatgaatgtccctccggggtggttaatgaggatacgtttaaacaaatatacgcacaattctttccacatggggatgcctctacttatgcccactatctgtttaatgcatttgacaccacacaaactggctccgtaaaattcgaagactttgttaccgctctgtccattctgttgaggggcacagtccatgagaagctacgctggaccttcaatctctacgacattaacaaggatggctacattaataaagaagagatgatggatatagttaaggccatttacgacatgatgggaaaatatacataccctgtgctcaaggaagatactccaaggcaacatgtggacgtgttcttccaaaaaatggataaaaacaaggacggaatcgtgaccctcgatgaatttttagaatcatgccaggaagacgataatataatgagatcattacagttatttcaaaatgtgatgtag

SEQ ID NO: 30842 - DNA, 1845 bp, Artificial Sequence
  derived and/or modified sequence
ggctagccctgagtccctgcatgtgcggggctgaagaaggaagccagaagcctcctagcctcgcctccacgcttgctgaataccaagctgcaggcgagctgccgggcgcttttctctcctccaattcagagtagacaaaccacggggatttctttccagggtaggggaggggccgggcccggggtcccaactcgcactcaagtcttcgctgccatgggggccgtcatgggcaccttctcatctctgcaaaccaaacaaaggcgaccctcgaaagaactaccttaaattaatttgttgaaaggacagatggatggatggttgatggaagtagcaggcttccagcagcaggggatggagtgagtgtgtggataccgctggatcagcagaaggttataccattttagagtaactatctcggacttcggagagttcctggataagattgaagatgagctggagatgaccatggtttgccatcggcccgagggactggagcagctcgaggcccagaccaacttcaccaagagggagctgcaggtcctttatcgaggcttcaaaaatgagtgccccagtggtgtggtcaacgaagacacattcaagcagatctatgctcagtttttccctcatggagatgccagcacgtatgcccattacctcttcaatgccttcgacaccactcagacaggctccgtgaagttcgaggactttgtaaccgctctgtcgattttattgagaggaactgtccacgagaaactaaggtggacatttaatttgtatgacatcaacaaggacggatacataaacaaagaggagatgatggacattgtcaaagccatctatgacatgatggggaaatacacatatcctgtgctcaaagaggacactccaaggcagcatgtggacgtcttcttccagaaaatggacaaaaataaagatggcatcgtaactttagatgaatttcttgaatcatgtcaggaggacgacaacatcatgaggtctctccagctgtttcaaaatgtcatgtaactggtgacactcagccattcagctctcagagacattgtactaaacaaccaccttaacaccctgatctgcccttgttctgattttacacaccaactcttgggacagaaacaccttttacactttggaagaattctctgctgaagactttctatggaacccagcatcatgtggctcagtctctgattgccaactcttcctctttcttcttcttgagagagacaagatgaaatttgagtttgttttggaagcatgctcatctcctcacactgctgccctatggaaggtccctctgcttaagcttaaacagtagtgcacaaaatatgctgcttacgtgcccccagcccactgcctccaagtcaggcagaccttggtgaatctggaagcaagaggacctgagccagatgcacaccatctctgatggcctcccaaaccaatgtgcctgtttctcttcctttggtgggaagaatgagagttatccagaacaattaggatctgtcatgaccagattgggagagccagcacctaacatatgtgggataggactgaattattaagcatgatattgtctgatgacccaaactgcccatgtcatttgtttccagaaacgaggaccaataattctctcacactggcatttgtgctggtagtacaagtcctttaatatgtccaggaagggagccattgcccagtggtccatatctccaccacatcccctgcttgagcccagcgctgcatgtccctcccaagaagtccagaatgcctgcaaattgctgtaattttataccatgttctaaccaataaacagaactatttcttaca

SEQ ID NO: 30843 - DNA, 684 bp, Artificial Sequence
  derived and/or modified sequence
atgggcgccgtgatgggcaccttcagcagcctgcagaccaagcagagaagacccagcaaggacatcgcctggtggtactaccagtaccagagagacaagatcgaggacgagctggagatgaccatggtgtgccacagacccgagggcctggagcagctggaggcccagaccaacttcaccaagagagagctgcaggtgctgtacagaggcttcaagaacgagtgccccagcggcgtggtgaacgaggacaccttcaagcagatctacgcccagttcttcccccacggcgacgccagcacctacgcccactacctgttcaacgccttcgacaccacccagaccggcagcgtgaagttcgaggacttcgtgaccgccctgagcatcctgctgagaggcaccgtgcacgagaagctgagatggaccttcaacctgtacgacatcaacaaggacggctacatcaacaaggaggagatgatggacatcgtgaaggccatctacgacatgatgggcaagtacacctaccccgtgctgaaggaggacacccccagacagcacgtggacgtgttcttccagaagatggacaagaacaaggacggcatcgtgaccctggacgagttcctggagagctgccaggaggacgacaacatcatgagaagcctgcagctgttccagaacgtgatgtag

SEQ ID NO: 30844 - DNA, 684 bp, Artificial Sequence
  derived and/or modified sequence
atgggcgcagtcatgggaacattctcgtcacttcagaccaaacagcgcagaccatcaaaagatattgcttggtggtattatcaataccaacgtgataagatagaagatgaattggagatgactatggtctgtcatcggcccgagggattagaacaacttgaggcacagaccaatttcacaaagcgtgaactgcaggttctctaccggggttttaagaacgagtgtccttcgggtgtggtcaatgaggatactttcaagcagatctacgcccagttcttcccgcatggggacgcctcgacttacgctcactatttgtttaatgcttttgataccacacaaactgggagcgtgaagttcgaggattttgtgacagctctaagcattctgctaagggggaccgtccacgagaagttgcgatggacattcaatttgtacgacattaataaggacggctacatcaataaggaagagatgatggatatcgtgaaggcgatctacgacatgatgggaaagtacacctatccagttctaaaggaagatactccaagacagcacgtcgatgtgttctttcagaaaatggataagaataaggacgggattgttactttggatgaatttcttgaaagttgccaagaagatgataatattatgagatcactgcagctatttcagaacgtgatgtag

SEQ ID NO: 30845 - DNA, 684 bp, Artificial Sequence
  derived and/or modified sequence
atgggcgctgtgatgggcaccttcagcagcctgcagaccaagcagaggcggcccagcaaggacatcgcctggtggtactaccagtaccagagggacaagattgaagatgagctggagatgaccatggtgtgccacaggcctgagggcctggagcagctggaggcccagaccaacttcaccaagcgggagctgcaggtgctgtaccggggcttcaagaatgaatgtccttctggagtggtgaatgaagacaccttcaagcagatctatgcccagttcttcccccatggagatgccagcacctacgcccactacctgttcaatgcctttgacaccacccagacaggctctgtgaagtttgaggactttgtgacagccctgagcatcctgctgcggggcaccgtgcatgagaagctgcgctggaccttcaacctgtatgacatcaacaaggatggctacatcaacaaggaggagatgatggacatcgtgaaggccatctatgacatgatgggcaagtacacctaccctgtgctgaaggaggacaccccccggcagcacgtggatgtgttcttccagaagatggacaagaacaaggatggcatcgtgaccctggatgagttcctggagagctgccaggaggatgacaacatcatgaggagcctgcagctgttccagaatgtgatgtag

SEQ ID NO: 30846 - DNA, 684 bp, Artificial Sequence
  derived and/or modified sequence
atgggcgccgtgatgggcaccttcagcagcctgcagaccaagcagaggaggccatctaaggacatcgcctggtggtactaccagtaccagcgtgacaaaatcgaagacgaactggagatgaccatggtgtgccatcgtcctgaaggtctcgagcagctcgaagctcagacaaatttcactaaacgggagttgcaggtgttgtaccgcgggttcaaaaacgaatgcccatccggagtagtgaacgaagacacatttaagcaaatttatgcacagttcttcccacatggcgatgcctctacctacgcccactacctgttcaatgccttcgacaccactcagaccggatctgtgaaattcgaagattttgtcacggctttgtctattctgctgcggggaactgttcacgaaaagcttaggtggactttcaatttgtacgatatcaacaaggacggctatatcaataaagaagaaatgatggatatcgtcaaggctatctacgatatgatggggaagtatacttacccggtcctgaaggaagacacaccacgccaacatgttgatgtgttctttcagaaaatggataagaacaaagatggcatagtgacgcttgatgagtttctcgaaagttgccaggaggatgataacattatgcgctcattacagctgttccagaatgtaatgtag

SEQ ID NO: 30847 - RNA, 684 nt, Artificial Sequence
  derived and/or modified sequence
augggagcugucaugggcacauucucuucccuccaaaccaaacagcgccgcccuuccaaagauaucgcuuggugguacuaucaauaccagagagauaagaucgaagacgaauuggaaaugaccaugguuugccaccgacccgagggucuagaacagcuagaagcucaaaccaauuucacaaaacgggaacugcagguguuauaucgaggguuuaaaaaugaaugccccagcggcgugguuaacgaggacaccuuuaaacaaaucuaugcccaguuuuucccucauggggacgcuaguacauacgcccauuaucuguucaaugcuuucgacacaacucaaacagggagcgucaaguuugaagacuuuguaacagcccugagcauuuuauugaggggcaccgugcacgagaaacuacgcuggacguucaacuuauacgacaucaacaaggauggauauauuaacaaagaggagaugauggacaucgugaaggcaauuuaugauaugaugggcaaauacacuuauccgguucugaaagaggauacaccccggcaacacguugacguauuuuuucagaagauggacaaaaauaaagacgguaucgugacucuggacgaguuucuugagucuugccaggaagaugauaauauuaugcguucccuucaguuguuccagaauguaauguag

SEQ ID NO: 30848 - RNA, 684 nt, Artificial Sequence
  derived and/or modified sequence
augggagcuguaaugggcacuuucuccucacuccaaacuaaacagagaaggccgagcaaggauaucgccuggugguauuaccaguaucaacgcgacaagauugaagacgaauuagagaugacaaugguaugucaccggccugaaggcuuggaacagcuggaagcgcagaccaacuucacuaaaagagagcugcaggugcuuuaucgaggcuuuaagaaugaaugucccuccggggugguuaaugaggauacguuuaaacaaauauacgcacaauucuuuccacauggggaugccucuacuuaugcccacuaucuguuuaaugcauuugacaccacacaaacuggcuccguaaaauucgaagacuuuguuaccgcucuguccauucuguugaggggcacaguccaugagaagcuacgcuggaccuucaaucucuacgacauuaacaaggauggcuacauuaauaaagaagagaugauggauauaguuaaggccauuuacgacaugaugggaaaauauacauacccugugcucaaggaagauacuccaaggcaacauguggacguguucuuccaaaaaauggauaaaaacaaggacggaaucgugacccucgaugaauuuuuagaaucaugccaggaagacgauaauauaaugagaucauuacaguuauuucaaaaugugauguag

SEQ ID NO: 30849 - protein, 225 aa, Artificial Sequence
  derived and/or modified sequence
MSGCSKRCKLGFVKFAQTIFKLITGTLSKDKIEDELEMTMVCHRPEGLEQLEAQTNFTKRELQVLYRGFKNECPSGVVNEDTFKQIYAQFFPHGDASTYAHYLFNAFDTTQTGSVKFEDFVTALSILLRGTVHEKLRWTFNLYDINKDGYINKEEMMDIVKAIYDMMGKYTYPVLKEDTPRQHVDVFFQKMDKNKDGIVTLDEFLESCQEDDNIMRSLQLFQNVM

SEQ ID NO: 30850 - DNA, 678 bp, Artificial Sequence
  derived and/or modified sequence
atgtctgggtgctccaaaaggtgtaaattaggtttcgtaaagtttgcccaaactatctttaaactgattaccgggaccctgtctaaagataagatcgaggatgaactggaaatgacaatggtctgccatcggcctgaaggactggagcaacttgaagctcagacaaacttcacgaaacgggagctgcaggtgctttaccgcggtttcaagaatgagtgcccaagtggggtggtgaatgaagacacctttaagcagatctatgcccaatttttcccacatggagatgcaagcacctacgcacactacctgttcaatgccttcgatacgacccaaactggctctgtcaagtttgaggacttcgtgacagccttgtcgatccttctacggggaacagtccatgaaaagctcaggtggaccttcaacctgtacgacatcaacaaggatggctatatcaataaagaggagatgatggacattgtaaaggcaatttatgatatgatgggcaagtatacctaccccgtgctgaaagaggatacgcctcggcagcacgttgacgtgttcttccaaaaaatggacaaaaataaagacgggattgtgactttagatgagtttcttgagagctgccaggaagacgacaatatcatgcggtctttacagctgttccaaaacgtcatgtag

SEQ ID NO: 30851 - DNA, 678 bp, Artificial Sequence
  derived and/or modified sequence
atgagcgggtgctcaaaaaggtgcaagctcggcttcgttaaattcgcccagactatttttaaactgattaccggcacactatcaaaagacaagattgaagacgaactcgaaatgactatggtgtgccatagacccgaagggctggagcagctggaggcccaaacaaactttaccaaaagggaacttcaggtgttgtatagaggattcaaaaacgaatgcccatctggggtggtcaacgaggacaccttcaaacaaatctatgcccagtttttcccacatggcgatgcgtcaacctacgctcactatctatttaacgcgtttgacacaactcagaccggaagtgtcaaattcgaggattttgtaactgcactaagtattttgctgcgggggacagtacatgagaagctccgttggactttcaatctgtacgatatcaacaaagatgggtatattaacaaggaagagatgatggacattgtcaaagcaatctatgatatgatggggaaatatacatatccagtcctgaaagaagatactcctagacagcacgttgacgtgttttttcaaaaaatggataagaacaaggacggaatcgtgactctcgacgagttccttgagagctgccaggaagatgacaatatcatgcgatcactgcaactattccagaatgttatgtag

SEQ ID NO: 30852 - DNA, 678 bp, Artificial Sequence
  derived and/or modified sequence
atgagcggctgttcgaaaaggtgtaagttaggattcgtcaagttcgctcagaccatcttcaagttaatcaccgggaccctttccaaggataaaatagaggacgagctcgagatgacaatggtgtgccacagacccgaaggactggagcagctggaagcccaaacaaactttacgaaacgagaactgcaagtcctgtacagaggattcaaaaacgagtgcccatccggggtggtgaacgaggacactttcaagcagatctatgcacagtttttcccccatggcgatgcatccacctatgcacactatctatttaacgcgtttgacacaactcagaccggaagtgtcaaattcgaggattttgtaactgcactaagtattttgctgcgggggacagtacatgagaagctccgttggactttcaatctgtacgatatcaacaaagatgggtatattaacaaggaagagatgatggacattgtcaaagcaatctatgatatgatggggaaatatacatatccagtcctgaaagaagatactcctagacagcacgttgacgtgttttttcaaaaaatggataagaacaaggacggaatcgtgactcttgatgaattcctagaaagttgccaggaggacgataacattatgagatcccttcagctgttccaaaatgtgatgtag

SEQ ID NO: 30853 - DNA, 678 bp, Artificial Sequence
  derived and/or modified sequence
atgagcggctgcagcaagagatgcaagctgggcttcgtgaagttcgcccagaccatcttcaagctgatcaccggcaccctgagcaaggacaagatcgaggacgagctggagatgaccatggtgtgccacagacccgagggcctggagcagctggaggcccagaccaacttcaccaagagagagctgcaggtgctgtacagaggcttcaagaacgagtgccccagcggcgtggtgaacgaggacaccttcaagcagatctacgcccagttcttcccccacggcgacgccagcacctacgcccactacctgttcaacgccttcgacaccacccagaccggcagcgtgaagttcgaggacttcgtgaccgccctgagcatcctgctgagaggcaccgtgcacgagaagctgagatggaccttcaacctgtacgacatcaacaaggacggctacatcaacaaggaggagatgatggacatcgtgaaggccatctacgacatgatgggcaagtacacctaccccgtgctgaaggaggacacccccagacagcacgtggacgtgttcttccagaagatggacaagaacaaggacggcatcgtgaccctggacgagttcctggagagctgccaggaggacgacaacatcatgagaagcctgcagctgttccagaacgtgatgtag

SEQ ID NO: 30854 - DNA, 678 bp, Artificial Sequence
  derived and/or modified sequence
atgtccggatgctccaaacgatgcaaattggggttcgtcaaattcgcccagactatttttaaacttataacgggaacactgtccaaggacaaaatcgaggacgagcttgaaatgaccatggtatgtcatagacccgaggggctcgagcagcttgaggcacaaaccaatttcacgaagagagaactgcaagtactgtatcgcggcttcaagaatgaatgtcctagtggcgtcgtgaacgaagacacattcaagcaaatttatgctcaattttttccacacggcgatgcaagtacgtacgcccactatctgttcaacgcgttcgacacaactcagacaggttctgttaaattcgaggacttcgtgaccgccctcagcattctcctgcgcggcaccgtccacgaaaaactgcgctggacttttaacttgtacgacatcaacaaagatggttatataaataaggaggaaatgatggacatcgtgaaggctatctacgacatgatggggaagtatacctaccccgtactgaaagaagacaccccccgccagcacgtagatgtgtttttccagaagatggataagaataaagatggtatcgtaacactagacgaatttttggaaagttgtcaagaggatgacaatattatgaggtccctgcaactttttcagaatgtgatgtag

SEQ ID NO: 30855 - DNA, 678 bp, Artificial Sequence
  derived and/or modified sequence
atgagcggctgcagcaagcgctgcaagctgggctttgtgaagtttgcccagaccatcttcaagctgatcaccggcaccctgagcaaggacaagattgaagatgagctggagatgaccatggtgtgccacaggcctgagggcctggagcagctggaggcccagaccaacttcaccaagcgggagctgcaggtgctgtaccggggcttcaagaatgaatgtccttctggagtggtgaatgaagacaccttcaagcagatctatgcccagttcttcccccatggagatgccagcacctacgcccactacctgttcaatgcctttgacaccacccagacaggctctgtgaagtttgaggactttgtgacagccctgagcatcctgctgcggggcaccgtgcatgagaagctgcgctggaccttcaacctgtatgacatcaacaaggatggctacatcaacaaggaggagatgatggacatcgtgaaggccatctatgacatgatgggcaagtacacctaccctgtgctgaaggaggacaccccccggcagcacgtggatgtgttcttccagaagatggacaagaacaaggatggcatcgtgaccctggatgagttcctggagagctgccaggaggatgacaacatcatgaggagcctgcagctgttccagaatgtgatgtag

SEQ ID NO: 30856 - DNA, 1197 bp, Artificial Sequence
  derived and/or modified sequence
aagaaagacagtcagcaaagcctgggagagctccagctcctccctccctgctctgctcaacttcactctcctcctcggttcccttggagtaccttgtgccccggcagtgctgtcccggccctggcatcctgaggtcctcccgtggtgaggacttaagtggacagcaggagtgggtggagagagggagggagagtttgccctgcaggctctctggatgcagaagccagactcgctgcagaggcagctgtgctgttcccggagcctggcttcaggggtgcatccgtcactcagggttcattcacccaggcaggctccaagttcctggggtgcacaaggtgggcactgtcccttctgggtgctgacagcagagcctggctcccctccgccaccatgagcggctgctccaaaagatgcaagcttgggttcgtgaaatttgcccagaccatctttaagctcatcactgggaccctcagcaaagataagattgaagatgagctggagatgaccatggtttgccatcggcccgagggactggagcagctcgaggcccagaccaacttcaccaagagggagctgcaggtcctttatcgaggcttcaaaaatgagtgccccagtggtgtggtcaacgaagacacattcaagcagatctatgctcagtttttccctcatggagatgccagcacgtatgcccattacctcttcaatgccttcgacaccactcagacaggctccgtgaagttcgaggactttgtaaccgctctgtcgattttattgagaggaactgtccacgagaaactaaggtggacatttaatttgtatgacatcaacaaggacggatacataaacaaagaggagatgatggacattgtcaaagccatctatgacatgatggggaaatacacatatcctgtgctcaaagaggacactccaaggcagcatgtggacgtcttcttccagaaaatggacaaaaataaagatggcatcgtaactttagatgaatttcttgaatcatgtcaggaggacgacaacatcatgaggtctctccagctgtttcaaaatgtcatgtaactggtgacactcagccattcagctctcagagacattgtactaaacaaccaccttaacaccctgatctgcccttgttctgattttacacaccaactcttgggacagaaacaccttttacactttggaaga

SEQ ID NO: 30857 - DNA, 678 bp, Artificial Sequence
  derived and/or modified sequence
atgagcggctgcagcaagcggtgcaagctgggcttcgtgaagttcgcgcaaaccatcttcaaactcatcaccggaacattgagcaaggataagatcgaggacgagcttgaaatgaccatggtgtgccaccgacccgaaggacttgagcagctggaagcccagaccaatttcaccaagagagaattgcaggtgctgtaccgcggctttaagaacgaatgcccatcaggcgttgtgaacgaagatacgttcaagcagatctacgcacagttttttccccacggtgatgcctcaacatacgcccattacctgttcaatgcctttgataccacccaaacaggctccgttaagtttgaggactttgtgaccgccctctccatccttttgagaggtacagtacacgagaagcttcgttggacattcaacctgtacgatatcaacaaagatgggtatattaataaagaggagatgatggatattgtaaaagcaatttacgacatgatgggcaaatacacatacccagttcttaaggaggacactccgaggcagcatgtagacgttttcttccagaaaatggataagaataaggacgggattgttaccctggatgagttcttggaatcctgccaagaggacgacaatatcatgcgcagtctgcagctttttcagaacgtgatgtag

SEQ ID NO: 30858 - RNA, 678 nt, Artificial Sequence
  derived and/or modified sequence
augagcgggugcucaaaaaggugcaagcucggcuucguuaaauucgcccagacuauuuuuaaacugauuaccggcacacuaucaaaagacaagauugaagacgaacucgaaaugacuauggugugccauagacccgaagggcuggagcagcuggaggcccaaacaaacuuuaccaaaagggaacuucagguguuguauagaggauucaaaaacgaaugcccaucugggguggucaacgaggacaccuucaaacaaaucuaugcccaguuuuucccacauggcgaugcgucaaccuacgcucacuaucuauuuaacgcguuugacacaacucagaccggaagugucaaauucgaggauuuuguaacugcacuaaguauuuugcugcgggggacaguacaugagaagcuccguuggacuuucaaucuguacgauaucaacaaagauggguauauuaacaaggaagagaugauggacauugucaaagcaaucuaugauaugauggggaaauauacauauccaguccugaaagaagauacuccuagacagcacguugacguguuuuuucaaaaaauggauaagaacaaggacggaaucgugacucucgacgaguuccuugagagcugccaggaagaugacaauaucaugcgaucacugcaacuauuccagaauguuauguag

SEQ ID NO: 30859 - RNA, 678 nt, Artificial Sequence
  derived and/or modified sequence
augagcggcuguucgaaaagguguaaguuaggauucgucaaguucgcucagaccaucuucaaguuaaucaccgggacccuuuccaaggauaaaauagaggacgagcucgagaugacaauggugugccacagacccgaaggacuggagcagcuggaagcccaaacaaacuuuacgaaacgagaacugcaaguccuguacagaggauucaaaaacgagugcccauccgggguggugaacgaggacacuuucaagcagaucuaugcacaguuuuucccccauggcgaugcauccaccuaugcacacuaucuauuuaacgcguuugacacaacucagaccggaagugucaaauucgaggauuuuguaacugcacuaaguauuuugcugcgggggacaguacaugagaagcuccguuggacuuucaaucuguacgauaucaacaaagauggguauauuaacaaggaagagaugauggacauugucaaagcaaucuaugauaugauggggaaauauacauauccaguccugaaagaagauacuccuagacagcacguugacguguuuuuucaaaaaauggauaagaacaaggacggaaucgugacucuugaugaauuccuagaaaguugccaggaggacgauaacauuaugagaucccuucagcuguuccaaaaugugauguag

SEQ ID NO: 30860 - protein, 226 aa, Artificial Sequence
  derived and/or modified sequence
MKRKQKRFLQMTLLFTVALIFLPNVGLWSLYKDKHLVKSAEPGEQQTFPLGLGDGQFYSWTDGLRRKDWHDYESIQKEAMRSGKGEHGKPYPLTEEDHDDSAYRENGFNIFVSNNIALERSLPDIRHANCKHKMYLERLPNTSIIIPFHNEGWTSLLRTIHSIINRTPGSLIAEIILVDDFSEREHLKDKLEEYMARFSKVRIVRTKKREGSGPVSWGHLWPEEKS

SEQ ID NO: 30861 - protein, 601 aa, Artificial Sequence
  derived and/or modified sequence
MKRKQKRFLQMTLLFTVALIFLPNVGLWSLYKDKHLVKSAEPGEQQTFPLGLGDGQFYSWTDGLRRKDWHDYESIQKEAMRSGKGEHGKPYPLTEEDHDDSAYRENGFNIFVSNNIALERSLPDIRHANCKHKMYLERLPNTSIIIPFHNEGWTSLLRTIHSIINRTPGSLIAEIILVDDFSEREHLKDKLEEYMARFSKVRIVRTKKREGLIRTRLLGASMARGEVLTFLDSHCEVNVNWLPPLLNQIALNHKTIVCPMIDVIDHNHFGYEAQAGDAMRGAFDWEMYYKRIPIPPELQRADPSDPFESPVMAGGLFAVDRKWFWELGGYDPGLEIWGGEQYEISFKVWMCGGEMFDVPCSRVGHIYRKYVPYKVPSGTSLARNLKRVAETWMDEFAEYIYQRRPEYRHLSTGDISAQKELRKQLKCKDFKWFMAAVAWDVPKYYPPVEPPPAAWGEIRNVAANLCVDSKHGATGTELRLDICVKDGSERTWSHEQLFTFGWREDIRPGEPLHTRKFCFDAISHNSPVTLYDCHGMKGNQLWGYRKDRTLFHPVSNSCMDCNPAEKKIFMARCDPLSETQQWIFEHINMTVLEKFNHHANS

SEQ ID NO: 30862 - DNA, 681 bp, Artificial Sequence
  derived and/or modified sequence
atgaagagaaagcagaagagattcctgcagatgaccctgctgttcaccgtggccctgatcttcctgcccaacgtgggcctgtggagcctgtacaaggacaagcacctggtgaagagcgccgagcccggcgagcagcagaccttccccctgggcctgggcgacggccagttctacagctggaccgacggcctgagaagaaaggactggcacgactacgagagcatccagaaggaggccatgagaagcggcaagggcgagcacggcaagccctaccccctgaccgaggaggaccacgacgacagcgcctacagagagaacggcttcaacatcttcgtgagcaacaacatcgccctggagagaagcctgcccgacatcagacacgccaactgcaagcacaagatgtacctggagagactgcccaacaccagcatcatcatccccttccacaacgagggctggaccagcctgctgagaaccatccacagcatcatcaacagaacccccggcagcctgatcgccgagatcatcctggtggacgacttcagcgagagagagcacctgaaggacaagctggaggagtacatggccagattcagcaaggtgagaatcgtgagaaccaagaagagagagggcagcggccccgtgagctggggccacctgtggcccgaggagaagagctag

SEQ ID NO: 30863 - DNA, 1806 bp, Artificial Sequence
  derived and/or modified sequence
atgaagagaaagcagaagagattcctgcagatgaccctgctgttcaccgtggccctgatcttcctgcccaacgtgggcctgtggagcctgtacaaggacaagcacctggtgaagagcgccgagcccggcgagcagcagaccttccccctgggcctgggcgacggccagttctacagctggaccgacggcctgagaagaaaggactggcacgactacgagagcatccagaaggaggccatgagaagcggcaagggcgagcacggcaagccctaccccctgaccgaggaggaccacgacgacagcgcctacagagagaacggcttcaacatcttcgtgagcaacaacatcgccctggagagaagcctgcccgacatcagacacgccaactgcaagcacaagatgtacctggagagactgcccaacaccagcatcatcatccccttccacaacgagggctggaccagcctgctgagaaccatccacagcatcatcaacagaacccccggcagcctgatcgccgagatcatcctggtggacgacttcagcgagagagagcacctgaaggacaagctggaggagtacatggccagattcagcaaggtgagaatcgtgagaaccaagaagagagagggcctgatcagaaccagactgctgggcgccagcatggccagaggcgaggtgctgaccttcctggacagccactgcgaggtgaacgtgaactggctgccccccctgctgaaccagatcgccctgaaccacaagaccatcgtgtgccccatgatcgacgtgatcgaccacaaccacttcggctacgaggcccaggccggcgacgccatgagaggcgccttcgactgggagatgtactacaagagaatccccatcccccccgagctgcagagagccgaccccagcgaccccttcgagagccccgtgatggccggcggcctgttcgccgtggacagaaagtggttctgggagctgggcggctacgaccccggcctggagatctggggcggcgagcagtacgagatcagcttcaaggtgtggatgtgcggcggcgagatgttcgacgtgccctgcagcagagtgggccacatctacagaaagtacgtgccctacaaggtgcccagcggcaccagcctggccagaaacctgaagagagtggccgagacctggatggacgagttcgccgagtacatctaccagagaagacccgagtacagacacctgagcaccggcgacatcagcgcccagaaggagctgagaaagcagctgaagtgcaaggacttcaagtggttcatggccgccgtggcctgggacgtgcccaagtactacccccccgtggagcccccccccgccgcctggggcgagatcagaaacgtggccgccaacctgtgcgtggacagcaagcacggcgccaccggcaccgagctgagactggacatctgcgtgaaggacggcagcgagagaacctggagccacgagcagctgttcaccttcggctggagagaggacatcagacccggcgagcccctgcacaccagaaagttctgcttcgacgccatcagccacaacagccccgtgaccctgtacgactgccacggcatgaagggcaaccagctgtggggctacagaaaggacagaaccctgttccaccccgtgagcaacagctgcatggactgcaaccccgccgagaagaagatcttcatggccagatgcgaccccctgagcgagacccagcagtggatcttcgagcacatcaacatgaccgtgctggagaagttcaaccaccacgccaacagctag

SEQ ID NO: 30864 - DNA, 681 bp, Artificial Sequence
  derived and/or modified sequence
atgaagagaaaacagaagcgcttcctgcagatgactttactcttcactgtcgctcttattttcctgccgaatgtgggactatggtcgctgtacaaagataagcaccttgtgaagtctgcagaacccggtgaacagcagacttttcctctcggcctcggagatgggcagttctatagttggaccgacggtcttaggagaaaagactggcacgactacgagagcattcagaaagaagctatgaggtctggcaagggagagcatgggaaaccatacccgttaacagaggaagatcacgacgattcggcatacagggagaacgggttcaatatctttgtttctaacaatatcgccctagagaggagtctccccgacatcaggcacgccaattgtaaacacaaaatgtacctggaacgcctgccaaacacttcaatcattattccattccacaatgaagggtggactagcctgctgcgcaccattcactctatcattaatagaacccccggatcactgattgcggaaattatacttgtcgacgacttctctgagcgcgaacatctgaaagacaagttggaagaatacatggccaggttttccaaggtgaggatcgttcgtaccaaaaaacgtgaggggtcaggccctgtgagctggggccacctgtggcccgaagagaagagttag

SEQ ID NO: 30865 - DNA, 1806 bp, Artificial Sequence
  derived and/or modified sequence
atgaaacggaaacagaagagattcctgcaaatgaccctcttattcacagtggccttgattttcttgcccaacgttgggctgtggagtctgtacaaggacaagcacttagtgaagagcgccgagccaggggagcagcagaccttcccactgggactgggagacgggcagttttattcctggaccgacggcttgcgcagaaaggattggcatgattatgagagcatacagaaggaagctatgcgctctggcaagggtgaacatgggaaaccctaccctctgacagaggaggaccacgatgactctgcttatagggagaatgggttcaatatatttgtctcaaacaacattgcactcgagcgatccctcccagacatacggcacgccaattgtaaacataagatgtacctggagcgcctgcctaataccagtatcatcatccctttccataatgaaggatggacatccctgctccggaccatccactccatcattaatagaacaccaggcagtctgattgccgaaatcatcctcgtcgacgacttctccgagagggaacatctcaaagataagcttgaagagtacatggcccgattttctaaagtcagaatagtgcgcacaaaaaaaagagaaggcctaattcgcactaggcttttaggggccagcatggcacgaggggaagtgctcacgttcctcgactcccactgcgaagttaatgtgaactggctcccccctctcctaaatcaaatcgcactcaaccacaagaccattgtttgccctatgatcgacgtgattgaccataaccacttcggctacgaggcacaggcaggcgacgccatgaggggcgcgtttgactgggaaatgtattataagagaattccaattccgccggaattacagcgggcagacccatcagatccattcgaatccccagtgatggccggtgggcttttcgctgttgatcgtaagtggttctgggagctgggggggtatgacccgggactggagatatggggtggtgaacagtacgaaatctcattcaaagtctggatgtgcggaggcgagatgttcgacgtcccatgcagcagagtaggtcacatctaccgcaagtacgtaccgtacaaagtccctagtgggacttcacttgcgcgaaaccttaaaagggttgccgaaacttggatggatgaattcgcagaatacatttatcagcggcgtcccgaataccgacatttgtccactggagacatctcagcacaaaaggagctgagaaagcagctgaaatgcaaagattttaaatggtttatggctgctgtggcatgggatgtgcctaagtactaccctcctgtggaaccaccacccgcagcctggggcgaaatccgaaacgttgcggcgaatttatgtgtggattctaaacatggcgcaacaggaaccgaactgcgactggatatttgcgttaaggacggtagtgaacgaacctggtctcacgaacaattatttactttcggatggagggaagatatcaggccgggtgaaccactgcatactcgcaagttttgctttgatgccataagccacaatagccctgtaactctctacgattgtcacggaatgaaaggcaaccaattgtggggctacaggaaagatcgaacactgtttcatcctgtgtccaactcttgcatggactgcaaccctgctgaaaagaaaatattcatggcaagatgtgaccctctgtctgaaacccagcaatggatattcgagcacattaacatgactgtgctcgagaaatttaatcaccatgctaactcatag

SEQ ID NO: 30866 - DNA, 681 bp, Artificial Sequence
  derived and/or modified sequence
atgaagaggaagcagaagcgcttcctgcagatgaccctgctcttcaccgtggccctgatcttcctgcccaacgtgggcctgtggagcctgtacaaggacaagcacctggtgaagtctgctgagcccggggagcagcagaccttccccctgggcctgggagatggccagttctacagctggacagatggcctgcggaggaaggactggcatgactatgagagcatccagaaggaggccatgaggtctgggaagggggagcacggcaagccctaccccctgacagaggaggaccatgatgattctgcctacagagaaaatggcttcaacatctttgtgagcaacaacatcgccctggagaggagcctgcctgacatcagacatgccaactgcaagcacaagatgtacctggagcggctgcccaacaccagcatcatcatccccttccacaatgaaggctggaccagcctgctgcggaccatccacagcatcatcaacagaacacctggcagcctgattgctgagatcatcctggtggatgacttcagcgagcgggagcacctgaaggacaagctggaggagtacatggcccgcttcagcaaggtgagaattgtgaggaccaagaagcgggagggcagcggccctgtgtcctggggccacctgtggccagaggagaagagctag

SEQ ID NO: 30867 - DNA, 1806 bp, Artificial Sequence
  derived and/or modified sequence
atgaagaggaagcagaagcgcttcctgcagatgaccctgctcttcaccgtggccctgatcttcctgcccaacgtgggcctgtggagcctgtacaaggacaagcacctggtgaagtctgctgagcccggggagcagcagaccttccccctgggcctgggagatggccagttctacagctggacagatggcctgcggaggaaggactggcatgactatgagagcatccagaaggaggccatgaggtctgggaagggggagcacggcaagccctaccccctgacagaggaggaccatgatgattctgcctacagagaaaatggcttcaacatctttgtgagcaacaacatcgccctggagaggagcctgcctgacatcagacatgccaactgcaagcacaagatgtacctggagcggctgcccaacaccagcatcatcatccccttccacaatgaaggctggaccagcctgctgcggaccatccacagcatcatcaacagaacacctggcagcctgattgctgagatcatcctggtggatgacttcagcgagcgggagcacctgaaggacaagctggaggagtacatggcccgcttcagcaaggtgagaattgtgaggaccaagaagcgggagggcctcatccgcacccggctgctgggcgcctccatggcccggggggaggtgctgaccttcctggacagccactgtgaggtgaatgtgaactggctgccccccctgctgaaccagatcgccctgaaccacaagaccatcgtgtgccccatgattgatgtgattgaccacaaccacttcggctatgaggcccaggccggagatgccatgagaggagcctttgactgggagatgtactacaagaggatccccatccccccagagctgcagagagctgaccccagcgacccctttgagagccctgtgatggccggcggcctgtttgctgtggacaggaagtggttctgggagctgggcggctatgaccccggcctggagatctggggcggggagcagtatgagatctccttcaaggtgtggatgtgtggcggggagatgtttgatgtgccctgcagccgggtgggccacatctacagaaaatatgtgccctacaaggtgcccagcggcaccagcctggccaggaacctgaagagggtggccgagacctggatggatgaatttgctgagtacatctaccagaggaggcctgagtaccgccacctgagcactggagacatcagcgcccagaaggagctgaggaagcagctgaagtgcaaggacttcaagtggttcatggctgctgtggcctgggatgtgcccaagtactacccacctgtggagcccccacctgctgcctggggcgagatcagaaatgtggccgccaacctgtgtgtggacagcaagcatggagccaccggcacagagctgcggctggacatctgtgtgaaggatggcagcgagaggacctggagccatgagcagctgttcaccttcggctggagggaggacatccggcctggagagcccctgcacaccaggaagttctgctttgatgccatcagccacaacagccctgtgaccctgtatgactgccacggcatgaagggcaaccagctgtggggctacaggaaggacaggaccctcttccaccctgtgagcaacagctgcatggactgcaacccagctgagaagaagatcttcatggcccgctgtgaccccctgtctgagacccagcagtggatctttgagcacatcaacatgacagtgctggagaagttcaaccaccacgccaacagctag

SEQ ID NO: 30868 - DNA, 681 bp, Artificial Sequence
  derived and/or modified sequence
atgaagcggaagcagaagcggttcctgcagatgaccctgctgttcaccgtggccctgatctttctgcccaacgttgggttgtggtctctctacaaggacaagcacctcgtaaagtccgccgaaccgggagagcagcagactttcccgctgggcttgggagatggacagttctactcatggacggatggactgcggcggaaagactggcacgattatgagtcaatccagaaagaggcaatgcgatccgggaaaggggagcacggaaagccttacccacttacagaggaggatcacgatgactcagcctatcgagaaaacggcttcaatatcttcgtttctaataacatagcactggaaagaagcctgcccgacatcagacacgcaaactgtaaacacaagatgtacctcgaaaggctacccaacactagcattatcatcccctttcataatgagggttggacttccctgctcagaacaatccattcaataataaaccgcacaccaggatctttgatcgctgagattatactggtcgacgattttagtgaacgggagcatttgaaggacaagttggaggaatacatggctaggttctcaaaggttaggattgtccgcaccaaaaagcgagagggttcagggccagtgagctggggccacctttggccagaggaaaaatcatag

SEQ ID NO: 30869 - DNA, 1806 bp, Artificial Sequence
  derived and/or modified sequence
atgaagcggaagcagaagcggttcctgcagatgaccctgctgttcactgtagctttgatctttctgccaaatgtgggcctgtggtccttgtacaaggacaagcatctggttaaaagcgctgagcctggcgaacagcagacttttcccctggggctgggcgatggccagttttacagctggaccgacggactccggcggaaagactggcacgattacgagtccatccagaaagaggccatgcggtctggcaagggcgagcacggcaagccctaccctctcactgaagaggatcatgatgatagcgcttatagagagaacgggttcaacattttcgtctcaaacaacatcgcactggaacggtcactcccagatataaggcacgcaaattgcaaacacaagatgtatctcgagcggctcccgaatactagcatcatcatcccctttcacaacgagggatggactagccttctgcggacaattcactcaatcattaacagaacgcctgggtcgctaatcgccgaaatcattctagtggatgatttcagcgaaagggaacacctcaaagataagctggaggaatatatggcccgattttccaaagtgagaatcgtgcgcacaaagaaacgtgagggcctcatcagaacgagactgctcggagcctccatggcgcgcggtgaggttctgacattcctggacagccactgcgaagtgaacgtgaattggctcccccctctccttaaccagatcgccctcaaccacaagactattgtctgtcctatgatcgacgtgattgaccacaatcactttgggtatgaggcacaggctggggatgccatgcggggggccttcgactgggaaatgtactataagaggatcccgatcccccccgagttacagagggccgacccttcagacccctttgaaagccccgtgatggccggcggcctgttcgctgtcgataggaaatggttctgggaactgggagggtacgacccagggctggaaatttggggaggggaacagtacgagatcagcttcaaggtgtggatgtgcggaggtgagatgtttgatgtcccatgttcacgggtggggcatatctatagaaagtatgtgccgtataaggtaccgtctggcacatcactggctagaaacctcaaacgcgtagccgaaacttggatggatgagtttgctgaatacatataccagcgaagacctgaatatcgacacctgtctaccggagacatctcagcccagaaggagctccgcaagcagcttaagtgcaaagactttaagtggttcatggccgctgttgcatgggatgtccccaagtactatccacccgtcgaacccccgcctgccgcttggggtgaaatccgcaacgtggcagctaatctgtgcgttgacagtaaacatggcgcaaccggcaccgaattgcggttggacatctgcgttaaggatgggtctgaacgcacatggtctcatgagcaacttttcacattcggatggagggaggacattcgccctggcgagccattgcacaccaggaaattctgtttcgatgccatttctcacaactcccccgtcactctgtacgattgtcatggaatgaaaggaaatcaactatggggctacaggaaggataggactcttttccatcccgtctcaaacagctgtatggattgtaatcccgcagaaaagaagatcttcatggcacggtgtgacccactgagtgaaacacaacaatggatcttcgagcacatcaacatgaccgtgttggaaaagtttaaccatcacgctaattcttag

SEQ ID NO: 30870 - DNA, 681 bp, Artificial Sequence
  derived and/or modified sequence
atgaaaaggaagcagaaaaggtttctccagatgacactcctgtttacagtggccctcatcttcctccctaacgtcggactctggtctctgtacaaggacaaacacctcgttaagagcgctgagcccggagagcagcagacgttccctttgggactcggcgacggacagttttactcttggaccgacggccttagaagaaaggattggcacgattacgaatcgatccaaaaggaggctatgagaagtggtaaaggtgagcatggaaagccctacccgctcaccgaggaagaccacgatgacagcgcctatcgggaaaacggcttcaacattttcgtcagcaacaatatagctttggaaagatcgttgcccgacattcgccatgcaaattgtaaacataaaatgtatctcgagcgcctcccaaatactagtatcattatccctttccataacgaagggtggaccagccttctgaggaccattcattccattatcaaccgcacccccggatcgctaatagcagagatcatattggtggatgactttagcgaacgcgaacacttaaaagacaagctcgaggagtacatggccaggttcagcaaagtgcgtatcgttagaactaaaaaaagggaagggagcggccctgtgtcttggggccacctttggcccgaagaaaagtcctag

SEQ ID NO: 30871 - DNA, 1806 bp, Artificial Sequence
  derived and/or modified sequence
atgaaaagaaaacagaagagattcttgcagatgaccctgctgttcacagtggctctgatctttctgcccaatgtgggtctctggagcttatataaggacaagcatttagtcaagtcagctgagccaggcgagcagcaaaccttcccgctcggcctcggagatgggcaattctattcttggactgatgggttaaggcgcaaagattggcacgattacgaaagtattcaaaaggaggccatgcggtctggaaaaggcgagcatgggaaaccatacccgttaaccgaagaggaccacgatgactcagcttatagagagaatggattcaacattttcgtctctaataacatcgccctggagaggagccttcctgacataaggcatgcaaattgcaagcataagatgtacctggagaggcttcctaacacaagcatcattatcccctttcacaatgaaggttggacttccctgctgcgtacaattcatagcatcataaatcggaccccaggctcactgattgcagagataatcctggtggacgatttctcagagagagaacacttaaaagacaaattggaagagtacatggccaggttctcgaaggtgagaattgtgcggaccaaaaaaagagagggtctcattaggaccaggctcttaggagcctcaatggcgaggggcgaggtcctcacatttttggactcacattgtgaggttaacgtcaactggctacctcctcttttaaaccagatagcactaaatcacaaaactattgtctgcccaatgatagatgtcattgaccacaatcactttgggtatgaggcacaggctggagacgctatgcgcggagcatttgactgggagatgtattataaacgaattccaatcccccctgagctacagagagctgatccaagcgacccttttgagagccccgtaatggccggagggctatttgccgtcgatcgaaagtggttctgggaactggggggttatgatcctggccttgagatctggggtggagagcagtatgagatctcatttaaggtatggatgtgtggcggtgagatgtttgatgttccctgctcgagggtgggccatatctaccgaaagtatgttccttacaaagtccccagcggcacttccctggcacggaacttgaaaagagtagccgaaacctggatggacgagttcgcagagtacatttatcaaagaaggcccgagtaccgccatctcagcacaggcgatatctccgctcagaaagaattgaggaagcagctgaagtgcaaggactttaagtggttcatggccgctgtagcatgggatgttcccaaatactaccctcctgtcgaaccgcctcccgcagcatggggggaaatcagaaatgtggccgcaaacctctgcgtggacagtaagcatggtgcaacaggcacggaattacggctggacatctgtgtcaaagacggcagtgagaggacctggtcccacgagcagctgtttacctttggatggagggaggatatccgacctggggaaccactgcacacccggaaattttgcttcgatgccataagccacaatagccccgttacattgtatgactgccatgggatgaagggcaaccaactgtggggatatcggaaggaccgcacactcttccacccagtgagtaattcatgcatggattgtaacccagcggaaaagaagatctttatggcgaggtgcgatccattgtctgagacacagcaatggatttttgaacacatcaacatgaccgttctcgagaaattcaaccaccacgctaattcttag

SEQ ID NO: 30872 - DNA, 681 bp, Artificial Sequence
  derived and/or modified sequence
atgaagaggaaacagaagagatttctgcagatgactttgttgttcacggtggctttaattttcctgcctaacgttggtctctggtctctgtacaaggataagcacctggtgaagtcagcggagcccggggagcagcagacatttccactgggcctgggagatgggcaattctattcatggacagatggtttgagaagaaaggactggcatgactatgaaagcattcagaaagaggctatgcgctcagggaaaggtgaacatgggaaaccttacccccttactgaagaggaccatgatgactcagcttacagggaaaatggttttaatattttcgtcagcaacaatattgctctagagaggtctctgccagatattcgtcatgctaactgtaagcataagatgtatctggaaaggctgccaaacaccagcatcattatcccatttcataatgaaggttggacttcactcctgcggaccatacacagtataattaaccgaaccccagggagtctgatagcagaaatcattctagtagatgacttcagtgagagagaacacctgaaggataaattggaagaatacatggcccgattttccaaagtgaggattgttcgcaccaagaaaagagaaggatccggacccgtctcctgggggcatctatggccagaggagaagtcctga

SEQ ID NO: 30873 - DNA, 3922 bp, Artificial Sequence
  derived and/or modified sequence
gcagcgccctcgtccgcttccaagcccagcacagacttcggtttctccgcctccatcccctttacgagaagaggagatcaaaaaatattgccctttaggtgctcgtgatggtcctgtgggttcgttcagttgccagaaaagaatggtaacatgaacagcggagcgtgagagcgtcaccgggggaagggacgagattgatgggcagagcgctcacttctcagaggatcgcattccgaggaccgcgcgaggaagggacgtcgcggcgccaccacttcctggctggactccgctgacatctgtagcctcctttccaccaggttcccggggctcccagccgctgcctgcagaggagcgtgtagacagcgcgcgagggtccggcacttcgtggacctccatccgaaccggagttctgcccggatcccgagtccctggatcccggtggagcccgccggcaagctggctccggagggagttgaacttgagttcagatggccaactccctctgaatcctgcagattggtgctgagcacgcaacaaaagtttgtagcttctcagtttctggtgcttcgcaggggagaggaaaggaatttgacattaaacacaagaagcagtcagggagccatctcctttaacttttcttctctgttaccatttgcaatgaagaggaaacagaagagatttctgcagatgactttgttgttcacggtggctttaattttcctgcctaacgttggtctctggtctctgtacaaggataagcacctggtgaagtcagcggagcccggggagcagcagacatttccactgggcctgggagatgggcaattctattcatggacagatggtttgagaagaaaggactggcatgactatgaaagcattcagaaagaggctatgcgctcagggaaaggtgaacatgggaaaccttacccccttactgaagaggaccatgatgactcagcttacagggaaaatggttttaatattttcgtcagcaacaatattgctctagagaggtctctgccagatattcgtcatgctaactgtaagcataagatgtatctggaaaggctgccaaacaccagcatcattatcccatttcataatgaaggttggacttcactcctgcggaccatacacagtataattaaccgaaccccagggagtctgatagcagaaatcattctagtagatgacttcagtgagagagaacacctgaaggataaattggaagaatacatggcccgattttccaaagtgaggattgttcgcaccaagaaaagagaaggactcatccggacccgtctcctgggggcatctatggccagaggagaagtcctgacattcctggactcccactgcgaggtcaatgtgaactggctgcccccactcctcaaccaaattgcactaaaccacaaaaccatcgtgtgtcccatgatcgatgtcattgaccacaatcacttcgggtatgaggcacaagctggggatgccatgcgaggagccttcgactgggaaatgtactacaaaagaatccccatccctccagagctccagagggcagatcccagcgacccttttgagtctcctgttatggctggaggtctctttgctgtggatcggaaatggttttgggaattgggtggctatgatccaggtttagaaatctggggaggagaacagtatgaaatctcttttaaggtttggatgtgtggaggagaaatgtttgatgttccatgttctagagttggtcatatctacaggaagtacgttccatacaaagttccatctgggacaagcctggcaagaaacctgaagcgggtagctgagacctggatggatgaatttgccgagtacatttaccagcggcggccggagtacaggcatctctccacgggggacatctctgcccagaaggagctgcgcaagcagctcaagtgcaaggacttcaaatggttcatggctgctgtggcctgggacgtgcctaaatactaccctccagtggagcccccgcctgctgcctggggggagatccgaaatgtggcagcaaatctctgtgtggacagcaagcatggagccaccggaacagagctgaggctggacatctgtgtcaaggatggttctgaaagaacatggtctcatgaacagctttttacctttggatggagagaagatattcgacccggtgagccactgcatacccggaaattctgctttgatgcgatctcacacaacagccccgttacactctatgactgtcatggcatgaaggggaaccagctctggggataccggaaggacagaacattattccatcctgtgagcaacagctgcatggattgcaaccccgcagagaagaagattttcatggccagatgtgaccctctctctgagactcagcagtggatttttgaacacattaatatgactgttttagaaaaatttaaccaccatgccaactcctagaaagaagaaaggaagaaagagtgattacctacaggttataaattaaattttagccagcatctgggtcgaaggagtcaggaataacatttcctcgatccaggaaggctggtttaaaaatttgcaaatgccatgtcaaagtaggttgttttgaagaacttcctgcatctgaagaacttggctgagaatctcaccagctgcttctgagaactcgagactagcagttcccttgctggccaagggcaaagataatttagggacttttcaaaacaactgctgagctaataaatcctagcatttctcaggtcaaatcctgcagtagtgagtagctatgaatggatcctattaactgggtgggaggggggtgaaaatggagtgcatgactgctctgacaacctgaggatatcacaggtttagaactagccaagcttaaggggtgagctgtactctttggtgccattctctgactaagaatgggttcagcaggtttaacccttaaaagtgctgcagatgatttcagagtgctcacactattctgttttttttatttttatttttaaatgagggtgcaatatctaatgtaagacttaaattacataatgaaatggacatccagtgttcccattctttcgtttatatttgccatttttttttcagagcaaagtttcttttttatgaaagttcatgctccatgaatccactgaatttctaattcagtgcccttctatgaatccagttaaaaacaaaagcaaaagcaaaaatctatgctatcaagttactccaaagaaagatttcacagaagcagcaaaaccatataagatttaggagagggacttccctgggaaatctatttttacttttctattatttttaaaatcttaaaagtctgatatttgtccagtcataatttttattaagcaaggaaatggagtgagtttgatgtaatttgtttaggagattcttaaacccaaataaatctacactccaagtgatatgtgaaaatggcttagttcacttcaattctgtttagtcagtggtgggagcttagaagtggttttatttgttcgtttgtttgggttttgcttttgttttttatttttttcttgttttttttttgtagtgttgaattaatgatgttcttttatttggaagctcataaaaggaattaccattaataaagtgtttctgacaccattttctgttaatgggacaatatttcggggatgaagaaaggaatgctccgaaaactaaatggaacacttaatccttaaagcaattttttactgttcaataatatcacattgggggaagaaaacacaggtatcaaggtggttcttgggaaaaaagaatcatgtttattatatatctctcaagtttttttggtataaaaatgttttaactttgctttctttttggtttttgtttgaagttggttttcctgttaataaaaatttatataaca

SEQ ID NO: 30874 - protein, 497 aa, Artificial Sequence
  derived and/or modified sequence
MASPAPPEHAEEGCPAPAAEEQAPPSPPPPQASPAERQQQEEEAQEAGAAEGAGLQVEEAAGRAAAAVTWLLGEPVLWLGCRADELLSWKRPLRSLLGFVAANLLFWFLALTPWRVYHLISVMILGRVIMQIIKDMVLSRTRGAQLWRSLSESWEVINSKPDERPRLSHCIAESWMNFSIFLQEMSLFKQQSPGKFCLLVCSVCTFFTILGSYIPGVILSYLLLLCAFLCPLFKCNDIGQKIYSKIKSVLLKLDFGIGEYINQKKRERSEADKEKSHKDDSELDFSALCPKISLTVAAKELSVSDTDVSEVSWTDNGTFNLSEGYTPQTDTSDDLDRPSEEVFSRDLSDFPSLENGMGTNDEDELSLGLPTELKRKKEQLDSGHRPSKETQSAAGLTLPLNSDQTFHLMSNLAGDVITAAVTAAIKDQLEGVQQALSQAAPIPEEDTDTEEGDDFELLDQSELDQIESELGLTQDQEAEAQQNKKSSGFLSNLLGGH

SEQ ID NO: 30875 - DNA, 3268 bp, Artificial Sequence
  derived and/or modified sequence
accgccgccccgccctcggcggcacccacacccaggcgcgcccgcgcgcgcgcccggccccgtccctgtctggaagcacagctgaagatggcgagcccggcgcctccggagcacgccgaggagggatgcccggctcctgccgccgaggagcaggcgccgccgtcgccgccaccgccccaggcatcccccgcagagcggcagcagcaggaggaggaagcgcaggaagctggggcggcggagggcgcggggttgcaggtggaggaggccgcgggccgggcggcggccgcggtaacctggctgctcggggagccggtgctgtggctgggctgccgcgccgacgagctgctgagctggaagaggccgctgcggagcctgctcggcttcgtcgctgccaacctgctgttctggttccttgcattgactccatggagagtatatcacctgatttccgtcatgatacttgggcgtgttattatgcaaataataaaggatatggttttgtctagaacaagaggtgcacagttgtggagaagcctcagtgaaagctgggaagttatcaattccaaaccagatgaaagacccaggctcagccactgtattgcagaatcatggatgaatttcagcatatttcttcaagaaatgtctctttttaaacagcagagccctggcaagttttgtctcctggtctgtagtgtgtgcacattttttacgatcttgggaagttacattcctggggttatactcagctatctactgttactgtgtgcatttttgtgtccattgtttaaatgtaatgatattggacaaaaaatttacagcaaaattaagtcagttctgctgaaactggattttggaattggagaatatattaatcagaagaaacgtgagagatctgaagcagacaaagaaaaaagtcacaaagatgacagtgaattagacttttcagctctttgtcctaagattagcctcacggttgctgccaaagagttatctgtgtctgacacagacgtctcagaggtatcctggactgataatgggaccttcaacctttcagaaggatacactccacagacagacacttctgatgatcttgaccgacccagtgaggaagttttctctagagatctttcagattttccatctctagaaaatggcatgggaacaaatgatgaagatgaattaagccttggtttgcccactgagctcaagagaaagaaggaacagttggacagtggtcacagaccaagcaaagagacgcaatcagcagctggtctcacccttcctctgaacagtgaccaaacctttcacctgatgagcaacctggctggggatgttatcacagctgcagtgactgcagctatcaaagaccagttagagggtgtgcagcaagcactttctcaggctgcccccatcccagaagaggacacagacactgaagaaggtgatgactttgaactacttgaccagtcagagctggatcaaattgagagtgaattgggacttacacaagaccaggaagcagaagcacagcaaaataagaagtcttcaggtttcctttcaaatctgctgggaggccattaatctaggaatcagcttgcaacagagcacaaaaaacaccaaaaaaatttcaaacaagaaaaaaaaaaaaaaaaggaaaagaaaaaaattgaactgtaagctttaatgattactttagatttgttttattttccctcctgcagtgaattaattggatatatatcagctgacactgatagattgatatttctgatcgttatttttgtgtaataagcatggaaatgaactttatacacaccactgtgttgtcagagataaatattaggggttgtttttaaagcaaaaagaaaaaaacaaaaaccaaactattaaaatcctcctataaatattctttttctttacagtttttcaagcatgcaaaacagtttattgtaacttactgaaaaatattaacaattaattgtgaatacatgctgttaccagcttccttattcctaatacctggaaaatttttttttcaacggatagattttgatgtaaaaaagaccgaaattatcaaggtatcttagttgaaggacttgggaaatactatcaaaattaatttcttaggaaaaaatttaaaagtatatttaagtactctggatagactgaaacgtttccatgttatttctgcagttgtagacttaggcttatttgtaaagaagcatgctccattgactgccatctctagtcttgcagtgggtggtattaacccatagaaagcaagcagttgtgtatcacatagacaatggttatgatgtaaacagattcagttgttttgttgttcattcgtcatatgtttgtgatagggatgttgggagcacagctctattctgcctgctcagacttaagttagacccttatcttttatattatgtcatgaaaaaagtctcctaaaattgtgaaactagttcttgatgagtgatgtgatcatcagcaataaagatataataactctgttttcttagcctgtatagaggagaggaacttgcttggctttaaaatatatttatttgccatttaagtataaatatggaatctgtttcttattgggaagatagaatatatatattttcctttaaactttttaaggtcacttttaaataaccaaatttgatttatggtttttaacaaaggactaaagagctgaaaccaacctagttttgtttttgtgatataaactttaagtgtcgagggaccatgccagcaactaccaaaaatctcttaaatcttcaggtacagctggcattttggcagatgcatagagacatctgagaccctcagaaaggaaggataatccaagaatataggaaatctgtgttctcttcctttcattttatcccttatatttctaaagactaattataagtaatctgacattttaatgtagctactcttatttattttttctttctgaggtattaaaatatctggactgagttttgccaaatgttaaagggagaagagttactgaagactttgaacacttgctttttgtgattgcttatgtcattagtgcctcatgactgtgtttgatgtcctttattgatacaaagtgagcctgtgccttcattatcttgcccattttaatacaaatggaaacctggtgtttgaaaatctctgaactgtgtgggttttggaggaatatacctgaattttattcaataacagtttctggacaggaagaaaaatacagttacatatttataaa

SEQ ID NO: 30876 - DNA, 1494 bp, Artificial Sequence
  derived and/or modified sequence
atggcctcacccgcaccacccgaacacgcggaagagggctgtcccgcaccagccgcggaggaacaggccccgcctagcccacccccgcctcaggcaagtccagcggagcggcagcaacaggaagaagaagcgcaggaggccggcgcagcagagggggccggcctgcaggtcgaagaagccgccgggagggccgccgccgccgttacatggttacttggtgaacctgtactatggctgggctgtcgggccgacgaattgttaagctggaagagaccactccggagcctcctcgggtttgtggccgccaatctgctattctggtttcttgccctgaccccctggcgcgtttaccacctgatatccgtcatgattctggggcgcgtgatcatgcagattattaaggacatggtcttgagtagaacacgcggtgcccagctgtggcggagtctgtccgaaagctgggaagtcattaattcgaaacctgacgagcgtcctagactctcccactgcatcgcggagtcctggatgaacttctccatattcctccaggagatgtccctttttaagcaacagtctcctggaaagttctgtctccttgtgtgttctgtctgcacgttcttcactatcttagggtcatatatccctggtgtcatcttgtcttatttgcttctgctttgtgctttcctctgccccctgtttaagtgtaatgacatcgggcagaaaatttatagcaaaatcaaatcagttcttttgaaacttgatttcggaatcggtgaatatattaatcagaagaaacgggagaggagtgaggccgataaagaaaagtcgcataaggacgatagcgagctcgacttttcggcactctgccccaagatttcactgacagtcgccgccaaggaactcagcgtgtccgacacggatgtttccgaagtctcctggactgataacgggacgttcaatctcagtgagggctacaccccccagacagacacgagcgatgacctcgataggcctagcgaggaggtgttctccagggacctgtcagatttccctagcctggagaatggcatggggactaatgacgaggacgaacttagccttggattgccgacggagctgaaacgaaagaaggaacagctggattcgggacaccggcccagtaaagaaactcaatcagctgcggggctgaccttgcccttaaacagcgatcagacgtttcaccttatgagcaacctagcgggggatgtgattaccgctgccgtgacggccgcgatcaaggatcagttagaaggcgtgcagcaggccctctctcaagccgctccgattcccgaagaggacaccgatacagaggagggcgatgacttcgagctcctcgatcagagtgagcttgaccagattgaatctgagctaggtctcacgcaggaccaggaggccgaagctcagcagaacaagaagtcctccggtttcttgagcaatttgctgggcggccactag

SEQ ID NO: 30877 - DNA, 1494 bp, Artificial Sequence
  derived and/or modified sequence
atggccagccctgcccctcctgagcacgccgaggagggctgcccagccccagctgctgaggagcaggccccacccagccccccaccaccccaggccagccctgctgagcggcagcagcaggaggaggaggcccaggaggccggggctgctgagggcgccggcctgcaggtggaggaggccgccggccgggctgctgctgctgtgacctggctgctgggggagcctgtgctgtggctgggctgcagagcagatgagctgctgtcctggaagaggcccctgcggagcctgctgggctttgtggccgccaacctgctcttctggttcctggccctgaccccctggagggtgtaccacctgatctctgtgatgatcctgggccgggtcatcatgcagatcatcaaggacatggtgctgagcaggaccaggggggcccagctgtggaggagcctgtctgagagctgggaggtgatcaacagcaagccagatgagcggccccggctgagccactgcatcgccgagagctggatgaacttcagcatcttcctgcaggagatgagcctcttcaagcagcagagccctgggaagttctgcctgctggtgtgcagcgtgtgcaccttcttcaccatcctgggcagctacatccctggggtcatcctgagctacctgctgctgctgtgtgccttcctgtgccccctcttcaagtgcaatgacatcggccagaagatctacagcaagatcaagtctgtgctgctgaagctggactttggaattggagagtacatcaaccagaagaagcgggagaggtctgaggccgacaaggagaagagccacaaggatgattctgagctggacttcagcgccctgtgccccaagatcagcctgactgtggccgccaaggagctgtctgtgtctgacacagatgtgtctgaggtgtcctggacagacaatggcaccttcaacctgtctgagggctacaccccccagacagacaccagtgatgacctggaccggcccagcgaggaggtgttcagccgggacctgagtgacttccccagcctggagaatggcatgggcaccaatgatgaagatgagctgagcctgggcctgcccacagagctgaagaggaagaaggagcagctggacagcggccaccggcccagcaaggagacccagagcgctgctggcctgaccctgcccctgaacagcgaccagaccttccacctgatgagcaacctggccggagatgtgatcacagctgctgtgacagctgccatcaaggaccagctggagggcgtgcagcaggccctgagccaggccgcccccatccctgaggaggacacagacacagaggagggagatgactttgagctgctggaccagagcgagctggaccagatcgagagcgagctgggcctgacccaggaccaggaggccgaggcccagcagaacaagaagagcagcggcttcctgagcaacctgctgggcggccactag

SEQ ID NO: 30878 - DNA, 1494 bp, Artificial Sequence
  derived and/or modified sequence
atggccagccccgccccccccgagcacgccgaggagggctgccccgcacccgcagctgaggagcaggctcccccgagtcccccccccccccaggcctccccagcagagcgacaacagcaggaagaggaggcacaggaggctggcgctgctgagggcgctggacttcaggtagaagaagccgctggacgggcagccgccgcagtgacgtggctgctcggcgaacctgtgctctggctgggatgccgggctgatgaattactatcctggaagagaccgctacggtccctgctgggcttcgttgcagccaatctcctgttctggtttcttgccctcacgccctggcgggtctatcacctgattagcgtgatgattctggggcgcgtcataatgcagataatcaaggatatggtgctatccaggacacgcggagcccaactttggaggtccttgtccgaaagctgggaagtgattaactctaagcctgacgaacggcccaggctgagtcattgcatcgcggagagttggatgaattttagcatcttcctgcaggaaatgtccctgtttaaacagcagtcaccaggcaagttctgtttactcgtctgctctgtctgtactttctttacaatactaggatcttatatccctggggtgatcctttcctaccttctactgctctgtgcattcctttgtccactgtttaagtgcaacgacatcggccagaaaatctattctaaaataaagagtgtcctacttaagctggattttggaatcggtgaatacatcaaccagaagaagagagagcgatctgaagctgataaggaaaaatcccacaaggatgactccgagctggacttcagcgccctttgtccgaaaatatccttgactgtggcagccaaagagttgtccgtcagtgacaccgacgtttccgaagtgtcttggacagataatggaacctttaacttaagcgagggctacacccctcagacggatacatccgatgatcttgacaggcctagcgaggaagttttcagcagggacctgtcggactttccgtctctagaaaatggaatgggaacaaatgacgaggatgaactttccctgggcctgcccactgagctcaagcgaaagaaggaacagcttgactccgggcatcgcccatcgaaggaaactcagagcgccgcgggcctgacgctgccactgaattctgaccagacctttcatctaatgtctaaccttgccggcgacgtgatcaccgctgctgtgaccgccgccatcaaggaccagctggaaggcgttcagcaggccctgagccaggcagcacctatccccgaagaggacacagataccgaagagggggacgatttcgaactgcttgaccagtccgagctggatcagatcgagtcggaactgggcctgacccaggatcaagaggccgaagcacagcaaaataaaaaatcaagcggttttctatccaatctgctgggcggacattag

SEQ ID NO: 30879 - DNA, 1494 bp, Artificial Sequence
  derived and/or modified sequence
atggcatcgccggcacctccagagcatgccgaagaaggatgccccgcacccgctgccgaggaacaggcccctccatcccccccacctccccaggcctctcccgctgagcgccagcaacaggaggaggaagcacaggaggccggtgccgctgagggtgcaggactgcaagtagaagaggcagcaggtcgcgctgctgccgcagttacatggctgctaggggagcctgtgttgtggctgggttgtcgagctgatgagctgttatcctggaagcggccactgaggtctctgttgggttttgtggcagccaacttgcttttttggttcttggcattgacaccttggagggtgtaccaccttatcagcgtgatgattttgggcagagtcattatgcagattattaaagacatggtgctatctaggacaagaggcgcacaactctggagaagtctgagtgaatcgtgggaagtgataaacagtaagcctgatgaacgaccaaggctttcacactgtatcgctgagtcctggatgaatttttccatttttctacaagaaatgtccttatttaagcagcagagcccgggtaagttttgtcttttggtctgttcggtttgtacttttttcaccattctcggctcctacattcccggagttattttgagttacctgttactcttgtgtgctttcctgtgcccgctatttaagtgtaacgacatcgggcagaagatctattctaaaattaaaagcgtcctcctgaaactcgacttcggaattggggagtacatcaaccagaagaaacgggagcggagcgaggccgacaaggagaagtcacacaaggacgacagcgagttagatttttccgcactgtgcccaaaaatttccctcaccgtcgctgccaaggaactcagtgtgtctgacacagatgtcagcgaagtatcatggactgacaacggcacttttaacctctctgagggctatacaccgcagactgacactagcgatgacttagaccgaccgtccgaagaggttttcagccgcgaccttagtgatttccctagcctggagaatggaatgggaacgaatgacgaggacgaactctctctcggcttaccaacagagctcaaaaggaaaaaggaacaactagattccggccacaggccatctaaagagactcaatcggccgcaggattgaccttacctttaaatagcgatcaaacctttcatctcatgtccaacctagcgggagacgtgatcacagctgcagttaccgccgcaatcaaggaccagctggagggtgtgcagcaagctctctcacaggctgcccctatcccggaggaggatacagacactgaggagggggacgattttgaactgttggaccaaagtgagctggaccagattgagtccgaactgggcctaactcaggaccaggaagcagaagctcagcagaacaaaaagagctccgggttcctgtctaatctcctagggggtcattag

SEQ ID NO: 30880 - DNA, 1494 bp, Artificial Sequence
  derived and/or modified sequence
atggccagccccgccccccccgagcacgccgaggagggctgccccgcccccgccgccgaggagcaggccccccccagccccccccccccccaggccagccccgccgagagacagcagcaggaggaggaggcccaggaggccggcgccgccgagggcgccggcctgcaggtggaggaggccgccggcagagccgccgccgccgtgacctggctgctgggcgagcccgtgctgtggctgggctgcagagccgacgagctgctgagctggaagagacccctgagaagcctgctgggcttcgtggccgccaacctgctgttctggttcctggccctgaccccctggagagtgtaccacctgatcagcgtgatgatcctgggcagagtgatcatgcagatcatcaaggacatggtgctgagcagaaccagaggcgcccagctgtggagaagcctgagcgagagctgggaggtgatcaacagcaagcccgacgagagacccagactgagccactgcatcgccgagagctggatgaacttcagcatcttcctgcaggagatgagcctgttcaagcagcagagccccggcaagttctgcctgctggtgtgcagcgtgtgcaccttcttcaccatcctgggcagctacatccccggcgtgatcctgagctacctgctgctgctgtgcgccttcctgtgccccctgttcaagtgcaacgacatcggccagaagatctacagcaagatcaagagcgtgctgctgaagctggacttcggcatcggcgagtacatcaaccagaagaagagagagagaagcgaggccgacaaggagaagagccacaaggacgacagcgagctggacttcagcgccctgtgccccaagatcagcctgaccgtggccgccaaggagctgagcgtgagcgacaccgacgtgagcgaggtgagctggaccgacaacggcaccttcaacctgagcgagggctacaccccccagaccgacaccagcgacgacctggacagacccagcgaggaggtgttcagcagagacctgagcgacttccccagcctggagaacggcatgggcaccaacgacgaggacgagctgagcctgggcctgcccaccgagctgaagagaaagaaggagcagctggacagcggccacagacccagcaaggagacccagagcgccgccggcctgaccctgcccctgaacagcgaccagaccttccacctgatgagcaacctggccggcgacgtgatcaccgccgccgtgaccgccgccatcaaggaccagctggagggcgtgcagcaggccctgagccaggccgcccccatccccgaggaggacaccgacaccgaggagggcgacgacttcgagctgctggaccagagcgagctggaccagatcgagagcgagctgggcctgacccaggaccaggaggccgaggcccagcagaacaagaagagcagcggcttcctgagcaacctgctgggcggccactag

SEQ ID NO: 30881 - protein, 435 aa, Artificial Sequence
  derived and/or modified sequence
MLPARCARLLTPHLLLVLVQLSPARGHRTTGPRFLISDRDPQCNLHCSRTQPKPICASDGRSYESMCEYQRAKCRDPTLGVVHRGRCKDAGQSKCRLERAQALEQAKKPQEAVFVPECGEDGSFTQVQCHTYTGYCWCVTPDGKPISGSSVQNKTPVCSGSVTDKPLSQGNSGRKDDGSKPTPTMETQPVFDGDEITAPTLWIKHLVIKDSKLNNTNIRNSEKVYSCDQERQSALEEAQQNPREGIVIPECAPGGLYKPVQCHQSTGYCWCVLVDTGRPLPGTSTRYVMPSCESDARAKTTEADDPFKDRELPGCPEGKKMEFITSLLDALTTDMVQAINSAAPTGGGRFSEPDPSHTLEERVVHWYFSQLDSNSSNDINKREMKPFKRYVKKKAKPKKCARRFTDYCDLNKDKVISLPELKGCLGVSKEVGRLV

SEQ ID NO: 30882 - DNA, 1308 bp, Artificial Sequence
  derived and/or modified sequence
atgctgcccgccagatgcgccagactgctgaccccccacctgctgctggtgctggtgcagctgagccccgccagaggccacagaaccaccggccccagattcctgatcagcgacagagacccccagtgcaacctgcactgcagcagaacccagcccaagcccatctgcgccagcgacggcagaagctacgagagcatgtgcgagtaccagagagccaagtgcagagaccccaccctgggcgtggtgcacagaggcagatgcaaggacgccggccagagcaagtgcagactggagagagcccaggccctggagcaggccaagaagccccaggaggccgtgttcgtgcccgagtgcggcgaggacggcagcttcacccaggtgcagtgccacacctacaccggctactgctggtgcgtgacccccgacggcaagcccatcagcggcagcagcgtgcagaacaagacccccgtgtgcagcggcagcgtgaccgacaagcccctgagccagggcaacagcggcagaaaggacgacggcagcaagcccacccccaccatggagacccagcccgtgttcgacggcgacgagatcaccgcccccaccctgtggatcaagcacctggtgatcaaggacagcaagctgaacaacaccaacatcagaaacagcgagaaggtgtacagctgcgaccaggagagacagagcgccctggaggaggcccagcagaaccccagagagggcatcgtgatccccgagtgcgcccccggcggcctgtacaagcccgtgcagtgccaccagagcaccggctactgctggtgcgtgctggtggacaccggcagacccctgcccggcaccagcaccagatacgtgatgcccagctgcgagagcgacgccagagccaagaccaccgaggccgacgaccccttcaaggacagagagctgcccggctgccccgagggcaagaagatggagttcatcaccagcctgctggacgccctgaccaccgacatggtgcaggccatcaacagcgccgcccccaccggcggcggcagattcagcgagcccgaccccagccacaccctggaggagagagtggtgcactggtacttcagccagctggacagcaacagcagcaacgacatcaacaagagagagatgaagcccttcaagagatacgtgaagaagaaggccaagcccaagaagtgcgccagaagattcaccgactactgcgacctgaacaaggacaaggtgatcagcctgcccgagctgaagggctgcctgggcgtgagcaaggaggtgggcagactggtgtag

SEQ ID NO: 30883 - DNA, 1308 bp, Artificial Sequence
  derived and/or modified sequence
atgctgcctgctcgatgtgcgcggctattgactccgcaccttctgctggttctggttcagctcagtcccgccagaggccaccggacgacaggccccagattcctcatttcagacagggacccgcaatgtaatctgcactgtagtagaacacagccgaaacctatctgcgcttccgatgggcgatcttacgaatctatgtgcgaatatcaaagagccaagtgcagggacccaactttgggagtggtgcaccggggccgttgtaaagacgctggtcagtcaaagtgccgactggagagagcccaggcactcgaacaggccaaaaaacctcaggaagccgttttcgtccctgagtgtggcgaggacggctctttcacacaggtccagtgccacacatacactggctactgctggtgtgttacacctgatgggaagcccattagtggttcaagcgtgcaaaataaaaccccagtgtgttccggcagcgttaccgataaaccccttagtcagggtaacagcggacgaaaagatgatggatcaaagcctaccccgacgatggagacccaacctgtctttgacggggacgaaattactgcaccaacgttatggatcaaacacctggtgatcaaggatagcaaacttaacaacacgaacataagaaactcggagaaggtctatagctgcgatcaggaacggcagtctgccttggaggaggcccagcagaatccacgggaggggatcgttatccccgaatgtgccccaggcgggctctacaagccagttcaatgccatcagtctactggatattgctggtgcgtcttagtagacactggccgacctctgccagggaccagcactcgatatgtgatgcctagctgcgaatcggatgcccgagctaaaacaaccgaagcggacgatccctttaaagatcgcgagcttcccgggtgtcctgaaggcaagaagatggaatttatcacgtctcttcttgacgccttaaccacagacatggtgcaggccatcaattcagccgcccctaccgggggaggacggttcagtgagccagacccgtcgcacacacttgaagaacgggtggtgcactggtacttttcacaattggactctaactcttctaacgacattaataaacgggaaatgaaaccattcaaacggtacgtcaagaagaaggcaaaaccaaaaaaatgtgcaagacgtttcaccgattattgtgacttgaacaaagataaagttatttcactgcctgaactcaagggctgcttgggggttagcaaagaggtcggacggttggtgtag

SEQ ID NO: 30884 - DNA, 1308 bp, Artificial Sequence
  derived and/or modified sequence
atgctgcctgcccgctgtgcccggctgctgaccccccacctgctgctggtgctggtgcagctgagccctgcccggggccacaggaccaccggcccccgcttcctgatcagtgaccgggacccccagtgcaacctgcactgcagcaggacccagcccaagcccatctgtgccagtgatggccgctcctatgaatccatgtgtgagtaccagagggccaagtgccgggaccccaccctgggcgtggtgcaccggggccgctgcaaggatgctggccagagcaagtgccgcctggagcgggcccaggccctggagcaggccaagaagccccaggaggccgtgtttgtgcctgaatgtggggaggatggcagcttcacccaggtgcagtgccacacctacacaggctactgctggtgtgtgaccccagatggcaagcccatcagcggcagctctgtgcagaacaagacccctgtgtgcagcggctctgtgacagacaagcccctgagccagggcaacagcggcaggaaggatgatggcagcaagcccacccccaccatggagacccagcctgtgtttgatggagatgagatcacagcccccaccctgtggatcaagcacctggtgatcaaggacagcaagctgaacaacaccaacatcagaaattctgagaaggtgtacagctgtgaccaggagcggcagagcgccctggaggaggcccagcagaacccccgggagggcatcgtcatcccagaatgtgcccctgggggcctgtacaagcctgtgcagtgccaccagagcacaggctactgctggtgtgtgctggtggacaccggccggcccctgcccggcaccagcaccaggtatgtgatgcccagctgtgagagtgatgcccgggccaagaccacagaagcagatgaccccttcaaggaccgggagctgcccggctgcccagagggcaagaagatggagttcatcaccagcctgctggatgccctgaccacagacatggtgcaggccatcaacagcgctgcccccactggaggcggccgcttcagcgagccagaccccagccacaccctggaggagcgggtggtgcactggtacttcagccagctggacagcaacagcagcaatgacatcaacaagcgggagatgaagcccttcaagcgctacgtgaagaagaaggccaagcccaagaagtgtgcccggcgcttcacagactactgtgacctgaacaaggacaaggtgatcagcctgcctgagctgaagggctgcctgggcgtgtccaaggaggtgggccgcctggtgtag

SEQ ID NO: 30885 - DNA, 1308 bp, Artificial Sequence
  derived and/or modified sequence
atgctgcccgcccggtgcgcccggctgctgaccccccacctgctgttggtgcttgtccagctctctccagctagaggccatcggacaactggcccaaggtttctcattagcgacagagatccccaatgtaatctgcactgctcccggactcagcccaaacccatttgcgccagcgacgggaggtcctacgaaagcatgtgcgagtaccagcgggctaaatgtcgggaccccaccttgggggtcgttcatagggggcggtgcaaagacgccggacagtcaaaatgtaggctcgagcgtgcacaggctctggagcaggccaagaagccacaggaggcagttttcgtgcccgagtgtggtgaggatggcagtttcacccaggtgcagtgtcatacctataccgggtattgctggtgcgtcactcctgacgggaagccgatatcagggagctctgtgcagaacaagacccctgtatgttcaggttcagtgactgataagccactgtcccaagggaactccggaaggaaggacgacggttcaaaacccacgcctacgatggaaacacagcctgtatttgacggtgatgaaatcaccgctcctactctctggattaaacatctcgttattaaggactcaaagctgaataataccaatatccgcaattcagagaaggtgtatagttgtgatcaagagaggcaaagcgcactggaagaggcacagcagaaccccagagaagggatagttattccggaatgcgctcctggcgggttatataagccagtgcagtgccaccagtcaacgggctactgttggtgtgtcctggtggataccggaaggcctctccctgggacctcgacacgctacgtgatgccctcatgtgaatctgatgcacgtgctaagaccaccgaagccgacgatcccttcaaagacagggagctgcctggctgccccgagggtaagaaaatggaatttatcaccagcctgctggatgccctcactacagatatggtgcaggctatcaattctgccgcacccaccgggggtgggaggttcagcgaacccgatccttcacatacactggaagagcgcgtggtgcactggtactttagccagctcgattctaacagctcaaacgacattaacaagcgggaaatgaagccttttaagcgttacgttaagaagaaagctaagcctaagaaatgcgcaaggcgcttcacggattactgtgacctgaacaaagataaagtcataagccttcccgaactgaagggatgcctcggagtatcgaaagaagtgggtcgccttgtttag

SEQ ID NO: 30886 - DNA, 1308 bp, Artificial Sequence
  derived and/or modified sequence
atgctgcctgcacgatgcgcacggctgctgacccctcatctcctgctggtactggtccaattgtctcctgccaggggccaccgaactacaggccctcgctttttgatctctgacagagacccacagtgtaatttgcactgttcccgcactcagcccaaaccgatctgtgcctccgatggcaggtcttacgagtccatgtgcgagtaccagagagctaagtgcagggacccaacccttggggtggtacatcgcggtcggtgcaaggatgccggtcaatctaagtgtcggctggagagggctcaggcccttgaacaggccaaaaagccacaggaggccgtattcgtgccagagtgcggagaagacggcagtttcactcaggtgcagtgccacacatacaccgggtactgttggtgcgtgaccccagacggtaaaccaatatctgggtcttcagtccaaaataagacgccagtgtgttctggcagtgtaaccgacaagcccctgtcacagggaaactcgggtagaaaagatgacgggtctaagcccacacccaccatggaaacccagccggtgttcgacggggacgagatcaccgctcctactctctggattaagcatcttgttattaaggactctaagctgaataacaccaatattcggaattctgagaaggtctactcgtgtgatcaagaacggcagtcagctcttgaggaagcccagcagaacccacgcgaagggattgtgattccggagtgtgccccagggggactctacaaacccgttcaatgccaccaatcaactgggtattgttggtgtgtgctcgtagacacaggtcgaccccttcctggtacatccacaaggtatgtaatgccctcctgcgaatctgacgccagagccaagactaccgaggccgacgatcccttcaaggatagagaattgccaggatgcccagaggggaagaagatggagttcataaccagcctgctcgatgctctgactacagacatggtgcaggctattaactctgcagccccaaccggcggaggacggttctccgagcccgatccctctcacacattggaagagagggtcgtgcattggtacttcagccagctggatagcaatagcagcaacgatatcaataagcgtgaaatgaaacccttcaagcgatacgtgaaaaaaaaggctaagcccaaaaagtgcgcacgacgtttcaccgattactgtgacctgaacaaggacaaagtgattagccttcccgaattgaaaggctgcttaggagtgtctaaagaagtagggaggttggtgtag

SEQ ID NO: 30887 - DNA, 2040 bp, Artificial Sequence
  derived and/or modified sequence
aggcgtccaacctgctgccgcctgggccccgccgagcggagctagcgccgcgcgcagagcacacgctcgcgctccagctcccctcctgcgcggttcatgactgtgtcccctgaccgcagcctctgcgagcccccgccgcaggaccacggcccgctccccgccgccgcgagggccccgagcgaaggaaggaagggaggcgcgctgtgcgccccgcggagcccgcgaaccccgctcgctgccggctgcccagcctggctggcaccatgctgcccgcgcgctgcgcccgcctgctcacgccccacttgctgctggtgttggtgcagctgtcccctgctcgcggccaccgcaccacaggccccaggtttctaataagtgaccgtgacccacagtgcaacctccactgctccaggactcaacccaaacccatctgtgcctctgatggcaggtcctacgagtccatgtgtgagtaccagcgagccaagtgccgagacccgaccctgggcgtggtgcatcgaggtagatgcaaagatgctggccagagcaagtgtcgcctggagcgggctcaagccctggagcaagccaagaagcctcaggaagctgtgtttgtcccagagtgtggcgaggatggctcctttacccaggtgcagtgccatacttacactgggtactgctggtgtgtcaccccggatgggaagcccatcagtggctcttctgtgcagaataaaactcctgtatgttcaggttcagtcaccgacaagcccttgagccagggtaactcaggaaggaaagatgacgggtctaagccgacacccacgatggagacccagccggtgttcgatggagatgaaatcacagccccaactctatggattaaacacttggtgatcaaggactccaaactgaacaacaccaacataagaaattcagagaaagtctattcgtgtgaccaggagaggcagagtgccctggaagaggcccagcagaatccccgtgagggtattgtcatccctgaatgtgcccctgggggactctataagccagtgcaatgccaccagtccactggctactgctggtgtgtgctggtggacacagggcgcccgctgcctgggacctccacacgctacgtgatgcccagttgtgagagcgacgccagggccaagactacagaggcggatgaccccttcaaggacagggagctaccaggctgtccagaagggaagaaaatggagtttatcaccagcctactggatgctctcaccactgacatggttcaggccattaactcagcagcgcccactggaggtgggaggttctcagagccagaccccagccacaccctggaggagcgggtagtgcactggtatttcagccagctggacagcaatagcagcaacgacattaacaagcgggagatgaagcccttcaagcgctacgtgaagaagaaagccaagcccaagaaatgtgcccggcgtttcaccgactactgtgacctgaacaaagacaaggtcatttcactgcctgagctgaagggctgcctgggtgttagcaaagaagtaggacgcctcgtctaaggagcagaaaacccaagggcaggtggagagtccagggaggcaggatggatcaccagacacctaaccttcagcgttgcccatggccctgccacatcccgtgtaacataagtggtgcccaccatgtttgcacttttaataactcttacttgcgtgttttgtttttggtttcattttaaaacaccaatatctaataccacagtgggaaaaggaaagggaagaaagactttattctctctcttattgtaagtttttggatctgctactgacaacttttagagggttttgggggggtgggggagggtgttgttggggctgagaagaaagagatttatatgctgtatataaatatatatgtaaattgtatagttcttttgtacaggcattggcattgctgtttgtttatttctctccctctgcctgctgtgggtggtgggcactctggacacatagtccagctttctaaaatcca

SEQ ID NO: 30888 - protein, 480 aa, Artificial Sequence
  derived and/or modified sequence
MREPEELMPDSGAVFTFGKSKFAENNPGKFWFKNDVPVHLSCGDEHSAVVTGNNKLYMFGSNNWGQLGLGSKSAISKPTCVKALKPEKVKLAACGRNHTLVSTEGGNVYATGGNNEGQLGLGDTEERNTFHVISFFTSEHKIKQLSAGSNTSAALTEDGRLFMWGDNSEGQIGLKNVSNVCVPQQVTIGKPVSWISCGYYHSAFVTTDGELYVFGEPENGKLGLPNQLLGNHRTPQLVSEIPEKVIQVACGGEHTVVLTENAVYTFGLGQFGQLGLGTFLFETSEPKVIENIRDQTISYISCGENHTALITDIGLMYTFGDGRHGKLGLGLENFTNHFIPTLCSNFLRFIVKLVACGGCHMVVFAAPHRGVAKEIEFDEINDTCLSVATFLPYSSLTSGNVLQRTLSARMRRRERERSPDSFSMRRTLPPIEGTLGLSACFLPNSVFPRCSERNLQESVLSEQDLMQPEEPDTHHEPEFQ

SEQ ID NO: 30889 - protein, 646 aa, Artificial Sequence
  derived and/or modified sequence
MREPEELMPDSGAVFTFGKSKFAENNPGKFWFKNDVPVHLSCGDEHSAVVTGNNKLYMFGSNNWGQLGLGSKSAISKPTCVKALKPEKVKLAACGRNHTLVSTEGGNVYATGGNNEGQLGLGDTEERNTFHVISFFTSEHKIKQLSAGSNTSAALTEDGRLFMWGDNSEGQIGLKNVSNVCVPQQVTIGKPVSWISCGYYHSAFVTTDGELYVFGEPENGKLGLPNQLLGNHRTPQLVSEIPEKVIQVACGGEHTVVLTENAVYTFGLGQFGQLGLGTFLFETSEPKVIENIRDQTISYISCGENHTALITDIGLMYTFGDGRHGKLGLGLENFTNHFIPTLCSNFLRFIVKLVACGGCHMVVFAAPHRGVAKEIEFDEINDTCLSVATFLPYSSLTSGNVLQRTLSARMRRRERERSPDSFSMRRTLPPIEGTLGLSACFLPNSVFPRCSERNLQESVLSEQDLMQPEEPDYLLDEMTKEAEIDNSSTVESLGETTDILNMTHIMSLNSNEKSLKLSPVQKQKKQQTIGELTQDTALTENDDSDEYEEMSEMKEGKACKQHVSQGIFMTQPATTIEAFSDEEVEIPEEKEGAEDSKGNGIEEQEVEANEENVKVHGGRKEKTEILSDDLTDKAEYSASHSQIVSV

SEQ ID NO: 30890 - protein, 1152 aa, Artificial Sequence
  derived and/or modified sequence
MREPEELMPDSGAVFTFGKSKFAENNPGKFWFKNDVPVHLSCGDEHSAVVTGNNKLYMFGSNNWGQLGLGSKSAISKPTCVKALKPEKVKLAACGRNHTLVSTEGGNVYATGGNNEGQLGLGDTEERNTFHVISFFTSEHKIKQLSAGSNTSAALTEDGRLFMWGDNSEGQIGLKNVSNVCVPQQVTIGKPVSWISCGYYHSAFVTTDGELYVFGEPENGKLGLPNQLLGNHRTPQLVSEIPEKVIQVACGGEHTVVLTENAVYTFGLGQFGQLGLGTFLFETSEPKVIENIRDQTISYISCGENHTALITDIGLMYTFGDGRHGKLGLGLENFTNHFIPTLCSNFLRFIVKLVACGGCHMVVFAAPHRGVAKEIEFDEINDTCLSVATFLPYSSLTSGNVLQRTLSARMRRRERERSPDSFSMRRTLPPIEGTLGLSACFLPNSVFPRCSERNLQESVLSEQDLMQPEEPDYLLDEMTKEAEIDNSSTVESLGETTDILNMTHIMSLNSNEKSLKLSPVQKQKKQQTIGELTQDTALTENDDSDEYEEMSEMKEGKACKQHVSQGIFMTQPATTIEAFSDEEVEIPEEKEGAEDSKGNGIEEQEVEANEENVKVHGGRKEKTEILSDDLTDKAEVSEGKAKSVGEAEDGPEGRGDGTCEEGSSGAEHWQDEEREKGEKDKGRGEMERPGEGEKELAEKEEWKKRDGEEQEQKEREQGHQKERNQEMEEGGEEEHGEGEEEEGDREEEEEKEGEGKEEGEGEEVEGEREKEEGERKKEERAGKEEKGEEEGDQGEGEEEETEGRGEEKEEGGEVEGGEVEEGKGEREEEEEEGEGEEEEGEGEEEEGEGEEEEGEGKGEEEGEEGEGEEEGEEGEGEGEEEEGEGEGEEEGEGEGEEEEGEGEGEEEGEGEGEEEEGEGKGEEEGEEGEGEGEEEEGEGEGEDGEGEGEEEEGEWEGEEEEGEGEGEEEGEGEGEEGEGEGEEEEGEGEGEEEEGEEEGEEEGEGEEEGEGEGEEEEEGEVEGEVEGEEGEGEGEEEEGEEEGEEREKEGEGEENRRNREEEEEEEGKYQETGEEENERQDGEEYKKVSKIKGSVKYGKHKTYQKKSVTNTQGNGKEQRSKMPVQSKRLLKNGPSGSKKFWNNVLPHYLELK

SEQ ID NO: 30891 - DNA, 390 bp, Artificial Sequence
  derived and/or modified sequence
atgtggctgtggcaggacatccagtgctgccccgccccccccagcgccccccccagagccctggagcccggcagagccccccccccccccggcgagggcctgggcgccggcatccccagcctgagccccccccagaagaagccccagagcgtgggcatctgcgtgagacagaagggcagacagaaggccggcctggagaagggcaacagaaagaaggagctgagacaggccaactgccccagcctgagaccccagagaaagggcgccgacaccagaagactgcccagagagaccagacccaccaagaagagaaccgccgccgcccagcccttcctgcagctgtggaaccccgccccccacaccagcaacggcagaaccggcgacctgtag

SEQ ID NO: 30892 - DNA, 249 bp, Artificial Sequence
  derived and/or modified sequence
atggacccgggcccaaaaggacattgtcactgcggaggacacggtcaccctcctggacactgtggacctcctccggggcacggaccagggccttgtggcccccctcctcaccacgggcctggcccctgtggccctccccccgggcatggcccggggccatgtggtccccctcctcaccatgggcccgggccctgtggtcctcctcctggccatggcccaggtcatccacctccgggacctcaccactag

SEQ ID NO: 30893 - DNA, 3063 bp, Artificial Sequence
  derived and/or modified sequence
atgcgagagcccgaagaattgatgccggatagcggggcagtgtttactttcggcaaaagtaagttcgccgagaataaccccggcaaattttggttcaaaaatgacgtcccggtacacctaagctgcggagacgagcactccgccgtcgtgacgggcaataataagctttacatgttcggctcgaacaactggggccaattagggcttggatccaaaagtgccatatctaaaccaacgtgtgttaaggccctgaagcctgaaaaggtgaaactggcagcctgtggaagaaaccacacgctggtctccaccgaaggagggaatgtgtacgctacaggaggtaataatgagggacagcttggacttggcgatactgaagagcggaatacattccacgtgatcagctttttcactagtgagcataaaattaaacagttgagcgccggctccaacaccagcgcagctctgacagaggacggtaggctgttcatgtggggcgacaatagcgagggacagatcggcctgaagaatgtgtcgaatgtgtgcgtgccccagcaggtgacaattggaaaaccagtatcctggataagttgcggttactatcattccgccttcgtgactaccgacggcgaactgtacgtttttggcgagcctgagaacgggaaactgggtttgcctaaccaactcctaggtaatcacaggacaccacagttagtgtccgagatccctgaaaaggtgatccaggtggcctgcgggggcgagcataccgttgtgttgactgaaaatgcagtctatacatttggtcttgggcagtttggtcagctgggactcgggacctttttgttcgagacgtctgaacctaaggttatcgagaacattcgcgaccagactatttcatacatttcctgcggagagaatcacactgccctgatcaccgacatcggattgatgtatacatttggcgacggtcgtcatgggaaattaggtctgggcctggagaacttcaccaaccatttcattcccacgttgtgcagcaattttcttcgcttcatagtgaagctggtggcctgcggcgggtgtcacatggtcgtatttgcggctccccacagaggagtggccaaagagattgaatttgacgagattaatgatacttgtctgtcagtggcaactttcctgccctattccagcttgactagcggaaatgttctgcagaggaccctcagtgccaggatgcgcaggagagaaagagagaggagccccgattcattttccatgaggcgcacacttccacctattgagggcactctaggattatctgcatgcttcctgcccaacagcgtatttcctaggtgttcagaaagaaacctccaggagtcggtgctgtccgagcaggacctgatgcagcctgaagagccggattatcttcttgacgagatgacgaaggaagccgaaattgataacagctctactgtggaaagcctcggcgaaacaaccgatattttgaacatgactcatatcatgtctctgaactcgaatgagaaatctctaaagttgtccccggtccagaaacagaaaaagcaacaaaccattggggagctgacccaggataccgctcttaccgagaacgatgattcagatgagtacgaagaaatgtctgaaatgaaggaaggaaaagcctgcaagcagcacgtcagccagggcattttcatgacccagccagccaccacaattgaagctttttctgacgaggaggtaggtaatgataccgggcaagttggcccccaagctgataccgacggggagggtcttcagaaggaagtttaccgacacgagaataataatggcgtagaccagctcgacgcaaaggaaattgagaaggagtctgatggtgggcactcacagaaggagtctgaggcagaagagatcgattctgagaaagagactaagctggcagaaatcgccggtatgaaagatctacgcgagcgcgagaagagtaccaaaaaaatgtcgccttttttcggaaacctgccggaccgcggaatgaatactgaatctgaggagaacaaggacttcgtcaaaaagcgggagtcttgcaaacaggacgtgatctttgacagtgaacgggaatcggtcgagaaacccgactcatacatggagggtgcatccgaaagccagcaggggattgcggacggcttccaacagccggaggccattgagttcagtagcggcgagaaagaggacgacgaggtggagacagaccagaatataaggtatggcaggaagctgatagagcagggcaacgagaaagagactaagccaatcattagcaaaagtatggcaaaatatgactttaaatgcgatagattgtccgagatacccgaggagaaggaaggcgctgaagattctaaagggaatggtatcgaagagcaagaggtagaggccaatgaggaaaacgtgaaagtgcacggagggcgtaaagagaaaaccgaaatcctttcagacgacctcaccgataaggccgaagaccatgaatttagtaagaccgaggagctgaagctagaggatgtagatgaagaaattaatgccgagaacgtggaaagcaagaagaaaaccgtgggcgacgacgaaagcgtgccgacaggctatcattctaagaccgagggcgctgagcgaaccaatgacgacagctccgcggaaactatcgaaaagaaagagaaagccaatctcgaagagcgggccatctgtgagtacaacgagaaccctaaagggtacatgctcgacgatgctgactcttcttcactagaaatcttagaaaattccgagactacacccagtaaagacatgaaaaagacaaagaagatcttcttgttcaagagagtcccaagcataaatcaaaagattgtgaagaacaataacgagccgctgcccgagatcaaatcaattggcgatcagattatcctaaaaagcgataataaggatgctgaccagaaccacatgtcacagaatcaccaaaacataccccccacaaataccgaaaggcgctctaagtcttgcactatcctatag

SEQ ID NO: 30894 - DNA, 1941 bp, Artificial Sequence
  derived and/or modified sequence
atgcgagagccagaggaattgatgccagatagcggggcggtgtttacctttggtaaatcgaaatttgccgagaataaccccgggaagttttggtttaagaacgatgttcctgttcatttaagttgtggcgatgagcactccgccgtcgtgacaggcaataataagctgtacatgttcggtagtaacaattggggacagctcggactggggtctaagagtgcaatctctaagcccacatgtgtcaaggcgctgaaaccagagaaggttaaacttgccgcatgcgggagaaaccataccctcgtgtccacagaaggaggcaacgtctatgccacgggaggcaataacgaagggcaacttggtttgggagacactgaggaaagaaatacctttcatgtgatttcattctttacatctgaacacaaaattaagcagctgtccgctggctctaatacatccgcagctctgactgaggacggcagactgttcatgtggggagacaattctgagggccagattggcctgaaaaatgtcagtaacgtctgtgtgccacagcaggttactattggaaagcctgtctcctggatttcctgtggatactaccatagcgctttcgtgacaactgacggggaactctacgtcttcggtgagccagaaaatggcaagctgggtctcccaaatcagctcctgggcaaccaccgaacaccccagctggtgtccgaaattccagaaaaggtgatccaggtcgcatgcggaggcgagcataccgtagtgcttacggaaaacgcagtctataccttcggccttggtcagtttggacagttgggtctgggaacatttttatttgagacgtcagaaccaaaagttatagagaatattcgagaccaaaccatttcttatatatcatgcggtgaaaaccatacagcattgataacggatatcggattaatgtatactttcggtgatggacggcatggtaagcttggtctgggcttagagaattttaccaatcacttcatacccacgctttgctctaactttcttcggtttatcgtgaaacttgtggcatgtggcggatgccacatggtggtgtttgctgctccccatcgaggcgttgccaaggagatagaattcgatgagataaacgatacctgcttatccgtggcgacttttctgccttatagttccttgacctctggaaatgtgctccagagaactctcagcgctagaatgaggagacgggagcgcgagagaagccctgactcttttagtatgcgtcgcacgctcccccccatcgaggggaccctcggcctaagcgcctgctttttgcccaacagtgtatttcccaggtgctctgagcggaacctgcaggagagtgttctttccgagcaagacttaatgcagcctgaggaacctgactaccttttggatgagatgacgaaggaggccgaaatagacaactcctcgactgtggagagtctaggtgaaaccaccgatatcctgaacatgacacacatcatgtccctcaatagtaatgaaaaaagtctgaaattgtcccctgtccagaaacagaaaaagcagcaaaccatcggggagctcacccaggatacagcattgaccgaaaacgacgactcagatgaatacgaagagatgagcgaaatgaaggaaggcaaagcctgcaaacagcatgtatctcaaggcatcttcatgacacagccggccaccaccattgaagcgttctctgacgaagaggtggagatccctgaagagaaggaaggtgccgaagatagcaaaggcaatggaattgaagaacaagaggtcgaggcaaatgaagaaaacgtgaaggttcacggcggtcggaaggagaaaaccgagatccttagcgatgatctcaccgacaaagccgaatattccgcgagtcattcccagattgtatccgtgtag

SEQ ID NO: 30895 - DNA, 3459 bp, Artificial Sequence
  derived and/or modified sequence
atgcgcgagcctgaagagctaatgcctgattccggcgctgtatttacctttggaaaaagtaaattcgctgaaaataatccaggtaaattctggtttaaaaatgatgtgcctgtgcatctgtcatgcggagacgaacatagtgccgtagtaaccggcaacaacaaactctatatgttcggctctaataactggggccagctgggattggggtccaaatcagcgataagtaaacccacttgtgtgaaagctctgaagcccgagaaggtgaaactcgctgcttgcggacgcaatcatacacttgtgagcacagaaggagggaatgtgtatgcgaccggtggtaacaacgagggccagttgggcctaggggatacagaagagagaaacacatttcacgtcatctcatttttcacatccgagcacaagatcaagcagctttcagcagggagcaacacatccgctgccctaactgaggatggtcgtctgttcatgtggggggacaatagtgaaggacaaatcgggctgaagaacgtttctaacgtgtgcgtcccccagcaagtcactatcggaaagccagtatcatggatcagctgcggatactatcacagcgcatttgtgaccaccgacggggaactctatgtctttggcgagcccgaaaacggaaagctgggcctgcccaatcagctgctgggcaaccaccgcacaccacaactggtttccgagatacctgagaaggtcatccaggtcgcctgtggcggagaacacaccgtggtcttgacagaaaatgcagtgtatacctttgggttaggccaatttggtcagttgggacttggcacctttctgtttgaaacctcagagccaaaggtcattgagaatattcgcgatcagaccatttcctatatcagctgtggggaaaaccatacggcccttatcacagacatcggcctaatgtataccttcggagacggtcgacacgggaagctgggcttgggtctggaaaacttcaccaatcattttattcccaccttatgttctaattttctgagatttatagtgaagttggtggcatgcggagggtgccacatggtcgtcttcgcggcgccccatcgcggcgtggcaaaggagatcgagtttgacgagattaacgatacctgcctgtcagtggccacctttctcccgtactccagcttaaccagtggcaatgttctccagaggacgctaagtgctcggatgcgcagacgcgagagggagcgctcacccgattccttttctatgcgacggacactgcccccaattgagggaacccttggtctgagcgcctgcttcttgccgaattcggtttttcctaggtgttccgagaggaatctccaggagagcgtgctgagcgaacaggaccttatgcaacccgaagagcctgactacctgttagacgagatgaccaaggaggccgaaatcgacaactcctctacagtggagtcactaggggagaccaccgatatcttgaatatgacgcatattatgtctctgaactccaatgagaaatcactgaagctttcccctgtgcagaagcagaaaaagcaacagactatcggagaactgacacaggacaccgctttgaccgaaaacgatgactccgatgaatacgaagagatgagcgagatgaaagagggcaaagcctgcaagcaacatgtgtctcaggggatatttatgacccagccggccacaacaatagaggcattctctgacgaagaggtcgaaatccccgaggagaaggaaggggccgaagactctaaaggtaatggcatcgaagagcaggaagtggaagctaatgaagaaaacgtgaaagtgcacggcggaagaaaagaaaagaccgagatactgagtgacgaccttacagataaagcggaagtgtctgaagggaaggccaaaagtgtgggagaagctgaagatggacccgagggcagaggggatggcacctgcgaagagggctcctcaggagctgaacactggcaagacgaggagcgggaaaagggcgagaaagacaaagggcgcggcgagatggaaaggccaggcgaaggagaaaaggaactggcagagaaagaggaatggaaaaagcgcgacggagaagagcaggagcagaaggagagagagcaggggcaccagaaggagcgcaatcaagaaatggaggaaggtggcgaagaggaacacggtgaaggagaggaggaggaaggtgaccgggaggaggaagaggaaaaagaaggcgaagggaaggaagagggagaaggggaagaggtggagggggagcgggagaaggaggaaggcgagcggaagaaagaggagcgggcaggtaaggaagagaagggtgaagaagagggcgaccagggggagggcgaggaagaagagacagagggccgcggagaagagaaagaagagggcggtgaagtcgaagggggtgaagtcgaggaaggtaagggagagcgagaggaggaggaagaagagggcgagggggaggaggaggaaggcgagggagaagaggaagagggcgagggagaggaagaggaaggcgagggaaaaggcgaagaggaaggcgaagaaggcgaaggggaagaggaaggggaggagggagagggcgagggggaagaagaagagggcgagggcgagggcgaagaggaaggcgagggcgagggcgaagaggaggagggggagggagaaggagaagaagagggcgagggggaaggtgaagaggaggagggcgagggaaagggagaggaagaaggagaggaaggcgagggcgagggagaggaggaggagggggagggtgagggcgaagacggtgagggcgagggagaagaggaggagggagagtgggaaggagaggaggaggagggagagggcgagggtgaggaggaaggtgagggagaaggggaggagggggaaggagagggcgaggaagaggagggcgagggggagggagaggaagaggaaggagaagaggaaggcgaagaagagggcgagggggaggaggaaggggagggggagggtgaggaggaagaggagggcgaggtcgaaggtgaagtggagggtgaggaaggcgagggcgagggcgaagaagaagaaggcgaggaggagggagaggaacgcgagaaagaaggagaaggagaggagaataggcgcaaccgggaagaggaggaggaagaagaaggtaagtaccaggagacgggagaagaggagaacgagagacaggatggagaggaatacaaaaaagtgtcaaaaattaagggctctgttaagtacggcaagcacaagacatatcagaaaaaaagtgtgaccaacactcagggaaatgggaaggagcagaggagtaaaatgcccgttcagtcaaagcgactcttgaaaaacgggccatcaggctcaaagaaattctggaacaatgtacttccacattacctagagttaaagtag

SEQ ID NO: 30896 - DNA, 3063 bp, Artificial Sequence
  derived and/or modified sequence
atgagggagcctgaggagctgatgccagattctggagctgtgttcaccttcggcaagagcaagtttgctgagaacaaccctgggaagttctggttcaagaatgatgtgcctgtgcacctgagctgtggagatgagcacagcgctgtggtgactggaaacaacaagctgtacatgtttggcagcaacaactggggccagctgggcctgggcagcaagagcgccatcagcaagcccacctgtgtgaaggccctgaagccagagaaggtgaagctggccgcctgtggcaggaaccacaccctggtgtccacagaaggaggaaatgtgtatgccactggaggcaacaatgaaggccagctgggcctgggggacacagaggagaggaacaccttccacgtgatctccttcttcaccagcgagcacaagatcaagcagctgtctgctggcagcaacaccagcgctgccctgacagaagatggccgcctcttcatgtggggagacaacagcgagggccagatcggcctgaagaatgtgtccaatgtgtgtgtgccccagcaggtgaccatcggcaagcctgtgtcctggatcagctgtggctactaccacagcgcctttgtgaccacagatggagagctgtatgtgtttggagagccagaaaatggcaagctgggcctgcccaaccagctgctgggcaaccacaggaccccccagctggtgtctgagatccctgagaaggtgatccaggtggcctgtggcggggagcacacagtggtgctgacagaaaatgctgtgtacaccttcggcctgggccagtttggccagctgggcctgggcaccttcctgtttgagaccagcgagcccaaggtgattgagaacatccgggaccagaccatctcctacatcagctgtggggagaaccacacagccctgatcacagacatcggcctgatgtacacctttggagatggccgccacggcaagctgggcctgggcctggagaacttcaccaaccacttcatccccaccctgtgcagcaacttcctgcgcttcatcgtgaagctggtggcctgtggcggctgccacatggtggtgtttgctgccccccaccggggcgtggccaaggagattgaatttgatgagatcaatgacacctgcctgtctgtggccaccttcctgccctacagcagcctgaccagcggaaatgtgctgcagaggaccctgagcgccaggatgagaagaagagagcgggagaggagcccagacagcttctccatgaggaggaccctgccccccatcgagggcaccctgggcctgagcgcctgcttcctgcccaacagcgtcttcccccgctgcagcgagaggaacctgcaggagagcgtgctgtctgagcaggacctgatgcagcctgaggagccagactacctgctggatgagatgaccaaggaggccgagattgacaacagcagcacagtggagagcctgggggagaccacagacatcctgaacatgacccacatcatgagcctgaacagcaatgagaagagcctgaagctgagccctgtgcagaagcagaagaagcagcagaccatcggggagctgacccaggacacagccctgacagaaaatgatgacagtgatgaatatgaggagatgtctgagatgaaggagggcaaggcctgcaagcagcacgtgtcccagggcatcttcatgacccagcctgccaccaccatcgaggccttcagtgatgaggaggtgggcaatgacaccggccaggtgggcccccaggccgacacagatggagagggcctgcagaaggaggtgtacagacatgagaacaacaatggagtggaccagctggatgccaaggagattgagaaggagagtgatggcggccacagccagaaggagagcgaggccgaggagattgattctgagaaggagaccaagctggccgagattgctggcatgaaggacctgcgggagcgggagaagagcaccaagaagatgagccccttcttcggcaacctgcctgaccggggcatgaacacagagagcgaggagaacaaggactttgtgaagaagcgggagagctgcaagcaggacgtcatctttgattctgagcgggagagcgtggagaagccagacagctacatggagggcgccagcgagagccagcagggcattgctgatggcttccagcagcctgaggccatcgagttcagcagtggagagaaggaggatgatgaggtggagacagaccagaacatccgctatggcaggaagctgattgagcagggcaatgagaaggagaccaagcccatcatcagcaagtccatggccaagtatgacttcaagtgtgaccggctgtctgagatccctgaggagaaggagggcgctgaggacagcaaaggaaatggcatcgaggagcaggaggtggaggccaatgaggagaatgtgaaggtgcatggaggcaggaaggagaagacagagatcctgagtgatgacctgacagacaaggccgaggaccacgagttcagcaagacagaggagctgaagctggaggatgtggatgaggagatcaatgcagaaaatgtggagagcaagaagaagacagtgggagatgatgagagcgtgcccaccggctaccacagcaagacagaaggagctgagaggaccaatgatgacagcagcgctgagaccatcgagaagaaggagaaggccaacctggaggagcgggccatctgtgagtacaatgaaaaccccaagggctacatgctggatgatgctgacagcagcagcctggagatcctggagaacagcgagaccacccccagcaaggacatgaagaagaccaagaagatcttcctgttcaagagggtgcccagcatcaaccagaagatcgtgaagaacaacaatgagcccctgcctgagatcaagagcatcggggaccagatcatcctgaagagtgacaacaaggatgctgaccagaaccacatgagccagaaccaccagaacatcccccccaccaacacagagcggcgcagcaagagctgcaccatcctgtag

SEQ ID NO: 30897 - DNA, 1941 bp, Artificial Sequence
  derived and/or modified sequence
atgagggagcctgaggagctgatgccagattctggagctgtgttcaccttcggcaagagcaagtttgctgagaacaaccctgggaagttctggttcaagaatgatgtgcctgtgcacctgagctgtggagatgagcacagcgctgtggtgactggaaacaacaagctgtacatgtttggcagcaacaactggggccagctgggcctgggcagcaagagcgccatcagcaagcccacctgtgtgaaggccctgaagccagagaaggtgaagctggccgcctgtggcaggaaccacaccctggtgtccacagaaggaggaaatgtgtatgccactggaggcaacaatgaaggccagctgggcctgggggacacagaggagaggaacaccttccacgtgatctccttcttcaccagcgagcacaagatcaagcagctgtctgctggcagcaacaccagcgctgccctgacagaagatggccgcctcttcatgtggggagacaacagcgagggccagatcggcctgaagaatgtgtccaatgtgtgtgtgccccagcaggtgaccatcggcaagcctgtgtcctggatcagctgtggctactaccacagcgcctttgtgaccacagatggagagctgtatgtgtttggagagccagaaaatggcaagctgggcctgcccaaccagctgctgggcaaccacaggaccccccagctggtgtctgagatccctgagaaggtgatccaggtggcctgtggcggggagcacacagtggtgctgacagaaaatgctgtgtacaccttcggcctgggccagtttggccagctgggcctgggcaccttcctgtttgagaccagcgagcccaaggtgattgagaacatccgggaccagaccatctcctacatcagctgtggggagaaccacacagccctgatcacagacatcggcctgatgtacacctttggagatggccgccacggcaagctgggcctgggcctggagaacttcaccaaccacttcatccccaccctgtgcagcaacttcctgcgcttcatcgtgaagctggtggcctgtggcggctgccacatggtggtgtttgctgccccccaccggggcgtggccaaggagattgaatttgatgagatcaatgacacctgcctgtctgtggccaccttcctgccctacagcagcctgaccagcggaaatgtgctgcagaggaccctgagcgccaggatgagaagaagagagcgggagaggagcccagacagcttctccatgaggaggaccctgccccccatcgagggcaccctgggcctgagcgcctgcttcctgcccaacagcgtcttcccccgctgcagcgagaggaacctgcaggagagcgtgctgtctgagcaggacctgatgcagcctgaggagccagactacctgctggatgagatgaccaaggaggccgagattgacaacagcagcacagtggagagcctgggggagaccacagacatcctgaacatgacccacatcatgagcctgaacagcaatgagaagagcctgaagctgagccctgtgcagaagcagaagaagcagcagaccatcggggagctgacccaggacacagccctgacagaaaatgatgacagtgatgaatatgaggagatgtctgagatgaaggagggcaaggcctgcaagcagcacgtgtcccagggcatcttcatgacccagcctgccaccaccatcgaggccttcagtgatgaggaggtggagatccctgaggagaaggagggcgctgaggacagcaaaggaaatggaattgaggagcaggaggtggaggccaatgaagaaaatgtgaaggtgcacggcggcaggaaggagaagacagagatcctgagtgatgacctgacagacaaggccgagtacagcgccagccacagccagatcgtgtctgtgtag

SEQ ID NO: 30898 - DNA, 3459 bp, Artificial Sequence
  derived and/or modified sequence
atgagggagcctgaggagctgatgccagattctggagctgtgttcaccttcggcaagagcaagtttgctgagaacaaccctgggaagttctggttcaagaatgatgtgcctgtgcacctgagctgtggagatgagcacagcgctgtggtgactggaaacaacaagctgtacatgtttggcagcaacaactggggccagctgggcctgggcagcaagagcgccatcagcaagcccacctgtgtgaaggccctgaagccagagaaggtgaagctggccgcctgtggcaggaaccacaccctggtgtccacagaaggaggaaatgtgtatgccactggaggcaacaatgaaggccagctgggcctgggggacacagaggagaggaacaccttccacgtgatctccttcttcaccagcgagcacaagatcaagcagctgtctgctggcagcaacaccagcgctgccctgacagaagatggccgcctcttcatgtggggagacaacagcgagggccagatcggcctgaagaatgtgtccaatgtgtgtgtgccccagcaggtgaccatcggcaagcctgtgtcctggatcagctgtggctactaccacagcgcctttgtgaccacagatggagagctgtatgtgtttggagagccagaaaatggcaagctgggcctgcccaaccagctgctgggcaaccacaggaccccccagctggtgtctgagatccctgagaaggtgatccaggtggcctgtggcggggagcacacagtggtgctgacagaaaatgctgtgtacaccttcggcctgggccagtttggccagctgggcctgggcaccttcctgtttgagaccagcgagcccaaggtgattgagaacatccgggaccagaccatctcctacatcagctgtggggagaaccacacagccctgatcacagacatcggcctgatgtacacctttggagatggccgccacggcaagctgggcctgggcctggagaacttcaccaaccacttcatccccaccctgtgcagcaacttcctgcgcttcatcgtgaagctggtggcctgtggcggctgccacatggtggtgtttgctgccccccaccggggcgtggccaaggagattgaatttgatgagatcaatgacacctgcctgtctgtggccaccttcctgccctacagcagcctgaccagcggaaatgtgctgcagaggaccctgagcgccaggatgagaagaagagagcgggagaggagcccagacagcttctccatgaggaggaccctgccccccatcgagggcaccctgggcctgagcgcctgcttcctgcccaacagcgtcttcccccgctgcagcgagaggaacctgcaggagagcgtgctgtctgagcaggacctgatgcagcctgaggagccagactacctgctggatgagatgaccaaggaggccgagattgacaacagcagcacagtggagagcctgggggagaccacagacatcctgaacatgacccacatcatgagcctgaacagcaatgagaagagcctgaagctgagccctgtgcagaagcagaagaagcagcagaccatcggggagctgacccaggacacagccctgacagaaaatgatgacagtgatgaatatgaggagatgtctgagatgaaggagggcaaggcctgcaagcagcacgtgtcccagggcatcttcatgacccagcctgccaccaccatcgaggccttcagtgatgaggaggtggagatccctgaggagaaggagggcgctgaggacagcaaaggaaatggaattgaggagcaggaggtggaggccaatgaagaaaatgtgaaggtgcacggcggcaggaaggagaagacagagatcctgagtgatgacctgacagacaaggccgaggtgtctgagggcaaggccaagtctgtgggggaggccgaggatggccctgagggcagaggagatggcacctgtgaggagggcagcagcggggctgagcactggcaggatgaggagcgggagaagggggagaaggacaagggccgcggggagatggagaggcctggagagggggagaaggagctggccgagaaggaggagtggaagaagagagatggagaggagcaggagcagaaggagcgggagcagggccaccagaaggagaggaaccaggagatggaggagggcggggaggaggagcacggggagggggaggaggaggagggggaccgggaggaggaggaggagaaggagggggagggcaaggaggagggggagggggaggaggtggagggggagcgggagaaggaggagggggagaggaagaaggaggagagagctgggaaggaggagaagggggaggaggagggggaccagggcgagggggaggaggaggagacagagggccgcggggaggagaaggaggagggcggggaggtggagggcggggaggtggaggagggcaaaggagagcgggaggaggaggaggaggagggggagggggaggaggaggagggggagggggaggaggaggagggggagggggaggaggaggagggggagggcaaaggagaggaggagggggaggagggggagggggaggaggagggggaggagggggagggggagggggaggaggaggagggggagggggagggggaggaggagggggagggggagggggaggaggaggagggggagggggagggggaggaggagggggagggggagggggaggaggaggagggggagggcaagggggaggaggagggggaggagggggagggggagggggaggaggaggagggggagggggagggggaggatggagagggggagggggaggaggaggagggggagtgggagggggaggaggaggagggggagggggagggggaggaggagggggagggggagggggaggagggggagggggagggggaggaggaggagggggagggggagggggaggaggaggagggggaggaggagggggaggaggagggggagggggaggaggagggggagggggagggggaggaggaggaggagggggaggtggagggggaggtggagggggaggagggggagggggagggggaggaggaggagggggaggaggagggggaggagcgggagaaggagggggagggggaggagaacagaagaaaccgggaggaggaggaggaggaggagggcaagtaccaggagaccggggaggaggagaatgaaaggcaggatggagaggagtacaagaaggtgtccaagatcaagggctctgtgaagtatggcaagcacaagacctaccagaagaagtctgtgaccaacacccagggcaatggcaaggagcagaggagcaagatgcctgtgcagagcaagaggctgctgaagaatggccccagcggcagcaagaagttctggaacaacgtgctgccccactacctggagctgaagtag

SEQ ID NO: 30899 - DNA, 3063 bp, Artificial Sequence
  derived and/or modified sequence
atgcgggagcccgaggagctgatgcccgacagcggcgccgtgttcacattcgggaaatctaagttcgcagaaaataatccaggaaagttctggtttaagaatgatgtccctgtgcacctgagctgcggtgatgagcacagcgctgtggtgacgggaaacaacaagctttacatgtttggatctaataattgggggcaactgggattagggtctaagtccgcaatcagcaagcccacttgcgtgaaggccttgaagcctgagaaagtgaagcttgcagcatgtggaagaaaccacacactggtcagcacagagggaggtaacgtctatgccaccgggggaaacaacgagggccagttggggctgggcgacacagaagagagaaatactttccacgtgatcagtttcttcacatccgaacacaagatcaagcagctaagcgcaggatctaacacttctgcagccctgaccgaggacggccggttatttatgtggggtgacaactccgagggtcagattggactgaagaatgttagtaatgtttgcgtgccacagcaagtgactataggaaaacccgtcagctggatttcctgcgggtactatcacagtgccttcgtcacaaccgatggagagctgtatgtgttcggggagccagagaatggaaagctcggcctgcctaaccagcttctggggaatcacaggacacctcagttggtgagcgaaatcccagagaaggtgatacaggtggcttgtgggggcgaacacactgtcgtcctaaccgaaaatgcggtgtacacctttggactgggccagtttggccaacttggcctggggacatttcttttcgagacctctgagcctaaagttattgagaatataagggatcaaacaatctcatacattagctgtggggagaaccacactgcattaatcacagacatcggcctcatgtacactttcggagatggccgccacggaaaattgggtttaggacttgagaatttcactaatcatttcatccctaccctttgtagcaacttcctgcgattcatcgtcaaattggtcgcctgcggtgggtgccacatggtcgtctttgccgcccctcacaggggggtggccaaagagatcgaattcgatgaaatcaacgacacttgcctgtcagttgccacattcctgccatacagttctctgacaagtggaaacgtgctgcagcggacactgtctgctaggatgcgaagaagggaacgagagcggtctccagactctttcagcatgcggcggactctgccacctatagaaggtacgctgggcctttcagcctgtttcttacctaactcggtgttccccaggtgtagtgagcgtaacctgcaggagtccgtactttcagagcaggatctcatgcaaccagaggaacccgactaccttcttgacgagatgaccaaggaggctgagatcgataattcttccactgtggagtctctgggagagactacagacatcctgaatatgacccacatcatgtcacttaattctaatgaaaagagtctgaaactaagtcccgtccaaaagcagaagaaacaacagactatcggagaacttacccaagacacagcattgactgagaatgatgactcagacgaatatgaggagatgtcggaaatgaaggagggtaaggcttgcaaacagcacgtctctcagggcatattcatgacccagcccgctaccacaatagaggccttcagcgacgaggaggtcggcaacgataccggtcaggtgggtccgcaagccgatactgatggtgagggcctccagaaggaggtctatcggcacgagaacaataatggcgtcgatcaactcgatgcgaaggaaatcgagaaagaatccgacggcggccactctcagaaagagtccgaagctgaagaaatcgactcagaaaaggagactaaacttgctgagatcgctggtatgaaagatctgagagaacgggaaaaaagcacaaagaaaatgtcaccattttttgggaatttaccagaccgaggcatgaacactgaatctgaggaaaacaaagatttcgtgaagaaaagagagtcttgtaaacaggacgtgatcttcgactccgaacgcgagagcgtggagaaacccgacagttacatggaaggagccagcgagtctcagcaagggatcgcagacggcttccagcagcccgaagccattgaatttagtagtggggaaaaggaggacgatgaggtcgaaaccgaccagaacatacggtacggtaggaaacttatagagcagggaaacgagaaagagactaagcctattatcagcaagagcatggcgaaatacgacttcaagtgcgatagactctctgagatccctgaggagaaagaaggcgctgaagacagcaaaggcaatggaatagaggagcaagaagtggaggcaaatgaagaaaatgtgaaagttcatggagggaggaaagaaaaaaccgagatcctgtccgacgacctgacagataaagcggaggatcacgagtttagcaaaacggaagaactcaaactcgaagatgttgatgaggaaattaacgcggagaatgtggagagcaagaaaaaaacggtgggggacgacgaatcagttcctaccgggtatcattccaagaccgagggtgctgagagaaccaacgatgatagcagtgcagagaccatcgagaaaaaagagaaggccaacctcgaagagcgtgccatctgtgaatacaacgaaaacccaaagggttacatgttggatgatgccgattcatctagcctcgagattttagagaacagtgagacaaccccatcaaaggacatgaaaaaaacgaagaagatctttctgttcaaaagagtgccgagcattaatcaaaaaattgttaagaacaataacgagccactgccagagataaagagcatcggggatcagataatcctgaaatccgacaataaagacgcagatcagaaccacatgagccagaaccaccagaatattcctcccaccaatacagagaggcggagcaaatcatgcaccatcctttag

SEQ ID NO: 30900 - DNA, 1941 bp, Artificial Sequence
  derived and/or modified sequence
atgcgggagcccgaggagctgatgcccgacagcggcgccgtgttcacattcggaaagagcaagttcgctgagaacaaccctggaaagttctggtttaaaaatgacgtcccagtgcacctgagctgcggggacgagcactcagctgtcgtaactggcaacaataaattgtacatgtttggttccaacaattgggggcagttgggcctgggctctaaatcagccatctcaaaacccacctgcgttaaagcccttaagcctgagaaagtcaaactcgctgcctgtgggaggaaccatactctcgttagcacagagggagggaacgtctacgcaacaggggggaataatgagggacagttaggcttgggggacaccgaggaacggaatacttttcatgtgatctccttctttactagcgagcacaagattaaacaactgtctgcaggctctaatacctctgctgcactgacagaggacggacgcctatttatgtggggcgacaacagtgagggacagatcggtctgaagaacgtgtcaaatgtgtgtgtaccacaacaagtaactatcgggaagcccgtgagttggatatcatgcggttattaccactccgccttcgtgaccactgatggagagctgtatgtcttcggggaaccagagaatgggaaattgggactccccaaccaactgttaggcaaccacaggacaccacagctcgtttcagaaattcctgagaaggtaatccaagttgcctgtggtggggagcacacagttgtgctgacggagaacgcggtgtacacctttgggctggggcagtttggtcagttgggccttgggacatttctcttcgagacctccgaacctaaggtaatagagaacattagggaccagacaatttcttatatatcatgcggggaaaaccacacagccctgataactgacatcggccttatgtacacattcggtgacggcagacatggaaaactcgggcttgggctcgaaaattttacgaaccacttcatcccaaccctatgctcaaattttttaagattcattgtgaagctggtcgcctgtggaggctgccatatggtggtgtttgctgctccccacaggggtgtggcaaaggagatagaattcgacgaaatcaatgatacatgcctgagtgttgccaccttcctgccgtattcaagtctcacgtcaggaaatgtgctgcagcggactctttcggctaggatgcgacgacgcgaacgcgaacgctcacccgactctttttccatgcgaagaacactgcctcccatcgaaggcacactgggtttgagcgcttgtttcttacctaacagcgtattcccccgctgctcagaaagaaatctgcaggaatcagtgctgtccgaacaagacctcatgcagccagaggagccagattatttattggatgaaatgaccaaagaagctgagatagataatagctcaaccgttgagtccctgggtgaaacaacggatatcttgaacatgacccacatcatgtctctgaattctaacgagaagagcctgaagctgtcgccggttcagaaacaaaagaaacagcagactattggtgaattaacgcaggatactgccctcaccgagaacgacgattcggatgaatatgaggagatgtcggagatgaaagaaggcaaggcttgtaagcagcacgtgagccagggcattttcatgacccagcccgctaccactattgaggccttcagcgatgaggaagttgagatcccagaggaaaaggaaggtgcagaagatagcaaggggaatgggatcgaggagcaggaggtagaggctaacgaagagaacgtgaaagtgcacggggggcggaaggaaaaaaccgaaattctttctgacgatctcaccgataaggccgaatatagtgcctcccactctcaaattgtgagtgtctag

SEQ ID NO: 30901 - DNA, 3459 bp, Artificial Sequence
  derived and/or modified sequence
atgcgggagcccgaggagctgatgcccgacagcggcgccgtgttcacgttcggtaagagtaagttcgccgagaataatcccggaaaattttggtttaaaaacgacgtgccagtccacctgagctgcggtgacgaacatagtgccgtcgtgacaggcaacaacaaattgtatatgttcggatctaacaactgggggcagctcggactggggagcaaaagcgcaatttctaagccaacttgcgtcaaggccctgaaacccgaaaaggtgaaattggcggcctgtggccggaaccacaccctggtttctaccgagggcggaaatgtgtatgccactggtggcaacaacgagggacagttaggactgggtgacaccgaagagaggaatacattccatgtcatttcttttttcacaagtgaacataagattaaacagctgtcggccgggagcaacacgagcgccgccctgactgaggacggacgtctttttatgtggggcgataactctgaggggcaaatagggttgaaaaacgtgtctaatgtttgcgtgcctcagcaggtgacaatcggaaaacctgtatcttggatctcttgcggctattaccactcagctttcgtgaccacggacggagaactgtacgtgtttggtgagccagaaaacggtaagctaggcctcccaaatcagctgttgggcaaccaccgaacgccccagttggtgagtgaaatacctgaaaaggtcatccaggttgcttgcgggggcgagcacacagtcgtgctaaccgagaatgcagtgtatacattcggcctcggtcagtttggccagctcggtctggggactttcctgtttgagacgtcagagcccaaagtgatcgagaatattcgggaccaaacaatctcgtatatcagctgcggggaaaaccacaccgccctgatcaccgacataggccttatgtacacattcggcgacggtcgtcacggcaagctaggactgggattagaaaattttactaaccactttatacctacactgtgtagcaactttcttagattcatcgtaaaactggtggcatgcggaggatgtcatatggtcgtgtttgctgccccccatcgcggggtcgctaaggagattgagttcgatgagattaacgatacctgcctgagcgtggccacgtttttaccttactctagtctaacatcaggcaacgtgctccagcggacattgagtgcaaggatgcgccggagagagcgggagagatcacccgactccttcagtatgagacgcactctaccaccgatcgaggggactctgggtttatcagcttgcttcctgccaaacagtgtcttccctcgttgctcagaaagaaacttgcaggaaagcgttctctctgagcaagatcttatgcagccagaagaaccggactatctgctcgacgaaatgaccaaggaagctgagatagataactctagcacagttgaatcgctgggggagacgaccgatatattgaacatgacacacattatgtccctcaatagtaacgaaaagagcttaaaactgtctcctgtgcaaaaacaaaagaaacaacagaccattggcgagctaactcaggatacagctctgaccgaaaatgacgacagtgacgagtacgaggagatgtccgaaatgaaagagggcaaagcgtgcaagcagcatgttagccaggggatcttcatgactcaaccagctaccaccatcgaggccttttctgacgaggaggtcgagattcctgaggaaaaagaaggagctgaagacagcaaaggaaatggcatcgaagagcaggaggtcgaagcaaatgaagagaatgtgaaggtgcatgggggacggaaggagaagacggaaatcttgtcagacgacttaaccgataaggccgaagtcagcgagggcaaagccaagtctgtaggggaagctgaagacggaccagagggccgtggcgacggcacatgtgaagaaggaagctccggagcagagcattggcaagatgaagagagagagaagggagaaaaggataaaggacggggggagatggaaagaccaggggagggcgaaaaagagctggcagaaaaggaagagtggaaaaagcgcgatggggaagagcaagaacaaaaagagagagagcagggccaccagaaagagaggaaccaggaaatggaggaaggcggggaggaagagcacggtgagggggaagaagaagagggggatcgtgaagaagaggaggagaaagagggagaaggcaaggaggagggagaaggggaagaagtcgaaggcgagagggaaaaagaggagggtgagagaaaaaaggaggagcgagctgggaaggaagagaagggcgaggaggagggcgatcaaggcgagggagaagaggaagagaccgaagggcggggagaggaaaaggaggagggcggcgaggtcgaaggtggcgaggtggaagagggcaaaggagaacgtgaggaagaggaagaagagggagagggcgaagaggaggaaggcgagggagaagaggaggaaggcgaaggcgaggaggaggagggggaaggtaagggcgaggaagagggcgaagagggcgagggagaagaggagggagaggagggggagggagagggcgaagaagaggagggggaaggcgaaggcgaggaagaaggggagggtgaaggcgaagaggaagaaggcgagggcgagggggaggaagagggtgagggagaaggtgaggaggaggaaggagagggcaaaggtgaggaggagggggaggagggagagggcgagggggaggaagaagagggtgagggtgaaggagaagatggagagggggagggcgaagaggaggagggagaatgggaaggggaggaggaagaaggagagggggaaggggaggaggaaggagaaggcgaaggtgaggagggagagggagaaggagaagaggaagagggggagggagaaggggaggaagaagagggtgaggaagaaggcgaggaagaaggtgagggtgaggaagaaggggagggcgagggagaggaggaggaagagggcgaagtggaaggcgaagtagaaggggaagaaggtgaaggcgagggcgaggaggaagaaggagaagaagaaggagaagagcgggaaaaagagggcgaaggggaagagaacaggaggaaccgggaagaagaggaggaggaagagggaaaatatcaggagactggggaagaagaaaacgagcgacaggatggggaagagtataaaaaagtcagcaagattaagggcagcgtgaaatacggcaagcacaagacctatcagaaaaagtctgttacaaatacccaggggaacggcaaagagcagcgatcgaagatgccagtacagtcaaaacgactcctcaaaaacggccctagcggcagcaaaaaattttggaataacgtcctgccccattacttggaattgaagtag

SEQ ID NO: 30902 - DNA, 3063 bp, Artificial Sequence
  derived and/or modified sequence
atgcgagaacccgaagagctgatgcctgattcaggcgcagtgtttacatttggcaaaagtaagttcgctgagaacaacccgggaaaattttggttcaaaaacgatgtgccagtacatctgtcttgtggtgacgaacattcagcggtggttacaggcaataataagctatacatgttcgggagtaacaattggggacagcttggattaggatcaaaatccgctattagtaaaccaacatgcgtgaaagctctgaagcctgaaaaagtaaagcttgcagcctgtggcaggaaccatacgctcgtaagtactgaaggcggaaacgtctatgccaccgggggtaacaacgaagggcagctcggtctgggcgatactgaggagcgaaatacctttcacgtcattagttttttcacatccgagcataagataaaacagctctctgcgggatccaacacctcagctgcactaaccgaggatggccgactgtttatgtggggtgataatagcgaaggtcagattggcctgaagaacgtcagtaacgtatgcgtgcctcaacaggtgactatcggcaaaccagtgtcatggatatcctgcgggtactaccattctgctttcgtgacaaccgatggcgagctctacgtctttggcgagccggagaatgggaagttggggcttccaaatcagctcctgggtaatcaccgaactcctcagctggtgagtgagattcctgagaaggtgatccaggtggcttgcggtggggaacacacagtcgttcttactgagaacgccgtctacaccttcgggctgggtcaatttggacagctaggccttggaacatttctcttcgaaacgtcagaaccaaaagtcatagagaatattagagatcagaccatcagttacatctcttgcggggagaaccatactgctctgattacagacattgggctaatgtataccttcggcgacggacggcacggtaagcttggactgggccttgaaaactttaccaatcatttcatccccactctctgctctaattttttgcggtttatagtgaaactggtggcctgtggaggctgtcacatggttgtgttcgcagccccacataggggcgtggcaaaagaaattgagtttgatgagatcaatgatacatgcctgtctgtggccacgttcctcccatatagttccctgacatcaggaaatgttttgcaacgcacgctttcagcccgaatgaggaggcgggagcgggagaggtcccctgacagtttctcaatgcgcagaacattgccaccaatagaaggtaccctgggtctgtctgcttgctttctgcctaatagtgtttttccaagatgctctgaacggaatctgcaggagagcgtccttagcgaacaggacctcatgcagcccgaggagccagactacctccttgacgagatgaccaaggaggccgaaatcgataattctagcacggtggaatcactgggtgaaactactgatatcctgaatatgacgcatattatgtccttgaactctaatgagaaatctctcaagcttagccctgttcagaaacagaagaagcaacaaactatcggggaacttacgcaagatacagccctgaccgaaaatgatgacagtgatgagtatgaagagatgtccgaaatgaaagagggaaaagcgtgcaagcagcacgtgtcccagggaatttttatgacacagcccgcaacaacaatcgaggcattttctgacgaagaagttgggaacgatacaggacaggttggccctcaggctgatacggacggagaaggcctgcagaaagaggtgtatagacacgagaacaataatggggtggatcaacttgacgcgaaggagattgaaaaagagtccgacggcggacatagccagaaggaaagcgaggccgaagagattgacagtgagaaagagaccaagctggctgagattgcaggcatgaaagatctgcgggagcgggaaaaatcgacaaaaaagatgtctccattcttcggaaatctgcccgaccggggaatgaacaccgagagcgaggaaaacaaagacttcgtgaagaagagagagagttgcaagcaggatgtgattttcgactcagaacgagagagcgttgagaaaccagacagctacatggaaggtgcatcggagtctcagcagggtattgcagatggattccagcagccagaggcgattgagttttcatccggcgaaaaggaagatgatgaggtggaaacagaccaaaacatccggtatggtcgtaaactaattgagcaggggaacgagaaggagacaaagccaattatctctaaatcaatggccaaatacgattttaaatgtgacagacttagtgagatacccgaggagaaggagggagccgaggactctaaaggcaacggtatcgaagagcaggaagtggaggccaatgaggaaaacgtcaaagtccatggcggaagaaaagagaaaactgagattcttagtgatgatctgacagacaaagcggaggatcacgagttttctaaaacagaagagctcaagcttgaggatgtggacgaggaaataaatgctgagaatgtggagtccaagaagaagacagtgggggacgacgaaagtgttcctaccgggtatcattctaagaccgagggagctgagagaacaaatgatgacagttccgcagagaccatcgaaaagaaagagaaagctaacctcgaagagcgcgcaatttgtgaatataacgaaaatccgaagggatacatgcttgatgacgccgatagcagttctctcgaaatccttgagaattcagagaccacaccgtccaaagatatgaagaagaccaaaaaaatattccttttcaaaagggtcccctccattaaccaaaagattgttaagaataacaacgagcccttgcccgaaattaagagcattggggatcagataattctgaagtccgacaacaaagacgccgatcagaatcacatgagtcagaaccatcagaacatcccgccaactaacacagagcgtcgctctaagagctgcacaatattgtag

SEQ ID NO: 30903 - DNA, 1941 bp, Artificial Sequence
  derived and/or modified sequence
atgcgggaacccgaagaactgatgccggactcaggcgcagtgttcacattcgggaagtccaaatttgccgagaataatcctgggaagttctggttcaagaacgacgttcctgtgcacttgagttgtggggatgagcactccgcggttgttaccggcaataataagctgtacatgtttggaagcaataattggggtcagttaggactcgggagtaagtccgccatttctaaaccgacatgtgtaaaggccctcaaaccagagaaagtgaaactcgccgcttgcgggaggaatcatactttggtgtccacggaagggggtaatgtgtacgccaccggaggaaacaacgaaggacagctgggccttggggataccgaggagcgaaacacttttcacgtaatctcttttttcacgtccgaacataaaattaaacagctcagcgccggatcaaatacgtccgcggcactgactgaggacggcaggctgttcatgtggggcgacaactccgagggacagattgggttgaaaaacgtatccaacgtgtgtgtgccacagcaggtgaccatcggaaagccagtttcttggatttcttgcggctactaccattccgcatttgtgaccaccgatggggagctctatgtcttcggcgagccagagaatggtaaattgggtctgccaaatcagcttctgggaaaccacagaactcctcaattggtgtctgaaatcccagaaaaagtgatccaggtggcttgcggcggtgagcatactgttgtccttactgagaacgcagtctatactttcgggctggggcagttcggccagctgggcctgggtaccttcctgtttgaaacatctgaaccgaaagtaatagagaatattagggaccagaccatttcctatatctcatgtggcgagaatcacaccgccctcataacagatattggattgatgtataccttcggggacggcaggcacggaaaattggggttgggtctggagaatttcaccaaccacttcattccaacactgtgctcaaacttcttgcgcttcatcgtcaagctggttgcatgtggcggatgccatatggtcgtgtttgccgctcctcatcgcggtgtggcaaaagagatcgaattcgacgagatcaacgacacttgcctgtcagtcgctacattcctgccgtactcaagccttacctccgggaatgtgctacagcgtactttgtccgcaagaatgcggcgacgcgagcgggaacggagccctgatagtttttctatgaggcggaccctgcctcccattgagggaaccttgggcttatctgcatgttttctccctaactcagtatttcctaggtgtagcgaacggaatctgcaggagtccgtgctctcagaacaggacttgatgcagcccgaagagcctgattacctgctcgacgagatgacaaaggaggctgagattgacaactctagtacggttgagtccctcggcgaaactactgatattctgaacatgacgcacatcatgtccctgaacagtaacgagaagtccttgaagctcagcccagtgcagaagcagaaaaagcaacagacaattggggaactgacacaggacacggcactaactgagaacgacgattcagacgagtacgaagagatgagcgaaatgaaggaaggtaaagcatgtaagcaacatgtttcccagggcattttcatgactcagcccgcaaccaccattgaagcctttagcgacgaggaggtcgagattcctgaggagaaagaaggcgctgaggatagcaagggtaatggaatcgaggagcaggaagtggaggccaatgaagagaatgtaaaggtgcacggagggaggaaagagaagacggagatcctctcagacgatctgactgataaggccgaatactccgccagtcatagccagattgtatccgtatag

SEQ ID NO: 30904 - DNA, 3459 bp, Artificial Sequence
  derived and/or modified sequence
atgagagaacctgaggagttgatgccagatagcggtgcagtattcaccttcggcaaaagtaagtttgctgagaacaaccccggaaaattctggtttaaaaatgacgtacctgtccatctgtcttgcggtgatgagcatagcgccgtggtgacaggcaataataaactgtacatgttcgggtcgaacaactgggggcagttgggccttggatctaagagcgctataagtaagccaacttgtgtcaaggccctcaaacccgagaaagtgaagttggcagcttgcggccgtaatcacacacttgtatccacggagggtggaaacgtgtatgcgacggggggtaacaatgaggggcagctcgggctgggagatacggaggagcgcaacacgtttcacgtgatcagctttttcacctcagagcacaagattaaacagctgagcgcaggctctaatacatctgctgcactgacagaggatggcaggctgttcatgtggggggacaactccgaaggccaaattggcttgaagaacgtctctaatgtatgcgtcccccaacaggtgacaattggtaagccggtctcatggatatcttgcggctattatcatagtgcgtttgtgacgacagacggcgaactgtatgtgtttggggagcctgagaatggcaaactcggactgccaaatcagttgctcgggaatcacagaacaccccagctagtgagcgagattccagaaaaggtgatccaggtggcctgtgggggagaacacactgtggtcttgaccgaaaacgcagtctacacctttgggcttggccagttcggccagctgggtttggggacctttttattcgaaacatcggagcctaaggtaattgagaatattcgggaccagaccatcagctatatcagctgcggggagaatcacactgcactgataaccgatatcggtcttatgtacacttttggcgatgggagacacggcaaactggggttaggtctagagaacttcacaaaccatttcatccccactctgtgctctaacttcctacgtttcatagtcaaacttgtagcatgcggcggttgccatatggtcgtcttcgccgctccgcacagaggtgtggcaaaggagattgagtttgatgagatcaatgacacttgtctgtcagtggcaacatttctgccctattcctctctgacttctggcaacgtgttgcaaagaacgctttccgcacggatgcggaggcgggaaagggaacgctcccctgattcttttagtatgagaaggacactgcctcccattgaaggcacactaggcctttccgcttgcttcctgcctaactccgtgttccctcgctgttccgagcgcaacctacaggaatcagttctgagcgagcaggatctgatgcagcccgaagaaccagattatcttttagacgagatgaccaaggaggccgaaattgacaattcctctaccgtggaatctctcggtgagacgacagatattctgaacatgactcacatcatgtctctcaactccaatgaaaaatcacttaagttgagcccggttcagaagcaaaagaagcagcaaacaatcggcgaactgacccaagatacagctcttactgagaacgatgacagcgatgagtatgaagagatgtccgaaatgaaggaaggaaaagcctgtaagcaacacgtaagccagggaatcttcatgactcagcccgctaccaccatcgaggcatttagcgatgaggaggtcgagattcccgaggaaaaggagggggctgaggatagtaaggggaatggaatagaagagcaagaggtagaggcgaatgaagaaaatgtgaaagtgcatggcggacgtaaggagaagaccgagattctgagcgatgatctgacagacaaagccgaggtgtccgagggcaaggctaagagtgtcggagaggctgaggacggccctgagggacgtggcgatggaacctgtgaggaaggaagcagtggggcagagcactggcaggacgaggagcgcgagaagggtgagaaggacaagggcaggggcgagatggaacgcccaggggagggcgagaaggaacttgcagagaaagaggagtggaagaagcgagacggcgaggaacaggagcagaaagagagagagcagggacaccagaaggaaaggaaccaagagatggaggaaggaggtgaggaggagcatggggagggcgaagaggaagaaggagatcgcgaagaggaggaggagaaagaaggcgagggcaaggaggaaggagagggcgaagaggtggaaggcgaacgagagaaggaagaaggcgagcggaagaaagaggagagggcaggcaaagaagaaaagggcgaggaagagggagatcagggggagggcgaagaagaagagactgaggggagaggggaagagaaagaggagggaggcgaggttgaaggaggagaggttgaggagggaaaaggcgaaagagaggaagaagaggaggagggcgagggcgaagaagaagagggggaaggggaagaggaagaaggagagggcgaagaagaggagggcgagggtaaaggcgaagaggagggagaagagggggaaggggaagaggagggagaagaaggagaaggtgagggtgaggaggaagagggcgagggagagggagaggaggaaggcgagggggagggtgaggaagaagagggggaaggcgagggggaagaagaaggggagggagaaggtgaagaggaggaaggcgaagggaagggtgaagaagaaggcgaagaaggcgaaggagagggagaggaagaagagggggagggtgagggagaggacggggagggggagggcgaggaggaagagggggagtgggaaggcgaggaggaagagggggaaggggaaggcgaggaggagggggagggggaaggagaagagggcgagggggagggcgaagaggaggagggagagggtgagggagaggaagaggagggggaggaggagggcgaggaggaaggggaaggcgaggaagaaggtgagggcgaaggcgaagaggaagaggaaggggaagtagaaggcgaggttgaaggggaggagggcgagggtgaaggagaggaggaagaaggggaagaagagggtgaggagagggaaaaggaaggggagggcgaggagaataggcggaaccgagaagaagaagaggaggaagagggaaagtaccaggaaactggagaagaagagaatgaaaggcaggatggggaagagtacaagaaagtttctaaaataaaaggcagtgtgaaatatggaaaacataagacttaccagaaaaagtctgtgaccaatacccaaggcaacggtaaggaacagcgctccaaaatgcccgtgcagagtaaacgcctattgaagaacggaccatccggttccaaaaagttttggaataatgtactgccccattacctcgaacttaaatag

SEQ ID NO: 30905 - DNA, 3686 bp, Artificial Sequence
  derived and/or modified sequence
gtttgttgacttccgggagcgcggttgtagttgatctccggagtttcgccatgcggaacttgggggctttcgcggcccgcgtcggtgcggagtagctgctttagccccgaccaaaccgtcctctacagcctcctggccccggcgcaggctgcccgtactgcccgtggcatgagggagccggaagagctgatgcccgattcgggtgctgtgtttacatttgggaaaagtaaatttgctgaaaataatcccggtaaattctggtttaaaaatgatgtccctgtacatctttcatgtggagatgaacattctgctgttgttaccggaaataataaactttacatgtttggcagtaacaactggggtcagttaggattaggatcaaagtcagccatcagcaagccaacatgtgtcaaagctctaaaacctgaaaaagtgaaattagctgcctgtggaaggaaccacaccctggtgtcaacagaaggaggcaatgtatatgcaactggtggaaataatgaaggacagttggggcttggtgacaccgaagaaagaaacacttttcatgtaattagcttttttacatccgagcataagattaagcagctgtctgctggatctaatacttcagctgccctaactgaggatggaagactttttatgtggggtgacaattccgaagggcaaattggtttaaaaaatgtaagtaatgtctgtgtccctcagcaagtgaccattgggaaacctgtctcctggatctcttgtggatattaccattcagcttttgtaacaacagatggtgagctatatgtgtttggagaacctgagaatgggaagttaggtcttcccaatcagctcctgggcaatcacagaacaccccagctggtgtctgaaattccggagaaggtgatccaagtagcctgtggtggagagcatactgtggttctcacggagaatgctgtgtatacctttgggctgggacaatttggtcagctgggtcttggcacttttctttttgaaacttcagaacccaaagtcattgagaatattagggatcaaacaataagttatatttcttgtggagaaaatcacacagctttgataacagatatcggccttatgtatacttttggagatggtcgccacggaaaattaggacttggactggagaattttaccaatcacttcattcctactttgtgctctaattttttgaggtttatagttaaattggttgcttgtggtggatgtcacatggtagtttttgctgctcctcatcgtggtgtggcaaaagaaattgaattcgatgaaataaatgatacttgcttatctgtggcgacttttctgccgtatagcagtttaacctcaggaaatgtactgcagaggactctatcagcacgtatgcggcgaagagagagggagaggtctccagattctttttcaatgaggagaacactacctccaatagaagggactcttggcctttctgcttgttttctccccaattcagtctttccacgatgttctgagagaaacctccaagagagtgtcttatctgaacaggacctcatgcagccagaggaaccagattatttgctagatgaaatgaccaaagaagcagagatagataattcttcaactgtagaaagccttggagaaactactgatatcttaaacatgacacacatcatgagcctgaattccaatgaaaagtcattaaaattatcaccagttcagaaacaaaagaaacaacaaacaattggggaactgacgcaggatacagctcttactgaaaacgatgatagtgatgaatatgaagaaatgtcagaaatgaaagaagggaaagcatgtaaacaacatgtgtcacaagggattttcatgacgcagccagctacgactatcgaagcattttcagatgaggaagtaggtaatgacacaggccaggtgggacctcaggctgacactgatggagagggtttacaaaaagaggtatatagacatgaaaataataatggtgttgatcaacttgatgctaaggaaatagaaaaggaaagtgatggaggacacagtcagaaggaatcagaagcagaagaaatagacagtgagaaggaaactaaactggcagaaatagcaggtatgaaggatttaagagaaagggaaaagagtacaaaaaagatgagtcctttctttggcaacttaccagatagaggtatgaatactgagagtgaagaaaataaagattttgttaagaaaagggaaagttgcaagcaagatgtgatctttgacagtgaaagagaatcagtagaaaagccagacagttacatggaaggtgcaagtgagagtcaacagggtatagctgatggattccagcagcctgaggcaatagaatttagtagtggagagaaagaggatgatgaagtggaaactgaccaaaacatacggtatggcaggaaattgattgaacaaggaaatgaaaaagagactaaacccataatatccaaatccatggcaaagtatgattttaaatgtgatcgcttgtcagagatcccagaggagaaggaaggagcagaggattcaaaaggaaatggaatagaggagcaagaggtagaagcaaatgaggaaaatgtgaaggtgcatggaggaagaaaggagaaaacagagatcctatcagatgaccttacagacaaagcagaggatcatgaattttctaaaactgaggaactaaaactagaagatgtggatgaggaaattaatgctgaaaatgtggaaagcaagaagaaaactgtgggagatgatgaaagtgttcctacaggttatcacagtaaaacagaaggagcagaaagaaccaatgatgatagctcagctgaaactattgaaaagaaagaaaaagccaacctagaggaacgggccatttgtgagtacaatgaaaacccaaaaggatacatgcttgatgatgcagatagcagttcattagaaatcctagaaaacagtgaaacaacaccaagcaaagacatgaaaaaaacaaagaagatttttctgttcaaaagagtcccctcaataaatcaaaagattgtcaagaataacaatgagccgctcccagagataaaatccataggagaccagatcattttaaaaagtgataataaagatgccgaccagaaccacatgagtcagaatcatcagaatatcccaccaacaaatacagagagaagatcaaaatcctgtacaatactataaatatatatttatgttttcacagtcaccaagtgtattgtaatgtatacttgaaaaatgttataacttatgaagtaaagtttctgatagtagtctttaaaagatataagacttaatatgttttattcagcttctataagtgtgaccagttttgatatttatttatgctaatatttttaacaagtcatttcaaaatatgtgtatctcaaattctccctaaagtgttgtggccttaactgttcagtattgcaataaaaaatatatttttatatgtggaaaattgaaataagatatttcctagtttttactaaacaattttacttctttataattttataaggcaatatttgcaatcttacgacactgtaacagtttttgatgtatttacaatttttacaaaactgaggtaaaattgtttataatgaacatattttaataaactatatctggtcagttcc

SEQ ID NO: 30906 - DNA, 2109 bp, Artificial Sequence
  derived and/or modified sequence
gtttgttgacttccgggagcgcggttgtagttgatctccggagtttcgccatgcggaacttgggggctttcgcggcccgcgtcggtgcggagtagctgctttagccccgaccaaaccgtcctctacagcctcctggccccggcgcaggctgcccgtactgcccgtggcatgagggagccggaagagctgatgcccgattcgggtgctgtgtttacatttgggaaaagtaaatttgctgaaaataatcccggtaaattctggtttaaaaatgatgtccctgtacatctttcatgtggagatgaacattctgctgttgttaccggaaataataaactttacatgtttggcagtaacaactggggtcagttaggattaggatcaaagtcagccatcagcaagccaacatgtgtcaaagctctaaaacctgaaaaagtgaaattagctgcctgtggaaggaaccacaccctggtgtcaacagaaggaggcaatgtatatgcaactggtggaaataatgaaggacagttggggcttggtgacaccgaagaaagaaacacttttcatgtaattagcttttttacatccgagcataagattaagcagctgtctgctggatctaatacttcagctgccctaactgaggatggaagactttttatgtggggtgacaattccgaagggcaaattggtttaaaaaatgtaagtaatgtctgtgtccctcagcaagtgaccattgggaaacctgtctcctggatctcttgtggatattaccattcagcttttgtaacaacagatggtgagctatatgtgtttggagaacctgagaatgggaagttaggtcttcccaatcagctcctgggcaatcacagaacaccccagctggtgtctgaaattccggagaaggtgatccaagtagcctgtggtggagagcatactgtggttctcacggagaatgctgtgtatacctttgggctgggacaatttggtcagctgggtcttggcacttttctttttgaaacttcagaacccaaagtcattgagaatattagggatcaaacaataagttatatttcttgtggagaaaatcacacagctttgataacagatatcggccttatgtatacttttggagatggtcgccacggaaaattaggacttggactggagaattttaccaatcacttcattcctactttgtgctctaattttttgaggtttatagttaaattggttgcttgtggtggatgtcacatggtagtttttgctgctcctcatcgtggtgtggcaaaagaaattgaattcgatgaaataaatgatacttgcttatctgtggcgacttttctgccgtatagcagtttaacctcaggaaatgtactgcagaggactctatcagcacgtatgcggcgaagagagagggagaggtctccagattctttttcaatgaggagaacactacctccaatagaagggactcttggcctttctgcttgttttctccccaattcagtctttccacgatgttctgagagaaacctccaagagagtgtcttatctgaacaggacctcatgcagccagaggaaccagattatttgctagatgaaatgaccaaagaagcagagatagataattcttcaactgtagaaagccttggagaaactactgatatcttaaacatgacacacatcatgagcctgaattccaatgaaaagtcattaaaattatcaccagttcagaaacaaaagaaacaacaaacaattggggaactgacgcaggatacagctcttactgaaaacgatgatagtgatgaatatgaagaaatgtcagaaatgaaagaagggaaagcatgtaaacaacatgtgtcacaagggattttcatgacgcagccagctacgactatcgaagcattttcagatgaggaagtagagatcccagaggagaaggaaggagcagaggattcaaaaggaaatggaatagaggagcaagaggtagaagcaaatgaggaaaatgtgaaggtgcatggaggaagaaaggagaaaacagagatcctatcagatgaccttacagacaaagcagagtattctgccagtcactcccaaattgtttcagtttaa

SEQ ID NO: 30907 - DNA, 4767 bp, Artificial Sequence
  derived and/or modified sequence
gtagcggctgtttgttgacttccgggagcgcggttgtagttgatctccggagtttcgccatgcggaacttgggggctttcgcggcccgcgtcggtgcggagtagctgctttagccccgaccaaaccgtcctctacagcctcctggccccggcgcaggctgcccgtactgcccgtggcatgagggagccggaagagctgatgcccgattcgggtgctgtgtttacatttgggaaaagtaaatttgctgaaaataatcccggtaaattctggtttaaaaatgatgtccctgtacatctttcatgtggagatgaacattctgctgttgttaccggaaataataaactttacatgtttggcagtaacaactggggtcagttaggattaggatcaaagtcagccatcagcaagccaacatgtgtcaaagctctaaaacctgaaaaagtgaaattagctgcctgtggaaggaaccacaccctggtgtcaacagaaggaggcaatgtatatgcaactggtggaaataatgaaggacagttggggcttggtgacaccgaagaaagaaacacttttcatgtaattagcttttttacatccgagcataagattaagcagctgtctgctggatctaatacttcagctgccctaactgaggatggaagactttttatgtggggtgacaattccgaagggcaaattggtttaaaaaatgtaagtaatgtctgtgtccctcagcaagtgaccattgggaaacctgtctcctggatctcttgtggatattaccattcagcttttgtaacaacagatggtgagctatatgtgtttggagaacctgagaatgggaagttaggtcttcccaatcagctcctgggcaatcacagaacaccccagctggtgtctgaaattccggagaaggtgatccaagtagcctgtggtggagagcatactgtggttctcacggagaatgctgtgtatacctttgggctgggacaatttggtcagctgggtcttggcacttttctttttgaaacttcagaacccaaagtcattgagaatattagggatcaaacaataagttatatttcttgtggagaaaatcacacagctttgataacagatatcggccttatgtatacttttggagatggtcgccacggaaaattaggacttggactggagaattttaccaatcacttcattcctactttgtgctctaattttttgaggtttatagttaaattggttgcttgtggtggatgtcacatggtagtttttgctgctcctcatcgtggtgtggcaaaagaaattgaattcgatgaaataaatgatacttgcttatctgtggcgacttttctgccgtatagcagtttaacctcaggaaatgtactgcagaggactctatcagcacgtatgcggcgaagagagagggagaggtctccagattctttttcaatgaggagaacactacctccaatagaagggactcttggcctttctgcttgttttctccccaattcagtctttccacgatgttctgagagaaacctccaagagagtgtcttatctgaacaggacctcatgcagccagaggaaccagattatttgctagatgaaatgaccaaagaagcagagatagataattcttcaactgtagaaagccttggagaaactactgatatcttaaacatgacacacatcatgagcctgaattccaatgaaaagtcattaaaattatcaccagttcagaaacaaaagaaacaacaaacaattggggaactgacgcaggatacagctcttactgaaaacgatgatagtgatgaatatgaagaaatgtcagaaatgaaagaagggaaagcatgtaaacaacatgtgtcacaagggattttcatgacgcagccagctacgactatcgaagcattttcagatgaggaagtagagatcccagaggagaaggaaggagcagaggattcaaaaggaaatggaatagaggagcaagaggtagaagcaaatgaggaaaatgtgaaggtgcatggaggaagaaaggagaaaacagagatcctatcagatgaccttacagacaaagcagaggtgagtgaaggcaaggcaaaatcagtgggagaagcagaggatgggcctgaaggtagaggggatggaacctgtgaggaaggtagttcaggagcagaacactggcaagatgaggagagggagaagggggagaaagacaagggtagaggagaaatggagaggccaggagagggagagaaggaactagcagagaaggaagaatggaagaagagggatggggaagagcaggagcaaaaggagagggagcagggccatcagaaggaaagaaaccaagagatggaggagggaggggaggaggagcatggagaaggagaagaagaggagggagacagagaagaggaagaagagaaggagggagaagggaaagaggaaggagaaggggaagaagtggagggagaacgtgaaaaggaggaaggagagaggaaaaaggaggaaagagcggggaaggaggagaaaggagaggaagaaggagaccaaggagagggggaagaggaggaaacagaggggagaggggaggaaaaagaggagggaggggaagtagagggaggggaagtagaggaggggaaaggagagagggaagaggaagaggaggagggtgagggggaagaggaggaaggggagggggaagaggaggaaggggagggggaagaggaggaaggagaagggaaaggggaggaagaaggggaagaaggagaaggggaggaagaaggggaggaaggagaaggggagggggaagaggaggaaggagaaggggagggagaagaggaaggagaaggggagggagaagaggaggaaggagaaggggagggagaagaggaaggagaaggggagggagaagaggaggaaggagaagggaaaggggaggaggaaggagaggaaggagaaggggagggggaagaggaggaaggagaaggggaaggggaggatggagaaggggagggggaagaggaggaaggagaatgggagggggaagaggaggaaggagaaggggagggggaagaggaaggagaaggggaaggggaggaaggagaaggggagggggaagaggaggaaggagaaggggagggggaagaggaggaaggggaagaagaaggggaggaagaaggagagggagaggaagaaggggagggagaaggggaggaagaagaggaaggggaagtggaaggggaggtggaaggggaggaaggagagggggaaggagaggaagaggaaggagaggaggaaggagaagaaagggaaaaggagggggaaggagaagaaaacaggaggaacagagaagaggaggaggaagaagaggggaagtatcaggagacaggcgaagaagagaatgaaaggcaggatggagaggagtacaaaaaagtgagcaaaataaaaggatctgtgaaatatggcaaacataaaacatatcaaaaaaagtcagttactaacacacagggaaatgggaaagagcagaggtccaaaatgccagtccagtcaaaacgacttttaaaaaacgggccatcaggttccaaaaagttctggaataatgtattaccacattacttggaattgaagtaacaaaccttaaatgtgacccgattatggccagtcagacaatttaaatgccttgcatataacgggcactcattacgtgttattaaattgattttatgtcaattattttatgtgtagtaaaaaaaaaagcaactgatgcagctgtgttaaggagccaaagacaataggaggcactggtaaattttggcctctctcaaactaaaattttcgtgtatttcccccccaaattataaaaacataactagaaaatattaaaaggtcatatcagattattaacattatatattcattaaaggcagctttaggaaacaggaatatactacaagagtgttttgtttgtgtatacaaatcattccatttttaaatggcacagatgcttaagggctataaaaacttctaatttcttataaatatgttagcactttttttaagttagtgattacagtttacctactgtatagaataattttctaataatggatggtattctaaaactcaattgaggcattcacattttaaagaaagtattgtctttcaccttttatgtgttctttttgcaaaaatctacaaagtgacagctgtgttcagagcttagatcccaaaaacgtgatctcttttagttactatctgggcagatggtagtatatctaatgaaatggtgattaatttaaatgtataatctggaaatatgtaaaacttgaagtattttttgtccaggcaaaggtactcattgggcctcagtttcttcatctctaaaatggagtggatgagatgatgtgataactgcagtcccttctaactcttaaattcttttcattctcacagattcactctatcattattgttattcatgtaagaaacgttttagggagaaaaattacactttaaaattaatttagttttctatacagttgttttctttactcttgaaaagttatgacagctttaacgtctcttgtcttctgtaattttttatttctaaactcctatcatttccaagctttaactgtactttatcagagccttcatttctggtatgtgttatatgccctcaatgtattcactgactgttctgtaatttcagtttgtctgttccttgtcagaatgtttcaagtaaaataaaaaattaaatgt

SEQ ID NO: 30908 - DNA, 3063 bp, Artificial Sequence
  derived and/or modified sequence
atgagagagcccgaggagctgatgcccgacagcggcgccgtgttcaccttcggcaagagcaagttcgccgagaacaaccccggcaagttctggttcaagaacgacgtgcccgtgcacctgagctgcggcgacgagcacagcgccgtggtgaccggcaacaacaagctgtacatgttcggcagcaacaactggggccagctgggcctgggcagcaagagcgccatcagcaagcccacctgcgtgaaggccctgaagcccgagaaggtgaagctggccgcctgcggcagaaaccacaccctggtgagcaccgagggcggcaacgtgtacgccaccggcggcaacaacgagggccagctgggcctgggcgacaccgaggagagaaacaccttccacgtgatcagcttcttcaccagcgagcacaagatcaagcagctgagcgccggcagcaacaccagcgccgccctgaccgaggacggcagactgttcatgtggggcgacaacagcgagggccagatcggcctgaagaacgtgagcaacgtgtgcgtgccccagcaggtgaccatcggcaagcccgtgagctggatcagctgcggctactaccacagcgccttcgtgaccaccgacggcgagctgtacgtgttcggcgagcccgagaacggcaagctgggcctgcccaaccagctgctgggcaaccacagaaccccccagctggtgagcgagatccccgagaaggtgatccaggtggcctgcggcggcgagcacaccgtggtgctgaccgagaacgccgtgtacaccttcggcctgggccagttcggccagctgggcctgggcaccttcctgttcgagaccagcgagcccaaggtgatcgagaacatcagagaccagaccatcagctacatcagctgcggcgagaaccacaccgccctgatcaccgacatcggcctgatgtacaccttcggcgacggcagacacggcaagctgggcctgggcctggagaacttcaccaaccacttcatccccaccctgtgcagcaacttcctgagattcatcgtgaagctggtggcctgcggcggctgccacatggtggtgttcgccgccccccacagaggcgtggccaaggagatcgagttcgacgagatcaacgacacctgcctgagcgtggccaccttcctgccctacagcagcctgaccagcggcaacgtgctgcagagaaccctgagcgccagaatgagaagaagagagagagagagaagccccgacagcttcagcatgagaagaaccctgccccccatcgagggcaccctgggcctgagcgcctgcttcctgcccaacagcgtgttccccagatgcagcgagagaaacctgcaggagagcgtgctgagcgagcaggacctgatgcagcccgaggagcccgactacctgctggacgagatgaccaaggaggccgagatcgacaacagcagcaccgtggagagcctgggcgagaccaccgacatcctgaacatgacccacatcatgagcctgaacagcaacgagaagagcctgaagctgagccccgtgcagaagcagaagaagcagcagaccatcggcgagctgacccaggacaccgccctgaccgagaacgacgacagcgacgagtacgaggagatgagcgagatgaaggagggcaaggcctgcaagcagcacgtgagccagggcatcttcatgacccagcccgccaccaccatcgaggccttcagcgacgaggaggtgggcaacgacaccggccaggtgggcccccaggccgacaccgacggcgagggcctgcagaaggaggtgtacagacacgagaacaacaacggcgtggaccagctggacgccaaggagatcgagaaggagagcgacggcggccacagccagaaggagagcgaggccgaggagatcgacagcgagaaggagaccaagctggccgagatcgccggcatgaaggacctgagagagagagagaagagcaccaagaagatgagccccttcttcggcaacctgcccgacagaggcatgaacaccgagagcgaggagaacaaggacttcgtgaagaagagagagagctgcaagcaggacgtgatcttcgacagcgagagagagagcgtggagaagcccgacagctacatggagggcgccagcgagagccagcagggcatcgccgacggcttccagcagcccgaggccatcgagttcagcagcggcgagaaggaggacgacgaggtggagaccgaccagaacatcagatacggcagaaagctgatcgagcagggcaacgagaaggagaccaagcccatcatcagcaagagcatggccaagtacgacttcaagtgcgacagactgagcgagatccccgaggagaaggagggcgccgaggacagcaagggcaacggcatcgaggagcaggaggtggaggccaacgaggagaacgtgaaggtgcacggcggcagaaaggagaagaccgagatcctgagcgacgacctgaccgacaaggccgaggaccacgagttcagcaagaccgaggagctgaagctggaggacgtggacgaggagatcaacgccgagaacgtggagagcaagaagaagaccgtgggcgacgacgagagcgtgcccaccggctaccacagcaagaccgagggcgccgagagaaccaacgacgacagcagcgccgagaccatcgagaagaaggagaaggccaacctggaggagagagccatctgcgagtacaacgagaaccccaagggctacatgctggacgacgccgacagcagcagcctggagatcctggagaacagcgagaccacccccagcaaggacatgaagaagaccaagaagatcttcctgttcaagagagtgcccagcatcaaccagaagatcgtgaagaacaacaacgagcccctgcccgagatcaagagcatcggcgaccagatcatcctgaagagcgacaacaaggacgccgaccagaaccacatgagccagaaccaccagaacatcccccccaccaacaccgagagaagaagcaagagctgcaccatcctgtag

SEQ ID NO: 30909 - DNA, 1941 bp, Artificial Sequence
  derived and/or modified sequence
atgagagagcccgaggagctgatgcccgacagcggcgccgtgttcaccttcggcaagagcaagttcgccgagaacaaccccggcaagttctggttcaagaacgacgtgcccgtgcacctgagctgcggcgacgagcacagcgccgtggtgaccggcaacaacaagctgtacatgttcggcagcaacaactggggccagctgggcctgggcagcaagagcgccatcagcaagcccacctgcgtgaaggccctgaagcccgagaaggtgaagctggccgcctgcggcagaaaccacaccctggtgagcaccgagggcggcaacgtgtacgccaccggcggcaacaacgagggccagctgggcctgggcgacaccgaggagagaaacaccttccacgtgatcagcttcttcaccagcgagcacaagatcaagcagctgagcgccggcagcaacaccagcgccgccctgaccgaggacggcagactgttcatgtggggcgacaacagcgagggccagatcggcctgaagaacgtgagcaacgtgtgcgtgccccagcaggtgaccatcggcaagcccgtgagctggatcagctgcggctactaccacagcgccttcgtgaccaccgacggcgagctgtacgtgttcggcgagcccgagaacggcaagctgggcctgcccaaccagctgctgggcaaccacagaaccccccagctggtgagcgagatccccgagaaggtgatccaggtggcctgcggcggcgagcacaccgtggtgctgaccgagaacgccgtgtacaccttcggcctgggccagttcggccagctgggcctgggcaccttcctgttcgagaccagcgagcccaaggtgatcgagaacatcagagaccagaccatcagctacatcagctgcggcgagaaccacaccgccctgatcaccgacatcggcctgatgtacaccttcggcgacggcagacacggcaagctgggcctgggcctggagaacttcaccaaccacttcatccccaccctgtgcagcaacttcctgagattcatcgtgaagctggtggcctgcggcggctgccacatggtggtgttcgccgccccccacagaggcgtggccaaggagatcgagttcgacgagatcaacgacacctgcctgagcgtggccaccttcctgccctacagcagcctgaccagcggcaacgtgctgcagagaaccctgagcgccagaatgagaagaagagagagagagagaagccccgacagcttcagcatgagaagaaccctgccccccatcgagggcaccctgggcctgagcgcctgcttcctgcccaacagcgtgttccccagatgcagcgagagaaacctgcaggagagcgtgctgagcgagcaggacctgatgcagcccgaggagcccgactacctgctggacgagatgaccaaggaggccgagatcgacaacagcagcaccgtggagagcctgggcgagaccaccgacatcctgaacatgacccacatcatgagcctgaacagcaacgagaagagcctgaagctgagccccgtgcagaagcagaagaagcagcagaccatcggcgagctgacccaggacaccgccctgaccgagaacgacgacagcgacgagtacgaggagatgagcgagatgaaggagggcaaggcctgcaagcagcacgtgagccagggcatcttcatgacccagcccgccaccaccatcgaggccttcagcgacgaggaggtggagatccccgaggagaaggagggcgccgaggacagcaagggcaacggcatcgaggagcaggaggtggaggccaacgaggagaacgtgaaggtgcacggcggcagaaaggagaagaccgagatcctgagcgacgacctgaccgacaaggccgagtacagcgccagccacagccagatcgtgagcgtgtag

SEQ ID NO: 30910 - DNA, 3459 bp, Artificial Sequence
  derived and/or modified sequence
atgagagagcccgaggagctgatgcccgacagcggcgccgtgttcaccttcggcaagagcaagttcgccgagaacaaccccggcaagttctggttcaagaacgacgtgcccgtgcacctgagctgcggcgacgagcacagcgccgtggtgaccggcaacaacaagctgtacatgttcggcagcaacaactggggccagctgggcctgggcagcaagagcgccatcagcaagcccacctgcgtgaaggccctgaagcccgagaaggtgaagctggccgcctgcggcagaaaccacaccctggtgagcaccgagggcggcaacgtgtacgccaccggcggcaacaacgagggccagctgggcctgggcgacaccgaggagagaaacaccttccacgtgatcagcttcttcaccagcgagcacaagatcaagcagctgagcgccggcagcaacaccagcgccgccctgaccgaggacggcagactgttcatgtggggcgacaacagcgagggccagatcggcctgaagaacgtgagcaacgtgtgcgtgccccagcaggtgaccatcggcaagcccgtgagctggatcagctgcggctactaccacagcgccttcgtgaccaccgacggcgagctgtacgtgttcggcgagcccgagaacggcaagctgggcctgcccaaccagctgctgggcaaccacagaaccccccagctggtgagcgagatccccgagaaggtgatccaggtggcctgcggcggcgagcacaccgtggtgctgaccgagaacgccgtgtacaccttcggcctgggccagttcggccagctgggcctgggcaccttcctgttcgagaccagcgagcccaaggtgatcgagaacatcagagaccagaccatcagctacatcagctgcggcgagaaccacaccgccctgatcaccgacatcggcctgatgtacaccttcggcgacggcagacacggcaagctgggcctgggcctggagaacttcaccaaccacttcatccccaccctgtgcagcaacttcctgagattcatcgtgaagctggtggcctgcggcggctgccacatggtggtgttcgccgccccccacagaggcgtggccaaggagatcgagttcgacgagatcaacgacacctgcctgagcgtggccaccttcctgccctacagcagcctgaccagcggcaacgtgctgcagagaaccctgagcgccagaatgagaagaagagagagagagagaagccccgacagcttcagcatgagaagaaccctgccccccatcgagggcaccctgggcctgagcgcctgcttcctgcccaacagcgtgttccccagatgcagcgagagaaacctgcaggagagcgtgctgagcgagcaggacctgatgcagcccgaggagcccgactacctgctggacgagatgaccaaggaggccgagatcgacaacagcagcaccgtggagagcctgggcgagaccaccgacatcctgaacatgacccacatcatgagcctgaacagcaacgagaagagcctgaagctgagccccgtgcagaagcagaagaagcagcagaccatcggcgagctgacccaggacaccgccctgaccgagaacgacgacagcgacgagtacgaggagatgagcgagatgaaggagggcaaggcctgcaagcagcacgtgagccagggcatcttcatgacccagcccgccaccaccatcgaggccttcagcgacgaggaggtggagatccccgaggagaaggagggcgccgaggacagcaagggcaacggcatcgaggagcaggaggtggaggccaacgaggagaacgtgaaggtgcacggcggcagaaaggagaagaccgagatcctgagcgacgacctgaccgacaaggccgaggtgagcgagggcaaggccaagagcgtgggcgaggccgaggacggccccgagggcagaggcgacggcacctgcgaggagggcagcagcggcgccgagcactggcaggacgaggagagagagaagggcgagaaggacaagggcagaggcgagatggagagacccggcgagggcgagaaggagctggccgagaaggaggagtggaagaagagagacggcgaggagcaggagcagaaggagagagagcagggccaccagaaggagagaaaccaggagatggaggagggcggcgaggaggagcacggcgagggcgaggaggaggagggcgacagagaggaggaggaggagaaggagggcgagggcaaggaggagggcgagggcgaggaggtggagggcgagagagagaaggaggagggcgagagaaagaaggaggagagagccggcaaggaggagaagggcgaggaggagggcgaccagggcgagggcgaggaggaggagaccgagggcagaggcgaggagaaggaggagggcggcgaggtggagggcggcgaggtggaggagggcaagggcgagagagaggaggaggaggaggagggcgagggcgaggaggaggagggcgagggcgaggaggaggagggcgagggcgaggaggaggagggcgagggcaagggcgaggaggagggcgaggagggcgagggcgaggaggagggcgaggagggcgagggcgagggcgaggaggaggagggcgagggcgagggcgaggaggagggcgagggcgagggcgaggaggaggagggcgagggcgagggcgaggaggagggcgagggcgagggcgaggaggaggagggcgagggcaagggcgaggaggagggcgaggagggcgagggcgagggcgaggaggaggagggcgagggcgagggcgaggacggcgagggcgagggcgaggaggaggagggcgagtgggagggcgaggaggaggagggcgagggcgagggcgaggaggagggcgagggcgagggcgaggagggcgagggcgagggcgaggaggaggagggcgagggcgagggcgaggaggaggagggcgaggaggagggcgaggaggagggcgagggcgaggaggagggcgagggcgagggcgaggaggaggaggagggcgaggtggagggcgaggtggagggcgaggagggcgagggcgagggcgaggaggaggagggcgaggaggagggcgaggagagagagaaggagggcgagggcgaggagaacagaagaaacagagaggaggaggaggaggaggagggcaagtaccaggagaccggcgaggaggagaacgagagacaggacggcgaggagtacaagaaggtgagcaagatcaagggcagcgtgaagtacggcaagcacaagacctaccagaagaagagcgtgaccaacacccagggcaacggcaaggagcagagaagcaagatgcccgtgcagagcaagagactgctgaagaacggccccagcggcagcaagaagttctggaacaacgtgctgccccactacctggagctgaagtag

SEQ ID NO: 30911 - protein, 230 aa, Artificial Sequence
  derived and/or modified sequence
MGIQGMELCAMAVVVLLFIAVLKQFGILEPISMEDSSDSELELSTVRHQPEGLDQLQAQTKFTKKELQSLYRGFKNECPTGLVDEDTFKLIYAQFFPQGDATTYAHFLFNAFDADGNGAIHFEDFVVGLSILLRGTVHEKLKWAFNLYDINKDGYITKEEMLAIMKSIYDMMGRHTYPILREDAPAEHVERFFEKMDRNQDGVVTIEEFLEACQKDENIMSSMQLFENVI

SEQ ID NO: 30912 - DNA, 693 bp, Artificial Sequence
  derived and/or modified sequence
atggggattcaggggatggaactgtgcgcgatggcagtggtggtcctcctctttatagccgtgcttaagcagttcgggatcctcgaacccatcagcatggaagattcaagtgacagtgagctggagctgagcacggtccggcatcagccggaggggctggatcagctgcaggcccaaaccaaatttactaagaaagaactccagagcctgtaccgaggttttaagaacgaatgcccaaccggtctggtcgacgaggataccttcaagctgatctatgcacaattttttccacagggtgacgcaaccacctacgcgcactttcttttcaacgccttcgacgcagacggaaatggtgcaatccactttgaagactttgttgttggcctgagtatcttacttcgaggtaccgtccacgaaaagctaaaatgggcgtttaacttgtacgatattaacaaagatggctatataacgaaggaggaaatgctcgccattatgaaaagtatttacgatatgatgggtcggcatacttatcctatcctgcgcgaagacgcaccggcagagcacgttgagcggttttttgaaaagatggatcgaaatcaggatggcgtggttacaatcgaggaattcttggaggcatgccaaaaagatgaaaacatcatgagttctatgcaactgttcgagaacgtgatctag

SEQ ID NO: 30913 - DNA, 985 bp, Artificial Sequence
  derived and/or modified sequence
gccgccgccgccgccgcgcctcgaagtttgccggctgactcggaaagttgcgctcgggctcggccgccgcgtccggtccccgcgtccagcctccggcctgacccgctcgccgccgccgccgccctccacggggccccggcccagccaacccagcagccccgcctgccgggggcatgtgagccgtcgccgcccccgagaggccgtgcgggctgcaggggccccggtgcctccgaggcagcgcgtgggcgaggggtgcgcccgggccccagggccccaggcagcccggcttgccatgggcatccagggcatggagctgtgcgccatggccgtggtggtgctgctgttcatcgccgtcctcaagcagttcggcatcctggagcccatatccatggaagatagcagcgacagtgagctggagctgtccacggtgcgccaccagccagaggggctggaccagctgcaggcccagaccaagttcaccaagaaggagctgcagtctctctacaggggctttaagaatgagtgtcccacgggcctggtggacgaagacaccttcaaactcatttacgcgcagttcttccctcagggagatgccaccacctatgcacacttcctcttcaacgcctttgatgcggacgggaacggggccatccactttgaggactttgtggttggcctctccatcctgctgcggggcacagtccacgagaagctcaagtgggcctttaatctctacgacattaacaaggatggctacatcaccaaagaggagatgctggccatcatgaagtccatctatgacatgatgggccgccacacctaccccatcctgcgggaggacgcgccggcggagcacgtggagaggttcttcgagaaaatggaccggaaccaggatggggtagtgaccattgaagagttcctggaggcctgtcagaaggatgagaacatcatgagctccatgcagctgtttgagaatgtcatctag

SEQ ID NO: 30914 - DNA, 693 bp, Artificial Sequence
  derived and/or modified sequence
atgggcatccagggcatggagctgtgtgccatggctgtggtggtgctgctcttcatcgctgtgctgaagcagtttggcatcctggagcccatctccatggaggacagcagtgacagcgagctggagctgagcacagtgcgccaccagcctgagggcctggaccagctgcaggcccagaccaagttcaccaagaaggagctgcagagcctgtaccggggcttcaagaatgaatgtcccaccggcctggtggatgaggacaccttcaagctgatctatgcccagttcttcccccagggagatgccaccacctacgcccacttcctgttcaatgcctttgatgctgatggaaatggagccatccactttgaagattttgtggtgggcctgagcatcctgctgcggggcaccgtgcatgagaagctgaagtgggccttcaacctgtatgacatcaacaaggatggctacatcaccaaggaggagatgctggccatcatgaagagcatctatgacatgatgggccgccacacctaccccatcctgcgggaggatgccccagctgagcacgtggagcgcttctttgagaagatggacaggaaccaggatggagtggtgaccatcgaggagttcctggaggcctgccagaaggatgagaacatcatgagctccatgcagctgtttgaaaatgtcatctag

SEQ ID NO: 30915 - DNA, 693 bp, Artificial Sequence
  derived and/or modified sequence
atgggcatccagggcatggagctgtgcgccatggccgtggtggtgctactgttcatagccgttttgaaacagttcggaatcttggaaccgatctcaatggaggatagcagcgatagcgagttggaactgagcactgttcggcaccagcccgagggactcgaccaactccaggcccagacaaagttcaccaagaaagaactgcaaagcctgtacaggggctttaagaacgagtgccctacaggcctcgtagacgaggatactttcaaactgatatacgctcaattcttcccacagggcgacgcgacaacttacgctcattttctattcaatgcttttgacgctgacgggaacggggcaatccatttcgaagatttcgtggtgggcctttcgatcctgctgcggggaactgttcacgaaaagctaaaatgggcttttaacctctatgacattaacaaggacggctacataactaaagaggaaatgcttgcgatcatgaaatccatatatgacatgatgggaaggcacacttaccccatcctccgtgaagatgcacctgccgagcacgtcgaacggttttttgagaaaatggatagaaaccaagacggagtggtaacgattgaagagttcctcgaggcttgccaaaaggacgagaacatcatgagcagtatgcaactcttcgaaaacgtgatttag

SEQ ID NO: 30916 - DNA, 693 bp, Artificial Sequence
  derived and/or modified sequence
atgggtattcaggggatggagctgtgcgccatggctgtggtcgtacttctgttcatagctgtgctcaaacagtttggaatcctggagccaattagtatggaagattctagtgactccgagctggagttgagtaccgtgagacaccagccggaaggcctcgatcagctccaagcccagacaaaattcaccaaaaaggaattgcagtccctgtatcgaggtttcaaaaacgaatgtccaacaggattggtggatgaggatacttttaaactgatttatgcacagttttttccgcagggggatgccaccacatacgcccacttcttgttcaacgccttcgatgcggacggcaatggtgccattcattttgaagatttcgtagttggcctgagcattctcctgcgcggaactgtccacgagaagttgaagtgggctttcaacctttacgatatcaataaggatggctacatcacaaaggaagaaatgctggctataatgaaaagcatatacgatatgatggggcgtcatacctatccgatattgcgagaagatgcccctgccgagcatgtggagagattttttgagaagatggacaggaatcaagacggtgtggtcaccatcgaagaattcctggaagcttgccagaaggacgagaacatcatgtcatccatgcagctctttgagaatgtcatctag

SEQ ID NO: 30917 - DNA, 693 bp, Artificial Sequence
  derived and/or modified sequence
atgggcatccagggcatggagctgtgcgccatggccgtggtggtgctgctgttcatcgccgtgctgaagcagttcggcatcctggagcccatcagcatggaggacagcagcgacagcgagctggagctgagcaccgtgagacaccagcccgagggcctggaccagctgcaggcccagaccaagttcaccaagaaggagctgcagagcctgtacagaggcttcaagaacgagtgccccaccggcctggtggacgaggacaccttcaagctgatctacgcccagttcttcccccagggcgacgccaccacctacgcccacttcctgttcaacgccttcgacgccgacggcaacggcgccatccacttcgaggacttcgtggtgggcctgagcatcctgctgagaggcaccgtgcacgagaagctgaagtgggccttcaacctgtacgacatcaacaaggacggctacatcaccaaggaggagatgctggccatcatgaagagcatctacgacatgatgggcagacacacctaccccatcctgagagaggacgcccccgccgagcacgtggagagattcttcgagaagatggacagaaaccaggacggcgtggtgaccatcgaggagttcctggaggcctgccagaaggacgagaacatcatgagcagcatgcagctgttcgagaacgtgatctag

SEQ ID NO: 30918 - protein, 677 aa, Artificial Sequence
  derived and/or modified sequence
MTASPDYLVVLFGITAGATGAKLGSDEKELILLFWKVVDLANKKVGQLHEVLVRPDQLELTEDCKEETKIDVESLSSASQLDQALRQFNQSVSNELNIGVGTSFCLCTDGQLHVRQILHPEASKKNVLLPECFYSFFDLRKEFKKCCPGSPDIDKLDVATMTEYLNFEKSSSVSRYGASQVEDMGNIILAMISEPYNHRFSDPERVNYKFESGTCSKMELIDDNTVVRARGLPWQSSDQDIARFFKGLNIAKGGAALCLNAQGRRNGEALVRFVSEEHRDLALQRHKHHMGTRYIEVYKATGEDFLKIAGGTSNEVAQFLSKENQVIVRMRGLPFTATAEEVVAFFGQHCPITGGKEGILFVTYPDGRPTGDAFVLFACEEYAQNALRKHKDLLGKRYIELFRSTAAEVQQVLNRFSSAPLIPLPTPPIIPVLPQQFVPPTNVRDCIRLRGLPYAATIEDILDFLGEFATDIRTHGVHMVLNHQGRPSGDAFIQMKSADRAFMAAQKCHKKNMKDRYVEVFQCSAEEMNFVLMGGTLNRNGLSPPPCLSPPSYTFPAPAAVIPTEAAIYQPSVILNPRALQPSTAYYPAGTQLFMNYTAYYPSPPGSPNSLGYFPTAANLSGVPPQPGTVVRMQGLAYNTGVKEILNFFQGYQYATEDGLIHTNDQARTLPKEWVCI

SEQ ID NO: 30919 - DNA, 2034 bp, Artificial Sequence
  derived and/or modified sequence
atgaccgcgtcaccagactaccttgtcgtgctgtttggaattacagcaggggctaccggtgcaaagttgggcagtgacgaaaaggaactcatcctcctgttttggaaagtcgtggatctggcaaacaagaaagtcgggcaactacatgaagtgctcgtgcgacctgaccaactggagctgaccgaagattgtaaggaggagacgaagatcgatgtggaatctctctcctccgcatcacagctggaccaagcccttcgtcagttcaaccagagcgttagcaatgaattgaacattggtgttggaacttcgttctgcctctgtaccgatggacaactgcacgtccgtcagatccttcatccggaggcctctaagaaaaacgtactgctgcctgaatgtttttattcctttttcgacttgagaaaggagttcaagaagtgctgtccaggcagccccgacatagataagctcgatgtggccacgatgactgaatacttaaacttcgagaaatcctcgtctgtgtcccggtatggcgcatcccaagtggaggatatgggtaacataattctggcgatgatctccgagccatacaatcatagattttctgacccagaaagggtcaactataaatttgagagtggcacctgttccaaaatggagcttatagatgacaacacagttgtgcgggctaggggcctcccttggcagagctcagaccaggacatcgctcgcttttttaagggactgaacattgcgaaaggaggtgctgccctttgcctgaatgctcagggcagaagaaatggcgaagccctagtgcgctttgtctcggaggagcaccgagatttagccctgcagcggcacaagcatcatatggggactcggtatatagaagtgtataaagccaccggggaagatttcttgaagatcgctggtgggacctccaacgaagttgcccagttcctgagcaaagagaaccaagttatcgttcggatgcgtggccttcctttcacagctaccgccgaggaggtggtcgcgttctttggccagcactgccctattacaggtggcaaagaagggatattatttgtcacttaccccgatggaaggcccaccggagacgcgttcgtcctgtttgcatgtgaggaatacgcccaaaacgctctgcgtaagcacaaagatcttctgggcaaacgctatatcgagcttttccgatccactgctgctgaggtacagcaggtcctaaaccggttcagctccgcccctttgatccccctcccaacgccacccattatccctgtcctcccacagcagttcgtacccccaaccaacgtgagggactgcattcgactgagggggctgccgtatgctgcaactattgaggatattctagatttccttggcgagtttgctaccgatattcgaactcatggtgtccatatggtattaaaccaccagggacgcccatccggcgacgcgtttatccagatgaagagcgccgaccgggcattcatggctgcacagaagtgccataagaaaaacatgaaagaccgatatgtcgaggtgttccagtgcagcgcagaggaaatgaacttcgtgttgatgggagggacattaaatcgaaatggcctgagccctcccccttgtctgtccccaccttcttacacttttccagcccctgccgcagtcataccaacagaagccgctatctatcaaccttcagtcattctaaaccctcgagcgcttcaaccgtcaaccgcgtattacccagccggcacgcaactgtttatgaactacacagcatactacccttcccctcccgggtcacccaacagcctgggctatttccccactgccgcaaatctgtccggggtgcctccacagcctggcaccgtggtgagaatgcaggggttagcttacaatacaggcgtaaaggaaatactgaatttcttccaaggatatcagtatgcgaccgaggatgggctgatccataccaacgaccaggctaggaccctacctaaagaatgggtgtgtatctag

SEQ ID NO: 30920 - DNA, 2034 bp, Artificial Sequence
  derived and/or modified sequence
atgacagccagcccagactacctggtggtgctgtttggcatcacagctggggccactggagccaagctgggcagtgatgagaaggagctgatcctgctcttctggaaggtggtggacctggccaacaagaaggtgggccagctgcacgaggtgctggtgcggccagaccagctggagctgacagaggactgcaaggaggagaccaagattgatgtggagagcctgagcagcgccagccagctggaccaggccctgcggcagttcaaccagagcgtgtccaatgagctgaacatcggcgtgggcaccagcttctgcctgtgcacagatggccagctgcacgtgcggcagatcctgcaccctgaggccagcaagaagaatgtgctgctgcctgagtgcttctacagcttctttgacctgaggaaggagttcaagaagtgctgccccggcagcccagacatcgacaagctggatgtggccaccatgacagagtacctgaactttgagaagagcagctctgtgagccgctacggggccagccaggtggaggacatgggcaacatcatcctggccatgatcagcgagccctacaaccaccgcttcagtgaccctgagcgggtgaactacaagtttgagagcggcacctgcagcaagatggagctgattgatgacaacacagtggtgcgggcccggggcctgccctggcagagcagtgaccaggacatcgcccgcttcttcaagggcctgaacatcgccaagggcggggccgccctgtgcctgaatgcccagggcagaagaaatggagaggccctggtgcgctttgtgtctgaggagcaccgggacctggccctgcagaggcacaagcaccacatgggcacccgctacatcgaggtgtacaaggccactggagaggacttcctgaagattgctgggggcaccagcaatgaggtggcccagttcctgagcaaagaaaaccaggtgattgtgaggatgaggggcctgcccttcaccgccacagctgaggaggtggtggccttcttcggccagcactgccccatcactggaggcaaggagggcatcctgtttgtgacctacccagatggccggcccactggagatgcctttgtgctgtttgcctgtgaggagtatgcccagaatgccctgaggaagcacaaggacctgctgggcaagcgctacatcgagctgttccgcagcacagctgctgaggtgcagcaggtgctgaaccgcttcagcagcgcccccctcatccccctgcccaccccacccatcatccctgtgctgccccagcagtttgtgccccccaccaacgtgcgggactgcatccggctgcggggcctgccctatgctgccaccatcgaggacatcctggacttcctgggggagtttgccacagacatccgcacccatggagtgcacatggtgctgaaccaccagggccggcccagcggagatgccttcatccagatgaagtctgctgaccgggccttcatggccgcccagaagtgccacaagaagaacatgaaggacagatatgtggaggtgttccagtgcagcgctgaggagatgaactttgtgctgatgggcggcaccctgaacagaaatggcctgagccccccaccctgcctgagcccccccagctacaccttccctgccccagctgctgtgatccccacagaggccgccatctaccagcccagcgtcatcctgaacccccgggccctgcagcccagcacagcctactacccagctggcacccagctgttcatgaactacacagcctactaccccagccccccaggcagccccaacagcctgggctacttccccacagctgccaacctgtctggagtgcccccccagcccggcaccgtggtgaggatgcagggcctggcctacaacacaggagtgaaggagatcctgaacttcttccagggctaccagtatgccacagaagatggcctcatccacaccaatgaccaggcccggaccctgcccaaggagtgggtgtgcatctag

SEQ ID NO: 30921 - DNA, 2034 bp, Artificial Sequence
  derived and/or modified sequence
atgaccgccagccccgactacctggtggtgctgttcggcatcaccgccggtgcgacaggggctaaactcggatcagatgagaaagaacttattctcctattctggaaggtggtggacttggctaataagaaggtgggtcagctgcacgaagtgctcgtgaggccagaccaattggaacttaccgaagactgcaaggaagagaccaagatcgatgttgagagcctcagttccgccagccaactggatcaggccctgagacagttcaatcagtctgtcagtaacgaactgaatatcggggtagggacttcattctgcctgtgcactgatggtcaactgcacgtgcgccagatcctccatcccgaggcatctaaaaaaaatgtgcttcttcctgagtgtttctactcattcttcgacctcagaaaggagtttaagaaatgttgcccagggtcccccgacatcgataaactcgacgtcgcaacaatgaccgagtacttaaacttcgaaaagtctagttcagtgtccagatacggggccagccaggtggaggacatgggaaacattattctagccatgattagtgagccatacaatcacaggttctccgacccagagagggtcaattataaatttgaatccgggacatgttccaagatggaattaatagatgataacaccgtcgtgcgagcaagagggttgccatggcagtcctccgatcaagatatcgcgcggttcttcaaggggttaaatattgccaaagggggtgctgcactgtgcctcaatgctcaaggcaggcggaacggagaggcattggtgaggttcgtgtccgaagaacacagggatctggcgttgcagcggcataagcatcatatgggaacccggtatatagaggtgtacaaagccaccggtgaggatttcctgaagattgctggaggaacaagcaatgaggtagctcagtttttgtcaaaagagaaccaggttattgtacgaatgagaggcctcccctttaccgctactgccgaggaggtcgtggcattcttcggacaacactgccctatcactggtgggaaagaaggtatcctgttcgtgacctatccagacgggagacctacaggagacgcgtttgtactctttgcatgtgaagagtacgcccagaacgcactgaggaagcacaaggatctgttaggcaagagatacatagagctgttccgcagtaccgctgcagaggtccaacaggtcctgaataggttcagctccgccccgttaatccctctgccaacacctccaataatacctgtgttgccacagcagtttgtacctcccactaacgtgagagactgtatcagacttcgtggactcccttacgccgcaacgatagaggatattcttgatttccttggagagttcgccaccgatattcggactcatggcgtccatatggtgctcaatcatcagggtcgacccagcggcgacgccttcatccagatgaaaagcgccgacagggccttcatggctgcccagaagtgtcacaaaaagaatatgaaggaccgttacgttgaagtcttccagtgctctgcagaagagatgaactttgtgttgatgggcggcaccctcaatcgcaacggactatcccccccaccatgcctttcccccccaagctatacctttccggctcccgcagccgtaatccctacggaggccgcaatataccaacctagcgtgattttgaatccccgagccctgcagccatccacggcatattatccagctgggacccagctcttcatgaattacacggcttactatccaagcccacccgggagccccaatagccttggctatttccctaccgcggccaatctgagcggagtgccaccacagcccgggaccgtcgtgaggatgcaggggcttgcatacaatacgggtgtcaaggaaatattgaacttcttccaggggtaccagtatgcaaccgaggacgggctcatccatactaacgaccaggcccggactcttcccaaagagtgggtctgtatctag

SEQ ID NO: 30922 - DNA, 2034 bp, Artificial Sequence
  derived and/or modified sequence
atgaccgcctcaccggactacttggtcgtgctgttcggtatcacagcaggcgctacaggggcaaagctcggctccgacgaaaaagagctgatattgttattctggaaggtcgtcgatctcgccaacaagaaagttgggcagctgcacgaggtcctcgtcaggccagatcagcttgaactaacggaagattgtaaagaagaaacaaagattgacgtagagtcccttagtagcgctagtcagctggatcaggcactccgtcagttcaaccagagtgtcagcaacgagctgaacattggtgtcgggacctccttttgcctttgcactgatggccagctgcatgtccggcaaatcctgcacccagaggcctcaaagaaaaacgttctgctcccagaatgcttctactctttttttgacctaaggaaggagttcaaaaagtgttgccccggatcccccgatatcgataagctggatgtagccactatgacggaatacctgaattttgagaaatcaagctcagtctcgaggtacggcgcaagccaggtggaggacatggggaatataatcctggcaatgatttctgagccctacaatcataggttctcagaccccgagcgagtgaactacaagtttgaatcagggacctgctcgaagatggagctaatcgacgacaataccgtggtgcgagccagaggactgccctggcagagctcagaccaggacattgccaggttttttaagggactgaatatcgcaaagggcggtgcagctctgtgtctgaacgctcaggggagacgcaatggcgaagcccttgtcaggttcgtgtctgaggagcacagagacttagctctgcaacgccacaagcaccacatgggcactcggtacatagaggtttacaaggccacaggtgaagacttcctgaagatagcaggcggtacttccaacgaagttgcacagtttctctccaaggaaaatcaggtgatcgttaggatgagaggtctgcccttcacggcaacggcggaagaggtcgtggccttcttcgggcagcattgccccatcactgggggaaaggaagggatactcttcgtgacttatcctgatgggagacccaccggggacgcattcgttctgtttgcttgcgaggaatatgcacagaacgcacttagaaagcataaggacttactgggaaaacggtacatagaactgttccgctctacggcggctgaagtgcagcaggtcttaaaccgtttttccagcgctccccttatcccactcccgacaccccctattatcccagtgcttcctcagcagtttgtgccacccacaaacgtaagggactgtattcggctgcgcggtcttccgtacgccgctacaattgaagacatattggacttccttggagaattcgctactgatatccggacacacggtgtgcacatggtgctgaaccatcaaggtagaccaagcggcgacgctttcatccagatgaaatctgcagacagagcctttatggcggcacagaaatgccacaaaaagaacatgaaggaccggtatgttgaagtcttccagtgttctgccgaggagatgaatttcgttttgatggggggaactttaaacagaaacggtttgtccccccctccatgtttatcccccccatcatacacgttccccgctcctgcagctgtaatcccaacagaagctgccatctaccaaccatcagtcatcttgaaccctagagccctgcagccttcgacagcctactatccagctgggacccagcttttcatgaattataccgcctattacccttcacccccaggttctccaaactctttggggtacttcccaaccgcagcgaacttatcaggcgtccctcctcagccaggcactgtagtcaggatgcagggcctagcctataacacaggcgtgaaggagattctgaacttcttccagggctaccagtacgccacggaagatggactgatccacacaaatgaccaggctaggacacttccgaaggagtgggtttgcatctag

SEQ ID NO: 30923 - DNA, 2034 bp, Artificial Sequence
  derived and/or modified sequence
atgaccgccagccccgactacctggtggtgctgttcggcatcaccgccggcgccaccggcgccaagctgggcagcgacgagaaggagctgatcctgctgttctggaaggtggtggacctggccaacaagaaggtgggccagctgcacgaggtgctggtgagacccgaccagctggagctgaccgaggactgcaaggaggagaccaagatcgacgtggagagcctgagcagcgccagccagctggaccaggccctgagacagttcaaccagagcgtgagcaacgagctgaacatcggcgtgggcaccagcttctgcctgtgcaccgacggccagctgcacgtgagacagatcctgcaccccgaggccagcaagaagaacgtgctgctgcccgagtgcttctacagcttcttcgacctgagaaaggagttcaagaagtgctgccccggcagccccgacatcgacaagctggacgtggccaccatgaccgagtacctgaacttcgagaagagcagcagcgtgagcagatacggcgccagccaggtggaggacatgggcaacatcatcctggccatgatcagcgagccctacaaccacagattcagcgaccccgagagagtgaactacaagttcgagagcggcacctgcagcaagatggagctgatcgacgacaacaccgtggtgagagccagaggcctgccctggcagagcagcgaccaggacatcgccagattcttcaagggcctgaacatcgccaagggcggcgccgccctgtgcctgaacgcccagggcagaagaaacggcgaggccctggtgagattcgtgagcgaggagcacagagacctggccctgcagagacacaagcaccacatgggcaccagatacatcgaggtgtacaaggccaccggcgaggacttcctgaagatcgccggcggcaccagcaacgaggtggcccagttcctgagcaaggagaaccaggtgatcgtgagaatgagaggcctgcccttcaccgccaccgccgaggaggtggtggccttcttcggccagcactgccccatcaccggcggcaaggagggcatcctgttcgtgacctaccccgacggcagacccaccggcgacgccttcgtgctgttcgcctgcgaggagtacgcccagaacgccctgagaaagcacaaggacctgctgggcaagagatacatcgagctgttcagaagcaccgccgccgaggtgcagcaggtgctgaacagattcagcagcgcccccctgatccccctgcccaccccccccatcatccccgtgctgccccagcagttcgtgccccccaccaacgtgagagactgcatcagactgagaggcctgccctacgccgccaccatcgaggacatcctggacttcctgggcgagttcgccaccgacatcagaacccacggcgtgcacatggtgctgaaccaccagggcagacccagcggcgacgccttcatccagatgaagagcgccgacagagccttcatggccgcccagaagtgccacaagaagaacatgaaggacagatacgtggaggtgttccagtgcagcgccgaggagatgaacttcgtgctgatgggcggcaccctgaacagaaacggcctgagcccccccccctgcctgagcccccccagctacaccttccccgcccccgccgccgtgatccccaccgaggccgccatctaccagcccagcgtgatcctgaaccccagagccctgcagcccagcaccgcctactaccccgccggcacccagctgttcatgaactacaccgcctactaccccagcccccccggcagccccaacagcctgggctacttccccaccgccgccaacctgagcggcgtgcccccccagcccggcaccgtggtgagaatgcagggcctggcctacaacaccggcgtgaaggagatcctgaacttcttccagggctaccagtacgccaccgaggacggcctgatccacaccaacgaccaggccagaaccctgcccaaggagtgggtgtgcatctag

SEQ ID NO: 30924 - DNA, 3756 bp, Artificial Sequence
  derived and/or modified sequence
cttttgcactagcagtagcaaggaaggggggtgggcgctctttctttttctcttagaagagggtttagcacaggttttttcgttctcacttccacaccaccttaccgcctcccgaccccccctctccccctccccacctatcgtcatgacggcctctccggattacttggtggtgctttttgggatcactgctggggccaccggggccaagctaggctcggatgagaaggagttgatcctgctgttctggaaagtcgtggatctggccaacaagaaggtgggacagttgcacgaagtgctagttagaccggatcagttggaactgacggaggactgcaaagaagaaactaaaatagacgtcgaaagcctgtcctcggcgtcgcagctggaccaagccctccgacagtttaaccagtcagtgagcaatgaactgaatattggagtagggacttccttctgtctctgtactgatgggcagcttcatgtcaggcaaatcctgcatcctgaggcttccaagaagaatgtactattacctgaatgcttctattccttttttgatcttcgaaaagaattcaagaaatgttgccctggttcacctgatattgacaaactggacgttgccacaatgacagagtatttaaattttgagaagagtagttcagtctctcgatatggagcctctcaagttgaagatatggggaatataattttagcaatgatttcagagccttataatcacaggttttcagatccagagagagtgaattacaagtttgaaagtggaacttgcagcaagatggaacttattgatgataacaccgtagtcagggcacgaggtttaccatggcagtcttcagatcaagatattgcaagattcttcaaaggactcaatattgccaagggaggtgcagcactttgtctgaatgctcagggtcgaaggaacggagaagctctggttaggtttgtaagtgaggagcaccgagacctagcactacagaggcacaaacatcacatggggacccggtatattgaggtttacaaagcaacaggtgaagatttccttaaaattgctggtggtacttccaatgaggtagcccagtttctctccaaggaaaatcaagtcattgtccgcatgcgggggctccctttcacggccacagctgaagaagtggtggccttctttggacagcattgccctattactgggggaaaggaaggcatcctctttgtcacctacccagatggtaggccaacaggggacgcttttgtcctctttgcctgtgaggaatatgcacagaatgcgttgaggaagcataaagacttgttgggtaaaagatacattgaactcttcaggagcacagcagctgaagttcagcaggtgctgaatcgattctcctcggcccctctcattccacttccaacccctcccattattccagtactacctcagcaatttgtgccccctacaaatgttagagactgtatacgccttcgaggtcttccctatgcagccacaattgaggacatcctggatttcctgggggagttcgccacagatattcgtactcatggggttcacatggttttgaatcaccagggccgcccatcaggagatgcctttatccagatgaagtctgcggacagagcatttatggctgcacagaagtgtcataaaaaaaacatgaaggacagatatgttgaagtctttcagtgttcagctgaggagatgaactttgtgttaatggggggcactttaaatcgaaatggcttatccccaccgccatgcctgtctcctccctcctacacatttccagctcctgctgcagttattcctacagaagctgccatttaccagccctctgtgattttgaatccacgagcactgcagccctccacagcgtactacccagcaggcactcagctcttcatgaattacacagcgtactatcccagccccccaggttcgcctaatagtcttggctacttccctacagctgctaatcttagcggtgtccctccacagcctggcacggtggtcagaatgcagggcctggcctacaatactggagttaaggaaattcttaacttcttccaaggttaccagtatgcaaccgaggatggacttatacacacaaatgaccaggccaggactctacccaaagaatgggtttgtatttaagggccccagcagttagaacatcctcagaaaagaagtgtttgaaagatgtatggtgatcttgaaacctccagacacaagaaaacttctagcaaattcaggggaagtttgtctacactcaggctgcagtattttcagcaaacttgattggacaaacgggcctgtgccttatcttttggtggagtgaaaaaatttgagctagtgaagccaaatcgtaacttacagcaagcagcatgcagcatacctggctctttgctgattgcaaataggcatttaaaatgtgaatttggaatcagatgtctccattacttccagttaaagtggcatcataggtgtttcctaagttttaagtcttggataaaaactccaccagtgtctaccatctccaccatgaactctgttaaggaagcttcatttttgtatattcccgctcttttctcttcatttccctgtcttctgcataatcatgccttcttgctaagtaattcaagcataagatcttggaataataaaatcacaatcttaggagaaagaataaaattgttattttcccagtctcttggccatgatgatatcttatgattaaaaacaaattaaattttaaaacacctgaagataaattagaagaaattgtgcaccctccacaaaacatacaaagtttaaaagtttggatctttttctcagcaggtatcagttgtaaataatgaattaggggccaaaatgcaaaacgaaaaatgaagcagctacatgtagttagtaatttctagtttgaactgtaattgaatattgtggcttcatatgtattattttatattgtacttttttcattattgatggtttggactttaataagagaaattccatagtttttaatatcccagaagtgagacaatttgaacagtgtattctagaaaacaatacactaactgaacagaagtgaatgcttatatatattatgatagccttaaacctttttcctctaatgccttaactgtcaaataattataaccttttaaagcataggactatagtcagcatgctagactgagaggtaaacactgatgcaattagaacaggtactgatgctgtcagtgtttaacactatgtttagctgtgtttatgctataaaagtgcaatattagacactagctagtactgctgcctcatgtaactccaaagaaaacaggatttcattaagtgcattgaatgtggatatttctctaagttactcatattgtcctttgcttgaatgcaatgccgtgcagatttatgaggctgctatttttattttctgtgcattactttaacaccttaaagggagaagcaaacatttccttcttcagctgactggcaatggccctttaactgcaataggaagaaaaaaaaaaaggtttgtgtgaaaattggtgataactggcacttaagatcgaaaagaaatttctgtatacttgatgccttaagatgcccaaagctgcccaaagctctgaaagactttaagataggcagtaatgcttactacaatactactgagtttttgtagagttaacatttgataataaaacttgcctgtttaatctcaa

SEQ ID NO: 30925 - protein, 1151 aa, Artificial Sequence
  derived and/or modified sequence
MSSECDGGSKAVMNGLAPGSNGQDKATADPLRARSISAVKIIPVKTVKNASGLVLPTDMDLTKICTGKGAVTLRASSSYRETPSSSPASPQETRQHESKPGLEPEPSSADEWRLSSSADANGNAQPSSLAAKGYRSVHPNLPSDKSQDATSSSAAQPEVIVVPLYLVNTDRGQEGTARPPTPLGPLGCVPTIPATASAASPLTFPTLDDFIPPHLQRWPHHSQPARASGSFAPISQTPPSFSPPPPLVPPAPEDLRRVSEPDLTGAVSSTDSSPLLNEVSSSLIGTDSQAFPSVSKPSSAYPSTTIVNPTIVLLQHNREQQKRLSSLSDPVSERRVGEQDSAPTQEKPTSPGKAIEKRAKDDSRRVVKSTQDLSDVSMDEVGIPLRNTERSKDWYKTMFKQIHKLNRDTPEENPYFPTYKFPELPEIQQTSEETKSCSVMSPRLECSGTVIAHCSLKLLDSSNPPTSASQVAGTADDDSDLYSPRYSFSEDTKSPLSVPRSKSEMSYIDGEKVVKRSATLPLPARSSSLKSSSERNDWEPPDKKVDTRKYRAEPKSIYEYQPGKSSVLTNEKMSRDISPEEIDLKNEPWYKFFSELEFGKPPPKKIWDYTPGDCSILPREDRKTNLDKDLSLCQTELEADLEKMETLNKAPSANVPQSSAISPTPEISSETPGYIYSSNFHAVKRESDGAPGDLTSLENERQIYKSVLEGGDIPLQGLSGLKRPSSSASTKDSESPRHFIPADYLESTEEFIRRRHDDKEKLLADQRRLKREQEEADIAARRHTGVIPTHHQFITNERFGDLLNIDDTAKRKSGSEMRPARAKFDFKAQTLKELPLQKGDIVYIYKQIDQNWYEGEHHGRVGIFPRTYIELLPPAEKAQPKKLTPVQVLEYGEAIAKFNFNGDTQVEMSFRKGERITLLRQVDENWYEGRIPGTSRQGIFPITYVDVIKRPLVKNPVDYMDLPFSSSPSRSATASPQPWREESGQYERKAERGAGERGPGGPKISKKSCLKPSDVVRCLSTEQRLSDLNTPEESRPGKPLGSAFPGSEAEQTERHRGGEQAGRKAARRGGSQQPQAQQRRVTPDRSQTSQDLFSYQALYSYIPQNDDELELRDGDIVDVMEKCDDGWFVGTSRRTKQFGTFPGNYVKPLYL

SEQ ID NO: 30926 - DNA, 3456 bp, Artificial Sequence
  derived and/or modified sequence
atgagcagcgagtgcgacggcggcagcaaggccgtgatgaacggcctggcccccggcagcaacggccaggacaaggccaccgccgaccccctgagagccagaagcatcagcgccgtgaagatcatccccgtgaagaccgtgaagaacgccagcggcctggtgctgcccaccgacatggacctgaccaagatctgcaccggcaagggcgccgtgaccctgagagccagcagcagctacagagagacccccagcagcagccccgccagcccccaggagaccagacagcacgagagcaagcccggcctggagcccgagcccagcagcgccgacgagtggagactgagcagcagcgccgacgccaacggcaacgcccagcccagcagcctggccgccaagggctacagaagcgtgcaccccaacctgcccagcgacaagagccaggacgccaccagcagcagcgccgcccagcccgaggtgatcgtggtgcccctgtacctggtgaacaccgacagaggccaggagggcaccgccagaccccccacccccctgggccccctgggctgcgtgcccaccatccccgccaccgccagcgccgccagccccctgaccttccccaccctggacgacttcatccccccccacctgcagagatggccccaccacagccagcccgccagagccagcggcagcttcgcccccatcagccagaccccccccagcttcagcccccccccccccctggtgccccccgcccccgaggacctgagaagagtgagcgagcccgacctgaccggcgccgtgagcagcaccgacagcagccccctgctgaacgaggtgagcagcagcctgatcggcaccgacagccaggccttccccagcgtgagcaagcccagcagcgcctaccccagcaccaccatcgtgaaccccaccatcgtgctgctgcagcacaacagagagcagcagaagagactgagcagcctgagcgaccccgtgagcgagagaagagtgggcgagcaggacagcgcccccacccaggagaagcccaccagccccggcaaggccatcgagaagagagccaaggacgacagcagaagagtggtgaagagcacccaggacctgagcgacgtgagcatggacgaggtgggcatccccctgagaaacaccgagagaagcaaggactggtacaagaccatgttcaagcagatccacaagctgaacagagacacccccgaggagaacccctacttccccacctacaagttccccgagctgcccgagatccagcagaccagcgaggagaccaagagctgcagcgtgatgagccccagactggagtgcagcggcaccgtgatcgcccactgcagcctgaagctgctggacagcagcaacccccccaccagcgccagccaggtggccggcaccgccgacgacgacagcgacctgtacagccccagatacagcttcagcgaggacaccaagagccccctgagcgtgcccagaagcaagagcgagatgagctacatcgacggcgagaaggtggtgaagagaagcgccaccctgcccctgcccgccagaagcagcagcctgaagagcagcagcgagagaaacgactgggagccccccgacaagaaggtggacaccagaaagtacagagccgagcccaagagcatctacgagtaccagcccggcaagagcagcgtgctgaccaacgagaagatgagcagagacatcagccccgaggagatcgacctgaagaacgagccctggtacaagttcttcagcgagctggagttcggcaagcccccccccaagaagatctgggactacacccccggcgactgcagcatcctgcccagagaggacagaaagaccaacctggacaaggacctgagcctgtgccagaccgagctggaggccgacctggagaagatggagaccctgaacaaggcccccagcgccaacgtgccccagagcagcgccatcagccccacccccgagatcagcagcgagacccccggctacatctacagcagcaacttccacgccgtgaagagagagagcgacggcgcccccggcgacctgaccagcctggagaacgagagacagatctacaagagcgtgctggagggcggcgacatccccctgcagggcctgagcggcctgaagagacccagcagcagcgccagcaccaaggacagcgagagccccagacacttcatccccgccgactacctggagagcaccgaggagttcatcagaagaagacacgacgacaaggagaagctgctggccgaccagagaagactgaagagagagcaggaggaggccgacatcgccgccagaagacacaccggcgtgatccccacccaccaccagttcatcaccaacgagagattcggcgacctgctgaacatcgacgacaccgccaagagaaagagcggcagcgagatgagacccgccagagccaagttcgacttcaaggcccagaccctgaaggagctgcccctgcagaagggcgacatcgtgtacatctacaagcagatcgaccagaactggtacgagggcgagcaccacggcagagtgggcatcttccccagaacctacatcgagctgctgccccccgccgagaaggcccagcccaagaagctgacccccgtgcaggtgctggagtacggcgaggccatcgccaagttcaacttcaacggcgacacccaggtggagatgagcttcagaaagggcgagagaatcaccctgctgagacaggtggacgagaactggtacgagggcagaatccccggcaccagcagacagggcatcttccccatcacctacgtggacgtgatcaagagacccctggtgaagaaccccgtggactacatggacctgcccttcagcagcagccccagcagaagcgccaccgccagcccccagccctggagagaggagagcggccagtacgagagaaaggccgagagaggcgccggcgagagaggccccggcggccccaagatcagcaagaagagctgcctgaagcccagcgacgtggtgagatgcctgagcaccgagcagagactgagcgacctgaacacccccgaggagagcagacccggcaagcccctgggcagcgccttccccggcagcgaggccgagcagaccgagagacacagaggcggcgagcaggccggcagaaaggccgccagaagaggcggcagccagcagccccaggcccagcagagaagagtgacccccgacagaagccagaccagccaggacctgttcagctaccaggccctgtacagctacatcccccagaacgacgacgagctggagctgagagacggcgacatcgtggacgtgatggagaagtgcgacgacggctggttcgtgggcaccagcagaagaaccaagcagttcggcaccttccccggcaactacgtgaagcccctgtacctgtag

SEQ ID NO: 30927 - DNA, 3456 bp, Artificial Sequence
  derived and/or modified sequence
atgtctagcgaatgcgatggagggtctaaggcagtgatgaatggtctggcccccggatcaaatggccaggacaaggctactgcggatcctctcagggctcgaagcatttccgctgtcaagatcatacccgtgaagacagtgaagaatgcctctggactcgtgctgccaactgatatggaccttactaagatttgtacgggtaagggtgccgtcactctccgtgcttcttcctcttaccgagagaccccctccagcagtcctgccagtccacaggaaacacgccaacacgaatcaaagcccggacttgaacccgaacccagcagtgccgatgagtggagattgagctcttccgctgatgccaacggtaacgcccagccttctagtctggctgcgaagggctatagaagtgtacatcctaacttgccatctgataagtcacaggatgcaacttctagtagcgctgcacagccagaggttattgtggtgcctctgtacctggtgaacactgaccgcggacaggagggcacagcccgcccccccactcccctgggccccctgggctgtgtgccaaccatccctgctaccgcatctgccgcctctccacttaccttccctactctggacgactttattcctcctcacctgcaacgttggcctcaccactcccagcccgcacgggccagcgggagctttgcaccaatttcccagaccccaccttcattttcccccccaccaccattggtgccacctgcccccgaggatttgcgtcgggtaagtgagcccgacctgaccggggccgttagctctacagattcatccccgctccttaatgaagtatcctcatcgctgatcggaacagactcacaagctttcccctccgtgtcaaagcccagctccgcctacccatcaactaccatcgtcaacccaactattgtgctgcttcaacacaatagggaacagcaaaagagactgagcagtttatccgatcccgtgagtgagcggagggtcggcgaacaggatagcgccccgactcaggagaaacccacctccccagggaaggcaattgaaaagcgtgccaaagatgatagccgaagggtggtcaagagcacccaggacctcagtgatgtgtccatggatgaagtagggatcccactgaggaatacagagcgctccaaagattggtacaagacaatgtttaagcagatccacaagcttaatagagacacacccgaagaaaacccctacttccctacatataagtttcccgaactgcctgaaattcagcagactagcgaagaaaccaagagttgctctgtgatgagtcccaggcttgaatgcagtgggaccgtgattgcgcactgctccctgaaactgcttgactcaagcaacccccccacctcagcctcccaggtcgcaggaacagcagacgatgatagcgacctctattccccccggtactcatttagcgaggataccaaaagcccacttagcgttccacgaagtaaaagcgaaatgagttacatagacggggagaaagttgtgaagagatctgcgacacttcctctgcctgcacgtagttcttcactgaaatcatcctcagagcggaatgactgggagcctcccgacaagaaggtggacacccgcaagtacagagctgagccaaaaagcatttacgagtatcagcccgggaagtcaagcgtcctaacgaatgagaagatgtctagagacatcagcccagaggaaatcgatcttaagaatgagccctggtataaattctttagcgagctcgagtttggaaagccccctccgaagaaaatatgggactatacgccaggcgactgcagcattcttccccgagaagaccgaaaaaccaatctcgacaaagatctgtcactgtgccagacagagctcgaggccgatctggaaaagatggagactctgaacaaggctccctccgctaatgtcccccaaagttccgctatttctcctaccccagaaatatcctccgagacccccggctacatctacagctctaatttccacgctgtaaagagagagtctgatggcgctcctggcgacctgacatccctggaaaatgagagacaaatctataagagtgtgctggaagggggggatattccactgcagggtcttagtggtttgaagcgccctagctccagcgcaagcactaaagactctgaatcccccaggcactttatacccgccgactatctcgagtctacagaggaattcattcggcgccggcacgacgacaaggagaagttactggccgatcagaggaggttgaagcgagaacaagaagaggctgacattgcggcccgcaggcacaccggcgtaatccctacccatcatcaattcattactaatgagaggtttggcgacctgcttaacatcgatgacactgccaagagaaagtccggaagcgagatgcgacctgcccgggccaaatttgactttaaggcccagaccctgaaagaactacctctacagaagggcgatatcgtgtacatctacaaacagatcgatcagaattggtacgagggagaacatcacggccgggtggggatcttccccagaacctatatcgagctcctgcctcctgcggagaaagctcagcccaagaaactcactcctgtccaagtgctggagtacggcgaagccatcgccaaattcaacttcaacggcgatacgcaggtagagatgtctttcaggaagggcgagcgtataactcttctccgacaggtggacgagaactggtacgaaggtagaatccccggcacctcccggcagggtatatttcccataacatacgtggacgttattaaaaggccgctggtgaagaaccctgtggattatatggatttacccttttcatcaagtccctcacgcagcgctactgcctccccgcagccgtggcgtgaggaatcagggcagtacgagcgtaaagcggaaaggggtgctggcgaacgaggtccaggaggacccaagatctctaagaagagctgcctcaagccaagcgacgttgtgcgatgtctcagcaccgagcagaggctgagcgatctcaacactcctgaggaatctcggcccggaaagccactgggatccgcctttcctgggtctgaggccgagcaaaccgagaggcaccggggaggggaacaggcgggcagaaaggccgctcgcaggggcggcagccagcagcctcaggcccagcagcggcgggtaactcctgataggtctcaaacttcacaggacttgtttagctatcaggctctgtactcctacatcccccaaaacgacgatgagctggagttaagagatggggacatagtggacgtcatggaaaagtgcgatgatggttggtttgtagggacatcgaggcgtactaaacagttcgggacttttccaggaaattatgtcaagccattatacctttag

SEQ ID NO: 30928 - DNA, 3456 bp, Artificial Sequence
  derived and/or modified sequence
atgtcatccgagtgtgacggggggtccaaagctgttatgaacgggctggcccctggatccaatggccaggacaaggctactgccgaccctctacgggccaggagcattagtgcagtgaaaataatacctgttaaaacagttaagaacgcctccggcctagtgttgcccaccgacatggacctgacaaagatctgtacaggcaaaggcgccgtgaccctgcgggcctcgagttcatatagggagacaccatcctcatcaccagcttctccacaggaaactcgacaacacgaaagcaagcccggcctggaaccagagccgtccagcgcagatgagtggagactctcttcttccgcagatgcgaatggtaatgcacaaccatcctctctggcggcaaaaggatacaggagcgtccatcccaacctccctagcgataaatctcaggatgccacatcttcgagcgctgcccagcccgaagtgatcgtggtcccgttatacctggttaataccgatagaggccaggaaggtacagcaaggccgcccacacctctcggccccctagggtgtgtccccaccatacccgcgacagcttctgcggcctctcccctgaccttcccaacactcgacgactttatccctccccatctccagaggtggccccaccattcacaacctgctagagcgtcagggtccttcgcacccatctcacaaacgcctccgtctttcagtccacctccccccctggtgcccccagcaccggaggatctgcgccgggtcagtgagccggacctgaccggagctgtgtcttccaccgactccagccccctgctcaacgaggtgagctccagcctgataggaacagacagccaggccttcccctccgtttcaaaaccttcttcagcttatccttccaccaccatcgttaacccgacaattgtgctgctgcagcacaatagagaacagcagaagcgactctcctcccttagtgatcctgtgtcagagcgccgcgtgggggaacaggacagcgctcccacacaggagaagccgacaagcccaggaaaggcgattgagaagcgagctaaggacgacagccggagggtcgtgaaatccacccaggatctctccgatgtctctatggacgaggtgggcatacccctccggaacacggagagatctaaggattggtacaagacgatgttcaagcagatccataaattaaaccgcgatacccctgaagagaatccctacttcccaacctacaagttccctgaactgcccgagatacagcagacttccgaggagacaaagagctgctcggtcatgtcccctagacttgagtgctccggaaccgtcatcgcacactgttcactcaaactgctggattcctctaaccctccaacaagcgcaagccaggtggcgggtacggccgacgatgattctgatctgtacagcccccggtattcattcagcgaggacactaaaagccccctgagcgtgcctcgaagcaagtcagaaatgagctatatagatggtgagaaagtggttaaacgatcagcaacgctaccccttccagctaggtcctcctcattaaagagcagcagtgagcgcaatgactgggagccccctgacaagaaggtcgacacccgaaagtatagagccgagcccaagagtatctacgaatatcaacccggtaagtcatctgtcctgaccaatgaaaagatgtccagagatatctccccagaagaaattgacctcaaaaacgagccttggtataaattctttagtgagctcgagttcggaaaaccaccccccaaaaagatctgggactataccccaggagactgcagcatattgcctcgagaggatcgtaaaacaaacctagacaaggacctctccctgtgccaaaccgaattagaggcagacctcgagaaaatggagaccttgaacaaggcaccctccgctaatgtccctcagagtagtgccattagtcctacaccagaaatttccagcgaaaccccgggatatatctacagcagcaattttcacgctgttaaacgggaaagtgacggagcaccaggagacctcacctcattggaaaatgagcgacagatttacaaatcagttctagagggtggagatatccctcttcagggtctcagtggtctgaaaagaccctcatcctccgctagcactaaagactcggagtcccctcgacactttattcctgctgattaccttgagagtaccgaggaattcatccgtcggagacatgacgacaaagaaaaactgctagctgaccagaggagactgaaacgtgaacaggaagaggctgatatcgcagccagacggcatactggcgtcatacccactcatcaccagttcatcacgaacgagcgattcggggatctcctgaatattgatgatactgccaagcgcaagtctggctccgagatgcgccccgcccgagccaagttcgattttaaggcgcaaacactgaaggagcttccgctgcagaagggagatatcgtgtatatctacaagcagatcgaccagaactggtatgagggagaacaccatggccgggtcggtattttcccaagaacatatatcgagcttctgcctccagcggagaaggcccagcctaaaaagctcacacctgtacaggtattagaatacggcgaagccatcgccaaatttaatttcaatggcgatactcaagtcgaaatgtcatttcggaagggggagcgaattaccctacttagacaggttgatgagaactggtacgaaggacgtattcctgggacttctagacagggaatatttcccattacctacgttgatgtgatcaagcgtccactggtgaagaatccagtcgattacatggatctgcccttctcaagctctccttcgcgctccgctaccgcgtcccctcagccatggagagaagaatctgggcagtacgagaggaaagctgagcgcggggctggcgagaggggccctggcggcccaaaaatttctaagaagtcctgcctgaagccatcggacgtggtaaggtgcctgtctacagaacagcggctgtccgatctgaatacgccagaagagtcaaggcctggaaagcccctgggatcagccttccccggtagcgaggctgaacagactgagcgacaccgaggcggtgagcaagccgggcggaaggcagcccggcggggaggctcccaacagccacaagcccagcagaggagggtgaccccagaccgctctcaaacgtctcaggatcttttttcttatcaggccctctatagctacatcccccaaaacgacgatgaattagagttacgggatggagatatagtcgacgtcatggaaaaatgcgacgacgggtggtttgtggggacttccagacggacaaaacagttcggaactttccctgggaactacgtcaaacctctttacctctag

SEQ ID NO: 30929 - DNA, 3456 bp, Artificial Sequence
  derived and/or modified sequence
atgagcagtgaatgtgatggcggcagcaaggctgtgatgaatggcctggcccctggcagcaatggccaggacaaggccacagctgaccccctgcgggcccggagcatctctgctgtgaagatcatccctgtgaagacagtgaagaatgccagcggcctggtgctgcccacagacatggacctgaccaagatctgcacaggaaaaggagctgtgaccctgcgggccagcagcagctaccgggagacccccagcagcagccctgccagcccccaggagacccggcagcacgagagcaagccaggcctggagcctgagcccagcagcgcagatgagtggaggctgagcagcagcgcagatgccaatggaaatgcccagcccagcagcctggccgccaagggctacagatctgtgcaccccaacctgcccagcgacaagagccaggatgccaccagcagcagcgctgcccagcctgaggtgattgtggtgcccctgtacctggtgaacacagaccggggccaggagggcacagcccggccccccacccccctgggccccctgggctgtgtgcccaccatcccagccacagccagcgctgccagccccctgaccttccccaccctggatgacttcatccccccccacctgcagcgctggccccaccacagccagcctgcccgggccagcggcagctttgcccccatcagccagaccccacccagcttcagccccccaccacccctggtgcccccagcccctgaggacctgcggcgggtgtctgagccagacctgaccggggctgtgagcagcacagacagcagccccctgctgaatgaggtgagcagcagcctcatcggcacagacagccaggccttccccagcgtgtccaagcccagcagcgcctaccccagcaccaccatcgtgaaccccaccatcgtgctgctgcagcacaaccgggagcagcagaagaggctgagcagcctgagtgaccctgtgtctgagcggcgggtgggggagcaggacagcgcccccacccaggagaagcccaccagccctgggaaggccatcgagaagagggccaaggatgacagccggcgggtggtgaagagcacccaggacctgagtgatgtgtccatggatgaggtgggcatccccctgaggaacacagagaggagcaaggactggtacaagaccatgttcaagcagatccacaagctgaacagagacaccccagaggagaacccctacttccccacctacaagtttcctgagctgcctgagatccagcagaccagcgaggagaccaagagctgcagcgtgatgagcccccggctggagtgcagcggcaccgtgattgcccactgcagcctgaagctgctggacagcagcaacccccccaccagcgccagccaggtggccggcacagcagatgatgacagcgacctgtacagcccccgctacagcttcagcgaggacaccaagagccccctgtctgtgcccaggagcaagtctgagatgagctacattgatggagagaaggtggtgaagaggtctgccaccctgcccctgcctgcccggagcagcagcctgaagagcagcagcgagagaaatgactgggagcccccagacaagaaggtggacaccaggaagtacagagctgagcccaagagcatctatgagtaccagcccgggaagagctctgtgctgaccaatgagaagatgagccgggacatcagccctgaggagattgacctgaagaatgagccctggtacaagttcttcagcgagctggagtttgggaagcccccacccaagaagatctgggactacacccctggggactgcagcatcctgccccgggaggacaggaagaccaacctggacaaggacctgagcctgtgccagacagagctggaggccgacctggagaagatggagaccctgaacaaggcccccagcgccaacgtgccccagagcagcgccatcagccccaccccagagatcagcagcgagaccccaggctacatctacagcagcaacttccacgctgtgaagcgggagagtgatggagcccctggggacctgaccagcctggagaatgaaaggcagatctacaagtctgtgctggagggcggggacatccccctgcagggcctgagcggcctgaagaggcccagcagcagcgccagcaccaaggacagcgagagccccaggcacttcatcccagctgactacctggagagcacagaggagttcatcagaagaagacatgatgacaaggagaagctgctggccgaccagaggcggctgaagcgggagcaggaggaggccgacattgctgcccggcggcacactggagtcatccccacccaccaccagttcatcaccaatgaaagatttggagacctgctgaacattgatgacacagccaagaggaagagcggcagcgagatgaggcctgcccgggccaagtttgacttcaaggcccagaccctgaaggagctgcccctgcagaagggggacatcgtgtacatctacaagcagattgaccagaactggtatgaaggagagcaccacggccgggtgggcatcttccccaggacctacatcgagctgctgcccccagctgagaaggcccagcccaagaagctgacccctgtgcaggtgctggagtatggagaggccatcgccaagttcaacttcaatggagacacccaggtggagatgtccttcaggaagggggagcgcatcaccctgctgcggcaggtggatgagaactggtatgagggccgcatccctggcaccagccggcagggcatcttccccatcacctacgtggatgtgatcaagaggcccctggtgaagaaccctgtggactacatggacctgcccttcagcagcagccccagccgcagcgccacagccagcccccagccctggagggaggagagcggccagtatgaaaggaaggccgagcggggggccggggagcggggccctgggggccccaagatcagcaagaagagctgcctgaagcccagtgatgtggtgcgctgcctgagcacagagcagaggctgagtgacctgaacaccccagaggagagcaggcctgggaagcccctgggcagcgccttccctggcagcgaggccgagcagacagagcggcacagaggaggagagcaggccggcaggaaggccgccaggagaggaggcagccagcagccccaggcccagcagaggagagtgaccccagacaggagccagaccagccaggacctcttctcctaccaggccctgtacagctacatcccccagaatgatgatgagctggagctgagagatggagacatcgtggatgtgatggagaagtgtgatgatggctggtttgtgggcaccagcaggaggaccaagcagtttggcaccttccctggcaactacgtgaagcccctgtacctgtag

SEQ ID NO: 30930 - DNA, 3456 bp, Artificial Sequence
  derived and/or modified sequence
atgagcagcgagtgcgacggcggcagcaaggccgtgatgaacggcttggcacccgggtccaatggacaggacaaagctaccgccgacccgctgcgagctcggtctatcagtgccgtcaagataatacccgtgaagacagtgaaaaatgcttctggcctcgtgctgccgacagatatggacctcaccaagatctgtacagggaagggcgccgttaccctgcgggcctcgagctcgtacagggaaaccccatcatcatcccctgccagtcctcaggagacccgtcaacatgagagcaaacccggcctggagcctgagccaagctccgctgatgaatggagactctcaagctcagcagacgccaacggaaacgcacaaccttcttccttagctgccaaggggtatcgttcagtacaccctaacttgcctagtgacaaatcacaggacgcgaccagcagcagcgccgcgcagcctgaggttattgtggtccctctttatctggtcaataccgacaggggacaggaaggtaccgctagaccacccaccccgttgggaccactaggttgtgtacctactattcccgctactgcttcagcggcatcccctctcactttcccgacactagacgactttattcccccccatttgcaacgatggccccaccatagtcagcccgcgcgtgcctctgggtcttttgcccccatcagccagacaccaccatcctttagtcctccgcctcctctcgtgccacccgcgccagaagacttaagaagggtgagcgagccggacttaacaggggccgtgtcgtccaccgatagttcacctcttcttaatgaagttagcagtagcttgattgggaccgactcacaggctttccctagtgtatccaagccctcctctgcctatccctccacaacgatcgtcaaccctacaatcgtgcttctgcaacacaaccgggagcaacagaaaaggctcagttctcttagcgacccagtatctgaaaggcgcgtgggcgaacaagactccgccccgacacaggagaagccaacttcccccggcaaagccatcgaaaaacgggccaaggatgatagccggcgggtggtgaagtccacgcaggatctctctgacgtctccatggacgaagttggaattcctctccgcaatacagaaaggagcaaagactggtacaagactatgttcaaacagatccacaaactgaatcgcgatacaccagaggagaatccctattttccgacctataagttccccgaactacccgaaattcagcagacctccgaggagacaaagagctgtagtgttatgtccccccgcctggaatgtagcggaaccgtgatagcacactgtagcctcaagcttctggactcaagcaacccccctactagtgcctcgcaggtggctggcacagccgacgacgactcagacctctattcacctcgttatagcttttcagaggacaccaagtctcccctgagtgtgcctagatcaaagtctgagatgagctacatagatggagaaaaggtggtaaagcgatccgccacgttacccctgccggctcgctcaagttccttaaaatcaagtagtgaaagaaatgactgggagccccccgacaagaaagtggacactcgcaaatatagggcagagccaaaaagcatctacgagtatcaacccggaaaatctagtgtgctgacaaacgagaagatgagccgcgatatatccccggaagagattgatcttaaaaatgagccttggtacaaatttttctctgaactcgaatttggcaagcccccacccaagaaaatttgggactacacccccggggactgtagtatactcccccgggaggatcgcaaaaccaacctggataaagaccttagtttatgtcaaaccgagttggaggcagatttagaaaagatggagacccttaataaagcgccctctgcgaacgtcccacagagctccgccattagcccgacaccggagatttccagcgagacaccagggtacatctatagttcaaattttcacgcagttaaacgggagtcggatggggctcccggggacctaacatctttagaaaatgagcggcagatatataagagcgttctagagggtggcgatattcctctccagggcctgtccgggctgaagagaccaagctcctctgccagcaccaaggattcggagtctcccaggcacttcattccagccgactatctcgagagtaccgaggaattcatcaggagaagacacgatgataaggagaagctcctggctgaccagcgtcggctgaaacgagagcaagaagaggcagatatcgccgccaggaggcatacaggggtcattccaacacaccatcaattcatcactaacgaacgattcggcgatctgttaaacatagatgataccgctaaacgaaaatcaggatccgaaatgaggccagctagggccaagtttgatttcaaagcgcaaacattaaaagagcttcccctgcagaagggagatatcgtctatatttacaaacagattgaccagaactggtacgaaggagagcaccatggcagggtcgggatatttcctcgcacatacattgaattgcttccgcctgctgagaaagcccagccaaagaaacttactccagtgcaggtattagagtacggggaggctatcgctaagtttaattttaacggcgacactcaagttgagatgtcatttcggaagggggagagaattaccctgctgcgacaggtggatgaaaattggtatgaaggccgaatccctggcacatcccgccagggtatttttccaattacgtacgtcgacgtgatcaagcgcccactggtcaaaaatcccgtggactacatggacctcccattctcttcctcccctagccgttctgccacggcctctccacaaccctggcgcgaggagagcggtcagtacgagcgcaaagctgagcgcggagccggcgaaagaggacctgggggtcctaagatctcaaagaaatcatgcctgaagccttctgacgtggttagatgcctctccactgagcagcgcttgtccgatctgaataccccagaggagagccgacccggtaaaccactcggtagcgcattcccaggcagtgaagcagagcaaacggagaggcaccgcggcggagagcaagcagggcgcaaggcagctaggaggggaggatcccagcaaccccaggcgcagcaacggcgagtgacccctgaccgttcccagacttcgcaggacctgttctcataccaagctttgtactcttacataccacaaaatgatgatgaactggagctgcgcgatggggatattgtggacgtgatggaaaagtgtgatgatgggtggtttgtgggaacttcccgcagaacaaagcagtttggcactttccccggtaactacgtaaaacccctgtacctttag

SEQ ID NO: 30931 - DNA, 3456 bp, Artificial Sequence
  derived and/or modified sequence
atgagcagcgagtgcgacggcggcagcaaggccgtgatgaacggcctggcccctgggtctaatgggcaagataaggcaactgctgacccactgcgggctcggtctatttcagctgtgaagataatccctgtcaagaccgtcaagaacgcgtctggcctggtcttgccaaccgacatggatttaaccaaaatttgcaccgggaagggagccgtgaccctgcgcgcctcttccagctacagagaaacccctagttctagtccagcatcacctcaggagacacgacagcatgagtccaagcccggactggagcccgagccatctagcgctgatgagtggcggctcagctcgtcagccgacgccaacggtaacgctcagccatcttctttggccgctaagggatatcgcagcgttcacccaaatctaccaagcgataagagtcaggacgccacaagttcatccgcggcccaacctgaagtgattgttgtgcctctgtatctggtgaacaccgatcgtggccaggagggaacagctcgccccccgacgcctttggggcctctgggctgtgtccccacgataccagccactgcctcggctgcctctcccctcactttcccgactctcgacgattttattccaccgcatctgcagagatggccccaccacagtcagccggcaagagcctccggctctttcgcccccatttcacagacaccgccctccttctcccccccccccccactagtccctcccgccccagaagatcttagacgtgtgagcgagccagacctgacaggagcagtctcaagtactgactcgagccccctgttgaatgaagtgagctcctccctgattggcaccgacagccaggcctttcccagcgtatccaaaccttcttccgcttacccatctacgaccatcgtgaatcctactatcgtcctgctccaacacaaccgggaacaacaaaagagactcagctccctgtccgaccccgtcagcgaaaggcgggttggagagcaggacagcgcccccactcaagaaaagcctacatctcctggaaaagctatagagaaaagggctaaagatgactcacgcagagtggtaaaaagtacccaagacctctctgatgtttccatggacgaggtgggtattcccctgcgtaacaccgagagaagcaaggactggtacaaaactatgttcaagcaaattcacaagctcaaccgggataccccagaggagaatccctatttccccacttacaaattcccagagctccctgagatccaacaaacatccgaagagactaagtcttgctccgtcatgtctcccagattggagtgttccggtacagttatcgcccattgcagcctcaaattattggactccagcaaccctcccacaagtgccagtcaggtcgctgggacggccgacgacgattccgacctgtattctcctcgttatagtttctcagaagatacaaagtcacccttgagtgttcctcgatctaagtcagagatgtcctatatcgatggcgagaaagtggtgaaaaggtcagcaacgctgccactgcccgccagaagcagcagtttgaaatctagcagcgagcgaaacgactgggaacctccggataagaaggttgatacgcggaagtatagggccgagcctaagtccatttatgagtatcagcccggcaagtccagtgtcttgactaatgagaaaatgtccagagatatctctcccgaggagatcgacttaaaaaacgaaccgtggtataagttttttagcgagctggaatttgggaagccaccccccaagaaaatttgggattatactcctggagactgcagcatcctcccacgggaggacaggaaaaccaacctggataaagacctttcactctgtcaaacagagctagaggctgatctcgaaaagatggaaaccctgaataaagccccctcagcgaatgtgccacagtcaagcgccatcagccctacccctgagatcagtagtgagacccccggttatatctacagctccaacttccatgccgtgaaacgagagagcgacggcgcacctggggacctgacttcactggagaacgagagacaaatctacaaaagtgtgcttgaaggcggcgatatacctctgcaggggcttagtggactgaaacgtccttctagctccgcatccaccaaggactctgagagccctaggcacttcatcccagccgattatttagagagcaccgaagaatttattaggcgccggcacgacgataaggaaaagttattggcagaccaacggcggttaaagcgggagcaggaagaagccgacatcgccgccaggcggcacaccggtgtaatcccaacccatcaccagtttataaccaacgagaggttcggtgacctgctgaacatcgacgatacagccaagcggaagagcggatctgaaatgaggcctgcgcgcgctaaattcgactttaaggcccaaacactgaaggaacttcccctgcaaaaaggggatatagtgtatatctataagcagatcgaccaaaactggtatgaaggcgaacatcacggcagagttggtattttcccccgtacctatattgaactgttacccccagcggaaaaggcccaacccaagaaactgactcctgtccaagttttagagtatggcgaagccatcgctaagtttaactttaacggagatacacaagtggagatgtccttccgcaagggggaaaggatcactctcctgcgacaggtcgacgaaaattggtacgagggccggatcccaggcacctctcggcaggggatctttcccattacctacgtggatgtcattaagcggccactggttaaaaaccctgttgactatatggatctgcccttttcgagttcgcctagtcggtccgctaccgcatcccctcagccatggcgtgaagagagcgggcagtacgagcgtaaagctgagagaggcgcgggtgagagagggcccggcggtccaaagattagtaaaaagagctgtctcaaaccatctgacgtggtccggtgtctcagtaccgagcaacggctgagcgatttaaacaccccagaagagagtagaccagggaaaccactgggatccgcgtttcctggttccgaagctgagcagacagaaagacacagggggggagagcaagctgggaggaaagccgccaggagggggggtagccagcagccacaggctcaacagcgcagagtaacccctgaccggtctcagacatcccaggacctgttttcgtatcaggccctttattcatacattcctcagaacgatgacgagctcgagctcagggacggtgatatcgtcgacgtcatggagaagtgcgatgatgggtggttcgtgggaacctctagacggactaagcagtttggtaccttccctggcaattacgtaaagccactctatttatag

SEQ ID NO: 30932 - DNA, 3456 bp, Artificial Sequence
  derived and/or modified sequence
atgagctctgagtgtgacggtgggtctaaggccgtgatgaacggtctggctccaggctctaacgggcaagacaaggctaccgctgacccacttagagcgagatccattagcgctgtgaaaatcatcccagttaagacggttaagaacgcatccgggttagtgctgcccaccgacatggatctgacaaaaatctgcaccggcaagggcgcagtaaccttgagagcctctagcagctatcgggaaaccccctcctctagtcctgcaagccctcaggagacaagacagcacgaatcgaaacccggattagagccagagccctcaagtgccgatgagtggagactctcaagttctgcggatgccaatggaaatgcccagcccagctctctggccgctaaagggtatcgctctgtgcaccctaatctgccgtctgacaagtctcaggacgctaccagctcttccgcggctcaaccagaagtgattgtggtgcccctgtacctagtcaatacggaccggggtcaggaaggcacagccaggccgccaactccactgggccctcttgggtgcgtgcccacgattccggcaaccgcatctgctgccagtccgctgacgttccctactctggatgacttcatccctccccacttgcaaagatggccacatcattctcagcccgcacgtgcctcagggagcttcgctcccatcagccagacaccccctagtttttccccccctcctcccctcgtccctcctgcacccgaagacctgaggcgggtctccgaacccgacttgaccggcgcagtgtcctccactgatagctctcccctactaaacgaggtctcatcctccctgatcggtaccgatagtcaggcctttccctcagttagtaagccatcctccgcttacccatctactacaattgtcaaccccactatcgtgctgctgcagcataacagagaacagcagaagagactgagcagtctgagtgacccagtctcagaaagacgggtgggtgagcaggactccgcacccacacaagagaaaccgactagccccggaaaggccattgaaaaaagagcaaaggacgactcccgaagggttgtgaaatcaactcaagacctttccgatgtgtccatggatgaagtgggcattcctttgcgcaacaccgagaggtctaaggactggtacaagaccatgtttaaacagatccataaactcaacagagatacgccagaagagaacccctactttcctacttataagttccctgagcttccggagatccagcagacaagtgaagagacaaaatcctgcagcgttatgtccccccgactggagtgctcaggtacagtcattgcccattgcagcctaaaactgctggactcctccaacccacccacgtctgcatcacaggtcgctggcactgccgacgacgactctgacctgtattccccaagatacagttttagcgaagataccaagtcccctctgtcagtgcccaggtcaaagtccgagatgtcctacatcgatggtgagaaggtcgttaagcgctcagcgaccttgccgctacccgctaggagttctagtctgaaatcctcaagcgaacggaacgactgggagccacccgacaagaaagtggatacgagaaagtacagggcagagcccaaatctatttacgaatatcaaccaggcaaatcatccgtgctgacaaacgagaagatgagccgcgatatctcccccgaagagattgacctgaagaatgagccttggtataaattctttagcgagctggagtttggcaagcccccaccaaaaaagatctgggactacacacccggagactgtagcatcctgccgagagaggataggaagaccaacctagataaggatctgagtctttgtcagaccgaactcgaagccgacctggaaaagatggagaccctcaacaaggccccaagcgccaatgtgccacagtctagcgctatctcccctactcctgaaatctcgagtgagacccctgggtacatctacagctctaacttccacgcagtgaaacgagagtcggacggcgctccaggtgatctgacatcactcgaaaacgagaggcagatttataagagcgtcctcgaggggggtgatattcccctgcagggtttgtccggcctgaagcggccttcaagctctgcctccactaaagattccgaatccccccgacattttatacctgccgattacctggaaagtactgaagaatttatcagacgtcgacacgatgataaggagaagcttctggctgatcagcgacgcctcaaacgcgagcaggaagaggccgacatcgccgcaaggcgtcataccggcgtgattcccacacatcaccagttcattaccaacgaacggttcggagatctactgaacatcgatgatactgcgaaacggaagagtggttccgaaatgaggcctgctcgcgctaagtttgattttaaggcccagaccctgaaggaactccctctacagaagggggacattgtgtacatatataagcaaattgaccagaattggtatgaaggtgagcatcatggacgggtcgggatcttccccaggacctatattgaactgttgccccctgccgagaaggcccagcccaagaaactgaccccagtgcaagtccttgaatacggagaggcgatagctaaattcaactttaatggggacacccaggtagaaatgtcatttcgaaagggagagagaattactctgcttaggcaggttgacgagaattggtatgagggcaggatccctggaacgagtcgacaggggatcttccctattacctatgtggatgttatcaagcgccctttagtgaaaaatcctgtggactatatggatctccctttttcatcgtcaccctctagatctgcgacagcttccccacaaccctggcgcgaagagtcagggcaatatgagcggaaagcggagagaggagcaggtgaaaggggtcctggtggaccaaaaatctccaagaagtcttgccttaaacctagcgacgtcgttagatgcttatccaccgagcagagactgtcagatctcaatacaccggaagagtctaggcccggtaagcccttaggaagcgctttccctggcagcgaagccgagcagactgagcgccaccgtgggggagagcaggcaggccgaaaggccgctcggagaggtgggtcccagcaaccgcaggcccaacagagacgtgtaaccccggataggagccagacgagccaggacttgttctcatatcaggctttgtattcatacatcccacagaatgatgacgagttggagctgcgggacggtgatatcgtcgatgtgatggaaaagtgtgacgacggctggtttgtgggcacctcaagacggaccaagcagtttgggaccttccccggtaattacgttaagcctctgtacttgtag

SEQ ID NO: 30933 - DNA, 3456 bp, Artificial Sequence
  derived and/or modified sequence
atgtcatctgagtgtgacggcggaagcaaagccgtgatgaatggcctggcgcctggctctaacggacaagacaaagctacagcagaccccctgcgggcaaggtcaatctctgccgtgaaaatcattcccgtgaagaccgtaaaaaacgcctcaggccttgtcctgcccacagatatggacttgactaagatctgcacgggaaagggcgctgttactctccgggcttcttcgtcctatcgggagaccccaagtagctctcctgcctcaccccaggagactcggcagcatgagtccaagcccggattggaacctgagccctcctccgcagatgaatggagactgagcagttccgcagatgcgaatgggaatgcacagccctcttctcttgccgctaaaggctacagatctgtgcatccaaacctgccctcagacaaatctcaggatgcaacaagctcttctgccgcacaaccggaggtaatagtggtaccattgtacctggtcaacacagatcggggacaagagggaaccgccagacctccaactccactgggcccactaggttgcgttcccacaattcccgctactgccagtgcggcttcccctctgacgtttcctacactcgatgattttattcccccacacctgcagcgctggccccaccatagtcagcccgctcgggcttccgggtcctttgcgccaatttcgcaaactcctccttctttttccccaccaccaccacttgtgcctcctgccccagaggacctgagaagagtatctgaaccggacctgaccggagccgtcagcagcacagactcctcacccctgttaaacgaggtgtcatctagcctaatcggcacagattcacaggccttcccctctgtgagcaagccatccagtgcatatccatccacaacgatcgtgaatcctaccatcgtgctcttgcaacacaatagggaacagcagaaaagattaagcagtctgtctgaccccgtgagtgagcggagagtgggagaacaggattctgcaccaacacaggaaaaacccacctcacctggaaaagccattgaaaaacgagcaaaagacgattcacggagagtggtgaagtccacccaggacctgtcagacgtgtcaatggacgaagttggaattccgctgcgcaacacggaacggtccaaggactggtataaaacaatgttcaagcagattcacaaactgaaccgtgatactccagaggaaaatccttattttcccacctataagtttcccgaattgcccgagattcagcaaactagcgaggagacaaagtcatgctcggtgatgagtcccagactcgagtgctccgggactgtgatcgcacattgttcacttaagctgctggactctagcaatcctcctacatctgcgtctcaggtggctggtaccgcagacgacgacagcgacttatactccccaaggtactctttcagcgaagacacaaaaagccctctatccgtcccacgctctaagtccgagatgtcctacatcgatggtgaaaaggtggtgaagagatctgccaccttgcctctacctgccaggtcttcgtcgcttaaatcaagttcggaaaggaatgactgggagcctcccgacaaaaaagtggatacacgaaaataccgggcagaacctaagtcaatctacgagtatcagccaggaaaaagcagcgtgctgacaaacgaaaagatgtctagggatatcagccccgaggaaatagaccttaaaaacgaaccttggtacaaattcttcagcgagctggagttcggtaagccacctccgaaaaagatatgggattatacacctggcgactgcagtatactgccacgcgaggatcgtaagacgaaccttgacaaagatctgagcttgtgtcaaactgaactggaagcagatctggagaaaatggagaccctcaataaggcaccaagcgcaaatgttccccagtcgagtgctatctcccctacaccggagatttctagcgaaactccaggttatatctattcttcaaacttccacgccgtgaagcgagagtctgacggggctcctggcgacctaacttccctcgagaacgagcggcagatctacaaaagcgtcctagaaggcggagatatcccactgcagggcttgagtggtttaaagaggcccagcagcagtgcctctaccaaggatagcgagtctcccaggcattttattcctgcggactatctggagagcacagaggagtttattagacggaggcacgacgataaggaaaagttgctggctgatcagcgcaggctcaagcgcgagcaggaagaggctgacatcgccgctaggcgacacactggcgttattcccacacaccatcagttcatcacgaatgagcgcttcggcgaccttttaaatattgacgacaccgcaaaacgcaagagcgggtcagaaatgaggcctgctcgtgcaaagttcgacttcaaagcccagacactgaaagagctgcccttgcagaagggtgacatcgtgtacatttataaacagattgaccaaaactggtacgagggagaacaccatggtcgcgttggaatctttcctcgcacatatatagaactactgcccccagcagaaaaagcacagcctaagaaactaacacctgtccaggttctcgagtacggtgaagcaatcgcgaagttcaatttcaacggggacactcaggttgagatgagtttcaggaagggagaaaggatcacactgcttaggcaagtggatgagaattggtacgaggggagaatcccaggaacttctcggcagggaatcttccccataacttacgtggatgtgataaaaaggccactcgtgaagaatcctgtcgattacatggatctcccgttctcatcctcccccagtcggtccgcgaccgcatcaccccagccctggagggaagaatctgggcaatacgagcggaaggccgaaaggggcgctggcgagaggggacctgggggtccaaaaatctctaagaagtcttgtctgaaaccatcagacgtcgtgagatgtctgagcaccgagcagaggctgtcagacttgaatactcctgaggagtctcggcctggtaagcccctcggctctgcattccccggttcagaggctgaacagacagagcgccaccgcggtggagagcaagccggaaggaaggcagctcgcaggggtggaagccagcagccacaggcccaacagagaagagtgaccccagaccggagccagacatcccaagatttattctcttatcaagctctgtatagctacattccacagaacgatgatgagctggagctccgggacggggatattgtggacgttatggagaaatgcgatgacggctggtttgtaggaacctcccgaaggactaaacaattcggcacctttccaggaaactacgtcaaaccactctatctgtag

SEQ ID NO: 30934 - DNA, 3517 bp, Artificial Sequence
  derived and/or modified sequence
ttgcagacgacttgtcctgccaccaccatgagttctgaatgtgatggtggttccaaagctgtgatgaatggcttggcacctggcagcaatgggcaagacaaagcaactgccgaccctttacgcgcacgctctatttctgctgttaaaatcattcctgtgaagacagtgaaaaacgcctcaggcctagttctccctacagacatggatcttacaaaaatctgcactgggaagggagcggtgactctccgggcctcgtcttcctacagggaaaccccaagcagtagccctgcgagccctcaggaaacccggcaacacgaaagcaaaccaggtctggagccagagccttcttcagcagatgagtggaggctttcttccagtgctgatgccaatggaaatgcccagccctcttcactcgctgccaagggctacagaagtgtgcatcccaaccttccttctgacaagtcccaggatgccacttcctccagtgcagcccagccggaggtaatagttgtccctctctacctggttaatactgacagagggcaagaaggcactgccagacctccaacacctctggggcctcttggctgcgtccccacaatcccagcgactgcctctgccgcctcacctctgaccttcccgactctagatgatttcattccccctcatctgcagaggtggccccaccacagccagccagcccgcgcctctggctcctttgcccccattagccagacgccaccatccttctcaccaccacctccgctggtccctcctgccccggaggacctccgcagagtctcggagcctgacctcacgggagctgtttcgagtaccgattccagtcctctactaaatgaagtttcttcttcccttattggaactgattcccaagcctttccatcagttagcaagccttcatccgcctatccctccacaacgattgtcaatcctactattgtgctcttgcaacacaatcgagaacagcaaaaacgactcagtagcctttcagatcctgtctcagaaagaagagtgggagagcaggactcagcaccaacccaggaaaaacccacctcacctggcaaggctattgaaaaaagagcaaaggatgacagtaggcgggtggtgaagagcactcaggacttaagcgatgtttccatggatgaagtgggcatcccactccggaacactgagagatcaaaagactggtacaagactatgtttaaacagatccacaaactgaacagagacactcctgaagaaaacccttatttccctacgtacaaattccctgaacttcctgaaatccagcaaacttccgaagagacaaagtcttgctctgtcatgtcacccaggctggagtgcagtggtacagtcatagctcactgcagcctcaaactcctagactcaagcaatcctcccacctcagcctcccaagtagctgggactgcagatgatgattcagatctgtactctcccagatactcattttctgaagacacaaaatctcccctttctgtgcctcgctcaaaaagtgagatgagctacattgatggtgagaaggtagtcaagaggtcggccacactacccctcccagcccgctcttcctcactgaagtcaagctcagaaagaaatgactgggaacccccagataagaaagtagacacaagaaaatatcgtgcagagcccaagagcatttacgaatatcagcctggcaagtcttccgttctgaccaacgaaaagatgagtcgggatataagcccagaagagatagatttaaagaatgaaccttggtataaattcttttcggaattggagtttgggaaaccgcctcccaaaaagatatgggattatactcctggagactgctctatccttcctagagaggatagaaagactaatctagacaaagatctcagcctctgccagacagagttagaggcagatttagaaaaaatggagacgcttaataaagcacccagtgcaaacgtgccacagagctcagccatcagccctactccggaaatttcttcagagactcctggatatatatattcttccaacttccatgcagtgaagagggaatcagacggggctcctggggatctcactagcttggagaatgagagacaaatttataaaagtgtcttggaaggtggtgacatccctcttcagggcctgagtgggctcaagcgaccatccagctctgcttccactaaagattcagaatcgccaagacattttataccagctgattacttggaatccacggaagaatttattcgaagacgtcatgatgataaagagaaacttttagcggaccagagacgacttaaacgcgagcaagaagaggctgatattgcagctcgacgccacacaggcgtcattccgacgcaccatcagtttatcactaatgagcgctttggggacctcctcaatatagacgatactgcaaaaaggaaatctgggtcagagatgagacctgccagagccaaatttgactttaaagctcagacactaaaggagcttcctctgcagaagggagatattgtttacatttataagcaaattgatcagaactggtatgaaggagaacaccacggccgggtgggaatcttcccacgcacctacatcgagcttcttcctcctgctgagaaggcacagcccaaaaagttgacaccagtgcaggttttggaatatggagaagctattgctaagtttaactttaatggtgatacacaagtagaaatgtccttcagaaagggtgagaggatcacactgctccggcaggtagatgagaactggtacgaagggaggatcccggggacatcccgacaaggcatcttccccatcacctacgtggatgtgatcaagcgaccactggtgaaaaaccctgtggattacatggacctgcctttctcctcctccccaagtcgcagtgccactgcaagcccacagccatggcgcgaagagagtggacaatatgagaggaaagcagagaggggggcaggcgaaagaggccctggtggacccaagatctctaagaagagctgcttgaagccttcagacgtggtcaggtgcctgagtactgaacagagactctcagatctcaacacccctgaggagagccggcccggcaagcccctgggtagcgcttttccaggaagtgaggctgagcagacagagcggcatagaggtggcgagcaggcggggaggaaagctgctcggagaggtgggagccagcaacctcaagcccagcagcgaagagtcacccccgacaggagtcaaacctcacaagatttatttagctatcaagcattatatagctatataccacagaatgatgatgagttggaactccgcgatggagatatcgttgatgtcatggaaaaatgtgacgatggatggtttgttggtacttcaagaaggacaaagcagtttggtacttttccaggcaactatgtaaaacctttgtatctataagaagactgaaaaccatggagattatttttattgg

SEQ ID NO: 30935 - DNA, 6931 bp, Artificial Sequence
  derived and/or modified sequence
gcagcgtgtagtgcgagtggggcggacgcgcgcagcccgcccgcccggcgaccagcaaggagttggcatcctttggaagagttcgtgaaagctttctgcccagagctcctggaccaatgcatcttcccaccaccttaaaccactgagcagttcagagccccagttgcagacgacttgtcctgccaccaccatgagttctgaatgtgatggtggttccaaagctgtgatgaatggcttggcacctggcagcaatgggcaagacaaagcaactgccgaccctttacgcgcacgctctatttctgctgttaaaatcattcctgtgaagacagtgaaaaacgcctcaggcctagttctccctacagacatggatcttacaaaaatctgcactgggaagggagcggtgactctccgggcctcgtcttcctacagggaaaccccaagcagtagccctgcgagccctcaggaaacccggcaacacgaaagcaaaccaggtctggagccagagccttcttcagcagatgagtggaggctttcttccagtgctgatgccaatggaaatgcccagccctcttcactcgctgccaagggctacagaagtgtgcatcccaaccttccttctgacaagtcccaggatgccacttcctccagtgcagcccagccggaggtaatagttgtccctctctacctggttaatactgacagagggcaagaaggcactgccagacctccaacacctctggggcctcttggctgcgtccccacaatcccagcgactgcctctgccgcctcacctctgaccttcccgactctagatgatttcattccccctcatctgcagaggtggccccaccacagccagccagcccgcgcctctggctcctttgcccccattagccagacgccaccatccttctcaccaccacctccgctggtccctcctgccccggaggacctccgcagagtctcggagcctgacctcacgggagctgtttcgagtaccgattccagtcctctactaaatgaagtttcttcttcccttattggaactgattcccaagcctttccatcagttagcaagccttcatccgcctatccctccacaacgattgtcaatcctactattgtgctcttgcaacacaatcgagaacagcaaaaacgactcagtagcctttcagatcctgtctcagaaagaagagtgggagagcaggactcagcaccaacccaggaaaaacccacctcacctggcaaggctattgaaaaaagagcaaaggatgacagtaggcgggtggtgaagagcactcaggacttaagcgatgtttccatggatgaagtgggcatcccactccggaacactgagagatcaaaagactggtacaagactatgtttaaacagatccacaaactgaacagagacactcctgaagaaaacccttatttccctacgtacaaattccctgaacttcctgaaatccagcaaacttccgaagagacaaagtcttgctctgtcatgtcacccaggctggagtgcagtggtacagtcatagctcactgcagcctcaaactcctagactcaagcaatcctcccacctcagcctcccaagtagctgggactgcagatgatgattcagatctgtactctcccagatactcattttctgaagacacaaaatctcccctttctgtgcctcgctcaaaaagtgagatgagctacattgatggtgagaaggtagtcaagaggtcggccacactacccctcccagcccgctcttcctcactgaagtcaagctcagaaagaaatgactgggaacccccagataagaaagtagacacaagaaaatatcgtgcagagcccaagagcatttacgaatatcagcctggcaagtcttccgttctgaccaacgaaaagatgagtcgggatataagcccagaagagatagatttaaagaatgaaccttggtataaattcttttcggaattggagtttgggaaaccgcctcccaaaaagatatgggattatactcctggagactgctctatccttcctagagaggatagaaagactaatctagacaaagatctcagcctctgccagacagagttagaggcagatttagaaaaaatggagacgcttaataaagcacccagtgcaaacgtgccacagagctcagccatcagccctactccggaaatttcttcagagactcctggatatatatattcttccaacttccatgcagtgaagagggaatcagacggggctcctggggatctcactagcttggagaatgagagacaaatttataaaagtgtcttggaaggtggtgacatccctcttcagggcctgagtgggctcaagcgaccatccagctctgcttccactaaagattcagaatcgccaagacattttataccagctgattacttggaatccacggaagaatttattcgaagacgtcatgatgataaagagaaacttttagcggaccagagacgacttaaacgcgagcaagaagaggctgatattgcagctcgacgccacacaggcgtcattccgacgcaccatcagtttatcactaatgagcgctttggggacctcctcaatatagacgatactgcaaaaaggaaatctgggtcagagatgagacctgccagagccaaatttgactttaaagctcagacactaaaggagcttcctctgcagaagggagatattgtttacatttataagcaaattgatcagaactggtatgaaggagaacaccacggccgggtgggaatcttcccacgcacctacatcgagcttcttcctcctgctgagaaggcacagcccaaaaagttgacaccagtgcaggttttggaatatggagaagctattgctaagtttaactttaatggtgatacacaagtagaaatgtccttcagaaagggtgagaggatcacactgctccggcaggtagatgagaactggtacgaagggaggatcccggggacatcccgacaaggcatcttccccatcacctacgtggatgtgatcaagcgaccactggtgaaaaaccctgtggattacatggacctgcctttctcctcctccccaagtcgcagtgccactgcaagcccacagccatggcgcgaagagagtggacaatatgagaggaaagcagagaggggggcaggcgaaagaggccctggtggacccaagatctctaagaagagctgcttgaagccttcagacgtggtcaggtgcctgagtactgaacagagactctcagatctcaacacccctgaggagagccggcccggcaagcccctgggtagcgcttttccaggaagtgaggctgagcagacagagcggcatagaggtggcgagcaggcggggaggaaagctgctcggagaggtgggagccagcaacctcaagcccagcagcgaagagtcacccccgacaggagtcaaacctcacaagatttatttagctatcaagcattatatagctatataccacagaatgatgatgagttggaactccgcgatggagatatcgttgatgtcatggaaaaatgtgacgatggatggtttgttggtacttcaagaaggacaaagcagtttggtacttttccaggcaactatgtaaaacctttgtatctataagaagactgaaaaccatggagattatttttattggaggaggaagcatcattcatgaaccgatctttttagttgagtcagtaggaaaattaatacagtggataaagtaagaagcaaaagacagggacagagaagtgttgtgtttaaaacccaagcctgtctaaggttactgtgtattagacagggccgaactagtgtgctgagcaaaaagaattgaagcaaattgtatttacttagccgcttctgggagccacttcagcctttcccctcccctccacttcttgggtaatctgacctgaagcatagtccaggagcagagttagccagaaatgcctcctgctgccccagccttagagagctcccatctcaatcattgagcctgaaggcttcaagcccaagaatgcaacaagacccccagcctacatttctcagctcccctggagccagctgatcctgtaacgctgctggaggtcagtctgagctaccaagactgtccctagacaaaggtggagtcccccacactgcccaagaccaaatccctcactcaacctgctgaggtgtggatggggaaacagaggcaaaactgaggcacctgatgcattcagcctgctgtgcagcagtgccattgactgccctgatgttcagagagaaacgcacacaaggtttgcccatgagaattggggagcagatggccaagcagataggttatgtctgttttctgagtgatgaagtcaggaagccctgtggctctggaggccacttgtggttcattcttttcccatatccttggcttttagaaatggttaccttcaggacagtgcagctgcatttatcagagcactattgctaagttttcttttctggcttgtgtttttctgggacagtttagaattgggaggcctattctcatagaacaccaaaaatgatgttcagtgattcatttaacatacaccaatgtactctggctgctggggggacaaccataagcaagacatgcccagggtttgccgtggctccagatctactccctgtaggagttcaaggatcacacaaacggtagtaaccagggttgtgaatctgagtacaccctggcaaggcttctcttcagactgaagcagcaattctgccactaccagcagcaaccaggacgtctgttctttgtgggggccagatcagaagagagaggcccctgtgacgcccgggctgcttggtcacaactctgtccaattcaaggatgtttatcggcctctcttagatcctgagtgagacaaatacagaaatgacccattccctgcccaccagaaactcagaggtgattggggagactgacacaggaaaatgaacttaatcaagagagactgtgatatgtgctaagaagggtgtgagggagggagagatgaattttccctggagggatcctagaaagcattgtcatattgccatctccattagctcacttttaaacaactagggtgctggaagaacctttgtctgagggtagttcatagctggaaatacttggaatattttccagagtctctaaactctcatcttcccccacagatacacatccaagctcacaaataggagtagcaattctaggtggtagggttgtgtacggaacccctggctgtctgcatatatctcagaattaccccaggaccattgtcccaaagtctagagtctttacaggtaggcaaaatttgttttcaatgcctgtgcctcagctgctgtcacaaatacccatcttaggatcccatcagcttcccatcccccaccagacagccacagtaccctcactttctccctattgttctttcaaatcctgttctcaggaaagaaactgccactaattcattcacactaaggtgtaaatgattgataataggaatgagttacctcttcccacagacatttgtttttaagtatgacagagcagggccttaatcccaagggaaaaggttatggaactggagggggtgagctttctgggtagaaggagacttcctgaatttccttaaaacccagtaagagtaagacctgttgttttggaaggtctgctccaccatctaagagcactgtttttttttttttgttgttgttgttgttttacggtctctgagggaatatagtaaaaatgcatatgcacgtgcaatttgcacggcagcatttcaccgattgtggactgtattggctaatgtgtttcctggtctttagatgcaaaccattaataacactatcttatctcatagttttttcaggggtgcttcttgattagtagggaattttgaacacctctttaaatacagctagaaaataaaaccaatttgtaaagccacatttgcatatgatgccagcctcacgcatttgtatatctccagaaattcaggtatgcctcaccaatttgcccgtctttaataaaatcttgtgttaaaatttgcatcacgtcgccttcctatgtatgacgaaacaagaaacagagatttccaattgctcttttgtcttcagacatttagtaatataaagtacctatttttatgctgaaatgtttatacaggtttattaatagcaagtgcaactaactggcggcatgccttgcaacacattttgatatattagccatgcttccgggtaaaggcaagccccaaactccttatcttttgcagtctctctgggatcagtaaaagaaaaaaaaaataatgtgcttaagaagtgggactgtaaatatgtatatttaactttgtatagcccatgtacctaccttgtatagaaaaataattttaaaaatttgaatggaagggggtaaaggaagtcatgaagtttttttgcatttttatttaaatgaaggaattccaaataactcacctacagatttttagcacaaaaatagccattgtaaagtgttaaaatttacgataagtattctattggggaggaaaggtaactctgatctcagttacagtttttttttcctttttaatttcattattttgggtttttggtttttgcagtcctatttatctgcagtcgtattaagtcctattgctagaataggttactacaaaaaaggttatattctgaaagaaaaataactgacattatatataaccaattaatttaaagtattgccatttaaattacacactgagagcatgtcctatgcagacatagatttttctgttcatttatttttcttcattgcagtggattgatttgataaatagatgtgttgaattactacatttgctgtacatattatttaataaactttattcagaattgcgtggc

SEQ ID NO: 30936 - protein, 905 aa, Artificial Sequence
  derived and/or modified sequence
MSSECDGGSKAVMNGLAPGSNGQDKATADPLRARSISAVKIIPVKTVKNASGLVLPTDMDLTKICTGKGAVTLRASSSYRETPSSSPASPQETRQHESKPGLEPEPSSADEWRLSSSADANGNAQPSSLAAKGYRSVHPNLPSDKSQRWPHHSQPARASGSFAPISQTPPSFSPPPPLVPPAPEDLRRVSEPDLTGAVSSTDSSPLLNEVSSSLIGTDSQAFPSVSKPSSAYPSTTIVNPTIVLLQHNREQQKRLSSLSDPVSERRVGEQDSAPTQEKPTSPGKAIEKRAKDDSRRVVKSTQDLSDVSMDEVGIPLRNTERSKDWYKTMFKQIHKLNRDDDSDLYSPRYSFSEDTKSPLSVPRSKSEMSYIDGEKVVKRSATLPLPARSSSLKSSSERNDWEPPDKKVDTRKYRAEPKSIYEYQPGKSSVLTNEKMSRDISPEEIDLKNEPWYKFFSELEFGKPPPKKIWDYTPGDCSILPREDRKSSAISPTPEISSETPGYIYSSNFHAVKRESDGAPGDLTSLENERQIYKSVLEGGDIPLQGLSGLKRPSSSASTKDSESPRHFIPADYLESTEEFIRRRHDDKEKLLADQRRLKREQEEADIAARRHTGVIPTHHQFITNERFGDLLNIDDTAKRKSGSEMRPARAKFDFKAQTLKELPLQKGDIVYIYKQIDQNWYEGEHHGRVGIFPRTYIELLPPAEKAQPKKLTPVQVLEYGEAIAKFNFNGDTQVEMSFRKGERITLLRQVDENWYEGRIPGTSRQGIFPITYVDVIKRPLVKNPVDYMDLPFSSSPSRSATASPQLSHHSLRAGPDLTESEKSYVQPQAQQRRVTPDRSQTSQDLFSYQALYSYIPQNDDELELRDGDIVDVMEKCDDGWFVGTSRRTKQFGTFPGNYVKPLYL

SEQ ID NO: 30937 - DNA, 2718 bp, Artificial Sequence
  derived and/or modified sequence
atgagcagcgagtgcgacggcggcagcaaggccgtgatgaacggcctggcccccggcagcaacggccaggacaaggccaccgccgaccccctgagagccagaagcatcagcgccgtgaagatcatccccgtgaagaccgtgaagaacgccagcggcctggtgctgcccaccgacatggacctgaccaagatctgcaccggcaagggcgccgtgaccctgagagccagcagcagctacagagagacccccagcagcagccccgccagcccccaggagaccagacagcacgagagcaagcccggcctggagcccgagcccagcagcgccgacgagtggagactgagcagcagcgccgacgccaacggcaacgcccagcccagcagcctggccgccaagggctacagaagcgtgcaccccaacctgcccagcgacaagagccagagatggccccaccacagccagcccgccagagccagcggcagcttcgcccccatcagccagaccccccccagcttcagcccccccccccccctggtgccccccgcccccgaggacctgagaagagtgagcgagcccgacctgaccggcgccgtgagcagcaccgacagcagccccctgctgaacgaggtgagcagcagcctgatcggcaccgacagccaggccttccccagcgtgagcaagcccagcagcgcctaccccagcaccaccatcgtgaaccccaccatcgtgctgctgcagcacaacagagagcagcagaagagactgagcagcctgagcgaccccgtgagcgagagaagagtgggcgagcaggacagcgcccccacccaggagaagcccaccagccccggcaaggccatcgagaagagagccaaggacgacagcagaagagtggtgaagagcacccaggacctgagcgacgtgagcatggacgaggtgggcatccccctgagaaacaccgagagaagcaaggactggtacaagaccatgttcaagcagatccacaagctgaacagagacgacgacagcgacctgtacagccccagatacagcttcagcgaggacaccaagagccccctgagcgtgcccagaagcaagagcgagatgagctacatcgacggcgagaaggtggtgaagagaagcgccaccctgcccctgcccgccagaagcagcagcctgaagagcagcagcgagagaaacgactgggagccccccgacaagaaggtggacaccagaaagtacagagccgagcccaagagcatctacgagtaccagcccggcaagagcagcgtgctgaccaacgagaagatgagcagagacatcagccccgaggagatcgacctgaagaacgagccctggtacaagttcttcagcgagctggagttcggcaagcccccccccaagaagatctgggactacacccccggcgactgcagcatcctgcccagagaggacagaaagagcagcgccatcagccccacccccgagatcagcagcgagacccccggctacatctacagcagcaacttccacgccgtgaagagagagagcgacggcgcccccggcgacctgaccagcctggagaacgagagacagatctacaagagcgtgctggagggcggcgacatccccctgcagggcctgagcggcctgaagagacccagcagcagcgccagcaccaaggacagcgagagccccagacacttcatccccgccgactacctggagagcaccgaggagttcatcagaagaagacacgacgacaaggagaagctgctggccgaccagagaagactgaagagagagcaggaggaggccgacatcgccgccagaagacacaccggcgtgatccccacccaccaccagttcatcaccaacgagagattcggcgacctgctgaacatcgacgacaccgccaagagaaagagcggcagcgagatgagacccgccagagccaagttcgacttcaaggcccagaccctgaaggagctgcccctgcagaagggcgacatcgtgtacatctacaagcagatcgaccagaactggtacgagggcgagcaccacggcagagtgggcatcttccccagaacctacatcgagctgctgccccccgccgagaaggcccagcccaagaagctgacccccgtgcaggtgctggagtacggcgaggccatcgccaagttcaacttcaacggcgacacccaggtggagatgagcttcagaaagggcgagagaatcaccctgctgagacaggtggacgagaactggtacgagggcagaatccccggcaccagcagacagggcatcttccccatcacctacgtggacgtgatcaagagacccctggtgaagaaccccgtggactacatggacctgcccttcagcagcagccccagcagaagcgccaccgccagcccccagctgagccaccacagcctgagagccggccccgacctgaccgagagcgagaagagctacgtgcagccccaggcccagcagagaagagtgacccccgacagaagccagaccagccaggacctgttcagctaccaggccctgtacagctacatcccccagaacgacgacgagctggagctgagagacggcgacatcgtggacgtgatggagaagtgcgacgacggctggttcgtgggcaccagcagaagaaccaagcagttcggcaccttccccggcaactacgtgaagcccctgtacctgtag

SEQ ID NO: 30938 - DNA, 2718 bp, Artificial Sequence
  derived and/or modified sequence
atgtcctcagagtgcgatggcggttctaaagcagtgatgaatggattggcgcctggctctaatggtcaggataaggccaccgcggacccactgcgggcccggagcatatcggccgttaaaatcatccctgtcaaaacagtgaagaacgcaagtggtctggtccttccaaccgacatggacctgaccaaaatctgtacaggtaaaggggccgttactttacgggctagcagctcctacagggaaacccctagcagcagtccagcaagcccgcaagaaacacggcagcacgagagtaagccaggtcttgaaccagagccatcaagcgcagacgaatggcggctgtcaagttctgccgacgcaaacggcaatgctcagccaagcagcctcgctgccaaaggttataggagcgtgcatcccaatttgccttccgacaagagccaaaggtggccacaccatagtcagccagcccgcgcgtccgggagcttcgctccgatttcccagacaccaccgagctttagccccccccccccactggtccctcccgcacccgaagacttgaggcgagttagtgaacccgatctcaccggcgccgtatctagtactgattcctcccctcttctgaatgaggtctcatcttcactgatcgggaccgattcgcaggcctttccaagcgttagtaaaccatcttctgcttacccctccacaaccatagtgaaccccaccatcgtcctccttcagcacaatcgggagcagcaaaagaggctcagtagtttatctgatccagtgagtgaacggagagtaggggagcaggactcagcccccacccaggagaaacctacctcacctggaaaggcgattgaaaagagggccaaagatgactctcgcagagtagtgaaatcaacccaggacctctcagacgttagcatggacgaggttggtatacctctgaggaatacagaaaggtcaaaggactggtataagacgatgtttaagcagattcacaagcttaaccgcgacgatgactcagacctatactcccccagatactcattttccgaggacaccaagtcgccactctcggtaccccgctccaaatctgagatgtcctatattgacggagagaaagtggtcaagagatcagcaaccttgccattacccgctcgcagtagctctctgaaatcctcatccgagagaaacgactgggaacccccagataaaaaggtcgacacaaggaagtatcgagccgagcccaaatccatatatgaataccaaccgggaaagagttccgtcctcacgaatgagaaaatgagtagagatataagccccgaggaaatcgacctgaaaaacgagccatggtacaaattcttctcagagttggaatttggaaagccaccacctaaaaagatctgggactacacaccaggcgattgctctattctgccccgcgaagatagaaagtcctcggctatcagcccaacccccgagatatcctcggaaacccccgggtatatctatagtagcaacttccacgcggtgaaaagagagagcgatggcgccccgggggatctcacgtcgttggaaaacgaacgacaaatttataaatccgtactggagggcggggatatccctctccaagggctgtctgggttgaagaggccctcctcttcggcaagtactaaagattcagagtcaccccgtcacttcatccccgccgactacttagaatccacagaagagttcatcagacgaaggcacgacgacaaggagaagctcttggccgaccaacggagactgaagcgggagcaggaggaagctgacattgccgcccgccgtcataccggcgtgatcccgacacaccaccagtttatcaccaacgaaagattcggcgacttgctgaacattgatgacaccgccaagcggaagagtggcagcgagatgaggcctgcacgtgctaagttcgattttaaagctcagacacttaaggagctcccactgcagaagggggacatagtgtacatttataagcagatcgatcagaattggtacgaaggagagcatcatggaagggtgggcatcttcccacgaacctacatcgaactgctgccccccgcagagaaggcccagcccaagaagctgactcccgttcaagtcctggagtatggagaggcaatcgcgaaattcaactttaatggagatactcaggtcgaaatgtcttttcgtaaaggagaaagaattaccctgcttagacaggtggacgaaaactggtatgaggggcgaattcctggtactagtcggcaggggatctttcctattacgtatgtggacgtcatcaagcgccctctcgtcaagaacccagtggactatatggacctgccttttagtagttctccttcccggtccgccactgcatcacctcaattgtcacaccactcacttcgagcaggtccggatctgacagaaagtgaaaagagttatgtgcagccacaggctcagcagcggagggttactcctgatcggtcccagacaagtcaggatttatttagctaccaggccctctacagctatatacctcagaatgatgacgaactggagttacgtgatggcgacattgtcgatgtcatggaaaaatgcgatgacggatggttcgtgggcacatcaaggcggacaaaacagtttggtaccttcccggggaattacgtcaaacccttgtatctgtag

SEQ ID NO: 30939 - DNA, 2718 bp, Artificial Sequence
  derived and/or modified sequence
atgagcagcgaatgcgatggtgggtcaaaagccgtgatgaatggtctcgcccctggatcaaacggacaggataaggcaactgccgaccccctgcgagccaggtcaataagcgccgtgaagatcattcctgtcaagaccgtaaagaatgcaagcggcctagttctgcccaccgacatggacttaacaaagatatgcacgggaaagggcgctgtgaccttgcgcgcttctagtagctaccgggagacaccctcaagtagtcccgcatctcctcaggagacgagacagcatgaatcaaaaccgggcctggagccagaacctagcagcgccgacgagtggagactgtcatcttctgctgatgctaatggcaatgcgcaaccatcaagccttgccgcaaaaggatataggagtgttcaccctaacttaccttctgataagtctcagagatggccccaccattcacaacccgctagagcttctggctcgtttgctcccatttcacaaaccccaccgtctttctctcctccaccaccgctggttccccccgcaccggaggacttgagaagagtgtccgaacccgatctcactggagctgtttctagtaccgattcatcccctctattgaacgaagtaagctcctccttaataggcacagactcccaggcgttcccatccgtgtcaaaaccttccagtgcctacccaagcaccaccatcgttaaccctacaattgtattgttgcagcataaccgggagcagcagaagagactgtccagtttgtccgaccctgttagcgaaagaagagtgggcgagcaggactccgccccaactcaggagaagccaacgtccccaggcaaggctatagaaaaaagggcaaaggacgacagtagacgtgtcgtaaagtcaacccaggatttaagtgacgttagcatggacgaagtcggaatcccactacgcaacaccgagcggtcgaaggactggtacaagacaatgtttaaacagattcacaaacttaacagggatgacgattcagacctgtactcacctaggtattcattttcagaggataccaagagccccctgtccgtgccccggagcaagagtgaaatgagttacatcgacggtgagaaggtcgtgaaacgcagtgctactttaccccttcccgcaagatcttcttccttaaagtccagttcggagagaaatgactgggaacctccggacaagaaagtggatacccgaaaatatcgggccgaaccgaaatctatctatgagtatcagcctggtaaatccagcgtgcttacaaacgaaaaaatgtcgcgggacatcagtcctgaagaaatcgatcttaagaacgaaccgtggtataaatttttcagcgaactggagtttgggaaaccaccccccaagaaaatatgggattacacccctggggattgctctatactcccaagggaggacagaaagtcctccgcaatcagccccactccggagattagttccgaaactcctggttacatctactcatccaactttcatgcggtgaagagggagagcgatggcgctccgggagacctcacctctctcgagaacgaaagacagatctataagtccgtactggagggcggcgatattcctctccaaggtctgagcggcctcaagcgccccagctcgagcgcctccacaaaagacagcgaatctccaaggcacttcatccccgcagactacttagaatctaccgaagaattcatccgcagacgacacgatgataaagagaaactgttggctgaccagcgacgcctgaagcgagagcaggaagaagcagatattgctgccagacggcacacaggagtgatacctacgcaccaccagtttataacaaacgagaggttcggcgatttattgaatatcgacgataccgcaaagagaaagtcaggatccgaaatgcgtccagctagggcaaagtttgacttcaaggctcagacactcaaagaactgcctctgcagaagggagatatagtttacatctacaagcagatcgatcagaattggtacgagggggagcatcatggaagagtcggcatctttccccgaacctatatcgaattactaccacccgccgaaaaagcacagcctaagaaacttactccagtccaggttttggagtacggggaagcgattgctaaattcaattttaacggggatactcaggtcgagatgtccttccgaaaaggtgagagaatcactctgctcaggcaggtagacgagaattggtacgaagggcggatccctggtacatcccgccagggaatatttccaatcacctacgttgatgtgatcaaacggcccttggtcaaaaatcctgtagactatatggatctgccttttagctcatccccatcccgctcagctacggccagtccccagttaagccatcacagcctccgcgcaggccctgatctaacagaaagtgaaaaatcatatgttcagccccaagcacaacaacgccgtgtcacacccgatagaagccagacaagccaggacctgttcagttaccaggctctgtattcctacattccgcaaaatgatgatgaactggagctccgggacggagatatcgtcgacgttatggagaagtgtgatgatggttggtttgttggcacttcgcggcgcactaaacagttcggcaccttccccggcaactacgtgaaacctttgtatctttag

SEQ ID NO: 30940 - DNA, 2718 bp, Artificial Sequence
  derived and/or modified sequence
atgagcagtgaatgtgatggcggcagcaaggctgtgatgaatggcctggcccctggcagcaatggccaggacaaggccacagctgaccccctgcgggcccggagcatctctgctgtgaagatcatccctgtgaagacagtgaagaatgccagcggcctggtgctgcccacagacatggacctgaccaagatctgcacaggaaaaggagctgtgaccctgcgggccagcagcagctaccgggagacccccagcagcagccctgccagcccccaggagacccggcagcacgagagcaagccaggcctggagcctgagcccagcagcgcagatgagtggaggctgagcagcagcgcagatgccaatggaaatgcccagcccagcagcctggccgccaagggctacagatctgtgcaccccaacctgcccagcgacaagagccagcgctggccccaccacagccagcctgcccgggccagcggcagctttgcccccatcagccagaccccacccagcttcagccccccaccacccctggtgcccccagcccctgaggacctgcggcgggtgtctgagccagacctgactggagctgtgagcagcacagacagcagccccctgctgaatgaggtgagcagcagcctgattggaacagacagccaggccttccccagcgtgtccaagcccagcagcgcctaccccagcaccaccatcgtgaaccccaccatcgtgctgctgcagcacaaccgggagcagcagaagaggctgagcagcctgagtgaccctgtgtctgaaagaagagtgggggagcaggacagcgcccccacccaggagaagcccaccagccctgggaaggccatcgagaagagggccaaggatgacagcagaagagtggtgaagagcacccaggacctgagtgatgtgtccatggatgaggtgggcatccccctgaggaacacagagaggagcaaggactggtacaagaccatgttcaagcagatccacaagctgaacagagatgatgacagcgacctgtacagcccccgctacagcttcagcgaggacaccaagagccccctgtctgtgcccaggagcaagtctgagatgagctacattgatggagagaaggtggtgaagaggtctgccaccctgcccctgcctgcccggagcagcagcctgaagagcagcagcgagagaaatgactgggagcccccagacaagaaggtggacaccaggaagtacagagctgagcccaagagcatctatgagtaccagcccgggaagagctctgtgctgaccaatgagaagatgagccgggacatcagccctgaggagattgacctgaagaatgagccctggtacaagttcttcagcgagctggagtttgggaagcccccacccaagaagatctgggactacacccctggggactgcagcatcctgccccgggaggacaggaagagcagcgccatcagccccaccccagagatcagcagcgagaccccaggctacatctacagcagcaacttccacgctgtgaagcgggagagtgatggagcccctggggacctgaccagcctggagaatgaaaggcagatctacaagtctgtgctggagggcggggacatccccctgcagggcctgagcggcctgaagaggcccagcagcagcgccagcaccaaggacagcgagagccccaggcacttcatcccagctgactacctggagagcacagaggagttcatcagaagaagacatgatgacaaggagaagctgctggccgaccagaggcggctgaagcgggagcaggaggaggccgacattgctgcccggcggcacactggagtcatccccacccaccaccagttcatcaccaatgaaagatttggagacctgctgaacattgatgacacagccaagaggaagagcggcagcgagatgaggcctgcccgggccaagtttgacttcaaggcccagaccctgaaggagctgcccctgcagaagggggacatcgtgtacatctacaagcagattgaccagaactggtatgaaggagagcaccacggccgggtgggcatcttccccaggacctacatcgagctgctgcccccagctgagaaggcccagcccaagaagctgacccctgtgcaggtgctggagtatggagaggccatcgccaagttcaacttcaacggggacacccaggtggagatgtccttcagaaaaggagagcgcatcaccctgctgcggcaggtggatgagaactggtatgagggccgcatccctggcaccagccggcagggcatcttccccatcacctacgtggatgtgatcaagaggcccctggtgaagaaccctgtggactacatggacctgcccttcagcagcagccccagccgcagcgccacagccagcccccagctgagccaccacagcctgcgggccggccctgacctgacagaaagtgagaagagctatgtgcagccccaggcccagcagaggagagtgaccccagacaggagccagaccagccaggacctcttctcctaccaggccctgtacagctacatcccccagaatgatgatgagctggagctgagagatggagacatcgtggatgtgatggagaagtgtgatgatggctggtttgtgggcaccagcaggaggaccaagcagtttggcaccttccctggcaactacgtgaagcccctgtacctgtag

SEQ ID NO: 30941 - DNA, 2718 bp, Artificial Sequence
  derived and/or modified sequence
atgagcagcgagtgcgacggcggcagcaaggccgtgatgaacggcttagcgcctggctcgaacggacaggacaaggctaccgctgatccgctcagagccagaagcatctcagccgtgaaaattattcctgtcaagaccgtcaaaaatgcatcaggactggttttgcctacagacatggacctcacaaagatctgtacaggcaagggcgcagttaccctgcgcgctagctcgtcttacagagagaccccctctagtagccctgcatctccccaagaaactaggcaacacgagtccaagccaggcctagagcccgagccctcaagcgccgatgagtggcgcctatctagttctgcagacgccaacggtaacgctcagccaagctcactggcagccaagggatatcgatccgtccaccccaacctgcccagcgacaagagtcaacgttggccacatcattcacaacccgccagagcttctggctcctttgcccccatctcccaaactccgccctcattcagtccccccccgcctcttgtgccccctgcccccgaagacctgagacgggtgagcgaacctgacttgaccggggccgtctctagtaccgactcttcgcctctgttaaacgaagtctcaagcagcctgattggtaccgactcccaggcttttccctcagtgtcaaaaccctcttccgcctacccttcaacgactatcgtcaaccctactatagtgctgctgcagcacaacagagaacagcagaagcggttgtcttctctgtccgacccagtgtctgagagaagggtgggtgaacaggattcagcgccgacacaagagaagcccacttcgcctgggaaagcaatcgagaaacgcgccaaagatgattccagacgcgtggttaagtcgactcaggatctttcggacgtgagcatggatgaagtgggaattcccctgagaaatacagagcgaagtaaagactggtataagacgatgtttaagcagattcacaaacttaatagggatgatgatagcgatctctatagcccccgttacagcttttcagaggacacaaaaagtccgctgtctgtgccccgtagcaaaagcgagatgagctacatcgacggcgagaaagtcgtgaaaaggtctgcaacattaccgctcccggcccggtccagctcactgaagtcatcctcggagaggaatgactgggagcccccagacaaaaaggtggatacgcggaaataccgagcggagccaaagagcatctacgagtaccagcccgggaaatccagcgttctgactaacgaaaaaatgtcaagggatatctcccctgaggaaattgacttaaagaatgagccatggtataaattcttcagtgagttagagttcggcaagcctccacccaaaaaaatttgggattacacccccggcgactgcagcatcctacctcgtgaagataggaaatccagcgcaatttcccccacaccggaaatctcttctgagaccccggggtatatttacagcagcaattttcatgctgtgaaaagggaaagcgatggcgcccccggggatctgacctccctggagaatgaaaggcagatatacaagagtgtcctggaggggggtgacatacccttgcagggactctcaggcctgaagaggcctagcagctcagcgtccaccaaggattccgaaagtccaagacatttcataccggctgattatctagagtcaacagaagagttcatccggcggcggcacgatgataaagaaaagttgctggccgaccagcgcagactcaagcgagaacaggaggaagcggatattgccgcgagaaggcacaccggagtgatcccaacgcatcaccaatttattacgaatgaacgctttggtgatttgttaaacatcgacgatacagccaagaggaaatcggggtctgagatgcggcctgccagagccaagtttgatttcaaggcgcagacactcaaggaactcccactgcagaagggggatattgtttacatttacaagcaaatagatcaaaattggtatgagggcgaacaccacgggcgcgttggcatttttccaagaacttatatcgagttgctaccacctgccgagaaagcgcagcctaaaaagctaactccagtgcaggtcctggaatatggggaggccatcgccaagttcaacttcaacggagacactcaggttgagatgtcatttcggaagggcgaacggatcaccctcctccgccaagtggacgagaattggtacgaaggaaggatccccggaacgtctcggcaggggatttttcccattacttatgtagatgttatcaagcgcccactggttaagaatccagtggactatatggacttacccttttcttcctcacctagcaggagcgccacggcttcacctcagctatctcaccattctcttagagccggacctgaccttaccgagagcgagaagagctacgtacagccccaggctcagcagagaagagtaacgccagatcggtcccagacgtctcaggatctgtttagctaccaagctctctatagctatatcccgcagaatgatgatgagctggaattaagggacggcgacatcgtggatgttatggagaagtgcgacgacggctggttcgtgggaacaagccggcggacgaaacagttcggtaccttcccaggtaactatgtgaagcccctctacctttag

SEQ ID NO: 30942 - DNA, 2718 bp, Artificial Sequence
  derived and/or modified sequence
atgagcagcgagtgcgacggcggcagcaaggccgtgatgaacggcttagccccaggttcaaacggtcaagataaggccacagcagatcctctgagggctcgctccatctcagcagtcaagattatacctgtgaaaaccgttaagaatgcatccgggttagtgctccctacagatatggacctgaccaagatttgcactggcaagggggctgtcacgctccgagcttcaagttcctatcgggaaactccaagcagcagcccagcatcccctcaggaaacccgccagcatgaatcaaaaccgggtctcgaacccgaacctagtagcgccgacgagtggcggttaagcagtagcgcagatgcaaacggcaatgcacagccctcttccctggccgctaagggttatcgcagcgttcatccaaatctgccttcggacaagtcgcagcggtggccgcaccattcccagcctgcccgagcctcgggtagctttgcaccaatctcgcaaacgccaccaagtttctctcctcctccccctttagtgccgccggccccagaggatctgcgacgagtgtccgagcctgatctcactggtgcagtgtcatccacagactcctctccccttctcaatgaggtctcttccagtctgatcggcacagactcccaagccttcccctcggtgtcaaaaccatcgtctgcctatcccagcaccaccattgtcaatcctacgattgtgctcctgcaacataaccgtgagcagcagaaaaggctctcgtctctgagtgacccggtgagtgagaggcgcgtcggcgaacaggactcagccccaactcaggaaaagccaacttcgcctggaaaggctatcgagaagcgggcaaaggacgacagcaggagggtcgtaaaatctacgcaggatctcagcgacgtgagcatggacgaggtcgggattcctctgaggaacacagaaaggagtaaggactggtataagaccatgttcaagcagatccataagctaaaccgggacgacgactccgacctttattctcccagatactctttctcagaggatactaaaagcccactgtccgtgcctcgaagtaagtcagagatgtcttacattgacggtgaaaaagtggtgaaaagatccgccactcttcccctaccggcccgctcttctagtcttaagtcatcgagcgagaggaacgattgggagcccccggataagaaagtggatacacgcaagtatagggctgagcctaagtctatatacgagtaccagcctggcaagtcatccgtactgacaaacgagaaaatgtctagggacataagcccagaggaaattgacctgaaaaatgagccctggtacaagttctttagtgagttggagtttggaaagccccctccaaagaagatatgggattacacgcccggtgactgttctattctgcccagggaagatcgaaagtcatcggcgataagtccaactcccgaaatcagttcagagactccaggctatatctatagctcaaatttccacgccgtcaagcgggaaagcgatggggcacccggggatctcacctccctagaaaatgagcgtcagatatacaaatccgtgctggaggggggggatatccctctccaggggctgtcgggcctcaagaggcccagcagttctgcctcgacaaaagactcagagtcaccccggcatttcatccctgcagactacctagaatctaccgaggagtttatccgacggcggcatgacgataaagaaaaactgctggcggatcagagaaggctcaaaagggaacaggaggaggccgacatcgctgcaagaaggcatactggggtgattccgacgcatcatcagttcataacaaatgaacgctttggggatttgctgaacattgacgatactgccaagcggaagagcggctccgagatgagacctgcaagagccaaattcgatttcaaggctcagaccctcaaagaacttcctctgcagaagggggacatcgtgtacatctacaaacagattgaccaaaactggtacgaaggggagcaccacggaagagtgggtatttttccccgaacctatatcgagctactgccacccgccgaaaaggcccagccgaagaaactgactccagtgcaggttcttgaatatggcgaggcaattgcgaaatttaacttcaacggcgatacccaagttgagatgagcttcagaaaaggagagaggatcaccttacttcgccaagtggatgaaaattggtacgaaggaagaatcccaggaacctctaggcaaggtatctttcccattacatatgttgatgtaattaagcggccactcgttaagaaccccgtagactacatggatttgccattcagtagtagccccagcagaagcgcgaccgcttctccgcagttgagtcatcactcgttaagagcaggtcctgacctcaccgagtcagaaaaatcctacgtgcaacctcaggcgcagcagcgccgagtgactcccgataggtcccagacaagccaagacctgtttagctaccaggcactgtactcatacatcccgcagaatgatgatgaactggagctgcgggacggtgacatcgttgatgtgatggaaaaatgtgatgatggctggtttgtgggtaccagtcggaggacgaaacagttcgggaccttcccaggtaattacgtgaaaccgttgtacctctag

SEQ ID NO: 30943 - DNA, 2718 bp, Artificial Sequence
  derived and/or modified sequence
atgagctccgagtgcgacggaggctccaaggccgttatgaatggactggcaccgggatctaatggccaggacaaggcaaccgccgatccgctgagggccagatcaatcagcgccgtgaaaatcataccggtcaagaccgtgaagaatgcctctgggttggtgctccctaccgatatggatttgactaaaatctgcactgggaaaggcgcagtgaccctcagggcatcttccagttaccgggaaaccccctctagtagccccgctagtccccaggagacccgtcagcacgagagcaaacctggcctagaacccgaaccctctagtgctgacgaatggagactgtcctcctctgccgatgccaacggaaatgcgcagccttcatcattagcagccaagggatacaggtcggtacatcccaatctcccaagcgataagtcccaacgatggcctcaccacagtcagcctgcgagggcctctgggtctttcgcgcctatctcccagactcccccttctttcagcccaccgcctccactggtgccccctgcacctgaggacctcagacgcgtatccgagcccgatctgaccggagcagtgtcatccactgattcctctcccctattgaacgaagtgtctagctccctcattggaacagactcccaggcttttccaagcgtaagtaagccatcgtcggcttaccccagcactacaatcgtaaacccaactatagtgctgctgcaacataatagggagcaacagaaacgtctgagctccctgtcagaccccgtgagtgaacgacgtgtcggcgagcaggacagtgccccaacccaggaaaaaccgacgtcaccaggtaaggccatcgaaaagagagcaaaggacgactctcgaagagttgtgaagagcacccaagaccttagcgacgtgagtatggacgaagttggcataccgctgcgtaataccgagaggtccaaagattggtacaaaacaatgtttaagcaaatccacaaattgaatcgcgatgatgattcggacctctacagtcccagatacagctttagcgaagatactaagtccccactctccgttcctcggtccaaatctgaaatgtcttatattgatggcgagaaagttgtcaaaaggtcagcaaccctgccccttcccgcaagaagttcctccttgaaaagctcctctgagcggaatgactgggagcctcctgacaaaaaggtcgatacccgcaagtatcgggctgagccaaaatcgatctacgagtatcagcctggcaaaagcagcgtgctgacgaatgaaaagatgagtcgtgacatctcacctgaagaaatcgacttgaagaatgaaccatggtacaagtttttttccgaactcgagttcggcaaaccaccgccaaagaaaatttgggactacacgccaggcgactgttctatactgccgagggaggatcgtaaaagctcggcgatctcgcctacaccggaaatctctagtgaaacccccggatatatctacagctcaaatttccatgccgtcaaacgcgaaagtgatggcgcacccggtgaccttacatcattagaaaacgagagacagatttataagtctgtgctggagggtggcgacattccactgcaaggcctatcaggactgaagcgcccttctagcagcgcatcaacaaaggattctgaaagtccacgtcatttcattcccgcagactaccttgagagtaccgaagaattcattaggcggaggcacgacgataaggagaagctgctggccgatcagcgcaggctgaaaagagagcaggaggaggccgatatagccgctaggaggcacaccggcgtcatacccacacatcatcagtttataacgaatgaaaggttcggcgatctgctcaacattgacgacacggccaaacgcaagtccggatcggaaatgcgtccagcaagggcgaagttcgacttcaaagcgcagactctcaaagaacttcccctccagaaaggggatatagtttacatctacaagcaaattgatcagaattggtacgagggcgagcatcatggcagagtcggcatctttcctcgcacttatattgagctcttacctcctgcagagaaagctcaacccaaaaagctaaccccagtgcaagtattggagtatggggaggccatcgccaagttcaattttaacggcgacacccaggttgagatgtccttccgcaagggggagaggattacactgttacggcaggtggatgagaactggtatgaaggcagaatcccaggaacttctaggcagggcattttcccaataacatacgtcgatgtgatcaagagacccttggtaaaaaaccctgtcgattacatggacctgcctttttccagcagcccctctcgatcggcaacagccagtccccagctgagccaccacagcctccgcgctggaccggacctgacggagtcagagaaatcctacgttcaaccccaggctcagcaacggagagtgacccctgaccgtagtcagaccagtcaggatctattctcataccaggcgctgtacagctatatcccacagaatgacgatgaacttgagttacgggatggcgatattgtggacgtcatggaaaaatgtgacgacggttggtttgtggggacgagtagaaggacaaagcaatttggaacattccctgggaattatgtcaaacctctctacctgtag

SEQ ID NO: 30944 - DNA, 2718 bp, Artificial Sequence
  derived and/or modified sequence
atgagttccgagtgcgacgggggaagcaaagccgtgatgaatggcttggcacctgggtcgaacgggcaagacaaagctacagcagatcctctcagagccagatctatttcagccgttaagattatccctgttaaaaccgttaaaaacgcctcgggccttgtcctccctactgatatggatctcactaaaatctgtacggggaaaggtgcggtgacactccgggcatcctcttcctaccgcgagacacctagctccagcccagcttccccccaggaaaccaggcagcacgaatcgaaaccgggtttggaacccgagccaagctcagccgatgaatggaggctgtcttctagcgccgacgctaacgggaacgcacagccctctagcctggccgctaagggctacagatcagtgcaccccaacctgcccagcgacaagtcccagcgatggccccaccactctcagccagccagggcctctgggagctttgctcccattagtcagacacccccaagtttttctccaccccctcccctggtgcctcccgcacctgaggatctgaggcgcgtgagtgaaccggatctcacgggggctgtgtcctctactgatagcagcccgctactgaatgaggtctccagctccttgatcggtaccgactcccaggctttcccctccgtatcgaagccatcctctgcttacccctctacaacaattgtcaaccccactatcgtgctgctccaacataatcgggagcaacagaaacgcctctcatccttgagtgaccccgtttctgaacgaagagttggcgaacaagactcagcccctactcaggagaaacctacctcaccaggcaaggctatcgaaaaacgtgccaaagacgactccaggagagtggttaagagcacacaggatctgtccgatgtctctatggacgaggtggggattcctctgcggaacactgaacgttctaaggattggtataagacaatgtttaagcagatccacaagctgaaccgtgacgatgattccgatctatactccccacggtactccttttcagaagacacaaagtcccctttatctgtacccaggagcaaatctgagatgtcctacatcgatggagaaaaggtagtcaagcgttctgcaaccttgccgttgcctgccagatcctccagcttgaagtcaagttccgagagaaacgactgggagccacctgataagaaggttgataccagaaagtacagggccgaacccaaaagcatctacgagtaccagcctggcaaaagctccgtcctcaccaatgaaaaaatgtccagagatatttcaccagaggagatcgacctgaaaaacgaaccttggtacaagttcttcagtgaactggagtttggcaaacccccacctaagaaaatctgggactatacacccggagactgctctatacttcctcgggaagaccgcaagtcaagcgccatatcaccgactcctgagatatcctctgagacccctggctacatatactcttccaatttccatgcggtcaagcgcgaatcagacggcgctccaggtgacctaactagcttagagaatgaacgacagatatacaagtcagtactggagggaggcgatatacctctccagggcctgtccggacttaagcggccttcaagtagtgcctctacaaaggattcagagagccctcgacactttattccggctgactatttggagtcgaccgaagaattcattagaagacgccatgatgacaaggaaaagttgctggctgatcagcgcagacttaagcgcgagcaggaagaggcagatattgctgctaggcggcataccggcgtaatacctactcaccatcaatttattacaaacgagaggttcggcgacctgctgaacatcgacgacacagcaaagagaaaaagcggaagcgaaatgaggccagccagagccaagtttgatttcaaagcccaaaccctgaaagaactacctctccaaaaaggcgatatcgtgtacatatacaaacagatcgatcagaattggtacgagggtgagcatcatggcagggtgggcatctttcctcggacctatatcgagctgctgcctcccgctgaaaaagctcagcctaaaaagcttacacccgtacaggtgctcgagtacggagaagcgattgcgaagtttaattttaatggggacacccaagtggaaatgtccttcagaaagggagagagaatcacattgctgaggcaggttgacgaaaactggtatgaggggaggattcccggaacttcaaggcaaggcattttccctatcacgtacgtggatgttattaagcggcctctcgtcaagaacccggtggactatatggatctgccttttagctcatcaccctcccgaagcgccacagccagcccacagctttctcatcacagcttaagggccggaccagatctgaccgagtctgagaaatcctacgtccagccccaggctcagcagcggcgagtcacccctgaccgctcccagacgagccaagacttattcagctaccaggcattatatagttatatcccacagaatgatgatgagcttgagctacgtgatggcgatattgtggatgtgatggagaaatgcgatgacgggtggttcgtgggaacttcgcggagaaccaaacaattcggtaccttcccaggcaactatgtgaaacccctgtatctgtag

SEQ ID NO: 30945 - DNA, 6193 bp, Artificial Sequence
  derived and/or modified sequence
gcagcgtgtagtgcgagtggggcggacgcgcgcagcccgcccgcccggcgaccagcaaggagttggcatcctttggaagagttcgtgaaagctttctgcccagagctcctggaccaatgcatcttcccaccaccttaaaccactgagcagttcagagccccagttgcagacgacttgtcctgccaccaccatgagttctgaatgtgatggtggttccaaagctgtgatgaatggcttggcacctggcagcaatgggcaagacaaagcaactgccgaccctttacgcgcacgctctatttctgctgttaaaatcattcctgtgaagacagtgaaaaacgcctcaggcctagttctccctacagacatggatcttacaaaaatctgcactgggaagggagcggtgactctccgggcctcgtcttcctacagggaaaccccaagcagtagccctgcgagccctcaggaaacccggcaacacgaaagcaaaccaggtctggagccagagccttcttcagcagatgagtggaggctttcttccagtgctgatgccaatggaaatgcccagccctcttcactcgctgccaagggctacagaagtgtgcatcccaaccttccttctgacaagtcccagaggtggccccaccacagccagccagcccgcgcctctggctcctttgcccccattagccagacgccaccatccttctcaccaccacctccgctggtccctcctgccccggaggacctccgcagagtctcggagcctgacctcacgggagctgtttcgagtaccgattccagtcctctactaaatgaagtttcttcttcccttattggaactgattcccaagcctttccatcagttagcaagccttcatccgcctatccctccacaacgattgtcaatcctactattgtgctcttgcaacacaatcgagaacagcaaaaacgactcagtagcctttcagatcctgtctcagaaagaagagtgggagagcaggactcagcaccaacccaggaaaaacccacctcacctggcaaggctattgaaaaaagagcaaaggatgacagtaggcgggtggtgaagagcactcaggacttaagcgatgtttccatggatgaagtgggcatcccactccggaacactgagagatcaaaagactggtacaagactatgtttaaacagatccacaaactgaacagagatgatgattcagatctgtactctcccagatactcattttctgaagacacaaaatctcccctttctgtgcctcgctcaaaaagtgagatgagctacattgatggtgagaaggtagtcaagaggtcggccacactacccctcccagcccgctcttcctcactgaagtcaagctcagaaagaaatgactgggaacccccagataagaaagtagacacaagaaaatatcgtgcagagcccaagagcatttacgaatatcagcctggcaagtcttccgttctgaccaacgaaaagatgagtcgggatataagcccagaagagatagatttaaagaatgaaccttggtataaattcttttcggaattggagtttgggaaaccgcctcccaaaaagatatgggattatactcctggagactgctctatccttcctagagaggatagaaagagctcagccatcagccctactccggaaatttcttcagagactcctggatatatatattcttccaacttccatgcagtgaagagggaatcagacggggctcctggggatctcactagcttggagaatgagagacaaatttataaaagtgtcttggaaggtggtgacatccctcttcagggcctgagtgggctcaagcgaccatccagctctgcttccactaaagattcagaatcgccaagacattttataccagctgattacttggaatccacggaagaatttattcgaagacgtcatgatgataaagagaaacttttagcggaccagagacgacttaaacgcgagcaagaagaggctgatattgcagctcgacgccacacaggcgtcattccgacgcaccatcagtttatcactaatgagcgctttggggacctcctcaatatagacgatactgcaaaaaggaaatctgggtcagagatgagacctgccagagccaaatttgactttaaagctcagacactaaaggagcttcctctgcagaagggagatattgtttacatttataagcaaattgatcagaactggtatgaaggagaacaccacggccgggtgggaatcttcccacgcacctacatcgagcttcttcctcctgctgagaaggcacagcccaaaaagttgacaccagtgcaggttttggaatatggagaagctattgctaagtttaactttaatggtgatacacaagtagaaatgtccttcagaaagggtgagaggatcacactgctccggcaggtagatgagaactggtacgaagggaggatcccggggacatcccgacaaggcatcttccccatcacctacgtggatgtgatcaagcgaccactggtgaaaaaccctgtggattacatggacctgcctttctcctcctccccaagtcgcagtgccactgcaagcccacagctttctcatcattcattgagagcaggaccagatctcacagaatctgaaaagagctatgtgcaacctcaagcccagcagcgaagagtcacccccgacaggagtcaaacctcacaagatttatttagctatcaagcattatatagctatataccacagaatgatgatgagttggaactccgcgatggagatatcgttgatgtcatggaaaaatgtgacgatggatggtttgttggtacttcaagaaggacaaagcagtttggtacttttccaggcaactatgtaaaacctttgtatctataagaagactgaaaaccatggagattatttttattggaggaggaagcatcattcatgaaccgatctttttagttgagtcagtaggaaaattaatacagtggataaagtaagaagcaaaagacagggacagagaagtgttgtgtttaaaacccaagcctgtctaaggttactgtgtattagacagggccgaactagtgtgctgagcaaaaagaattgaagcaaattgtatttacttagccgcttctgggagccacttcagcctttcccctcccctccacttcttgggtaatctgacctgaagcatagtccaggagcagagttagccagaaatgcctcctgctgccccagccttagagagctcccatctcaatcattgagcctgaaggcttcaagcccaagaatgcaacaagacccccagcctacatttctcagctcccctggagccagctgatcctgtaacgctgctggaggtcagtctgagctaccaagactgtccctagacaaaggtggagtcccccacactgcccaagaccaaatccctcactcaacctgctgaggtgtggatggggaaacagaggcaaaactgaggcacctgatgcattcagcctgctgtgcagcagtgccattgactgccctgatgttcagagagaaacgcacacaaggtttgcccatgagaattggggagcagatggccaagcagataggttatgtctgttttctgagtgatgaagtcaggaagccctgtggctctggaggccacttgtggttcattcttttcccatatccttggcttttagaaatggttaccttcaggacagtgcagctgcatttatcagagcactattgctaagttttcttttctggcttgtgtttttctgggacagtttagaattgggaggcctattctcatagaacaccaaaaatgatgttcagtgattcatttaacatacaccaatgtactctggctgctggggggacaaccataagcaagacatgcccagggtttgccgtggctccagatctactccctgtaggagttcaaggatcacacaaacggtagtaaccagggttgtgaatctgagtacaccctggcaaggcttctcttcagactgaagcagcaattctgccactaccagcagcaaccaggacgtctgttctttgtgggggccagatcagaagagagaggcccctgtgacgcccgggctgcttggtcacaactctgtccaattcaaggatgtttatcggcctctcttagatcctgagtgagacaaatacagaaatgacccattccctgcccaccagaaactcagaggtgattggggagactgacacaggaaaatgaacttaatcaagagagactgtgatatgtgctaagaagggtgtgagggagggagagatgaattttccctggagggatcctagaaagcattgtcatattgccatctccattagctcacttttaaacaactagggtgctggaagaacctttgtctgagggtagttcatagctggaaatacttggaatattttccagagtctctaaactctcatcttcccccacagatacacatccaagctcacaaataggagtagcaattctaggtggtagggttgtgtacggaacccctggctgtctgcatatatctcagaattaccccaggaccattgtcccaaagtctagagtctttacaggtaggcaaaatttgttttcaatgcctgtgcctcagctgctgtcacaaatacccatcttaggatcccatcagcttcccatcccccaccagacagccacagtaccctcactttctccctattgttctttcaaatcctgttctcaggaaagaaactgccactaattcattcacactaaggtgtaaatgattgataataggaatgagttacctcttcccacagacatttgtttttaagtatgacagagcagggccttaatcccaagggaaaaggttatggaactggagggggtgagctttctgggtagaaggagacttcctgaatttccttaaaacccagtaagagtaagacctgttgttttggaaggtctgctccaccatctaagagcactgtttttttttttttgttgttgttgttgttttacggtctctgagggaatatagtaaaaatgcatatgcacgtgcaatttgcacggcagcatttcaccgattgtggactgtattggctaatgtgtttcctggtctttagatgcaaaccattaataacactatcttatctcatagttttttcaggggtgcttcttgattagtagggaattttgaacacctctttaaatacagctagaaaataaaaccaatttgtaaagccacatttgcatatgatgccagcctcacgcatttgtatatctccagaaattcaggtatgcctcaccaatttgcccgtctttaataaaatcttgtgttaaaatttgcatcacgtcgccttcctatgtatgacgaaacaagaaacagagatttccaattgctcttttgtcttcagacatttagtaatataaagtacctatttttatgctgaaatgtttatacaggtttattaatagcaagtgcaactaactggcggcatgccttgcaacacattttgatatattagccatgcttccgggtaaaggcaagccccaaactccttatcttttgcagtctctctgggatcagtaaaagaaaaaaaaaataatgtgcttaagaagtgggactgtaaatatgtatatttaactttgtatagcccatgtacctaccttgtatagaaaaataattttaaaaatttgaatggaagggggtaaaggaagtcatgaagtttttttgcatttttatttaaatgaaggaattccaaataactcacctacagatttttagcacaaaaatagccattgtaaagtgttaaaatttacgataagtattctattggggaggaaaggtaactctgatctcagttacagtttttttttcctttttaatttcattattttgggtttttggtttttgcagtcctatttatctgcagtcgtattaagtcctattgctagaataggttactacaaaaaaggttatattctgaaagaaaaataactgacattatatataaccaattaatttaaagtattgccatttaaattacacactgagagcatgtcctatgcagacatagatttttctgttcatttatttttcttcattgcagtggattgatttgataaatagatgtgttgaattactacatttgctgtacatattatttaataaactttattcagaattgcgtggc

SEQ ID NO: 30946 - DNA, 6033 bp, Artificial Sequence
  derived and/or modified sequence
ttgcagacgacttgtcctgccaccaccatgagttctgaatgtgatggtggttccaaagctgtgatgaatggcttggcacctggcagcaatgggcaagacaaagcaactgccgaccctttacgcgcacgctctatttctgctgttaaaatcattcctgtgaagacagtgaaaaacgcctcaggcctagttctccctacagacatggatcttacaaaaatctgcactgggaagggagcggtgactctccgggcctcgtcttcctacagggaaaccccaagcagtagccctgcgagccctcaggaaacccggcaacacgaaagcaaaccaggtctggagccagagccttcttcagcagatgagtggaggctttcttccagtgctgatgccaatggaaatgcccagccctcttcactcgctgccaagggctacagaagtgtgcatcccaaccttccttctgacaagtcccagaggtggccccaccacagccagccagcccgcgcctctggctcctttgcccccattagccagacgccaccatccttctcaccaccacctccgctggtccctcctgccccggaggacctccgcagagtctcggagcctgacctcacgggagctgtttcgagtaccgattccagtcctctactaaatgaagtttcttcttcccttattggaactgattcccaagcctttccatcagttagcaagccttcatccgcctatccctccacaacgattgtcaatcctactattgtgctcttgcaacacaatcgagaacagcaaaaacgactcagtagcctttcagatcctgtctcagaaagaagagtgggagagcaggactcagcaccaacccaggaaaaacccacctcacctggcaaggctattgaaaaaagagcaaaggatgacagtaggcgggtggtgaagagcactcaggacttaagcgatgtttccatggatgaagtgggcatcccactccggaacactgagagatcaaaagactggtacaagactatgtttaaacagatccacaaactgaacagagatgatgattcagatctgtactctcccagatactcattttctgaagacacaaaatctcccctttctgtgcctcgctcaaaaagtgagatgagctacattgatggtgagaaggtagtcaagaggtcggccacactacccctcccagcccgctcttcctcactgaagtcaagctcagaaagaaatgactgggaacccccagataagaaagtagacacaagaaaatatcgtgcagagcccaagagcatttacgaatatcagcctggcaagtcttccgttctgaccaacgaaaagatgagtcgggatataagcccagaagagatagatttaaagaatgaaccttggtataaattcttttcggaattggagtttgggaaaccgcctcccaaaaagatatgggattatactcctggagactgctctatccttcctagagaggatagaaagagctcagccatcagccctactccggaaatttcttcagagactcctggatatatatattcttccaacttccatgcagtgaagagggaatcagacggggctcctggggatctcactagcttggagaatgagagacaaatttataaaagtgtcttggaaggtggtgacatccctcttcagggcctgagtgggctcaagcgaccatccagctctgcttccactaaagattcagaatcgccaagacattttataccagctgattacttggaatccacggaagaatttattcgaagacgtcatgatgataaagagaaacttttagcggaccagagacgacttaaacgcgagcaagaagaggctgatattgcagctcgacgccacacaggcgtcattccgacgcaccatcagtttatcactaatgagcgctttggggacctcctcaatatagacgatactgcaaaaaggaaatctgggtcagagatgagacctgccagagccaaatttgactttaaagctcagacactaaaggagcttcctctgcagaagggagatattgtttacatttataagcaaattgatcagaactggtatgaaggagaacaccacggccgggtgggaatcttcccacgcacctacatcgagcttcttcctcctgctgagaaggcacagcccaaaaagttgacaccagtgcaggttttggaatatggagaagctattgctaagtttaactttaatggtgatacacaagtagaaatgtccttcagaaagggtgagaggatcacactgctccggcaggtagatgagaactggtacgaagggaggatcccggggacatcccgacaaggcatcttccccatcacctacgtggatgtgatcaagcgaccactggtgaaaaaccctgtggattacatggacctgcctttctcctcctccccaagtcgcagtgccactgcaagcccacagctttctcatcattcattgagagcaggaccagatctcacagaatctgaaaagagctatgtgcaacctcaagcccagcagcgaagagtcacccccgacaggagtcaaacctcacaagatttatttagctatcaagcattatatagctatataccacagaatgatgatgagttggaactccgcgatggagatatcgttgatgtcatggaaaaatgtgacgatggatggtttgttggtacttcaagaaggacaaagcagtttggtacttttccaggcaactatgtaaaacctttgtatctataagaagactgaaaaccatggagattatttttattggaggaggaagcatcattcatgaaccgatctttttagttgagtcagtaggaaaattaatacagtggataaagtaagaagcaaaagacagggacagagaagtgttgtgtttaaaacccaagcctgtctaaggttactgtgtattagacagggccgaactagtgtgctgagcaaaaagaattgaagcaaattgtatttacttagccgcttctgggagccacttcagcctttcccctcccctccacttcttgggtaatctgacctgaagcatagtccaggagcagagttagccagaaatgcctcctgctgccccagccttagagagctcccatctcaatcattgagcctgaaggcttcaagcccaagaatgcaacaagacccccagcctacatttctcagctcccctggagccagctgatcctgtaacgctgctggaggtcagtctgagctaccaagactgtccctagacaaaggtggagtcccccacactgcccaagaccaaatccctcactcaacctgctgaggtgtggatggggaaacagaggcaaaactgaggcacctgatgcattcagcctgctgtgcagcagtgccattgactgccctgatgttcagagagaaacgcacacaaggtttgcccatgagaattggggagcagatggccaagcagataggttatgtctgttttctgagtgatgaagtcaggaagccctgtggctctggaggccacttgtggttcattcttttcccatatccttggcttttagaaatggttaccttcaggacagtgcagctgcatttatcagagcactattgctaagttttcttttctggcttgtgtttttctgggacagtttagaattgggaggcctattctcatagaacaccaaaaatgatgttcagtgattcatttaacatacaccaatgtactctggctgctggggggacaaccataagcaagacatgcccagggtttgccgtggctccagatctactccctgtaggagttcaaggatcacacaaacggtagtaaccagggttgtgaatctgagtacaccctggcaaggcttctcttcagactgaagcagcaattctgccactaccagcagcaaccaggacgtctgttctttgtgggggccagatcagaagagagaggcccctgtgacgcccgggctgcttggtcacaactctgtccaattcaaggatgtttatcggcctctcttagatcctgagtgagacaaatacagaaatgacccattccctgcccaccagaaactcagaggtgattggggagactgacacaggaaaatgaacttaatcaagagagactgtgatatgtgctaagaagggtgtgagggagggagagatgaattttccctggagggatcctagaaagcattgtcatattgccatctccattagctcacttttaaacaactagggtgctggaagaacctttgtctgagggtagttcatagctggaaatacttggaatattttccagagtctctaaactctcatcttcccccacagatacacatccaagctcacaaataggagtagcaattctaggtggtagggttgtgtacggaacccctggctgtctgcatatatctcagaattaccccaggaccattgtcccaaagtctagagtctttacaggtaggcaaaatttgttttcaatgcctgtgcctcagctgctgtcacaaatacccatcttaggatcccatcagcttcccatcccccaccagacagccacagtaccctcactttctccctattgttctttcaaatcctgttctcaggaaagaaactgccactaattcattcacactaaggtgtaaatgattgataataggaatgagttacctcttcccacagacatttgtttttaagtatgacagagcagggccttaatcccaagggaaaaggttatggaactggagggggtgagctttctgggtagaaggagacttcctgaatttccttaaaacccagtaagagtaagacctgttgttttggaaggtctgctccaccatctaagagcactgtttttttttttttgttgttgttgttgttttacggtctctgagggaatatagtaaaaatgcatatgcacgtgcaatttgcacggcagcatttcaccgattgtggactgtattggctaatgtgtttcctggtctttagatgcaaaccattaataacactatcttatctcatagttttttcaggggtgcttcttgattagtagggaattttgaacacctctttaaatacagctagaaaataaaaccaatttgtaaagccacatttgcatatgatgccagcctcacgcatttgtatatctccagaaattcaggtatgcctcaccaatttgcccgtctttaataaaatcttgtgttaaaatttgcatcacgtcgccttcctatgtatgacgaaacaagaaacagagatttccaattgctcttttgtcttcagacatttagtaatataaagtacctatttttatgctgaaatgtttatacaggtttattaatagcaagtgcaactaactggcggcatgccttgcaacacattttgatatattagccatgcttccgggtaaaggcaagccccaaactccttatcttttgcagtctctctgggatcagtaaaagaaaaaaaaaataatgtgcttaagaagtgggactgtaaatatgtatatttaactttgtatagcccatgtacctaccttgtatagaaaaataattttaaaaatttgaatggaagggggtaaaggaagtcatgaagtttttttgcatttttatttaaatgaaggaattccaaataactcacctacagatttttagcacaaaaatagccattgtaaagtgttaaaatttacgataagtattctattggggaggaaaggtaactctgatctcagttacagtttttttttcctttttaatttcattattttgggtttttggtttttgcagtcctatttatctgcagtcgtattaagtcctattgctagaataggttactacaaaaaaggttatattctgaaagaaaaataactgacattatatataaccaattaatttaaagtattgccatttaaattacacactgagagcatgtcctatgcagacatagatttttctgttcatttatttttcttcattgcagtggattgatttgataaatagatgtgttgaattactacatttgctgtacatattatttaataaactttattcagaattgcgtggcata

SEQ ID NO: 30947 - protein, 215 aa, Artificial Sequence [sequence omitted]

SEQ ID NO: 30948 - protein, 128 aa, Artificial Sequence [sequence omitted]

SEQ ID NO: 30949 - DNA, 648 bp, Artificial Sequence
  derived and/or modified sequence
atggtgttcagaagattcgtggaggtgggcagagtggcctacgtgagcttcggcccccacgccggcaagctggtggccatcgtggacgtgatcgaccagaacagagccctggtggacggcccctgcacccaggtgagaagacaggccatgcccttcaagtgcatgcagctgaccgacttcatcctgaagttcccccacagcgcccaccagaagtacgtgagacaggcctggcagaaggccgacatcaacaccaagtgggccgccaccagatgggccaagaagatcgaggccagagagagaaaggccaagatgaccgacttcgacagattcaaggtgatgaaggccaagaagatgagaaacagaatcatcaagaacgaggtgaagaagctgcagaaggccgccctgctgaaggccagccccaagaaggcccccggcaccaagggcaccgccgccgccgccgccgccgccgccgccgccaaggtgcccgccaagaagatcaccgccgccagcaagaaggcccccgcccagaaggtgcccgcccagaaggccaccggccagaaggccgcccccgcccccaaggcccagaagggccagaaggcccccgcccagaaggcccccgcccccaaggccagcggcaagaaggcctag

SEQ ID NO: 30950 - DNA, 855 bp, Artificial Sequence
  derived and/or modified sequence
ggcggtgcgttcttctacacatgcgcagggttgggcgggtcttcttccttctcgcctaacgccgccaacatggtgttcaggcgcttcgtggaggttggccgggtggcctatgtctcctttggacctcatgccggaaaattggtcgcgattgtagatgttattgatcagaacagggctttggtcgatggaccttgcactcaagtgaggagacaggccatgcctttcaagtgcatgcagctcactgatttcatcctcaagtttccgcacagtgcccaccagaagtatgtccgacaagcctggcagaaggcagacatcaatacaaaatgggcagccacacgatgggccaagaagattgaagccagagaaaggaaagccaagatgacagattttgatcgttttaaagttatgaaggcaaagaaaatgaggaacagaataatcaagaatgaagttaagaagcttcaaaaggcagctctcctgaaagcttctcccaaaaaagcacctggtactaagggtactgctgctgctgctgctgctgctgctgctgctaaagttccagcaaaaaagatcaccgccgcgagtaaaaaggctccagcccagaaggttcctgcccagaaagccacaggccagaaagcagcgcctgctccaaaagctcagaagggtcaaaaagctccagcccagaaagcacctgctccaaaggcatctggcaagaaagcataagtggcaatcataaaaagtaataaaggttctttttgacctgttgacaaatgtatttaagcctttggatttaaagcctgttgaggctggagttaggaggcagattgatagtaggattataataaacattaaataatcagt

SEQ ID NO: 30951 - DNA, 387 bp, Artificial Sequence
  derived and/or modified sequence
atggtgttcagaagattcgtggaggtgggcagagtggcctacgtgagcttcggcccccacgccggcaagctggtggccatcgtggacgtgatcgaccagaacagagccctggtggacggcccctgcacccaggtgagaagacaggccatgcccttcaagtgcatgcagctgaccgacttcatcctgaagttcccccacagcgcccaccagaagtacgtgagacaggcctggcagaaggccgacatcaacaccaagtgggccgccaccagatgggccaagaagatcgaggccagagagagaaaggccaagatgaccgacttcgacagattcaaggtgatgaaggccaagaagatgagaaacagaatcatcaagaacgacaccagatag

SEQ ID NO: 30952 - DNA, 648 bp, Artificial Sequence
  derived and/or modified sequence
atggtcttcagaaggtttgtggaggtgggcagggttgcctacgtgtccttcggtccccacgctggtaagctggtggctatcgtggacgtgattgatcagaaccgcgcactcgtcgacgggccttgcacccaggttaggcggcaggctatgccatttaaatgcatgcagttaacagatttcatccttaagttcccccacagcgcccaccaaaaatacgtcaggcaagcctggcagaaagccgatattaacacaaaatgggcggccacccgctgggccaagaagattgaggctagggaaaggaaagctaaaatgacagatttcgatcggtttaaagttatgaaagctaagaagatgagaaatcgcatcatcaagaacgaggtgaagaagcttcaaaaggccgccctgctgaaggcgtcccccaagaaggcaccaggaaccaaaggaaccgccgccgcagccgctgccgcggctgctgctaaagtcccagccaagaagattacagcagctagcaagaaggcacctgcccaaaaggtgccagctcagaaggccacgggacagaaggccgctccagctccgaaggctcagaaaggtcagaaggctccagctcaaaaagcacctgcaccgaaagcctccggaaagaaagcttag

SEQ ID NO: 30953 - DNA, 648 bp, Artificial Sequence
  derived and/or modified sequence
atggtctttcgacgcttcgtggaagtgggacgggtggcgtacgtgagcttcggacctcacgccgggaagcttgtcgccatcgttgacgtaattgaccaaaaccgcgctctcgtcgacgggccctgcactcaggttcgacgtcaagcaatgccatttaaatgcatgcagctgacagatttcatcttaaagtttccacattccgcacatcagaaatacgtccgccaggcgtggcagaaagctgatatcaataccaaatgggccgcgacaagatgggctaaaaagattgaggcccgcgagagaaaggccaagatgaccgatttcgaccgttttaaggtcatgaaggccaagaaaatgcgcaacaggattattaaaaatgaggtgaaaaagctgcagaaagccgccctactcaaggccagtccaaaaaaggcacccggaaccaaggggacagctgccgccgccgctgccgccgctgctgcaaaagttcccgccaagaaaataactgccgcaagcaaaaaggctcccgctcagaaggtgccggctcagaaagctacggggcagaaggccgcacccgcaccaaaggcgcagaagggacagaaagccccagcacagaaagcaccagctcccaaagctagtggaaaaaaggcatag

SEQ ID NO: 30954 - DNA, 387 bp, Artificial Sequence
  derived and/or modified sequence
atggtgttccggaggttcgtggaggtggggcgtgtggcctacgtctctttcggccctcatgcagggaagctggtggccatagtggatgtgatcgaccaaaatcgcgctctggttgacgggccttgtacacaagtccgccgccaggcaatgccatttaagtgtatgcagctgactgactttatcctcaaattcccgcattcagcccaccagaaatacgtgcggcaggcctggcagaaggccgatattaacaccaaatgggctgcaactagatgggccaagaagatagaggcaagggaacggaaggctaaaatgaccgacttcgatcggtttaaggtcatgaaagcaaagaagatgcgaaaccggattatcaagaatgacacccgatag

SEQ ID NO: 30955 - DNA, 648 bp, Artificial Sequence
  derived and/or modified sequence
atggtgttccgccgctttgtggaggtgggccgggtggcctacgtgtcctttggcccccatgctgggaagctggtggccatcgtggatgtgattgaccagaacagagccctggtggatggcccctgcacccaggtgcggcggcaggccatgcccttcaagtgcatgcagctgacagacttcatcctgaagttcccccacagcgcccaccagaagtatgtgcggcaggcctggcagaaggctgacatcaacaccaagtgggccgccacccgctgggccaagaagattgaggcccgggagaggaaggccaagatgacagactttgaccgcttcaaggtgatgaaggccaagaagatgaggaaccgcatcatcaagaatgaggtgaagaagctgcagaaggccgccctgctgaaggccagccccaagaaggcccctggcaccaagggcacagctgctgctgctgctgctgctgctgctgccaaggtgcctgccaagaagatcacagctgccagcaagaaggccccagcccagaaggtgcctgcccagaaggccaccggccagaaggccgccccagcccccaaggcccagaagggccagaaggccccagcccagaaggccccagcccccaaggccagcggcaagaaggcctag

SEQ ID NO: 30956 - DNA, 387 bp, Artificial Sequence
  derived and/or modified sequence
atggtgttccgccgctttgtggaggtgggccgggtggcctacgtgtcctttggcccccatgctgggaagctggtggccatcgtggatgtgattgaccagaacagagccctggtggatggcccctgcacccaggtgcggcggcaggccatgcccttcaagtgcatgcagctgacagacttcatcctgaagttcccccacagcgcccaccagaagtatgtgcggcaggcctggcagaaggctgacatcaacaccaagtgggccgccacccgctgggccaagaagattgaggcccgggagaggaaggccaagatgacagactttgaccgcttcaaggtgatgaaggccaagaagatgaggaaccgcatcatcaagaatgacaccaggtag

SEQ ID NO: 30957 - DNA, 648 bp, Artificial Sequence
  derived and/or modified sequence
atggtgttccggcggttcgtggaggtgggccgggtggcctacgtgagtttcggacctcacgctggcaagctggtggctattgtcgatgtgatagatcagaaccgagccctggtggatgggccatgcacgcaagtgcgtcgccaggccatgccttttaagtgcatgcagctgaccgactttatcttgaagttcccccattcagcccaccaaaagtacgtccggcaggcctggcagaaagctgatatcaacacaaagtgggcagcgacacgttgggccaaaaagattgaagctcgtgagaggaaagcaaaaatgaccgacttcgataggttcaaggtaatgaaggccaagaagatgcgcaaccgtataatcaagaacgaagtgaaaaaactgcagaaggccgcactcctgaaggcatctccaaagaaggcccccggcacaaaagggaccgctgccgccgccgcagccgctgcagccgcgaaggtcccagctaaaaaaatcaccgcagcatcaaagaaggcacccgctcagaaggtacccgcacaaaaggcaactgggcagaaggccgcccccgcacctaaagcgcagaagggccagaaggccccagcacaaaaagccccagcccccaaggcaagcggcaaaaaggcatag

SEQ ID NO: 30958 - DNA, 916 bp, Artificial Sequence
  derived and/or modified sequence
ttctcgcctaacgccgccaacatggtgagtcttactgttgcgggctccggggccgtcgaccatgccgctcgacctccacctccgctgggaagctgaggcgccaaacggctcccagagggtcccgggaagcgcatggtgttcaggcgcttcgtggaggttggccgggtggcctatgtctcctttggacctcatgccggaaaattggtcgcgattgtagatgttattgatcagaacagggctttggtcgatggaccttgcactcaagtgaggagacaggccatgcctttcaagtgcatgcagctcactgatttcatcctcaagtttccgcacagtgcccaccagaagtatgtccgacaagcctggcagaaggcagacatcaatacaaaatgggcagccacacgatgggccaagaagattgaagccagagaaaggaaagccaagatgacagattttgatcgttttaaagttatgaaggcaaagaaaatgaggaacagaataatcaagaatgaagttaagaagcttcaaaaggcagctctcctgaaagcttctcccaaaaaagcacctggtactaagggtactgctgctgctgctgctgctgctgctgctgctaaagttccagcaaaaaagatcaccgccgcgagtaaaaaggctccagcccagaaggttcctgcccagaaagccacaggccagaaagcagcgcctgctccaaaagctcagaagggtcaaaaagctccagcccagaaagcacctgctccaaaggcatctggcaagaaagcataagtggcaatcataaaaagtaataaaggttctttttgacctgttgacaaatgtatttaagcctttggatttaaagcctgttgaggctggagttaggaggcagattgatagtaggattataataaacattaaataatca

SEQ ID NO: 30959 - DNA, 648 bp, Artificial Sequence
  derived and/or modified sequence
atggtgttccggcggttcgtggaggtgggccgggtggcctacgtgagtttcggtcctcacgctggcaaacttgttgccatcgtagatgtaatagaccagaatagagctctggttgacgggccctgtacgcaggtgcgcagacaggccatgccgtttaagtgcatgcaactaactgactttatcctgaaattcccacattccgcacatcagaaatatgtgcgccaggcctggcagaaagctgatatcaataccaagtgggcggctacccgttgggcaaaaaagattgaagcccgggagagaaaagccaagatgaccgatttcgatcggttcaaagttatgaaggctaagaagatgcgaaataggatcatcaagaatgaggtgaagaagttacagaaagcagccctccttaaggcaagcccaaaaaaggcccccggcactaaaggtactgccgccgctgcggccgctgctgctgcagctaaggtgccagcaaaaaagatcactgccgcatccaaaaaagctcctgctcagaaggtccccgcccaaaaggctacaggccagaaagctgccccagcacccaaagctcagaaaggccaaaaggctccggcccagaaggcccccgccccaaaagcgagcggtaagaaggcatag

SEQ ID NO: 30960 - DNA, 387 bp, Artificial Sequence
  derived and/or modified sequence
atggtgttccggcggttcgtggaggtgggccgggtggcctacgtgagctttggtcctcacgccggaaaactcgtggctatagttgatgtgatagatcagaatcgagcgcttgtcgacggaccctgcactcaagtacgacgccaagccatgccttttaaatgcatgcagctcacagactttattttaaagtttcctcatagcgcccaccagaaatatgtgcgccaggcttggcagaaggccgatattaacacaaaatgggcggccacccggtgggccaagaaaatcgaggcacgcgagcgaaaggccaagatgaccgacttcgacagattcaaggtaatgaaggctaagaagatgagaaaccggattatcaaaaatgataccaggtag

SEQ ID NO: 30961 - DNA, 648 bp, Artificial Sequence
  derived and/or modified sequence
atggttttccggaggtttgttgaagtcgggagagtcgcctacgttagtttcggaccacatgcgggaaaactggtggccatcgtggatgttatcgaccaaaatagggccctcgtcgatgggccttgcacccaggttcgacggcaggccatgccttttaaatgtatgcagttgactgattttatcttgaagttcccacacagcgcccatcagaaatatgtcagacaggcctggcaaaaagcggatatcaacacaaagtgggctgccacgagatgggccaagaagattgaagctcgggagcgtaaggcgaagatgacagattttgacaggttcaaagtaatgaaagctaagaagatgcggaatcgtattattaaaaacgaagtcaaaaaactgcaaaaggccgctctccttaaggcctctcccaaaaaggctccgggaacaaagggcactgccgctgcagctgctgctgccgcagcagccaaagtcccagctaagaaaatcaccgctgcctcgaagaaggctccggctcaaaaagtacctgcacagaaagctactggccaaaaagccgcacctgccccaaaagcacagaaaggtcaaaaggcaccagctcaaaaagctcctgcccctaaggcatccggaaagaaggcttag

SEQ ID NO: 30962 - DNA, 648 bp, Artificial Sequence
  derived and/or modified sequence
atggtgttcagacgcttcgtcgaggttggaagagtggcctatgtttcatttggtccccacgccggtaagctagtggccattgtggacgtgatcgaccagaaccgcgcattggtcgacggaccctgcactcaagttagacggcaagcgatgccattcaagtgtatgcagctgaccgacttcatcctgaagttccctcattcagcccatcagaagtacgtaaggcaagcgtggcagaaagccgacattaataccaagtgggctgctacacgatgggccaagaagatcgaagcacgggaacggaaggcgaaaatgaccgactttgatcggttcaaagtcatgaaagcaaagaaaatgagaaataggattatcaagaacgaagtgaagaagcttcagaaagcggctcttctcaaagcatcccccaagaaagcacctggcaccaaagggaccgcggctgccgctgcggctgcagcagctgcgaaggttcccgcaaaaaaaattaccgccgcatccaagaaagcaccagcccaaaaggtgccagctcagaaggcgactggccaaaaggcagcgccagcgcctaaagcacagaaaggacagaaagcacccgctcagaaagcgcctgcacctaaagcctccgggaaaaaggcatag

SEQ ID NO: 30963 - DNA, 387 bp, Artificial Sequence
  derived and/or modified sequence
atggtgttccgcaggttcgtggaggtagggcgagtggcctatgtttccttcggccctcacgccggaaagctagtggctattgttgatgtgattgatcagaaccgcgcattggtggacgggccatgtacacaggtcagaaggcaggctatgccatttaaatgcatgcaattaaccgactttattctgaagttcccacattccgcacatcagaaatacgtgcgacaagcctggcaaaaggctgacataaacaccaaatgggcagccactaggtgggctaagaagattgaagcccgtgaacgcaaggcgaaaatgactgatttcgatcgcttcaaggtgatgaaggcaaagaagatgcgcaaccgcattatcaagaacgatacgaggtag

SEQ ID NO: 30964 - DNA, 967 bp, Artificial Sequence
  derived and/or modified sequence
cttctcgcctaacgccgccaacatggtgttcaggcgcttcgtggaggttggccgggtggcctatgtctcctttggacctcatgccggaaaattggtcgcgattgtagatgttattgatcagaacagggctttggtcgatggaccttgcactcaagtgaggagacaggccatgcctttcaagtgcatgcagctcactgatttcatcctcaagtttccgcacagtgcccaccagaagtatgtccgacaagcctggcagaaggcagacatcaatacaaaatgggcagccacacgatgggccaagaagattgaagccagagaaaggaaagccaagatgacagattttgatcgttttaaagttatgaaggcaaagaaaatgaggaacagaataatcaagaatgacacgagataggaaataaacgaactgatagtgtagaggactggctcgggaccacatcaaggaagtaggttagtggttagatcgtgtaggggaacacgggaagctactgagggttttttaaaatggcgtgatatctcagatttagatcattgaactgttaagactgaatcttatgggatcaagactgggaatgctcgggttggcagtatgaagtttggcagtaatccaaggaagtgacagtggtaatgccatttaggtggtcttgatcatgcattggactgcagaaataagggagaaaacaatgtgtcagggtttctggtttgtacctctggttcattggttgtgagggaacatgaggcagggtaaagtttatctaggtaaaatgagttagttttcatgtagactatctgggtgtatatgcaaagactgcagacaatctatactaaaatcctggctctgcctcttgaaagctatgtagtttaggcacatagtcaaaatccagtttcctcatctatgtggtacgcttcagagtagttaatcatgatatgtagtccagtgactggttccctt

SEQ ID NO: 30965 - protein, 225 aa, Artificial Sequence
  derived and/or modified sequence
MSGCRKRCKREILKFAQYLLRLLTGSLHTDSVEDELEMATVRHRPEALELLEAQSKFTKKELQILYRGFKNECPSGVVNEETFKEIYSQFFPQGDSTTYAHFLFNAFDTDHNGAVSFEDFIKGLSILLRGTVQEKLNWAFNLYDINKDGYITKEEMLDIMKAIYDMMGKCTYPVLKEDAPRQHVETFFQKMDKNKDGVVTIDEFIESCQKDENIMRSMQLFENVI

SEQ ID NO: 30966 - DNA, 678 bp, Artificial Sequence
  derived and/or modified sequence
atgtcgggttgtaggaaaaggtgtaaacgggaaattcttaagtttgcccaatacctgctgcgacttttaactgggagtctgcacaccgattccgtcgaggacgagctcgagatggccactgtgcgccaccggccggaggcactagagttgctggaggcccaatccaagttcaccaaaaaggaactccagatcctctacagaggatttaaaaacgagtgtcctagcggagtcgtcaacgaggagacgtttaaagaaatttatagccagttcttccctcaaggagattctaccacgtacgctcactttctgtttaatgctttcgatacagaccacaacggtgccgtgtcttttgaagattttatcaaggggttaagtatattgcttaggggaacggtccaggagaagctgaattgggcattcaacctgtacgacattaataaggacggctatatcaccaaggaagaaatgctggatataatgaaggccatttatgatatgatgggcaaatgtacgtaccccgtcctgaaagaagacgctccaagacagcacgttgaaaccttttttcagaaaatggacaagaataaggatggagtagtcactatcgacgaattcatagagagctgccaaaaggatgagaacatcatgagatccatgcagctgttcgaaaacgtcatttag

SEQ ID NO: 30967 - DNA, 2481 bp, Artificial Sequence
  derived and/or modified sequence
aactgcttctggagaggggatgccgagccgaaccagagctgggttactacaagtgtgaaccggcagcctgtctgttgccacagaagaacttggtcaccacactgagaagccgtgttttctcacctccctgttactgttgtagctgtatctggcttctctagcattttaaaggaatttctgattgaggcgctaacagctaattccacaggagttgtaaggcagcctgtgcataaactgagacagaagtttctcctcagagactctctttttattattattattattattattggcaaagacttctggctctcctcagaggaataccttgttgcttaagatgagtggctgtagaaagcggtgtaaacgtgaaatactgaaatttgcccagtaccttctcagactattaacaggttctcttcatacagacagcgtggaagatgaactggagatggccaccgtcaggcatcggcctgaagcccttgagcttctggaagcccagagcaaatttaccaagaaagagcttcagatcctttacagaggatttaagaatgaatgccccagtggtgttgttaatgaagaaaccttcaaagagatttactcgcagttctttccacagggagactctacaacatatgcacattttctgttcaatgcatttgatacagaccacaatggagctgtgagtttcgaggatttcatcaaaggtctttccattttgctccgggggacagtacaagaaaaactcaattgggcatttaatctgtatgacataaataaagatggctacatcactaaagaggaaatgcttgatataatgaaagcaatatacgatatgatgggtaaatgtacatatcctgtcctcaaagaagatgctcccagacaacacgttgaaacattttttcagaaaatggacaaaaataaagatggggttgttaccatagatgagttcattgaaagctgccaaaaagatgaaaacataatgcgctccatgcagctctttgaaaatgtgatttaacttgtcaaatagatcctgaatccaacagacaaatgtgaactattctaccacccttaaagttggagctaccacttttagcatagattgctcagcttgacactgaagcatattatgcaaacaagctttgttttaatataaagcaatccccaaaagatttgagctttcagttataaatttgcatccttttcataatgccactgagttcaggggatggtctaactcatttcatactctgtgaatattcaaaagtaatagaatctggcatatagttttattggttccttagccatgggattattgaggctttcacatatcagtgattttaaaatatcagtgttttttgctactcatttgtatgtattcagtcctaggattttgaatggttttctaatatagtgacatctgcatttaatttccagaaattaaattaattttcatgtttgaatgctgtaattccatttaaattccatttatatactttaaggaaacaagattacaacaattaaaaaaacacatagttccagtttctatggccttcccaccttctgttagaaattagttttatctggcatttttaaacatttaaaaattattaaacatttaaaaattagtttattatcagatatcagcatatgcctaataaaacttattttaataagcatttaattttccataatatgttacagccaaggcctatataataattttggatttgttcaatctttcttacaggctgttttctattgtatcaatcattagtatcaatcattaagtggaagttgaagaaggcatcaaacaaaacaaggatgtttacagacatatgcaaagggtcaggatatctatcctccagtatatagtaatgcttaataacaagtaatcctaacagcattaaaggccaaatctgtcctctttcccctgacttccttacagcatgtttatttatattacaagccattcagggacaaagaaagaaaccttgactaccccactgtctactaagaacaaacagcaagcaaaattagcaagcaaaattcactttgaaagcaccagtggttccattacattgacaactactaccaagatttagtagaaaataagtgctcaacaactaatccagattacagtatgatttagctcatcataattcagattatttttaatcatcttagccaaaactgtaaagttgccacattactaaagccacacacatcgtccctgttttgtagaaatatcacaaagaccaagaggctacagaaggaggaaatttgcaactgtctttgcaacaataaatcaggtatctattctggtgtagagataggatgttgaaagctgccctgctatcaccagtgtagaaattaagagtagtacaatacatgtacactgaaatttgccatcacgtgtttgtgtaaactcaatgtgcacattttgtatttcaaaaagaaaaaataaaagcaaaataaaatgtt

SEQ ID NO: 30968 - DNA, 1301 bp, Artificial Sequence
  derived and/or modified sequence
aagatggaggctctgtgtgagaaggaatgcagggcagcctctggttgcagagagcagcacccggtttgacagctagcaatgcaattgtgacctcagacctacaatgtcaaggaattggcttctgccaacaaccagaatgagcatgaaagtggattagtccttggaacttccagataagagcccagccagctatacttggatttcagcctgtgagattctcagcagagaacccagtcaagtgtgtccagacgtccaacctacagaactacagcgtggaagatgaactggagatggccaccgtcaggcatcggcctgaagcccttgagcttctggaagcccagagcaaatttaccaagaaagagcttcagatcctttacagaggatttaagaatgaatgccccagtggtgttgttaatgaagaaaccttcaaagagatttactcgcagttctttccacagggagactctacaacatatgcacattttctgttcaatgcatttgatacagaccacaatggagctgtgagtttcgaggatttcatcaaaggtctttccattttgctccgggggacagtacaagaaaaactcaattgggcatttaatctgtatgacataaataaagatggctacatcactaaagaggaaatgcttgatataatgaaagcaatatacgatatgatgggtaaatgtacatatcctgtcctcaaagaagatgctcccagacaacacgttgaaacattttttcagaaaatggacaaaaataaagatggggttgttaccatagatgagttcattgaaagctgccaaaaagatgaaaacataatgcgctccatgcagctctttgaaaatgtgatttaacttgtcaaatagatcctgaatccaacagacaaatgtgaactattctaccacccttaaagttggagctaccacttttagcatagattgctcagcttgacactgaagcatattatgcaaacaagctttgttttaatataaagcaatccccaaaagatttgagctttcagttataaatttgcatccttttcataatgccactgagttcaggggatggtctaactcatttcatactctgtgaatattcaaaagtaatagaatctggcatatagttttattggttccttagccatgggattattgaggctttcacatatcagtgattttaaaatatcagtgttttttgctactcatttgtatgtattcagtcctaggattttgaatggttttctaatatagtgacatctgcatttaatttccagaaattaaattaattttcatgtttga

SEQ ID NO: 30969 - DNA, 678 bp, Artificial Sequence
  derived and/or modified sequence
atgagcggctgcaggaagcgctgcaagcgggagatcctgaagtttgcccagtacctgctgcggctgctgaccggcagcctgcacacagattctgtggaggatgagctggagatggccaccgtgcgccacaggcctgaggccctggagctgctggaggcccagagcaagttcaccaagaaggagctgcagatcctgtaccggggcttcaagaatgaatgtccttctggagtggtgaatgaggagaccttcaaggagatctacagccagttcttcccccagggcgacagcaccacctacgcccacttcctgttcaatgcctttgacacagaccacaacggggctgtgtcctttgaggacttcatcaagggcctgagcatcctgctgcggggcaccgtgcaggagaagctgaactgggccttcaacctgtatgacatcaacaaggatggctacatcaccaaggaggagatgctggacatcatgaaggccatctatgacatgatgggcaagtgcacctaccctgtgctgaaggaggatgccccccggcagcacgtggagaccttcttccagaagatggacaagaacaaggatggagtggtgaccattgatgagttcatcgagagctgccagaaggatgagaacatcatgaggtccatgcagctgtttgaaaatgtcatctag

SEQ ID NO: 30970 - DNA, 678 bp, Artificial Sequence
  derived and/or modified sequence
atgagcggctgccggaagcggtgcaagcgggagatcctgaagttcgcccagtatctgttgcggctgctgactggttctctgcatacagactcagtggaggatgaactcgagatggcaactgtacgccaccggcctgaagccctggagctgcttgaagcccagtccaaattcaccaaaaaagagctacaaattttgtacagggggtttaagaatgagtgtccttcaggcgttgtgaacgaagaaacatttaaggagatctatagtcagttctttccacagggggactcaaccacctacgcccattttctgtttaatgctttcgacacagatcataacggggccgtctcattcgaagatttcatcaagggcttatcgattttactgcggggcaccgtgcaagaaaaactcaattgggcttttaatctgtacgacatcaacaaggatggttatattaccaaggaggagatgttggatatcatgaaggcaatctacgatatgatgggcaaatgtacctaccccgttctcaaggaggatgcgcctagacagcatgtggagaccttcttccagaaaatggataaaaataaggatggagtggtgacaatcgatgaatttatcgagtcctgccagaaggacgagaatatcatgcggtctatgcagctctttgagaatgtcatttag

SEQ ID NO: 30971 - DNA, 678 bp, Artificial Sequence
  derived and/or modified sequence
atgtccgggtgccgaaaacgatgtaagagggagatcttgaagttcgcacagtaccttttgcgcctgctaacaggcagcctccacaccgacagtgttgaggatgagttagagatggctaccgtaaggcacaggccagaagctcttgagctcctggaagctcagtcaaaattcaccaagaaggaactacagatcctgtataggggttttaagaatgaatgtcctagcggcgtagtcaacgaggagaccttcaaagagatttactctcagtttttcccacaaggagacagtacgacatatgcccacttcctgttcaacgcattcgatacagatcacaatggagccgtcagtttcgaagatttcataaaggggcttagtatcctgctccgagggaccgtgcaggagaagctgaattgggcattcaatctgtacgacataaataaggacggctacatcacgaaggaggagatgctagacattatgaaagctatctatgacatgatgggcaaatgtacataccccgtgctgaaggaagatgcgcctaggcagcacgtcgagacgtttttccagaaaatggacaagaataaagacggtgtcgttactatcgacgagttcatcgaatcctgtcaaaaggacgagaacatcatgcgtagcatgcagctgttcgaaaacgttatatag

SEQ ID NO: 30972 - DNA, 678 bp, Artificial Sequence
  derived and/or modified sequence
atgagcggctgcagaaagagatgcaagagagagatcctgaagttcgcccagtacctgctgagactgctgaccggcagcctgcacaccgacagcgtggaggacgagctggagatggccaccgtgagacacagacccgaggccctggagctgctggaggcccagagcaagttcaccaagaaggagctgcagatcctgtacagaggcttcaagaacgagtgccccagcggcgtggtgaacgaggagaccttcaaggagatctacagccagttcttcccccagggcgacagcaccacctacgcccacttcctgttcaacgccttcgacaccgaccacaacggcgccgtgagcttcgaggacttcatcaagggcctgagcatcctgctgagaggcaccgtgcaggagaagctgaactgggccttcaacctgtacgacatcaacaaggacggctacatcaccaaggaggagatgctggacatcatgaaggccatctacgacatgatgggcaagtgcacctaccccgtgctgaaggaggacgcccccagacagcacgtggagaccttcttccagaagatggacaagaacaaggacggcgtggtgaccatcgacgagttcatcgagagctgccagaaggacgagaacatcatgagaagcatgcagctgttcgagaacgtgatctag

SEQ ID NO: 30973 - protein, 184 aa, Artificial Sequence [sequence omitted]

SEQ ID NO: 30974 - protein, 146 aa, Artificial Sequence
  derived and/or modified sequence
MHIRKATKYLKDVTLQKQCVPFRRYNGGVGRCAQAKQWGWTQGRWPKKSAEFLLHMLKNAESNAELKGLDVDSLVIEHIQVNKAPKMRRRTYRAHGRINPYMSSPCHIEMILTEKEQIVPKPEEEVAQKKKISQKKLKKQKLMARE

SEQ ID NO: 30975 - protein, 174 aa, Artificial Sequence
  derived and/or modified sequence
MVRYSLDPENPTKSCKSRGSNLRVHFKNTRETAQAIKGMHIRKATKYLKDVTLQKQCVPFRRYNGGVGRCAQAKQWGWTQGRWPKKSAEFLLHMLKNAESNAELKGLDVDSLVIEHIQVNKAPKMRRRTYRAHGRINPYMSSPCHIEMILTEKEQIVPKPEEEVAQKKKISQKK

SEQ ID NO: 30976 - DNA, 555 bp, Artificial Sequence
  derived and/or modified sequence
atggtgagatacagcctggaccccgagaaccccaccaagagctgcaagagcagaggcagcaacctgagagtgcacttcaagaacaccagagagaccgcccaggccatcaagggcatgcacatcagaaaggccaccaagtacctgaaggacgtgaccctgcagaagcagtgcgtgcccttcagaagatacaacggcggcgtgggcagatgcgcccaggccaagcagtggggctggacccagggcagatggcccaagaagagcgccgagttcctgctgcacatgctgaagaacgccgagagcaacgccgagctgaagggcctggacgtggacagcctggtgatcgagcacatccaggtgaacaaggcccccaagatgagaagaagaacctacagagcccacggcagaatcaacccctacatgagcagcccctgccacatcgagatgatcctgaccgagaaggagcagatcgtgcccaagcccgaggaggaggtggcccagaagaagaagatcagccagaagaagctgaagaagcagaagctgatggccagagagtag

SEQ ID NO: 30977 - DNA, 525 bp, Artificial Sequence
  derived and/or modified sequence
atggtgagatacagcctggaccccgagaaccccaccaagagctgcaagagcagaggcagcaacctgagagtgcacttcaagaacaccagagagaccgcccaggccatcaagggcatgcacatcagaaaggccaccaagtacctgaaggacgtgaccctgcagaagcagtgcgtgcccttcagaagatacaacggcggcgtgggcagatgcgcccaggccaagcagtggggctggacccagggcagatggcccaagaagagcgccgagttcctgctgcacatgctgaagaacgccgagagcaacgccgagctgaagggcctggacgtggacagcctggtgatcgagcacatccaggtgaacaaggcccccaagatgagaagaagaacctacagagcccacggcagaatcaacccctacatgagcagcccctgccacatcgagatgatcctgaccgagaaggagcagatcgtgcccaagcccgaggaggaggtggcccagaagaagaagatcagccagaagaagtag

SEQ ID NO: 30978 - DNA, 555 bp, Artificial Sequence
  derived and/or modified sequence
atggttcggtacagcttagaccctgagaatcccaccaagagctgtaagagccgagggagcaatttgcgggtgcatttcaagaacaccagagaaacagcgcaggccatcaagggaatgcacattcgaaaggcgaccaaatatctgaaagatgtcacattgcagaagcaatgcgtgccctttaggcggtataatggaggcgtggggaggtgtgctcaggccaagcagtggggctggacacaaggccgctggcctaaaaaatctgcggagtttttacttcatatgctgaagaatgcagagagcaatgccgagctgaaggggttggacgtcgactcgctggtgatcgagcatatccaggtcaacaaggcacctaaaatgaggaggcgcacctaccgagctcacggtaggatcaacccgtacatgtcctcaccgtgtcatatcgaaatgattctcacggagaaggagcagatcgtgccaaaaccagaggaggaggtggcccagaagaaaaagatttctcagaaaaagcttaagaagcagaagctcatggctagggaatag

SEQ ID NO: 30979 - DNA, 525 bp, Artificial Sequence
  derived and/or modified sequence
atggttcgatattccctcgaccccgaaaacccaactaagtcttgtaagtccagggggagcaacctgagggttcatttcaaaaatacaagagaaactgcacaggcaattaaaggcatgcacataagaaaggccacaaagtatcttaaggacgtgacgttacagaaacagtgtgttccgtttaggagatacaacggtggggtcggtaggtgtgctcaggccaaacagtggggttggacccagggacggtggccaaaaaaatccgctgagtttctccttcatatgctcaaaaatgccgagtctaatgccgagttaaaagggctcgacgttgactctctggtaatcgaacacattcaggtaaataaagctcctaaaatgcgtagacgtacctacagggcacacggacgtatcaatccatatatgtctagcccatgccatattgaaatgatcctgaccgagaaggaacagatcgtgcctaagccagaagaagaggtggctcagaagaaaaagattagccagaagaagtag

SEQ ID NO: 30980 - DNA, 555 bp, Artificial Sequence
  derived and/or modified sequence
atggtgcgctacagcctggaccctgagaaccccaccaagagctgcaagagccggggcagcaacctgcgggtgcacttcaagaacacccgggagacagcccaggccatcaagggcatgcacatcaggaaggccaccaagtacctgaaggatgtgaccctgcagaagcagtgtgtgcccttccgccgctacaacggcggcgtgggccgctgtgcccaggccaagcagtggggctggacccagggccgctggcccaagaagtctgctgagttcctgctgcacatgctgaagaatgctgagagcaatgctgagctgaagggcctggatgtggacagcctggtgattgagcacatccaggtgaacaaggcccccaagatgagaagaaggacctaccgggcccacggccgcatcaacccctacatgagcagcccctgccacatcgagatgatcctgacagagaaggagcagatcgtgcccaagccagaggaggaggtggcccagaagaagaagatcagccagaagaagctgaagaagcagaagctgatggcccgggagtag

SEQ ID NO: 30981 - DNA, 525 bp, Artificial Sequence
  derived and/or modified sequence
atggtgcgctacagcctggaccctgagaaccccaccaagagctgcaagagccggggcagcaacctgcgggtgcacttcaagaacacccgggagacagcccaggccatcaagggcatgcacatcaggaaggccaccaagtacctgaaggatgtgaccctgcagaagcagtgtgtgcccttccgccgctacaacggcggcgtgggccgctgtgcccaggccaagcagtggggctggacccagggccgctggcccaagaagtctgctgagttcctgctgcacatgctgaagaatgctgagagcaatgctgagctgaagggcctggatgtggacagcctggtgattgagcacatccaggtgaacaaggcccccaagatgagaagaaggacctaccgggcccacggccgcatcaacccctacatgagcagcccctgccacatcgagatgatcctgacagagaaggagcagatcgtgcccaagccagaggaggaggtggcccagaagaagaagatcagccagaagaagtag

SEQ ID NO: 30982 - DNA, 555 bp, Artificial Sequence
  derived and/or modified sequence
atggtgcggtacagcctggaccccgagaaccccaccaagagctgcaagtcaaggggtagcaacctgagagtacacttcaagaatactagggaaacagcacaggcaattaagggaatgcacatcaggaaagcgaccaagtatctgaaggacgttactcttcagaagcagtgtgtcccctttaggcgctacaatggtggcgtgggcaggtgtgcacaggcaaagcaatggggatggacacaagggcgatggcccaagaagtcagcagaattccttttgcatatgctcaagaacgctgaatccaatgctgagttgaaaggactcgatgtcgattccctcgtgatcgagcacatccaggtcaataaagcccccaaaatgcgccgacgaacataccgcgcacacggaagaattaatccatacatgtcgtcaccttgccatattgaaatgatattgaccgagaaagagcagatagtgccaaagcccgaagaagaagtcgctcagaagaaaaaaatcagccagaaaaagctgaagaaacagaaacttatggcccgcgaatag

SEQ ID NO: 30983 - DNA, 525 bp, Artificial Sequence
  derived and/or modified sequence
atggtgcggtacagcctggaccccgagaaccccaccaagagctgcaagagcagagggagcaacctgcgcgtacacttcaaaaacaccagagaaaccgcacaggctatcaaggggatgcacatcaggaaggccacaaagtacttaaaggacgtgacgctgcagaagcagtgcgtgccttttcggcgctacaatggcggtgtcgggcggtgtgcccaggctaagcagtggggctggacgcagggccgttggcccaagaaaagcgcagagttcctgcttcacatgttgaagaatgccgaatcaaatgctgagctgaaagggctagacgttgattccttggtgatagaacacatccaagtgaacaaggctcccaagatgcgcagacgtacctacagagcacacggaagaatcaatccttatatgtcctcgccatgccatatagagatgattttaacagagaaggaacagatcgtccctaaacctgaagaggaggtagcccaaaaaaaaaaaatttcacagaaaaagtag

SEQ ID NO: 30984 - DNA, 555 bp, Artificial Sequence
  derived and/or modified sequence
atggtgcgttattcattggaccccgagaacccaaccaaaagttgtaagtctcggggatccaacttacgcgtgcacttcaaaaatacccgggagacagcgcaggcaatcaaagggatgcacatcaggaaggcaactaagtacctgaaggacgtgacccttcaaaagcagtgtgtcccattccggaggtataatggaggcgttggacggtgcgcccaggccaagcaatggggctggactcagggtcgttggcccaaaaagagcgctgagttcctcctccatatgcttaaaaacgccgaatccaacgccgaattgaaagggttggacgtcgatagcctcgtcattgaacacattcaggtgaacaaagcacccaaaatgagacgtaggacctatcgtgcacacgggagaatcaacccatacatgtcaagcccctgccacatcgagatgatccttaccgaaaaggaacagatagtcccaaaaccagaggaagaagtcgcacagaagaagaagatatctcaaaagaagctgaagaaacagaagttgatggcacgcgaatag

SEQ ID NO: 30985 - DNA, 525 bp, Artificial Sequence
  derived and/or modified sequence
atggtgaggtacagtttagaccctgaaaaccccaccaagtcatgtaaatcccggggtagcaatctgagagtgcatttcaaaaatactagggaaaccgcacaagcgattaaaggtatgcacataagaaaagccactaagtatcttaaggatgtcactctgcagaaacagtgtgtcccgttccggcgttataatggaggtgtgggcaggtgtgcacaggccaagcagtggggatggactcaaggtaggtggccaaaaaaaagtgcagaatttctgctgcacatgttgaagaacgcagagtccaatgccgagctgaaaggcctggatgttgacagcctggttattgagcacattcaggtgaataaagctcccaagatgcgacgcaggacttaccgtgctcatggcaggattaacccttatatgtctagtccgtgtcacatcgaaatgattttaaccgaaaaggagcaaatcgtccctaagcccgaggaagaagtggctcagaaaaagaagattagtcagaaaaagtag

SEQ ID NO: 30986 - DNA, 790 bp, Artificial Sequence
  derived and/or modified sequence
ctgcgttgctccgagggcccaatcctcctgccatcgccgccatcctggcttcgggggcgccggcctccaggcccccgggaggagaactcctagggctactaaatcctcgctggaggcggtggcttcttatgcgggaggacgtggcggagggcctgactttgggagccggggtcagtcggcctctgaggtgatctgtgaaaatggttcgctattcacttgacccggagaaccccacgaaatcatgcaaatcaagaggttccaatcttcgtgttcactttaagaacactcgtgaaactgctcaggccatcaagggtatgcatatacgaaaagccacgaagtatctgaaagatgtcactttacagaaacagtgtgtaccattccgacgttacaatggtggagttggcaggtgtgcgcaggccaagcaatggggctggacacaaggtcggtggcccaaaaagagtgctgaatttttgctgcacatgcttaaaaacgcagagagtaatgctgaacttaagggtttagatgtagattctctggtcattgagcatatccaagtgaacaaagcacctaagatgcgccgccggacctacagagctcatggtcggattaacccatacatgagctctccctgccacattgagatgatccttacggaaaaggaacagattgttcctaaaccagaagaggaggttgcccagaagaaaaagatatcccagaagaaactgaagaaacaaaaacttatggcacgggagtaaattcagcattaaaataaatgtaattaaaaggaaaa

SEQ ID NO: 30987 - DNA, 584 bp, Artificial Sequence
  derived and/or modified sequence
ctctttccctaagcagcctgaggtgatctgtgaaaatggttcgctattcacttgacccggagaaccccacgaaataacactcgtgaaactgctcaggccatcaagggtatgcatatacgaaaagccacgaagtatctgaaagatgtcactttacagaaacagtgtgtaccattccgacgttacaatggtggagttggcaggtgtgcgcaggccaagcaatggggctggacacaaggtcggtggcccaaaaagagtgctgaatttttgctgcacatgcttaaaaacgcagagagtaatgctgaacttaagggtttagatgtagattctctggtcattgagcatatccaagtgaacaaagcacctaagatgcgccgccggacctacagagctcatggtcggattaacccatacatgagctctccctgccacattgagatgatccttacggaaaaggaacagattgttcctaaaccagaagaggaggttgcccagaagaaaaagatatcccagaagaaactgaagaaacaaaaacttatggcacgggagtaaattcagcattaaaataaatgtaattaaaaggaaaa

SEQ ID NO: 30988 - DNA, 758 bp, Artificial Sequence
  derived and/or modified sequence
tggcttcgggggcgccggcctccaggcccccgggaggagaactcctagggctactaaatcctcgctggaggcggtggcttcttatgcgggaggacgtggcggagggcctgactttgggagccgggggttgactggattggtgaggcccgtgtggctacttctgtggaagcagtgctgtagttactggaagataaaagggaaagcaagcccttggtgggggaaagtgatctgtgaaaatggttcgctattcacttgacccggagaaccccacgaaatcatgcaaatcaagaggttccaatcttcgtgttcactttaagaacactcgtgaaactgctcaggccatcaagggtatgcatatacgaaaagccacgaagtatctgaaagatgtcactttacagaaacagtgtgtaccattccgacgttacaatggtggagttggcaggtgtgcgcaggccaagcaatggggctggacacaaggtcggtggcccaaaaagagtgctgaatttttgctgcacatgcttaaaaacgcagagagtaatgctgaacttaagggtttagatgtagattctctggtcattgagcatatccaagtgaacaaagcacctaagatgcgccgccggacctacagagctcatggtcggattaacccatacatgagctctccctgccacattgagatgatccttacggaaaaggaacagattgttcctaaaccagaagaggaggttgcccagaagaaaaagatatcccagaagaaa

SEQ ID NO: 30989 - DNA, 555 bp, Artificial Sequence
  derived and/or modified sequence
atggtccggtacagcctggatcccgagaatccgactaaatcctgtaaaagcagaggttccaacctgagagtgcacttcaagaacactcgcgaaaccgcccaggccatcaagggcatgcatattcgcaaggcaacaaagtacttgaaagacgtgacacttcagaaacagtgtgtgccctttcgtaggtacaatggcggagtggggcgctgcgcccaagcgaaacagtggggttggacgcaaggacggtggcctaaaaaatcggcggagttccttttacacatgcttaaaaatgctgagtcaaatgccgaattaaaaggattggatgtggatagcctcgtgattgagcacattcaggtcaacaaggcaccaaagatgaggcgtcggacctacagagcccacgggcggatcaatccttacatgtcgagtccctgtcatattgagatgatactgactgagaaggagcagatcgtgcccaagccggaggaagaggtggcacagaagaagaagatctcacagaagaagctgaaaaagcagaaactaatggccagagagtag

SEQ ID NO: 30990 - DNA, 555 bp, Artificial Sequence
  derived and/or modified sequence
atggtcaggtatagccttgaccccgagaatccaacgaaaagttgcaaaagtaggggaagcaacctgagggtacactttaagaatacccgtgagacagcccaggctatcaaggggatgcatattcggaaggctactaaatacctcaaagatgtcaccttgcagaaacagtgtgtgcctttccggaggtataacgggggcgtaggccgctgtgcacaggctaagcaatggggttggactcagggcagatggcccaaaaagtccgccgagtttctgctccatatgttaaaaaacgccgaatcaaacgccgaactgaaggggttggatgtcgactcattggtaattgaacacatccaggttaacaaggcacccaaaatgagaaggaggacgtatagggcccacgggagaatcaatccgtatatgtcttctccttgccacatcgagatgatcttgactgaaaaggagcagatcgtgcccaagccagaggaggaggtggcccaaaaaaaaaaaattagccagaaaaaactgaagaagcaaaaactgatggcgcgtgaatag

SEQ ID NO: 30991 - DNA, 555 bp, Artificial Sequence
  derived and/or modified sequence
atggtgcggtacagcctggaccccgagaaccccaccaagagctgcaagtccaggggctctaatctccgggtccacttcaagaacaccagagagactgcacaggccatcaaaggaatgcacatccgcaaggcaaccaaatatctgaaagatgtgactcttcaaaagcaatgcgtaccattccggagatacaatggcggagtagggagatgcgcccaggccaagcaatggggatggacccagggcagatggccaaaaaagtcagcggagttcctgctgcacatgttgaaaaacgccgaatccaacgcggagctgaagggattggacgtcgacagccttgtgatcgaacacattcaggttaataaggcaccaaagatgagaaggagaacctatcgtgcacatggtcggatcaatccctatatgagcagtccatgccacattgaaatgatattaacggagaaggagcagattgtcccaaaacccgaggaagaagtggcccaaaaaaaaaaaatctcccagaaaaaactaaaaaaacaaaagctaatggctagggaatag

SEQ ID NO: 30992 - DNA, 555 bp, Artificial Sequence
  derived and/or modified sequence
atggtgcggtacagcctggaccccgagaaccccaccaagagctgcaaatcccggggctccaatcttcgcgtccactttaagaatactcgggagacggctcaagccattaaggggatgcacatcaggaaggccacgaagtacctgaaggacgtgaccctgcagaaacagtgcgtgccctttcgtcgatataatggcggggtcggtagatgtgctcaggcgaagcagtggggctggacacagggaaggtggcctaagaaatcggccgagtttctcctccacatgctaaagaatgcagagtcaaatgccgagttgaaggggttggatgtggacagtctcgtaatcgagcatatccaggtgaacaaggctcccaaaatgagacgcaggacataccgtgctcatggccgcattaatccatatatgagcagcccctgccacattgaaatgatcttgaccgagaaggagcagatcgtcccgaaacctgaggaagaggtggcccagaaaaaaaagattagtcagaagaaactcaagaagcagaaactcatggcaagggaatag

SEQ ID NO: 30993 - DNA, 555 bp, Artificial Sequence
  derived and/or modified sequence
atggtccggtatagtctagatcctgaaaaccctaccaagtcatgcaagagtagagggagtaatctgagggtacactttaaaaacacccgtgagaccgcccaggctatcaaggggatgcatataaggaaagccaccaagtatctcaaagacgtgacgttacagaaacagtgcgtaccctttcggcgttataatggcggagtgggcaggtgtgcccaagcaaagcagtggggctggactcaagggaggtggccaaagaagagcgcagaatttttgctccatatgctcaagaatgcggaatcaaatgctgagttgaaaggactcgacgtagactctctggtgatcgagcatatacaggtcaataaagctcccaagatgcgcagacggacgtatcgggctcatggaagaattaacccctacatgtctagcccttgccacatcgaaatgatattgacagaaaaggagcagatagtaccgaaaccagaagaagaagtagctcagaaaaagaaaatttctcagaagaagctgaagaagcaaaagctgatggctagggaatag

SEQ ID NO: 30994 - DNA, 555 bp, Artificial Sequence
  derived and/or modified sequence
atggttagatactctctcgaccctgagaatccaacgaagtcgtgtaaaagccgaggctcaaaccttagagtgcactttaaaaatactagggaaaccgcgcaggccatcaaaggcatgcatatacggaaggcaacaaagtacctcaaagacgtgaccttacagaaacagtgcgtacccttcagaaggtataatggtggtgtcggaagatgtgcccaagctaaacagtggggctggacacagggacgctggccaaagaagtcagccgaattcttgctgcatatgctgaaaaacgccgaatccaatgccgagctgaaaggtctggatgttgactccttagtaatagaacacatacaggtcaacaaagctccaaagatgcggcgacgaacttatagggcccatggcagaatcaacccctacatgtctagtccttgtcacattgaaatgattttgaccgaaaaggagcagatcgttcctaagccggaagaggaggtcgcccaaaagaaaaaaatctctcagaaaaagttgaaaaaacagaagctgatggccagggagtag

SEQ ID NO: 30995 - DNA, 580 bp, Artificial Sequence
  derived and/or modified sequence
ctctttccctaagcagcctgaggtgatctgtgaaaatggttcgctattcacttgacccggagaaccccacgaaataacactcgtgaaactgctcaggccatcaagggtatgcatatacgaaaagccacgaagtatctgaaagatgtcactttacagaaacagtgtgtaccattccgacgttacaatggtggagttggcaggtgtgcgcaggccaagcaatggggctggacacaaggtcggtggcccaaaaagagtgctgaatttttgctgcacatgcttaaaaacgcagagagtaatgctgaacttaagggtttagatgtagattctctggtcattgagcatatccaagtgaacaaagcacctaagatgcgccgccggacctacagagctcatggtcggattaacccatacatgagctctccctgccacattgagatgatccttacggaaaaggaacagattgttcctaaaccagaagaggaggttgcccagaagaaaaagatatcccagaagaaactgaagaaacaaaaacttatggcacgggagtaaattcagcattaaaataaatgtaattaaaagg

SEQ ID NO: 30996 - DNA, 927 bp, Artificial Sequence
  derived and/or modified sequence
tacgaatctcgcgagaagtcaagttctcatgagttctcccaaaatccaccgctcttcctctttccctaagcagcctgagggttgactggattggtgaggcccgtgtggctacttctgtggaagcagtgctgtagttactggaagataaaagggaaagcaagcccttggtgggggaaagtatggctgcgatgatggcatttcttaggacacctttggattaataatgaaaacaactactctctgagcagctgttcgaatcatctgatatttatactgaatgagttactgtaagtacgtattgacagaattacactgtactttcctctaggtgatctgtgaaaatggttcgctattcacttgacccggagaaccccacgaaatcatgcaaatcaagaggttccaatcttcgtgttcactttaagaacactcgtgaaactgctcaggccatcaagggtatgcatatacgaaaagccacgaagtatctgaaagatgtcactttacagaaacagtgtgtaccattccgacgttacaatggtggagttggcaggtgtgcgcaggccaagcaatggggctggacacaaggtcggtggcccaaaaagagtgctgaatttttgctgcacatgcttaaaaacgcagagagtaatgctgaacttaagggtttagatgtagattctctggtcattgagcatatccaagtgaacaaagcacctaagatgcgccgccggacctacagagctcatggtcggattaacccatacatgagctctccctgccacattgagatgatccttacggaaaaggaacagattgttcctaaaccagaagaggaggttgcccagaagaaaaagatatcccagaagaaactgaagaaacaaaaacttatggcacgggagtaaattcagcattaaaataaatgtaattaaaagg

SEQ ID NO: 30997 - DNA, 678 bp, Artificial Sequence
  derived and/or modified sequence
tacgaatctcgcgagaagtcaagttctcatgagttctcccaaaatccaccgctcttcctctttccctaagcagcctgaggtgatctgtgaaaatggttcgctattcacttgacccggagaaccccacgaaatcatgcaaatcaagaggttccaatcttcgtgttcactttaagaacactcgtgaaactgctcaggccatcaagggtatgcatatacgaaaagccacgaagtatctgaaagatgtcactttacagaaacagtgtgtaccattccgacgttacaatggtggagttggcaggtgtgcgcaggccaagcaatggggctggacacaaggtcggtggcccaaaaagagtgctgaatttttgctgcacatgcttaaaaacgcagagagtaatgctgaacttaagggtttagatgtagattctctggtcattgagcatatccaagtgaacaaagcacctaagatgcgccgccggacctacagagctcatggtcggattaacccatacatgagctctccctgccacattgagatgatccttacggaaaaggaacagattgttcctaaaccagaagaggaggttgcccagaagaaaaagatatcccagaagaaactgaagaaacaaaaacttatggcacgggagtaaattcagcattaaaataaatgtaattaaaagg

SEQ ID NO: 30998 - protein, 236 aa, Artificial Sequence
  derived and/or modified sequence
MTRCPAGQAEVEMAELYVKPGNKERGWNDPPQFSYGLQTQAGGPRRSLLTKRVAAPQDGSPRVPASETSPGPPPMGPPPPSSKAPRSPPVGSGPASGVEPTSFPVESEAVMEDVLRPLEQALEDCRGHTRKQVCDDISRRLALLQEQWAGGKLSIPVKKRMALLVQELSSHRWDAADDIHRSLMVDHVTEVSQWMVGVKRLIAEKRSLFSEEAANEEKSAATAEKNHTIPGFQQAS

SEQ ID NO: 30999 - DNA, 918 bp, Artificial Sequence
  derived and/or modified sequence
tcctttggtgccttgtgaccagggccctgatggttcattagatggagccttcgagtcttagggagttgccgcagggtccccacagcggctcccgacggttgtgaaccagcatccatcctccacggattccggcaacccgcctggccctggacgtgtctcaactggcccgcgtgaggggccgccccggaaatgacgcgctgccccgctggccaagcggaagtggagatggcggagctgtacgtgaagccgggcaacaaggaacgcggctggaacgacccgccgcagttctcatacgggctgcagacccaggccggcggacccaggcgctcgctgcttaccaagagggtagccgcaccccaggatggatcccccagagtccccgcatcagagacttctcctgggcctcccccaatggggcctccacctccttcaagtaaggctcccaggtccccacctgtggggagtggtcctgcctctggcgtggagcccacaagtttcccagtcgagtctgaggctgtgatggaggatgtgctgagacctttggaacaggcattggaagactgccgtggccacacaaggaagcaggtatgtgatgacatcagccgacgcctggcactgctgcaggaacagtgggctggaggaaagttgtcaatacctgtaaagaagagaatggctctactggtgcaagagctttcaagccaccggtgggacgcagcagatgacatccaccgctccctcatggttgaccatgtgactgaggtcagtcagtggatggtaggagttaaaagattaattgcagaaaagaggagtctgttttcagaggaggcagccaatgaagagaaatctgcagccacagctgagaagaaccataccataccaggcttccagcaggcttcataatcctcggttccccagact

SEQ ID NO: 31000 - DNA, 711 bp, Artificial Sequence
  derived and/or modified sequence
atgaccagatgccccgccggccaggccgaggtggagatggccgagctgtacgtgaagcccggcaacaaggagagaggctggaacgaccccccccagttcagctacggcctgcagacccaggccggcggccccagaagaagcctgctgaccaagagagtggccgccccccaggacggcagccccagagtgcccgccagcgagaccagccccggccccccccccatgggcccccccccccccagcagcaaggcccccagaagcccccccgtgggcagcggccccgccagcggcgtggagcccaccagcttccccgtggagagcgaggccgtgatggaggacgtgctgagacccctggagcaggccctggaggactgcagaggccacaccagaaagcaggtgtgcgacgacatcagcagaagactggccctgctgcaggagcagtgggccggcggcaagctgagcatccccgtgaagaagagaatggccctgctggtgcaggagctgagcagccacagatgggacgccgccgacgacatccacagaagcctgatggtggaccacgtgaccgaggtgagccagtggatggtgggcgtgaagagactgatcgccgagaagagaagcctgttcagcgaggaggccgccaacgaggagaagagcgccgccaccgccgagaagaaccacaccatccccggcttccagcaggccagctag

SEQ ID NO: 31001 - DNA, 711 bp, Artificial Sequence
  derived and/or modified sequence
atgacacgctgccccgccggacaggcagaagtcgagatggcagagctgtacgtaaaaccaggaaataaagaacggggctggaatgacccgcctcagttttcgtacggactccagacacaggcgggcggaccccgtcggtcacttctcacaaagagggtcgccgcaccgcaggatggctccccccgtgtacccgcctccgagaccagccctggacccccccccatgggcccaccacctccgagcagtaaggccccccgatccccacccgtgggatcaggcccagctagcggcgtcgaaccaacatcattcccagtggaaagcgaggctgtgatggaggatgtgctccgcccacttgagcaggcgctggaagactgcagagggcacacaaggaagcaagtgtgtgacgacatctccaggagattggcactgctgcaggaacaatgggccggaggtaaacttagtataccagtcaagaaaagaatggcgctgttggtccaggaattgtcctcacatcgctgggatgccgccgacgatattcacaggtctctgatggtagaccacgtcactgaagtttctcagtggatggtaggtgtaaaaaggctgattgccgaaaaaaggagcctatttagcgaggaggctgccaatgaagagaaatctgccgctaccgcggaaaaaaatcacaccatcccaggatttcaacaagcttcctag

SEQ ID NO: 31002 - DNA, 711 bp, Artificial Sequence
  derived and/or modified sequence
atgacccgctgcccagctggccaggccgaggtggagatggccgagctgtatgtgaagccaggcaacaaggagcggggctggaatgaccccccccagttctcctatggcctgcagacccaggccggcggccccaggaggagcctgctgaccaagagggtggccgccccccaggacggcagcccccgggtgcctgccagcgagaccagccctggccccccacccatgggccccccaccacccagcagcaaggcccccaggagcccccctgtgggcagcggccctgccagcggcgtggagcccaccagcttccctgtggagagcgaggccgtgatggaggatgtgctgcggcccctggagcaggccctggaggactgccggggccacaccaggaagcaggtgtgtgatgacatcagccggcggctggccctgctgcaggagcagtgggccggcggcaagctgagcatccctgtgaagaagaggatggccctgctggtgcaggagctgagcagccaccgctgggatgctgctgatgacatccacaggagcctgatggtggaccacgtgacagaggtgtcccagtggatggtgggcgtgaagaggctgattgctgagaagaggagcctcttcagcgaggaggccgccaatgaggagaagtctgctgccacagctgagaagaaccacaccatccctggcttccagcaggccagctag

SEQ ID NO: 31003 - DNA, 711 bp, Artificial Sequence
  derived and/or modified sequence
atgacccggtgccccgccggccaggccgaggtggagatggccgagctttatgttaaacctggaaacaaagagagggggtggaatgacccacctcagttttcctatggtttacagacccaagccgggggtcctaggcgctcactgctgacaaagagggtggctgccccacaagacggaagtccacgcgtacctgctagcgaaacatcacctggaccgccccccatgggtccacctccgccctcctctaaagccccccgcagtcctcccgtgggttcagggcctgcttcaggcgtcgaacctacgagcttccctgtcgaatcagaggccgtgatggaggatgtacttagacctctggagcaagccctggaggactgtcgaggacatacccgcaagcaggtgtgtgatgacatttctaggcgcctggctctgctacaagagcagtgggccgggggaaaactgtcaattccagtgaagaagcggatggctctgcttgttcaggagttgagttcccaccggtgggacgctgctgatgacatccatcgcagtttaatggtggatcacgtaactgaggtgagccagtggatggtcggcgttaaacggcttatagcagagaaacggtccctcttctctgaagaggctgcaaacgaagagaagtcagcagccacagcagaaaagaatcacacaatccctggcttccagcaggcttcctag

SEQ ID NO: 31004 - DNA, 711 bp, Artificial Sequence
  derived and/or modified sequence
atgacacgatgccctgcagggcaggcagaggtggaaatggccgagttgtacgttaagcccggaaacaaggagcggggatggaatgatcctcctcagttcagttacggtctgcaaactcaggcagggggtccaaggcggagcctgctcacaaagcgggtcgcggctcctcaggacggcagcccacgtgtgccagcatccgaaaccagcccgggacccccacctatgggcccacccccaccctcgtccaaggcccctcgctcgcctcctgtcggctccggcccagcaagtggcgtggagcccacctcctttccagtggaatccgaagccgttatggaagatgttttacgcccattagagcaggcgcttgaggactgtaggggccatacacgaaaacaagtttgtgacgatatctccaggcgactggcccttttgcaagaacagtgggccggtggcaagctgagcatccccgtgaagaagagaatggcccttttagtccaagaactctcctcgcatcgatgggacgcggctgatgatatccaccggtcgctcatggttgaccacgtcacagaggtctctcaatggatggtgggcgttaaaaggttgatcgcagaaaagagatccctgttctctgaagaggccgctaatgaggaaaaaagtgctgctacggctgagaaaaatcatactatccccggatttcaacaggccagctag

SEQ ID NO: 31005 - DNA, 2066 bp, Artificial Sequence
  derived and/or modified sequence
ttatagcaaaatcagtgcaaataaaaatccctcagtgacctcactggatgtgagtatattgggcctgggacagggctgggggctaacaccctgtgtgagatgagtgtctttgtgtctgtgcttgatgttggtggctctctgtagtcacatgacagcatgggtgtgatggagatctgacttcattcaacaaacatattttctaaggagttccctgtgccaggcactaagctgggcactgggaatgtaataaaatagtcaaggtcccaccttctaagactgtccgacagggaaacgaacaagagtcaaataaggcagaagatgtgatgtaatacacctacgaaatctcagagggttgtagggtcgtgggagctcaagtgagacacttaacctggcctgagacattccagaaggcctcctgaagaactgacatctgaactgagaactgaaggaagatgagtactagtgaggctaccggacgtgaatgtggagattgtgcagggcaatgcaagaggaggctgtagaagtcaacctggctagatcacagcggggtgtatgtggggcaggagcttctttgtttgaatttgctcctgagaggatgaggcctcctagagcactggctcctggacagcaacctcctttggtgccttgtgaccagggccctgatggttcattagatggagccttcgagtcttagggagttgccgcagggtccccacagcggctcccgacggttgtgaaccagcatccatcctccacggattccggcaacccgcctggccctggacgtgtctcaactggcccgcgtgaggggccgccccggaaatgacgcgctgccccgctggccaagcggaagtggagatggcggagctgtacgtgaagccgggcaacaaggaacgcggctggaacgacccgccgcagttctcatacgggctgcagacccaggccggcggacccaggcgctcgctgcttaccaagagggtcgccgcaccccaggatggatcccccagagtccccgcatcagagacttctcctgggcctcccccaatggggcctccacctccttcaagtaaggctcccaggtccccacctgtggggagtggtcctgcctctggcgtggagcccacaagtttcccagtcgagtctgaggctgtgatggaggatgtgctgagacctttggaacaggcattggaagactgccgtggccacacaaggaagcaggtatgtgatgacatcagccgacgcctggcactgctgcaggaacagtgggctggaggaaagttgtcaatacctgtaaagaagagaatggctctactggtgcaagagctttcaagccaccggtgggacgcagcagatgacatccaccgctccctcatggttgaccatgtgactgaggtcagtcagtggatggtaggagttaaaagattaattgcagaaaagaggagtctgttttcagaggaggcagccaatgaagagaaatctgcagccacagctgagaagaaccataccataccaggcttccagcaggcttcataatcctcggttccccagactcaccggacaccatctcctatgccttggagaccttctgtcacttggctcccttcttaccaccaccaagactgtcccactgggcctgacccacctatgagggaagaagtcccacctgggccagagggagttcatgtgttactcataacatgcatttcaataaaaacatctctgcggtgggccttgggtaggagagatgaacccttccggtgccaagctagtcccctctggtgtcctcgactgccctgctccctgtgtatctgcaaacctctgttctcccttctccattcatcaggaagggatctgctgggtaaagtcagactactgcctaccactttttcccaaagtagactgaaagcacatcctgtgctgggcggagcagctgtgtttggatggtttcatttcagcatgagaacagactcaaatagaacggggagacttttccctcaacaaaaggaaagacagtcctatttgcactgtatcacccttgagatactactgttacagagattagaacc

SEQ ID NO: 31006 - DNA, 801 bp, Artificial Sequence
  derived and/or modified sequence
atgttcagcttcaacatgttcgaccaccccatccccagagtgttccagaacagattcagcacccagtacagatgcttcagcgtgagcatgctggccggccccaacgacagaagcgacgtggagaagggcggcaagatcatcatgccccccagcgccctggaccagctgagcagactgaacatcacctaccccatgctgttcaagctgaccaacaagaacagcgacagaatgacccactgcggcgtgctggagttcgtggccgacgagggcatctgctacctgccccactggatgatgcagaacctgctgctggaggagggcggcctggtgcaggtggagagcgtgaacctgcaggtggccacctacagcaagttccagccccagagccccgacttcctggacatcaccaaccccaaggccgtgctggagaacgccctgagaaacttcgcctgcctgaccaccggcgacgtgatcgccatcaactacaacgagaagatctacgagctgagagtgatggagaccaagcccgacaaggccgtgagcatcatcgagtgcgacatgaacgtggacttcgacgcccccctgggctacaaggagcccgagagacaggtgcagcacgaggagagcaccgagggcgaggccgaccacagcggctacgccggcgagctgggcttcagagccttcagcggcagcggcaacagactggacggcaagaagaagggcgtggagcccagccccagccccatcaagcccggcgacatcaagagaggcatccccaactacgagttcaagctgggctag

SEQ ID NO: 31007 - DNA, 801 bp, Artificial Sequence
  derived and/or modified sequence
atgttctcatttaatatgttcgaccacccaattccaagagtcttccagaatcgattcagcacgcagtatcgctgctttagcgtctcaatgttggcgggacctaatgacaggtccgacgttgagaagggcgggaagattatcatgccccctagcgcactggatcaactgagtcgactgaatataacctatccaatgctgtttaagctgaccaacaagaacagtgatcggatgacccactgtggtgttctggagttcgtggcagatgaaggtatatgctatttgcctcattggatgatgcagaaccttctgttagaggagggtgggctcgtacaggtggaatctgtgaacctgcaggtggccacctacagtaagttccagccccaaagccctgacttcctagacatcacgaatcctaaggcggtgctcgagaatgccctacgcaacttcgcatgcctaacgacaggtgacgtgatcgctataaattataacgagaagatctatgaactgagagtgatggaaaccaaacctgataaggccgtgtctattattgaatgcgacatgaacgtcgacttcgacgcccccctgggatataaggagcccgagaggcaggtgcaacacgaggaatccactgagggagaagcagatcacagcgggtatgccggcgagcttggattcagagcattcagtggcagcggaaacaggcttgacggcaaaaaaaagggggttgagccttccccctccccaattaagcccggagatattaaacgcggtattcctaactatgaattcaaactgggatag

SEQ ID NO: 31008 - DNA, 801 bp, Artificial Sequence
  derived and/or modified sequence
atgttctccttcaacatgtttgaccaccccatccccagggtcttccagaaccgcttcagcacccagtaccgctgcttctctgtgtccatgctggccggccccaatgacagaagtgatgtggagaagggcggcaagatcatcatgcctccttctgccctggaccagctgagccggctgaacatcacctaccccatgctgttcaagctgaccaacaagaacagcgacaggatgacccactgcggcgtgctggagtttgtggctgatgagggcatctgctacctgccccactggatgatgcagaacctgctgctggaggagggcggcctggtgcaggtggagagcgtgaacctgcaggtggccacctacagcaagttccagccccagagcccagacttcctggacatcaccaaccccaaggctgtgctggagaatgccctgaggaactttgcctgcctgaccactggagatgtgattgccatcaactacaatgagaagatctatgagctgcgggtgatggagaccaagccagacaaggctgtgtccatcattgaatgtgacatgaatgtggactttgatgcccccctgggctacaaggagcctgagcggcaggtgcagcacgaggagagcacagaaggagaggccgaccacagcggctacgccggggagctgggcttccgggccttcagcggcagcggcaaccggctggatggcaagaagaagggcgtggagcccagccccagccccatcaagccaggggacatcaagaggggcatccccaactatgagttcaagctgggctag

SEQ ID NO: 31009 - DNA, 801 bp, Artificial Sequence
  derived and/or modified sequence
atgttcagcttcaacatgttcgaccaccccatcccccgggtgttccagaacagattcagtactcaatacaggtgcttcagtgtaagcatgctcgcgggaccgaatgacaggtctgacgtcgaaaagggcggcaagatcatcatgcctcccagcgccctcgatcagttgtccaggctgaacatcacctacccaatgcttttcaagttgaccaataagaattcagaccgtatgacccactgcggggtcctggagttcgtcgctgacgaaggaatctgctacttaccacactggatgatgcagaatctcttgttggaggaagggggcctcgtccaggtagagagtgtgaacctgcaggtcgctacatacagtaagtttcagccccagagccctgattttctggatatcactaatccaaaggcagttcttgaaaatgcactccggaacttcgcctgcctgaccaccggcgatgtcatcgccatcaactataatgaaaagatctatgaattgcgcgtcatggagactaaacctgataaggccgtctccataattgaatgtgatatgaacgtggacttcgatgcgccactgggctataaggaacccgagcgccaggtccagcatgaagaatccacagaaggggaggccgatcactccggctacgcaggagagctgggcttccgcgcattcagtgggtcaggaaaccgtctggatgggaaaaagaagggtgtggaaccaagtccatcgcctattaaacctggcgatatcaagcgcggcatacccaactacgaattcaaattgggttag

SEQ ID NO: 31010 - DNA, 801 bp, Artificial Sequence
  derived and/or modified sequence
atgtttagtttcaacatgtttgaccaccccatacctagggtgttccagaatcgattttccacacagtaccgctgctttagcgtgagtatgctggccggacctaacgatcgaagtgatgtggagaagggtggcaagataatcatgccgccttcagccctggatcaactcagtagactgaatatcacctatcccatgctgtttaaactcactaacaaaaattctgaccggatgacacactgcggggtcttggagtttgtggcagatgaggggatttgctacctgccgcattggatgatgcaaaacctgcttctcgaagagggaggtctggtgcaggtggaaagtgtcaatctgcaggtcgcaacttactccaaatttcagccacagagcccagacttccttgacatcactaatccgaaggctgtgttagaaaacgcattgcgcaatttcgcttgtcttacaactggtgatgttatcgcaatcaactataatgaaaaaatctatgagcttagagtcatggagactaagcccgataaggccgtgtccattatcgaatgcgacatgaatgtggactttgacgctcccctcggctataaggaacctgaacggcaagtgcagcatgaagagtccacagagggtgaagccgatcactcgggctacgccggagaactgggcttcagagcgttctctgggagtggtaaccgattagacggcaaaaagaagggggttgaacctagcccttctccgatcaaacccggagatattaagcgaggaatacccaattacgagtttaaacttgggtag

SEQ ID NO: 31011 - DNA, 1007 bp, Artificial Sequence
  derived and/or modified sequence
agcggcagcggcggctgggagagcggtcggcggggtttcttcgttgcattgcctgagaggagcggagtctgccaggtggtgtccatcatgttctctttcaacatgttcgaccaccctattcccagggtcttccaaaaccgcttctccacacagtaccgctgcttctctgtgtccatgctagcagggcctaatgacaggtcagatgtggagaaaggagggaagataattatgccaccctcggccctggaccaactcagccgacttaacattacctatcccatgctgttcaaactgaccaataagaattcggaccgcatgacgcattgtggcgtgctggagtttgtggctgatgagggcatctgctacctcccacactggatgatgcagaacttactcttggaagaaggcggcctggtccaggtggagagcgtcaaccttcaagtggccacctactccaaattccaacctcagagccctgacttcctggacatcaccaaccccaaagccgtattagaaaacgcacttaggaactttgcctgtctgaccaccggggatgtgattgccatcaactataatgaaaagatctacgaactgcgtgtgatggagaccaaacccgacaaggcagtgtccatcattgagtgtgacatgaacgtggactttgatgctcccctgggctacaaagaacccgaaagacaagtccagcatgaggagtcgacagaaggtgaagccgaccacagtggctatgctggagagctgggcttccgcgctttctctggatctggcaatagactggatggaaagaagaaaggggtagagcccagcccctccccaatcaagcctggagatattaaaagaggaattcccaattatgaatttaaacttggatgaagctggaggcagattcgtcgctttctctggagaaggacagtcattgcgtaaaaagggaagaaagccctaagtgaggactgttggctgattggaaaataataaaagaatcatttgcaaca

SEQ ID NO: 31012 - protein, 242 aa, Artificial Sequence
  derived and/or modified sequence
MFLLSGDPCFKTPPSTAKSISIPGQDSSLQLTCKGGGTSSGGSSTNSLTGSRPPKARPTILSSGLPEEPDQNLSSPEEVFHSGHSRNSSYASQQSKISGYSTEHSRSSSLSDLTHRRNTSTSSSASGGLGMTVEGPEGSEREHRPPEKPPRPPRPLHLSDRSFRRKKDSVESHPTWVDDTRIDADAIVEKIVQSQDFTDGSNTEDSNLRLFVSRDGSATLSGIQLATRVSSGVYEPVVIESH

SEQ ID NO: 31013 - protein, 384 aa, Artificial Sequence
  derived and/or modified sequence
MAFLMKKKKFKFQTTFTLEELTAVPFVNGVLFCKVRLLDGGDFVSLSSREEVQENCVRWRKRFTFVCKMSANPATGLLDPCVFRVSVRKELKGGKAYSKLGFADLNLAEFAGSGSTVRCCLLEGYDTKNTRQDNSILKVTIGMFLLSGDPCFKTPPSTAKSISIPGQDSSLQLTCKGGGTSSGGSSTNSLTGSRPPKARPTILSSGLPEEPDQNLSSPEEVFHSGHSRNSSYASQQSKISGYSTEHSRSSSLSDLTHRRNTSTSSSASGGLGMTVEGPEGSEREHRPPEKPPRPPRPLHLSDRSFRRKKDSVESHPTWVDDTRIDADAIVEKIVQSQDFTDGSNTEDSNLRLFVSRDGSATLSGIQLATRVSSGVYEPVVIESH

SEQ ID NO: 31014 - DNA, 4144 bp, Artificial Sequence
  derived and/or modified sequence
ccgcgcggcgtgagctccccggacatcgcgtctcgggatgctgcaagccagcgcggccgctcgcgcgcagccccgcacctccgcccctgcctctgcctcctgggccatgccctgctgtttacatgccggtgaggtccccggccgctccgaacccctccgagccccggctccccgagggtgaagcccgccggcccgcgaactggactggtggatctctcagacctggggccccggactccgatctccgccgtctccgccaccatcagggcgggatccggctctggtgttttgaggagggggtgtggtgtagggaaaggaatcccgtccctctccaccttttttcgccttcggggcttcagactcagggaactcgctcatggctttcttgatgaagaagaagaaattcaaattccaaactactttcaccctggaggagctgactgcggttcccttcgtgaacggggtcctcttctgcaaggtccggctgctggatggaggggattttgtcagcttgtcgtcaagggaggaggtacaggagaactgtgtgcggtggcgaaagaggttcaccttcgtgtgtaagatgagtgctaacccggccaccggcctgctggacccctgtgtcttccgtgtgtctgtgcgcaaggagctgaaaggcgggaaggcttattccaagctgggcttcgctgacttgaacctggccgagtttgcgggctcgggctccacggtgcgctgctgcctgctcgagggatatgacacgaagaacactcgccaggacaactccatccttaaggtcaccattggtatgttcctgctctctggagatccctgcttcaagacgccaccatcgactgccaagtccatctccatcccaggccaggattcctccctgcagctgacgtgtaagggtggtgggaccagcagtgggggcagcagcaccaactccctgactgggtcccggccccccaaggctcggcccactattctcagctcagggctgccagaggaacccgaccagaacctgtccagccctgaggaggtgttccactctggccactcccgcaactccagctatgccagccagcagtccaagatctccggctacagcacagagcactcgcgctcctccagcctctcagacctgacgcaccgccgcaacacgtccaccagcagcagcgcctctgggggccttggcatgaccgtggagggccctgagggcagtgagcgggagcaccggcccccggagaagccgccgcggccaccccggcccctgcatctgtccgatcgctctttcaggcggaagaaggactcggtggagagccacccgacctgggtggacgacacgcggatcgatgcggatgccatcgtggagaagatcgtgcagagccaggatttcacagatggcagcaacaccgaggacagcaacctccggctgttcgtgagccgcgatggctctgccacgctgagcggcatccagcttgccaccagggtctcttctggggtctacgagccagttgtgattgaaagccattgaggagcaggtgtccgggctggagaagagtcctgctttctctggagtccagacctgtatcattccatgaggaactttccccttcagatcacctctgcgccacatctcatccatgcctcctccatgcactccagtccacactccccgtagcatcattccattgcccctcccatccatgctgggaccctcctggcccaccaaggcccaggcaccactgtgaatattctcctctgaaccactagagggcaggccaggcaggccaggcgggcccgtgcagcttgtgggcaagaaggagctggcaaggaccggcgctgctggagactgacccagccctctggctgaggacatgcagcggctcctaaatgtagagatgcctgtggctgagggggcctctctacctgtgtccccactcactccaggagcactggctttggtcacgtcttagcagcagggccttgctccgttgttcccttgccctggtggtgggggggccagaccacctccggaatcctgccacctgtgactgtctgactgcttagtgcttcagctgtcccttccttgtgtcctgggggacctgctggcggcctcttcctgggagccatgacctcagaccccacccacactccagatcgagacccctgcctccccccggcaaatgtcctcccgctgccttgcagcctgcactttgcacatgctcacccccagcacagtcccactggcccctcacctccccttccctgagctccttcccaaggactcctggtcactgcctgctgtgcagtcagaggcccagggtccagcagcccggcgggaacgggtgctgcctcttcctccagttagctccagctcaggtctgagacccgtgctgagaaaggtctgagcaccgaccgtgccctctgcccagggctgggtcctgagcagctggttttcctgcaggaaggttggagcaagcaaagtccttctctgccctcagggtcagctgcccagactggggcggatgccagagaggcaggtgggctgtggctggactggtccggagctggcttccttaccagaaaagcctcagccttcctctggaagcatcccccgttctgggcaagggggaagggctcctttaaggggtgtgctttcccagtggggagcagtctggccctgccccctactaaagcctctgctctcagcactttcccccaagtccttgtaacttgcttgaaggtgggttctggctgccagccagtccctggacaaactctcctgccccttttaaatttcactcattttgtataaacccagcaggctggtgtttacttagccctgtagcttttttcattttttctttccgtctttcttcttgagttcacggttcaatattgcctcctcgccctggtgaggggaggtgctgcttttctgccccacctgccggctggttccagcagcgctggggcccagctggggggccgggatgggggcttctctctctgggaggggtgcaggtgccctccccaggctgggagggttccttccctagctccccatctgcccccgctggtgagagttgggcttcttggtcttggaactccctggcattgggaacagagcatttccagcatttgttgttgttttactcacctaacccttagaaaatgaatgttagaaggtgcctgccgaggcgggacagagtgttcgctcgcgctggagaaggctctgctcagccctgagagtcccttcctgccccaccgatactggcactttaaaaaggaagctgaccgcacagtgtccagacgaattggcccccagaagatggggagttctgtcctgcccttctgtgtctgcgtgacctcacccagcctaggagggaggtgcattcagggtagatttgcctctcattcaaagttctggggctttgggtggaaaacagccagctttggcgctgttggggagactcctccagaccaggaaccccagaaggagacagagcctgccacatcctcccacgccaggccctgggccagggtgattggactgagaatttggccacaaccaaattgatgctggctggaaccagaggccagaaagcctggccttgtccccatgtgggagccctgtcctcagccctcttgtccccttgagctcagtgaattcccaccaggtgcccacagctcctggacttcaaattctatatattgagagagttggagagtatatcagagatatttttggaaaggagttggtctatgcaatgtcagtttggaatcttcttgaaagtttaatgtttttattaggagatttaaagaaaataaaggtctacaatatctttaggttttttttttttcctgtttaccgcacaaactgaccacatggcatgtctatcaggatggagggtgtccatgttctcctctgtctttagggaggtgataaggagatgggcggaggggtgtttttttctttgactcccctcctttctaacagaatgttgccaccactgcttgagtgggctgtgtttgttcctctgtcccagcttctgttgtagaaaataacattgttaggggaactcaggctagtgtcagcgtcttggtttggggagaaaaaattaaatgtttcggtttttgtttcttt

SEQ ID NO: 31015 - DNA, 1155 bp, Artificial Sequence
  derived and/or modified sequence
atggcgtttctcatgaagaagaaaaagttcaagttccagaccacctttacactggaggagctgaccgcagtgccattcgttaacggggtgttattctgcaaagtacggctattggatggcggggattttgtgtcactctctagcagagaggaggttcaggaaaattgtgtgcgatggcgaaagaggtttacctttgtttgcaagatgtcagctaatcccgccaccgggttattggacccttgcgtttttagagttagtgtgcggaaggagctgaagggaggaaaagcgtacagcaaattgggtttcgctgatctgaatcttgccgagtttgccgggtcaggctctaccgtgcgctgctgcctgctggagggctatgacacaaaaaacacgagacaggataatagcattttgaaggtcactattgggatgtttcttctgagcggcgacccctgtttcaaaacaccaccttccacggctaagtctatttccatccctggccaagactcgtctttgcagcttacttgcaaaggagggggcacttccagcggaggatccagtaccaattctttgactggttcaaggcctcccaaagccagaccaacgatactgtcttcaggactgccagaagagcctgaccagaacttatcatcgccagaagaggtgtttcatagcggccactcacgaaattctagttacgcttcacagcagtccaaaattagcggctacagtaccgaacactcaagatcttctagcctgagtgacttaacacatagaagaaatacttctacaagctcctcagcctccggcggactgggaatgactgtggaaggcccagagggatctgagagagaacaccggcccccggagaagcccccacgccctcctcgccccttacatctgtctgacagatccttcaggcgaaagaaggacagtgtggaatcacaccctacatgggtggacgacacgagaatagacgcggatgcgatcgtggaaaaaatagtccagagccaagacttcaccgatgggagcaacactgaagattctaacctgaggttattcgtttctcgggacggtagcgccaccctcagtggtattcagctggcaacccgcgtctcatcgggcgtctacgaacccgtggtcatcgagtcacactag

SEQ ID NO: 31016 - DNA, 1155 bp, Artificial Sequence
  derived and/or modified sequence
atggccttcctgatgaagaagaagaagttcaagttccagaccaccttcaccctggaggagctgacagctgtgccctttgtgaatggagtgctcttctgcaaggtgcggctgctggatggaggagactttgtgtccctgagcagccgggaggaggtgcaggagaactgtgtgcgctggaggaagcgcttcacctttgtgtgcaagatgtctgccaacccagccaccggcctgctggacccctgtgtgttccgggtgtctgtgaggaaggagctgaagggcggcaaggcctacagcaagctgggctttgctgacctgaacctggccgagtttgctggcagcggcagcacagtgcgctgctgcctgctggagggctatgacaccaagaacacccggcaggacaacagcatcctgaaggtgaccatcggcatgttcctgctgagcggggacccctgcttcaagaccccacccagcacagccaagagcatcagcatccctggccaggacagcagcctgcagctgacctgcaagggcggcggcaccagcagcggcggcagcagcaccaacagcctgaccggcagcaggcctcccaaggcccggcccaccatcctgagcagcggcctgcctgaggagccagaccagaacctgagcagccctgaggaggtgttccacagcggccacagcaggaacagcagctatgccagccagcagagcaagatcagcggctacagcacagagcacagccgcagcagcagcctgagtgacctgacccacagaagaaacaccagcaccagcagcagcgccagcggcggcctgggcatgacagtggagggccctgagggcagcgagcgggagcacaggcctcctgagaagccaccccggcccccccggcccctgcacctgagtgacaggagcttccggaggaagaaggacagcgtggagagccaccccacctgggtggatgacaccagaattgatgctgatgccatcgtggagaagatcgtgcagagccaggacttcacagatggcagcaacacagaggacagcaacctgcggctgtttgtgtccagagatggcagcgccaccctgagcggcatccagctggccaccagggtgtcctctggagtgtatgagcctgtggtgattgagagccactag

SEQ ID NO: 31017 - DNA, 1155 bp, Artificial Sequence
  derived and/or modified sequence
atggccttcctgatgaagaagaagaagttcaagttccagaccaccttcaccttagaggaactgaccgctgtgcccttcgttaacggagtactgttctgcaaggtgaggctactcgatggtggtgattttgtgagtctgagctcaagggaggaggtgcaagagaactgcgttagatggaggaagagattcacgttcgtttgtaaaatgtcagccaaccctgcgaccgggcttctggacccttgtgtattccgcgtatcagtgcgtaaggaactgaagggcgggaaggcgtactctaagctcggctttgcagacttgaatctggccgagtttgcgggttccgggtcgactgtgaggtgctgtctgctggagggatacgacactaagaatacacgccaggataatagcatcctcaaggtcacaattggaatgttccttctgagtggagatccctgttttaagacacctccatctaccgctaagtccatatcaattcctggccaggatagtagtctccagctgacctgtaagggcggcggaaccagtagtggaggtagttctacaaacagcttgactggttcacggccgcctaaggcaaggcctacaatactgtcctcagggctgcccgaggaacccgaccagaacctttcgtcccccgaagaggtcttccacagcggacacagtcggaacagctcctacgcctctcaacaaagcaagatttccggatattctacagagcattctagatcttcaagtctgagcgacctgacgcacagaaggaatacgagcacttcttccagtgccagtggaggcctggggatgaccgttgaaggccccgagggtagcgaaagggagcataggccacctgagaagcccccccgccctccacggccgcttcatctgtcagatagaagttttcgtcgaaaaaaagatagcgtggagagccaccccacttgggtcgacgacacccgcatagatgcagatgcaattgtcgaaaaaatcgtccagagccaggacttcaccgacgggtctaatactgaggactctaatctgagactgtttgtgtccagagacggctctgccaccctttctgggattcaactggctacacgggtctcctccggcgtgtatgagcccgtcgtcatcgagagccactag

SEQ ID NO: 31018 - DNA, 1155 bp, Artificial Sequence
  derived and/or modified sequence
atggcatttctgatgaaaaagaagaagttcaaattccagaccacgttcactctggaagaactaaccgccgttcctttcgtgaacggagtcttgttttgcaaagtgagactacttgacggcggtgattttgtgtctctttcatcccgggaagaggtccaggagaattgcgtccgctggaggaaacgcttcacatttgtgtgtaagatgagtgctaacccagccaccggccttttggatccatgtgtatttcgtgtatctgttaggaaagagttgaagggcggtaaggcatactcaaagctcggatttgcagacttgaacttggccgagttcgccggatcaggaagtacagtgcgatgctgtctcctggaaggctacgacacgaaaaacacaagacaggacaattctatccttaaagttaccatcggcatgttcctgctctccggagatccttgcttcaaaacccctccctcaaccgctaagtcgatcagtataccgggacaggactcctcactgcagctgacctgtaaaggcggtggtacaagctcaggaggcagctctactaatagcctgactggtagccgtccaccaaaagcgaggcctacaatcctgtccagtgggctccctgaggagccggaccagaatttgtccagcccggaggaggtttttcactctggtcacagcagaaactcctcttacgcctctcaacaatctaagatctccggttacagtacggaacattcacgctcctcgagcctgtcggacctaactcacaggcggaatacttccacgtcctcatcagcttccgggggtctggggatgacagtggagggaccagagggcagtgagcgcgaacatagacctccagaaaagcctcccagaccgccacggcctctgcacttgtcggacagatccttccgtcggaagaaggactccgtcgagtcacacccaacatgggtcgatgataccagaattgatgccgacgccattgtcgagaagatcgtgcagagccaggatttcactgacggaagtaacacagaagattcaaatctaaggctgtttgtgtccagggacggatcagccactttatcgggcatccagttggccacacgagttagtagcggagtgtacgagcctgtcgtcatagagagtcactag

SEQ ID NO: 31019 - DNA, 1155 bp, Artificial Sequence
  derived and/or modified sequence
atggccttcctgatgaagaagaagaagttcaagttccagaccaccttcaccctggaggagctgaccgccgtgcccttcgtgaacggcgtgctgttctgcaaggtgagactgctggacggcggcgacttcgtgagcctgagcagcagagaggaggtgcaggagaactgcgtgagatggagaaagagattcaccttcgtgtgcaagatgagcgccaaccccgccaccggcctgctggacccctgcgtgttcagagtgagcgtgagaaaggagctgaagggcggcaaggcctacagcaagctgggcttcgccgacctgaacctggccgagttcgccggcagcggcagcaccgtgagatgctgcctgctggagggctacgacaccaagaacaccagacaggacaacagcatcctgaaggtgaccatcggcatgttcctgctgagcggcgacccctgcttcaagaccccccccagcaccgccaagagcatcagcatccccggccaggacagcagcctgcagctgacctgcaagggcggcggcaccagcagcggcggcagcagcaccaacagcctgaccggcagcagaccccccaaggccagacccaccatcctgagcagcggcctgcccgaggagcccgaccagaacctgagcagccccgaggaggtgttccacagcggccacagcagaaacagcagctacgccagccagcagagcaagatcagcggctacagcaccgagcacagcagaagcagcagcctgagcgacctgacccacagaagaaacaccagcaccagcagcagcgccagcggcggcctgggcatgaccgtggagggccccgagggcagcgagagagagcacagaccccccgagaagccccccagaccccccagacccctgcacctgagcgacagaagcttcagaagaaagaaggacagcgtggagagccaccccacctgggtggacgacaccagaatcgacgccgacgccatcgtggagaagatcgtgcagagccaggacttcaccgacggcagcaacaccgaggacagcaacctgagactgttcgtgagcagagacggcagcgccaccctgagcggcatccagctggccaccagagtgagcagcggcgtgtacgagcccgtggtgatcgagagccactag

SEQ ID NO: 31020 - protein, 251 aa, Artificial Sequence
  derived and/or modified sequence
MSFLGGFFGPICEIDIVLNDGETRKMAEMKTEDGKVEKHYLFYDGESVSGKVNLAFKQPGKRLEHQGIRIEFVGQIELFNDKSNTHEFVNLVKELALPGELTQSRSYDFEFMQVEKPYESYIGANVRLRYFLKVTIVRRLTDLVKEYDLIVHQLATYPDVNNSIKMEVGIEDCLHIEFEYNKSKYHLKDVIVGKIYFLLVRIKIQHMELQLIKKEITGIGPSTTTETETIAKYEIMDGAPVKGDNFMEKSS

SEQ ID NO: 31021 - DNA, 756 bp, Artificial Sequence
  derived and/or modified sequence
atgagcttcctgggcggcttcttcggccccatctgcgagatcgacatcgtgctgaacgacggcgagaccagaaagatggccgagatgaagaccgaggacggcaaggtggagaagcactacctgttctacgacggcgagagcgtgagcggcaaggtgaacctggccttcaagcagcccggcaagagactggagcaccagggcatcagaatcgagttcgtgggccagatcgagctgttcaacgacaagagcaacacccacgagttcgtgaacctggtgaaggagctggccctgcccggcgagctgacccagagcagaagctacgacttcgagttcatgcaggtggagaagccctacgagagctacatcggcgccaacgtgagactgagatacttcctgaaggtgaccatcgtgagaagactgaccgacctggtgaaggagtacgacctgatcgtgcaccagctggccacctaccccgacgtgaacaacagcatcaagatggaggtgggcatcgaggactgcctgcacatcgagttcgagtacaacaagagcaagtaccacctgaaggacgtgatcgtgggcaagatctacttcctgctggtgagaatcaagatccagcacatggagctgcagctgatcaagaaggagatcaccggcatcggccccagcaccaccaccgagaccgagaccatcgccaagtacgagatcatggacggcgcccccgtgaagggcgacaacttcatggagaagagcagctag

SEQ ID NO: 31022 - DNA, 756 bp, Artificial Sequence
  derived and/or modified sequence
atgtctttcttggggggtttttttggcccaatctgtgagattgacatagtgctcaacgacggggagactagaaaaatggccgaaatgaaaaccgaggacggtaaggtggaaaaacactacctgttctacgacggcgaaagcgtctctgggaaggtgaacttggctttcaagcagccaggcaaaaggctggaacatcagggcatccgtattgaattcgttggccagatcgaacttttcaatgacaaatccaacacgcatgaatttgtcaatttggtcaaggagctggcgttacccggtgagttaacccagagtaggtcttacgactttgagttcatgcaagtggagaagccctatgagagctacataggcgctaatgtgagattacggtattttctcaaggttactatcgtccgcagactgaccgacctggtgaaagaatatgatctgattgtgcaccaactcgcaacctatccagacgtgaacaattccatcaagatggaagtggggattgaggactgcttacatatcgaatttgagtataataaatctaagtatcatttgaaggatgtgattgttggtaaaatctacttcctgttggtccgcatcaagatccagcacatggaattacagttgatcaaaaaggagatcacaggcattggtcctagtacaaccaccgagaccgaaaccattgccaagtatgaaatcatggacggcgcccccgtcaagggagacaacttcatggagaagagttcatag

SEQ ID NO: 31023 - DNA, 756 bp, Artificial Sequence
  derived and/or modified sequence
atgtccttcctgggcggcttcttcggccccatctgtgaaattgacatcgtgctgaatgatggagagaccaggaagatggccgagatgaagacagaagatggcaaggtggagaagcactacctgttctatgatggagagagcgtgtctgggaaggtgaacctggccttcaagcagcccgggaagaggctggagcaccagggcatccgcatcgagtttgtgggccagatcgagctgttcaatgacaagagcaacacccatgaatttgtgaacctggtgaaggagctggccctgcccggggagctgacccagagccgctcctatgactttgagttcatgcaggtggagaagccctatgagagctacatcggggccaacgtgcggctgcgctacttcctgaaggtgaccatcgtgcggcggctgacagacctggtgaaggagtatgacctgattgtgcaccagctggccacctacccagatgtgaacaacagcatcaagatggaggtgggcatcgaggactgcctgcacatcgagtttgagtacaacaagagcaagtaccacctgaaggatgtgattgtgggcaagatctacttcctgctggtgcgcatcaagatccagcacatggagctgcagctgatcaagaaggagatcactggaattggccccagcaccaccacagaaacagagaccatcgccaagtatgagatcatggatggagcccctgtgaagggggacaacttcatggagaagagcagctag

SEQ ID NO: 31024 - DNA, 756 bp, Artificial Sequence
  derived and/or modified sequence
atgagcttcctgggcggcttcttcggccccatctgcgagatcgacatcgtgctcaatgatggagaaacccgcaaaatggccgagatgaagacggaggacgggaaggtcgagaagcactatctcttctacgacggagagtcagtgtccgggaaggtgaacctggcattcaaacaacccggaaaaagactggaacaccagggcattcgcattgaatttgtgggccagatcgagctttttaatgataaaagcaacacccatgagttcgtgaacctcgtgaaagaactcgcattaccaggtgaattgacacaatcccgcagttatgacttcgagttcatgcaagtcgagaagccgtatgagtcctatattggagccaacgtgaggctccgttacttccttaaagttacgattgtgagaaggctgactgacttggtgaaggaatatgatctaatagtgcaccaactcgccacatatcccgacgtcaacaatagcataaagatggaggtgggcattgaagactgcctccatatagagtttgaatacaacaaatctaaataccacttgaaggatgtaatcgtgggcaagatatatttcctgctcgttcggattaaaattcagcacatggaactccagctgattaagaaggagatcacaggaattggcccctcaaccacaactgagaccgaaactattgcaaagtatgaaattatggatggggctcctgtcaagggcgacaacttcatggagaagagctcttag

SEQ ID NO: 31025 - DNA, 756 bp, Artificial Sequence
  derived and/or modified sequence
atgtcatttctcggcggatttttcggcccaatttgtgagatcgatattgttctgaatgatggtgagacacgcaagatggcagagatgaaaacagaagatggaaaggtcgagaagcactatctgttctacgatggagaatccgtgtctggaaaagtgaatttggccttcaaacagcccggtaaaaggctcgagcaccagggcattaggatcgagttcgtgggccaaatcgagctgttcaatgataagtccaatacacacgaatttgtaaacttagtcaaggagctcgcactgcctggtgagctaacacagtctagatcttacgacttcgaatttatgcaagtggaaaagccctatgagagttatattggggctaacgtccgtctgaggtacttcctgaaggttacaatcgttcgccgactaaccgatcttgtcaaagagtatgatctgatcgtacatcagcttgccacttatcctgacgtgaataactcaatcaaaatggaggttggcattgaagattgcctgcacatcgaatttgagtataacaaaagtaaatatcatcttaaagacgtgatcgtaggaaagatctatttcttactggtgcggatcaagatacaacacatggagctccagcttatcaagaaggagatcacaggcattggcccatccaccactactgagacggaaaccattgccaagtatgaaatcatggacggagcaccggtgaagggagataacttcatggaaaagtccagttag

SEQ ID NO: 31026 - DNA, 2554 bp, Artificial Sequence
  derived and/or modified sequence
gagcggtcacgtgtgaggggcggcccgaggtcacgtgacggagcgccggagcggagggagccggggctgggagttctcctgagggaagaggagtggagtaggggggacgcggcggcggcgttgacaatgagttttcttggaggcttttttggtccaatttgtgagatcgatattgttcttaatgatggggaaaccaggaaaatggcagaaatgaaaactgaagatggcaaagtagaaaaacactatctcttctatgacggagaatccgtttcaggaaaggtaaacctagcctttaagcaacctggaaagaggctagaacaccaaggaattagaattgaatttgtaggtcaaattgaacttttcaatgacaagagtaatactcatgaatttgtaaacctagtgaaagaactagccttacctggagaactgactcagagcagaagttatgattttgaatttatgcaagttgaaaagccatatgaatcttacatcggtgccaatgtccgcttgaggtattttcttaaagtgacaatagtgagaagactgacagatttggtaaaagagtatgatcttattgttcaccagcttgccacctatcctgatgttaacaactctattaagatggaagtgggcattgaagattgtctacatatagaatttgaatataataaatcaaagtatcatttaaaggatgtgattgttggaaaaatttacttcttattagtaagaataaaaatacaacatatggagttacagctgatcaaaaaagagatcacaggaattggacccagtaccacaacagaaacagaaacaatcgccaaatatgaaataatggatggtgcaccagtaaaaggagataattttatggagaaaagctcctgaaaaactgaggaaacagagaacaaactttcaccagcgatttgaatctccagaatcacaggcatctgccgaacagcctgaaatgtgaactgaacaggagaaaaaaagaaaagcaaaaaactcctgtaacccttgagattaagttcagcaggttaaagatggttgcagctggagggggcggaaaaaggccaaaactccatatatgttagtcttcctttatcttacagcgcagcatttattttatgatataatgaaatgttcgttcatgtatatacatttttaaaagtgctttctttgaaacactggaactttgttaagctgcctttttttttttaacttcctactttgatgataagcactcagatatatatcagcgtaaacatgaaaaattttcatgtgagtaggctggtatttgtaattttgctttctttctgcataatgttgattataaatcctctcttttcaggctaatgattacctcttattctctacatgcaaaaaattaaatattttgtgttcaaataaaattagaaaacctgagtggcctcttgtgtcctgcagagatttaaaacatggcatctcaatatttttgagaactacatttgtttttaacatatgtgtttgagaaaagcatatggagtgtttcaccgcaggcacttctgagtaccattccatggcttccagaattttatcctctttgaggtcttctgtgctatgaatattagatttctttccccaagggattatgtggcaggtcattatggccttcttttttttggccatattaagtaacagttttgctatattccagtagtaccgttgtgtgttttctgcaatgtggagttgacttagcttggcattttagatttgttaaaactattttttccataaatactttgaaacatatttatatatttcaatttaaggaatctttttgccatgtgtatgcaaatattattttcttcatacattcattttcttttcaggggaaaattttgggatgggggactcaggaggacctgtgaagcatgtagttatctagatctgggtaatttcatgtttattaaactcgaactttggctagttaaactcatattgaaacttcatctagtctcttaattttttaacactaaattcaagtcatttgttttaagtctctaaaaaagaagattgcagtcatccattcatatgcatggggtctgatcgcaaatacactaaatgtggagtgtaggaaccaaaatgaaacctgctgtatggaaactactttcacttatggttcattggtttttgtaccaatattttttatgcacttcagtgcaagtcttgtcagttaaccttactttatgagtaagctaaataacccaaattacatttctttaaacctgttttactactatggcactttgataaaatggtcaggaaccaactttactggcaaaagggtccatgtaccaccatgtgctggagcatctgttctacatgtggatatctatgaatggtaatgttttccttcatgtaagtgcctattcagagtttcagaattttaaaatgccaaatattttcatggtcatttgcatgtagtaagccagaaaatattcaaagagattttgaaaaccaattgtatttaaccagcctcaaattgtgcaaccatgatgtataataaagaatttgaaac

SEQ ID NO: 31027 - protein, 101 aa, Artificial Sequence
  derived and/or modified sequence
MAAWSPAAAAPLLRGIRGLPLHHRMFATQTEGELRVTQILKEKFPRATAIKVTDISGTKRRNQRDAWIADIYLCPQTLTTPWLHRCCCLRPWMNFTDIILP

SEQ ID NO: 31028 - DNA, 306 bp, Artificial Sequence
  derived and/or modified sequence
atggccgcatggtcaccagcagccgctgcaccattgctcaggggaatccggggattgcccctgcatcaccggatgtttgcaacccaaacagagggagagctcagagtcacgcaaatcctcaaagaaaagttcccaagggcgactgctattaaagtgaccgacatctctggtaccaagcgccgcaatcaaagagacgcgtggatcgccgacatctacctctgcccacagaccctcactaccccctggctacacagatgctgctgtttgcgaccctggatgaatttcactgacataatcctaccttag

SEQ ID NO: 31029 - DNA, 306 bp, Artificial Sequence
  derived and/or modified sequence
atggccgcctggagccctgctgctgctgcccccctgctgcggggcatccggggcctgcccctgcaccacaggatgtttgccacccagacagaaggagagctgcgggtgacccagatcctgaaggagaagttcccccgggccacagccatcaaggtgacagacatcagcggcaccaagagaagaaaccagagagatgcctggattgctgacatctacctgtgcccccagaccctgaccaccccctggctgcaccgctgctgctgcctgcggccctggatgaacttcacagacatcatcctgccctag

SEQ ID NO: 31030 - DNA, 306 bp, Artificial Sequence
  derived and/or modified sequence
atggccgcctggagccccgccgccgccgcccccctgctgcggggcattaggggtttaccactgcaccatcggatgttcgcgactcagacagaaggagagttacgggtcactcagatactgaaagaaaaattccctcgagcaactgctattaaagtcactgacatctccggcacaaagaggagaaatcagagagacgcatggattgctgatatttacctttgtccccaaacattaaccaccccatggcttcacagatgttgctgcttacggccatggatgaatttcacagatatcattctcccatag

SEQ ID NO: 31031 - DNA, 306 bp, Artificial Sequence
  derived and/or modified sequence
atggcagcctggtcccccgctgccgctgcaccactgctaagaggtatcaggggactcccacttcatcatcgcatgtttgcaacacagactgaaggcgagttgcgggtgacacagatccttaaggagaaattcccacgtgctactgcgattaaggtaaccgacatctcgggcaccaagcgcaggaaccagcgcgacgcgtggattgccgatatatacctgtgccctcagaccctgacaactccatggctccataggtgctgttgtttaagaccttggatgaacttcaccgacattatcttaccctag

SEQ ID NO: 31032 - DNA, 444 bp, Artificial Sequence
  derived and/or modified sequence
gacctcgggcggcgggtcacgtcggccgggcatggctgcatggagcccggccgcggcagcgcctctcctccgcgggatccgcgggcttccacttcaccatcggatgtttgccactcagactgagggggagctcagagtgacccaaattctcaaagaaaagtttccacgagctacagctataaaagtcactgacatttcaggcactaaaagaagaaatcaaagagatgcatggattgcggatatttacctctgtccccaaacgctgaccacgccctggctgcatagatgctgctgcttaagaccttggatgaacttcactgacatcattcttccctaagcagtcaccaaaaaatttatatattttgctcatatacatttccatattataattatagaagatgtataatctatttagatgttaattaaaggaaacaaacaactgaa

SEQ ID NO: 31033 - DNA, 306 bp, Artificial Sequence
  derived and/or modified sequence
atggccgcctggagccccgccgccgccgcccccctgctgagaggcatcagaggcctgcccctgcaccacagaatgttcgccacccagaccgagggcgagctgagagtgacccagatcctgaaggagaagttccccagagccaccgccatcaaggtgaccgacatcagcggcaccaagagaagaaaccagagagacgcctggatcgccgacatctacctgtgcccccagaccctgaccaccccctggctgcacagatgctgctgcctgagaccctggatgaacttcaccgacatcatcctgccctag

SEQ ID NO: 31034 - protein, 150 aa, Artificial Sequence
  derived and/or modified sequence
MAALLLRHVGRHCLRAHFSPQLCIRNAVPLGTTAKEEMERFWNKNIGSNRPLSPHITIYSWSLPMAMSICHRGTGIALSADVGPRKRPEDSPAIPVWSGCPGSYCVVLYGAGSHVKKGGSQHHLPTHYYIHPSFCLSFLSPAWEKFSLFV

SEQ ID NO: 31035 - DNA, 453 bp, Artificial Sequence
  derived and/or modified sequence
atggccgccctgctgctgagacacgtgggcagacactgcctgagagcccacttcagcccccagctgtgcatcagaaacgccgtgcccctgggcaccaccgccaaggaggagatggagagattctggaacaagaacatcggcagcaacagacccctgagcccccacatcaccatctacagctggagcctgcccatggccatgagcatctgccacagaggcaccggcatcgccctgagcgccgacgtgggccccagaaagagacccgaggacagccccgccatccccgtgtggagcggctgccccggcagctactgcgtggtgctgtacggcgccggcagccacgtgaagaagggcggcagccagcaccacctgcccacccactactacatccaccccagcttctgcctgagcttcctgagccccgcctgggagaagttcagcctgttcgtgtag

SEQ ID NO: 31036 - DNA, 453 bp, Artificial Sequence
  derived and/or modified sequence
atggccgctctgctgctacgacacgtgggtcgacactgtcttcgtgcccacttctccccgcagttatgtattcgaaacgctgtgccattgggcactaccgctaaagaggagatggaacggttttggaataagaacatcgggagtaacaggcccttgagtccccacattacaatctactcgtggtctttgccgatggccatgtccatctgccacagaggaacagggatcgctctctccgccgacgtgggccccagaaaacgccccgaggactctccagccatcccagtctggtccgggtgcccgggatcttattgtgtggtcctgtatggagccggctcccacgtcaagaagggcggctcccagcaccacctcccgacccactactatatccaccctagcttttgcctcagttttctaagcccagcgtgggagaagttctccctgtttgtgtag

SEQ ID NO: 31037 - DNA, 453 bp, Artificial Sequence
  derived and/or modified sequence
atggccgccctgctgctgcggcacgtgggccgccactgcctgcgggcccacttcagcccccagctgtgcatcagaaatgctgtgcccctgggcaccacagccaaggaggagatggagcgcttctggaacaagaacatcggcagcaaccggcccctgagcccccacatcaccatctacagctggagcctgcccatggccatgagcatctgccaccggggcaccggcatcgccctgtctgcagatgtgggccccaggaagaggcctgaggacagccctgccatccctgtgtggagcggctgccccggcagctactgtgtggtgctgtatggagctggcagccacgtgaagaagggcggcagccagcaccacctgcccacccactactacatccaccccagcttctgcctgtccttcctgagccctgcctgggagaagttcagcctgtttgtgtag

SEQ ID NO: 31038 - DNA, 453 bp, Artificial Sequence
  derived and/or modified sequence
atggccgccctgctgctgcggcacgtgggccggcactgcctgcgggctcacttcagcccccagctgtgtatcagaaatgctgtccctttaggaacgacagcaaaagaggagatggagaggttttggaacaaaaacataggctcgaaccgcccccttagtccacacataactatctattcctggagcctccccatggctatgagcatctgtcacaggggaacagggatcgctttgagcgcagacgtgggtccacggaagagaccagaggatagtcctgcaattccagtgtggtccgggtgccccggatcgtactgcgtagtactgtatggggccggttctcacgtgaaaaaaggcgggtcccaacaccacctgcccactcattactacattcatcctagtttttgcttgtccttcctgagtccagcttgggagaagttttcgctcttcgtttag

SEQ ID NO: 31039 - DNA, 453 bp, Artificial Sequence
  derived and/or modified sequence
atggccgctctgctcctacggcatgtcggtagacattgccttcgcgctcatttcagcccccagctgtgtatccggaacgccgtccccctgggcacaacagcgaaagaggagatggagcggttctggaacaagaatattggttccaaccggccactctctcctcatatcacaatatacagctggtctctccccatggctatgtccatctgccatcgaggaaccggaatcgccctcagtgccgatgtgggacctagaaagaggcctgaggacagtcctgctataccagtctggtcaggttgtcccggaagctattgcgtggtgttgtacggggctggttcccatgtgaagaaggggggatctcaacaccacctgcccacacactactatatccatccctcattttgcctctctttcttgtccccagcttgggaaaagttctcactgtttgtgtag

SEQ ID NO: 31040 - DNA, 1127 bp, Artificial Sequence
  derived and/or modified sequence
acttccgtccagaccggaacccaagatggctgcgctgttgctgagacacgttggtcgtcattgcctccgagcccactttagccctcagctctgtatcagaaatgctgttcctttgggaaccacggccaaagaagagatggagcggttctggaataagaatataggttcaaaccgtcctctgtctccccacattactatctacagttggtctcttcccatggcgatgtccatctgccaccgtggcactggtattgctttgagtgcagatgtgggacctaggaaaaggcctgaagattccccagctataccagtctggagtggttgtcctggttcttactgtgttgtcctctatggggctggcagccatgtgaagaaaggaggctcccagcatcatcttcctacacattattacattcacccatctttctgtttgtcattcttatctccagcctgggaaaagttctccttatttgtttagatccttttgtattttcagatctccttggagcagtagagtacctggtagaccataatagtggaaaagggtctagttttccccttgtttctaaagatgaggtggctgcaaaaactccccttttttgcccacagcttgcctactctcggcctagaagcagttattctctctccatattgggctttgatttgtgctgagggtcagcttttggctccttcttcctgagacagtggaaacaatgccagctctgtggcttctgccctggggatgggccgggttggggggtgggttggtgaggctttgggtgccactgcctgtgggttgctggcttaaaggacaattctcttcattggtgagagcccaggccattaacacctacacagtgttattgaaagaagagaggtgggggtggaggggaattagtctgtcccagctagagggagataaagagggctagttagttcttggagcagctgcttttgaggagaaaatatatagctttggacacgaggaagatctagaaaattatcattgaacatattaatggttatttctttttcttggatttccagaaaagcctcttaattttatgctttctcatcgaagtaatgtaccctttttttctgaaactgaattaaatactcattttatc

SEQ ID NO: 31041 - protein, 135 aa, Artificial Sequence
  derived and/or modified sequence
MAALLLRHVGRHCLRAHFSPQLCIRNWSLPMAMSICHRGTGIALSAGVSLFGMSALLLPGNFESYLELVKSLCLGPALIHTAKFALVFPLMYHTWNGIRHLMWDLGKGLKIPQLYQSGVVVLVLTVLSSMGLAAM

SEQ ID NO: 31042 - DNA, 408 bp, Artificial Sequence
  derived and/or modified sequence
atggccgccctgctgctgagacacgtgggcagacactgcctgagagcccacttcagcccccagctgtgcatcagaaactggagcctgcccatggccatgagcatctgccacagaggcaccggcatcgccctgagcgccggcgtgagcctgttcggcatgagcgccctgctgctgcccggcaacttcgagagctacctggagctggtgaagagcctgtgcctgggccccgccctgatccacaccgccaagttcgccctggtgttccccctgatgtaccacacctggaacggcatcagacacctgatgtgggacctgggcaagggcctgaagatcccccagctgtaccagagcggcgtggtggtgctggtgctgaccgtgctgagcagcatgggcctggccgccatgtag

SEQ ID NO: 31043 - DNA, 408 bp, Artificial Sequence
  derived and/or modified sequence
atggctgcccttctgctgcggcacgtgggccgtcattgtcttagggctcatttctctccacagttgtgtattcggaactggtcacttccaatggctatgtctatttgtcacaggggtaccgggattgccctgagtgctggtgtctctttgtttggaatgagcgctctgctcctgcccgggaatttcgagtcttatcttgagttggtcaaaagcctgtgcctgggcccagcgctgattcacacagccaaatttgccctcgtctttccattaatgtatcacacttggaacggaataaggcacttaatgtgggatctgggcaaaggactcaaaatcccacagttgtatcaatctggagtggttgtgctggtgctgactgtactctcttctatgggtcttgctgctatgtag

SEQ ID NO: 31044 - DNA, 408 bp, Artificial Sequence
  derived and/or modified sequence
atggccgccctgctgctgcggcacgtgggccgccactgcctgcgggcccacttcagcccccagctgtgcatccggaactggagcctgcccatggccatgagcatctgccaccggggcaccggcatcgccctgtctgctggggtgtccctgtttggcatgtctgccctgctgctgcccggcaactttgagagctacctggagctggtgaagagcctgtgcctgggccctgccctgatccacacagccaagtttgccctggtgttccccctgatgtaccacacctggaatggcatccgccacctgatgtgggacctgggcaagggcctgaagatcccccagctgtaccagagcggcgtggtggtgctggtgctgactgtgctgagctccatgggcctggccgccatgtag

SEQ ID NO: 31045 - DNA, 408 bp, Artificial Sequence
  derived and/or modified sequence
atggccgccctgctgctgcggcacgtgggccggcactgcctgcgggcccacttctcaccccagttatgcatcaggaactggtccctccctatggccatgagtatttgccatagaggaactggtatcgcactgagcgcaggtgtttcactatttggcatgagtgcgttgctgttgcccggcaatttcgagtcctatctcgagctggtcaagtctctctgccttggccctgcccttatccatactgcgaagttcgcactggtattcccattgatgtaccacacctggaacggcatccgccacctaatgtgggatctgggcaagggattgaagattccccagctttaccagtccggcgtcgtggtgctcgtgctgaccgtgttaagctcgatgggattggccgctatgtag

SEQ ID NO: 31046 - DNA, 408 bp, Artificial Sequence
  derived and/or modified sequence
atggctgcactgctgttgaggcatgtggggcgacactgtcttagagcccatttttctcctcaactgtgtatcaggaattggtctcttccgatggccatgagtatttgccacagagggaccgggattgccctgagtgcaggtgtgagcttatttggcatgtcagccttactgctcccagggaacttcgagtcatatctggagctcgtcaaaagtttgtgtcttggtccagctctcattcataccgcaaagttcgccctagtgttccccctgatgtatcacacttggaacggcatcagacacctgatgtgggatctgggcaaaggcttaaagatcccccagctgtatcagtccggcgttgttgtcctggttctgaccgtgttgtcgagcatgggcctggctgctatgtag

SEQ ID NO: 31047 - DNA, 460 bp, Artificial Sequence
  derived and/or modified sequence
cttccgtccagaccggaacccaagatggctgcgctgttgctgagacacgttggtcgtcattgcctccgagcccactttagccctcagctctgtatcagaaattggtctcttcccatggcgatgtccatctgccaccgtggcactggtattgctttgagtgcaggggtctctctttttggcatgtcggccctgttactccctgggaactttgagtcttatttggaacttgtgaagtccctgtgtctggggccagcactgatccacacagctaagtttgcacttgtcttccctctcatgtatcatacctggaatgggatccgacacttgatgtgggacctaggaaaaggcctgaagattccccagctataccagtctggagtggttgtcctggttcttactgtgttgtcctctatggggctggcagccatgtgaagaaaggaggctcccagcatcatcttcc

SEQ ID NO: 31048 - protein, 116 aa, Artificial Sequence
  derived and/or modified sequence
MAALLLSWSLPMAMSICHRGTGIALSAGVSLFGMSALLLPGNFESYLELVKSLCLGPALIHTAKFALVFPLMYHTWNGIRHLMWDLGKGLKIPQLYQSGVVVLVLTVLSSMGLAAM

SEQ ID NO: 31049 - DNA, 351 bp, Artificial Sequence
  derived and/or modified sequence
atggccgccctgctgctgagctggagcctgcccatggccatgagcatctgccacagaggcaccggcatcgccctgagcgccggcgtgagcctgttcggcatgagcgccctgctgctgcccggcaacttcgagagctacctggagctggtgaagagcctgtgcctgggccccgccctgatccacaccgccaagttcgccctggtgttccccctgatgtaccacacctggaacggcatcagacacctgatgtgggacctgggcaagggcctgaagatcccccagctgtaccagagcggcgtggtggtgctggtgctgaccgtgctgagcagcatgggcctggccgccatgtag

SEQ ID NO: 31050 - DNA, 351 bp, Artificial Sequence
  derived and/or modified sequence
atggcagctttattgctgtcatggtccctgccaatggccatgtccatctgtcaccgggggaccgggatagctctgagtgccggcgtcagtctctttggtatgagcgccctgctgttgccaggaaacttcgagagctatctggagctagtcaagtctctgtgcttaggacctgccctgattcacactgctaagttcgccctggtgtttccgctgatgtaccacacgtggaacggcattcgccacctaatgtgggacttggggaaaggtttgaagatcccccaactgtatcagtctggggtagtcgtactggtcctcaccgtgttgtcctctatgggcttagcagccatgtag

SEQ ID NO: 31051 - DNA, 351 bp, Artificial Sequence
  derived and/or modified sequence
atggccgccctgctgctgtcctggagcctgcccatggccatgagcatctgccaccggggcactggaattgccctgtctgctggggtgtccctgtttggcatgtctgccctgctgctgcccggcaactttgagagctacctggagctggtgaagagcctgtgcctgggccctgccctgatccacacagccaagtttgccctggtgttccccctgatgtaccacacctggaatggcatccgccacctgatgtgggacctgggcaagggcctgaagatcccccagctgtaccagagcggcgtggtggtgctggtgctgactgtgctgagctccatgggcctggccgccatgtag

SEQ ID NO: 31052 - DNA, 351 bp, Artificial Sequence
  derived and/or modified sequence
atggccgccctgctgctgagctggagcctgcccatggccatgagcatttgtcatcggggaaccgggatagcactgagtgctggtgtgtccctgtttgggatgtctgcgctattactccctggaaacttcgagtcctacctggagttggtaaaaagtctatgcctgggcccagccctgatacataccgcgaaattcgccctggtttttcctctcatgtaccatacttggaatgggatccggcacttaatgtgggatctgggaaaggggctgaaaatccctcagttatatcaaagtggagttgtggtccttgtcctgaccgtgctgtcgtcaatggggctcgctgctatgtag

SEQ ID NO: 31053 - DNA, 351 bp, Artificial Sequence
  derived and/or modified sequence
atggcggctcttctgttgtcctggtcgctccctatggccatgagcatctgccacagagggactgggatagccctcagtgcgggagtgtctctatttggcatgagtgctctgctcctgccaggaaacttcgaatcttatctggagttggtcaagagcctgtgcctcgggcctgcactcattcacaccgccaagtttgctctggtgtttcccctcatgtaccatacctggaacggaatccgccacttgatgtgggatctcggtaaaggactcaaaatccctcagctgtatcagtctggcgtggtggtactggtccttactgtgttaagtagcatggggctggcagcgatgtag

SEQ ID NO: 31054 - DNA, 369 bp, Artificial Sequence
  derived and/or modified sequence
tccagaccggaacccaagatggctgcgctgttgctgagttggtctcttcccatggcgatgtccatctgccaccgtggcactggtattgctttgagtgcaggggtctctctttttggcatgtcggccctgttactccctgggaactttgagtcttatttggaacttgtgaagtccctgtgtctggggccagcactgatccacacagctaagtttgcacttgtcttccctctcatgtatcatacctggaatgggatccgacacttgatgtgggacctaggaaaaggcctgaagattccccagctataccagtctggagtggttgtcctggttcttactgtgttgtcctctatggggctggcagccatgtga

SEQ ID NO: 31055 - protein, 90 aa, Artificial Sequence
  derived and/or modified sequence
MNMKPATASALLLLLLGLAWTQGSHGWGADASSLQKRAGRDDQNYNYNQHAYPTAYGGKYSVKTPAKGGVSPSSSASRVQPGLLQWVKFW

SEQ ID NO: 31056 - DNA, 600 bp, Artificial Sequence
  derived and/or modified sequence
acaagcacatgaacatgaagccggccactgcctctgctctgctcctgctcctgctgggcctggcctggacccaggggagccacggctggggtgcggacgcgtcatcactgcagaaacgtgcaggcagagacgatcagaactacaattacaaccagcatgcgtatcccactgcctatggtgggaagtactcagtcaagacccctgcaaaggggggagtctcaccttcttcctcggcttcccgggtgcaacctggcctgctgcagtgggtgaagttttggtaggcaatttcttgcaaccaccaccgaggccccgaaaagcactggtcgtcagggagctcctccccttggcccccagcctgtgccagccctggcccggctgccacacctctgtttcctaggctggggacccagcttgtctctccttgtttcttcccactgcactgtggtgcttcagtggccaccagcctcgtcacatacaccagcatctttctgtacctcctccctttggtgacctgaagtcactgtgacagttctccaggaaggaggagcttcctacttttgagtttctctgtggaaataaaacatgaatcttgtttcccta

SEQ ID NO: 31057 - DNA, 273 bp, Artificial Sequence
  derived and/or modified sequence
atgaacatgaagcccgcaacagcttccgcacttctgctgctgctgctgggattagcatggacccagggctcacacggctggggagcagacgcttccagcctccaaaagcgcgctggacgggatgaccagaattacaactataatcaacatgcataccccaccgcctatggcggaaaatacagcgtaaagaccccagcgaaagggggagtttctccatcttccagtgcatcacgggtccagcccggattgttgcagtgggtgaagttttggtag

SEQ ID NO: 31058 - DNA, 273 bp, Artificial Sequence
  derived and/or modified sequence
atgaacatgaagcctgccactgcatccgcgttgctgttgctgctcctcgggctcgcttggacacagggctcccacggatggggtgcagacgcttcatccctccagaaacgtgcaggcagagacgaccagaactataactacaatcaacacgcctatcccacagcgtatggcggcaagtactccgttaagacgcccgctaaagggggagtaagcccttcttcttccgcctctcgcgtacagcccggacttcttcaatgggtcaaattttggtag

SEQ ID NO: 31059 - DNA, 273 bp, Artificial Sequence
  derived and/or modified sequence
atgaacatgaagcccgccaccgccagcgccctgctgctgctgctgctgggcctggcctggacccagggcagccacggctggggcgccgacgccagcagcctgcagaagagagccggcagagacgaccagaactacaactacaaccagcacgcctaccccaccgcctacggcggcaagtacagcgtgaagacccccgccaagggcggcgtgagccccagcagcagcgccagcagagtgcagcccggcctgctgcagtgggtgaagttctggtag

SEQ ID NO: 31060 - DNA, 273 bp, Artificial Sequence
  derived and/or modified sequence
atgaacatgaaacccgcaacagcgtctgctctgctgctgctgctgttgggacttgcatggacacagggatcccatggctggggagccgatgccagcagccttcaaaaacgagcgggaagggacgaccagaattataactacaaccagcacgcataccccacagcatacggaggaaagtacagcgtcaaaaccccagctaagggaggcgtctccccgagctcatcggccagtcgcgtacagccgggcctgttacagtgggtaaagttctggtag

SEQ ID NO: 31061 - DNA, 273 bp, Artificial Sequence
  derived and/or modified sequence
atgaacatgaagccagccacagccagcgccctgctgctgctgctgctgggcctggcctggacccagggcagccacggctggggcgcagatgccagcagcctgcagaagagagctggaagagatgaccagaactacaactacaaccagcacgcctaccccacagcctacggcggcaagtacagcgtgaagaccccagccaagggcggcgtgagccccagcagcagcgccagccgggtgcagcccggcctgctgcagtgggtgaagttctggtag

SEQ ID NO: 31062 - DNA, 273 bp, Artificial Sequence
  derived and/or modified sequence
atgaacatgaagcccgccaccgccagcgccctgctgctgctgctgttaggccttgcatggacccaagggagtcatggttggggcgctgatgccagtagcctgcagaaacgtgcgggccgggacgaccagaattacaattataatcagcacgcctaccctacagcttatggaggtaagtacagtgtgaaaacacctgccaagggcggtgttagcccctctagctctgcatctcgagttcaaccaggccttttacaatgggtgaagttctggtag

SEQ ID NO: 31063 - RNA, 273 nt, Artificial Sequence
  derived and/or modified sequence
augaacaugaagccugccacugcauccgcguugcuguugcugcuccucgggcucgcuuggacacagggcucccacggauggggugcagacgcuucaucccuccagaaacgugcaggcagagacgaccagaacuauaacuacaaucaacacgccuaucccacagcguauggcggcaaguacuccguuaagacgcccgcuaaagggggaguaagcccuucuucuuccgccucucgcguacagcccggacuucuucaaugggucaaauuuugguag

SEQ ID NO: 31064 - protein, 733 aa, Artificial Sequence
  derived and/or modified sequence
MGWMGEKTGKILTEFLQFYEDQYGVALFNSMRHEIEGTGLPQAQLLWRKVPLDERIVFSGNLFQHQEDSKKWRNRFSLVPHNYGLVLYENKAAYERQVPPRAVINSAGYKILTSVDQYLELIGNSLPGTTAKSGSAPILKCPTQFPLILWHPYARHYYFCMMTEAEQDKWQAVLQDCIRHCNNGIPEDSKVEGPAFTDAIRMYRQSKELYGTWEMLCGNEVQILSNLVMEELGPELKAELGPRLKGKPQERQRQWIQISDAVYHMVYEQAKARFEEVLSKVQQVQPAMQAVIRTDMDQIITSKEHLASKIRAFILPKAEVCVRNHVQPYIPSILEALMVPTSQGFTEVRDVFFKEVTDMNLNVINEGGIDKLGEYMEKLSRLAYHPLKMQSCYEKMESLRLDGLQQRFDVSSTSVFKQRAQIHMREQMDNAVYTFETLLHQELGKGPTKEELCKSIQRVLERVLKKYDYDSSSVRKRFFREALLQISIPFLLKKLAPTCKSELPRFQELIFEDFARFILVENTYEEVVLQTVMKDILQAVKEAAVQRKHNLYRDSMVMHNSDPNLHLLAEGAPIDWGEEYSNSGGGGSPSPSTPESATLSEKRRRAKQVVSVVQDEEVGLPFEASPESPPPASPDGVTEIRGLLAQGLRPESPPPAGPLLNGAPAGESPQPKAAPEASSPPASPLQHLLPGKAVDLGPPKPSDQETGEQVSSPSSHPALHTTTEDSAGVQTEF

SEQ ID NO: 31065 - DNA, 3760 bp, Artificial Sequence
  derived and/or modified sequence
caggaactgggccagttccggtcccttccttttggggctctcactctggaggatggggtggatgggagaaaaaaccgggaagatcctgacggagttcctccagttctatgaagaccagtatggcgtggctctcttcaacagcatgcgccatgagattgagggcacggggctgccgcaggcccagctgctctggcgcaaggtgccactggacgagcgcatcgtcttctcggggaacctcttccagcaccaggaggacagcaagaagtggagaaaccgcttcagcctcgtgccccacaactacgggctggtgctctacgaaaacaaagcggcctatgagcggcaggtcccaccacgagccgtcatcaacagtgcaggctacaaaatcctcacgtccgtggaccaatacctggagctcattggcaactccttaccagggaccacggcaaagtcgggcagtgcccccatcctcaagtgccccacacagttcccgctcatcctctggcatccttatgcgcgtcactactacttctgcatgatgacagaagccgagcaggacaagtggcaggctgtgctgcaggactgcatccggcactgcaacaatggaatccctgaggactccaaggtagagggccctgcgttcacagatgccatccgcatgtaccgacagtccaaggagctgtacggcacctgggagatgctgtgtgggaacgaggtgcagatcctgagcaacctggtgatggaggagctgggccctgagctgaaggcagagctcggcccgcggctgaaggggaaaccgcaggagcggcagcggcagtggatccagatctcggacgccgtgtaccacatggtgtacgagcaggccaaggcgcgcttcgaggaggtgctgtccaaggtgcagcaggtgcagccggccatgcaggccgtcatccgaactgacatggaccaaattatcacctccaaggagcaccttgccagcaagatccgagccttcatcctccccaaggcagaggtgtgcgtgcggaaccatgtccagccctacatcccatccatcctggaggccctgatggtccccaccagccagggcttcactgaggtgcgagatgtcttcttcaaggaggtcacggacatgaacctgaacgtcatcaacgagggcggcattgacaagctgggcgagtacatggagaagctgtcccggctggcgtaccaccccctgaagatgcagagctgctatgagaagatggagtcgctgcgactggacgggctgcagcagcgatttgatgtgtccagcacgtccgtgttcaagcagcgagcccagatccacatgcgggagcaaatggacaatgccgtgtatacgttcgagaccctcctgcaccaggagctggggaaggggcccaccaaggaggagctgtgcaagtccatccagcgggtcctggagcgggtgctgaagaaatacgactacgacagcagctctgtgcggaagaggttcttccgggaggcgctgctgcagatcagcatcccgttcctgctcaagaagctggcccctacctgcaagtcggagctgccccggttccaggagctgatcttcgaggactttgccaggttcatcctggtggaaaacacgtacgaggaggtggtgctgcagaccgtcatgaaggacatcctgcaggctgtgaaggaggccgcggtgcagaggaagcacaacctctaccgggacagcatggtcatgcacaacagcgaccccaacctgcacctgctggccgagggcgcccccatcgactggggcgaggagtacagcaacagcggcgggggcggcagccccagccccagcaccccggagtcagccaccctctcggaaaagcgacggcgcgccaagcaggtggtctctgtggtccaggatgaggaggtggggctgccctttgaggctagccctgagtcaccaccacctgcgtccccggacggtgtcactgagatccgaggcctgctggcccaaggtctgcggcctgagagccccccaccagccggccccctgctcaacggggcccccgctggggagagtccccagcctaaggccgcccccgaggcctcctcgccgcctgcctcacccctccagcatctcctgcctggaaaggctgtggaccttgggccccccaagcccagcgaccaggagactggagagcaggtgtccagccccagcagccaccccgccctccacaccaccaccgaggacagtgcaggggtgcagactgagttctaggccagtgggtccctgactgctgcacatggcacaggccgttcccttccggacccaggcaggctcagctctggggagggcaccctggtctgtgccttgtgggtggaggcggggcagggctgtgtggcaccgccagggagcgggcccacctgagtcactttattgggttcagtcaacactttcttgctccctgttttctcttctgtgggatgatctcagatgcaggggctggttttggggttttcctgcttgtgccaagggctggacactgctggggggctggaaagcccctcccttcctgtccttctgtggcctccatcccctcatgggtgctgccatccttcctggagagagggaggtgaaagctggtgtgagcccagtgggttcccgcccactcacccaggagctggctgggccaggaccgggagagggagcactgctgccctcctggccctgctccttccgcagttaggggtggaccgagcctcgctttccccactgttctggagggaaggggaaggagggggtcttcaggctggagccaggctgggggtgctgggtggagagatgagatttagggggtgcctcatggggtgggcaggcctggggtgaaatgagaaaggcccagaacgtgcaggtctgcggaggggaagtgtcctgagtgaaggaggggacccccatcctgggggatgctgggagtgagtgagtgagatggctgagtgagggttatggggagcctgaggttttatgggcctgtgtatccccttctcccggccccagcctgcctccctcctgcccgcctggcccacaggtctccctctggtccctgtccctctggtggttggggatggagcggcagcaaggggtgtaatggggctgggttctgtcttctacaggccaccccgaggtcctcagtggttgcctggggagccggacggggctcctgaggggtacaggttgggtgggccctccctgagggtctggggtcaggctttggcctctgctgcctctcagtcaccaagtcacctccctctgaaaatccagtcccttctttggatgtccttgtgagtcactctgggcctggctgtcgtccctcctcagcttcttgttcctgggacaagggtcaagccaggatgggcccaggcctgggatcccccaccccaggacccccaggccccctcccctgctgctttgcggggggcagggcagaaatggactccttttgggtccccgaggtggggtcccctcccagccctgcatcctccgtgccctagacctgctccccagaggaggggccttgacccacaggacgtgtggtggcgcctggcactcagggacccccagctgccgcagccctggtctctggcgcatctcttccctcttgtcccgaagatctgcgcctctagtgccttttgaggggttcccatcatccctccctgatattgtattgaaaatattatgcacactgttcatgcttctactaatcaataaacgctttatttaaagcca

SEQ ID NO: 31066 - DNA, 2028 bp, Artificial Sequence
  derived and/or modified sequence
agccttcatcctccccaaggcagaggtgtgcgtgcggaaccatgtccagccctacatcccatccatcctggaggccctgatggtccccaccagccagggcttcactgaggtgcgagatgtcttcttcaaggaggtcacggacatgaacctgaacgtcatcaacgagggcggcattgacaagctgggcgagtacatggagaagctgtcccggctggcgtaccaccccctgaagatgcagagctgctatgagaagatggagtcgctgcgactggacgggctgcagcagcgatttgatgtgtccagcacgtccgtgttcaagcagcgagcccagatccacatgcgggagcaaatggacaatgccgtgtatacgttcgagaccctcctgcaccaggagctggggaaggggcccaccaaggaggagctgtgcaagtccatccagcgggtcctggagcgggtgctgaagaaatacgactacgacagcagctctgtgcggaagaggttcttccgggaggcgctgctgcagatcagcatcccgttcctgctcaagaagctggcccctacctgcaagtcggagctgccccggttccaggagctgatcttcgaggactttgccaggttcatcctggtggaaaacacgtacgaggaggtggtgctgcagaccgtcatgaaggacatcctgcaggctgtgaaggaggccgcggtgcagaggaagcacaacctctaccgggacagcatggtcatgcacaacagcgaccccaacctgcacctgctggccgagggcgcccccatcgactggggcgaggagtacagcaacagcggcgggggcggcagccccagccccagcaccccggagtcagccaccctctcggaaaagcgacggcgcgccaagcaggtggtctctgtggtccaggatgaggaggtggggctgccctttgaggctagccctgagtcaccaccacctgcgtccccggacggtgtcactgagatccgaggcctgctggcccaaggtctgcggcctgagagccccccaccagccggccccctgctcaacggggcccccgctggggagagtccccagcctaaggccgcccccgaggcctcctcgccgcctgcctcacccctccagcatctcctgcctggaaaggctgtggaccttgggccccccaagcccagcgaccaggagactggagagcaggtgtccagccccagcagccaccccgccctccacaccaccaccgaggacagtgcaggggtgcagactgagttctaggccagtgggtccctgactgctgcacatggcacaggccgttcccttccggacccaggcaggctcagctctggggagggcaccctggtctgtgccttgtgggtggaggcggggcagggctgtgtggcaccgccagggagcgggcccacctgagtcactttattgggttcagtcaacactttcttgctccctgttttctcttctgtgggatgatctcagatgcaggggctggttttggggttttcctgcttgtgccaagggctggacactgctggggggctggaaagcccctcccttcctgtccttctgtggcctccatcccctcatgggtgctgccatccttcctggagagagggaggtgaaagctggtgtgagcccagtgggttcccgcccactcacccaggagctggctgggccaggaccgggagagggagcactgctgccctcctggccctgctccttccgcagttaggggtggaccgagcctcgctttccccactgttctggagggaaggggaaggagggggtcttcaggctggagccaggctgggggtgctgggtggagagatgagatttagggggtgcctcatggggtgggcaggcctggggtgaaatgagaaaggcccagaacgtgcaggtctgcggaggggaagtgtcctgagtgaaggaggggttcccatcatccctccctgatattgtattgaaaatattatgcacactgttcatgcttctactaatcaataaacgctttatttaaagcc

SEQ ID NO: 31067 - DNA, 2202 bp, Artificial Sequence
  derived and/or modified sequence
atgggttggatgggagagaagaccggaaagattctcactgaatttctccagttctatgaagaccaatacggagtggctctctttaactctatgaggcatgaaattgaaggcaccggactaccgcaggcgcaactgctgtggcgcaaagtaccacttgacgagcggatagtgttttcaggcaatctgttccagcatcaggaggacagcaaaaagtggagaaatcgcttctctctagtgccccacaactatgggctcgtcctctacgaaaacaaagctgcatatgaaagacaggttcctcctagagcggtgattaatagcgcaggctacaagatactgaccagtgtggatcagtatctggaattgatcgggaattcactgccgggaaccacggccaaatctggcagcgccccgatcctaaaatgtcccacccagttcccccttatcctttggcacccgtacgcccgccactactatttctgtatgatgactgaggctgaacaggataaatggcaggctgttttgcaagactgtatacgccattgcaataatggtatccctgaagatagcaaggtggagggaccggcattcaccgacgctatccgtatgtataggcagtcgaaagaactctacgggacctgggagatgctgtgcggcaacgaggtacagatactaagtaacctggtgatggaagagctcggtcccgaactcaaggccgaacttggtccccggctcaaaggcaaaccccaagagcggcagagacaatggatacaaatctcggatgccgtgtaccatatggtttacgaacaagccaaggctcggttcgaagaagttctgtcaaaagtccagcaggtgcagcccgccatgcaggcagtgatccgcacagacatggaccaaattataacatccaaagaacatctggccagcaagattcgcgccttcattctgcctaaggctgaagtgtgcgtgaggaaccacgtacagccatacatcccctcaatcttggaggccctaatggtaccaacttcacagggatttaccgaagtaagggacgtgttcttcaaggaagtgactgacatgaatttaaacgtgattaatgagggcgggatcgataaactgggtgagtatatggagaagttatccagattggcctaccaccctcttaaaatgcagagttgctacgaaaaaatggaaagcttgcggcttgacggcttgcagcagagattcgacgtatccagcactagtgtgttcaagcagcgcgctcagatccatatgcgagaacagatggacaacgccgtctatacctttgagaccctcctgcaccaggaactgggcaaaggccccactaaggaggagctctgcaagagtatccaaagagtactggaacgtgtgctaaagaagtacgattatgacagcagctctgtacgaaagcgctttttccgtgaagctcttctacaaatttcaatccccttcctcctgaagaaactggctcctacctgcaagtcagaacttcctcgattccaggaactgatatttgaggactttgccaggtttattctggtagagaacacctacgaggaggtggtgctgcagacagtcatgaaagatatattacaggcagtaaaggaagccgctgtgcagcgcaagcacaacttgtacagggacagcatggtaatgcacaatagcgaccccaatctgcatctgctagctgaaggcgcccctattgactggggggaggaatactccaactctgggggcggggggtccccttcgccctcaactcccgaatcagctacgctcagcgaaaagagacgcagagccaagcaagtagtctctgttgttcaggacgaagaggtgggacttcccttcgaagcatctccggagtccccccctccagcctcacctgacggagttacagagatccggggcctcctggcacagggcctacggcctgagagcccacccccggccggacctttgctaaacggagcaccggccggggagagcccccagcccaaggccgcacctgaagccagttcacctcccgccagccctttgcagcacctgctcccggggaaggccgtcgatctaggccctcctaaaccttctgatcaggaaacaggcgaacaggtctccagtcctagctctcatcccgcgctgcacacgaccaccgaagatagcgcaggggtccagaccgagttttag

SEQ ID NO: 31068 - DNA, 1191 bp, Artificial Sequence
  derived and/or modified sequence
atggtgcccactagtcagggttttaccgaggtccgggacgtctttttcaaagaggtgaccgatatgaatcttaacgttatcaacgagggcgggattgacaaactgggggagtatatggagaagctcagccggctcgcttatcatccccttaagatgcagtcttgctacgaaaagatggagtccttgcggctggacgggcttcaacagcgtttcgatgtgagttccaccagtgtgttcaagcaaagagcccagatccatatgagggaacaaatggacaatgccgtctacacattcgaaacactgctgcaccaggagctgggaaagggtccaacaaaagaggagttatgcaaatctatccaaagggtcctggagagggtgctgaagaagtatgattatgactcatcctccgtgcggaagagattttttagagaagcgttactccaaatctccattccattcctgttgaagaagttagcccctacatgcaagtcggagctaccaaggttccaggagctgatcttcgaggacttcgctcggtttatactggtagagaacacatatgaagaggtagtactgcaaacagtgatgaaggacatcttacaagccgtgaaggaggccgctgtccagcggaagcacaatttatatagggactctatggtgatgcataattctgacccaaacctccacctgctcgccgagggagccccaatcgattggggggaagagtactcaaacagcggggggggcggatctccaagtcccagcacccccgagagcgccactctgtcggaaaagcgcaggcgcgccaagcaagtggtctccgtagtgcaagatgaggaagtgggacttccctttgaggcctccccggagagtcccccgccagcaagcccagacggcgttactgaaattcggggcttgcttgcccagggactgcgtcccgaatccccacccccagccgggccactcctgaacggagctccagccggtgagagccctcagcccaaggccgcacccgaggcatcctcccctcccgcatctccactgcagcacttgctgcctgggaaggcagtcgatctgggtccacccaagccgagcgaccaggaaacaggcgagcaagtgtccagcccttcctcccaccccgcactgcacaccactaccgaagattcagcaggtgtccagacagagttctag

SEQ ID NO: 31069 - DNA, 2202 bp, Artificial Sequence
  derived and/or modified sequence
atgggctggatgggagagaagacaggcaagatcctgacagagttcctgcagttctatgaggaccagtatggagtggccctcttcaacagcatgagacatgaaattgagggcaccggcctgccccaggcccagctgctgtggaggaaggtgcccctggatgagcgcatcgtgttttctggcaacctcttccagcaccaggaggacagcaagaagtggaggaaccgcttcagcctggtgccccacaactacggcctggtgctgtatgagaacaaggccgcctatgaaaggcaggtgcccccccgggccgtcatcaacagcgctggctacaagatcctgacctctgtggaccagtacctggagctgattggcaacagcctgcccggcaccacagccaagagcggcagcgcccccatcctgaagtgccccacccagttccccctcatcctgtggcacccctatgcccggcactactacttctgcatgatgacagaagctgagcaggacaagtggcaggccgtgctgcaggactgcatccgccactgcaacaacggcatccctgaggacagcaaggtggagggccctgccttcacagatgccatccgcatgtaccggcagagcaaggagctgtatggcacctgggagatgctgtgtggaaatgaggtgcagatcctgagcaacctggtgatggaggagctgggccctgagctgaaggccgagctgggcccccggctgaagggcaagccccaggagcggcagaggcagtggatccagatcagtgatgctgtgtaccacatggtgtatgagcaggccaaggccaggtttgaggaggtgctgagcaaggtgcagcaggtgcagcctgccatgcaggccgtcatcagaacagacatggaccagatcatcaccagcaaggagcacctggccagcaagatccgggccttcatcctgcccaaggccgaggtgtgtgtgagaaatcatgtgcagccctacatccccagcatcctggaggccctgatggtgcccaccagccagggcttcacagaggtgagagatgtgttcttcaaggaggtgacagacatgaacctgaatgtcatcaatgaaggaggcatcgacaagctgggggagtacatggagaagctgagccggctggcctaccaccccctgaagatgcagagctgctatgagaagatggagagcctgcggctggatggcctgcagcagagatttgatgtgagcagcaccagcgtcttcaagcagagggcccagatccacatgagggagcagatggacaatgctgtgtacacctttgagaccctgctgcaccaggagctgggcaagggccccaccaaggaggagctgtgcaagagcatccagagggtgctggagcgggtgctgaagaagtatgactatgacagcagctctgtgaggaagcgcttcttccgggaggccctgctgcagatcagcatccccttcctgctgaagaagctggcccccacctgcaagtctgagctgccccgcttccaggagctgatctttgaggactttgcccgcttcatcctggtggagaacacctatgaggaggtggtgctgcagacagtgatgaaggacatcctgcaggccgtgaaggaggccgctgtgcagaggaagcacaacctgtacagagacagcatggtgatgcacaacagcgaccccaacctgcacctgctggccgagggcgcccccatcgactggggcgaggagtacagcaacagcggcggcggcggcagccccagccccagcaccccagagagcgccaccctgtctgagaagagaagaagagccaagcaggtggtgtctgtggtgcaggatgaggaggtgggcctgccctttgaggccagccctgagagccccccaccagccagcccagatggagtgacagagatccggggcctgctggcccagggcctgcggcctgagagccccccacctgctggccccctgctgaatggagccccagctggggagagcccccagcccaaggccgcccctgaggccagcagccccccagccagccccctgcagcacctgctgcccgggaaggctgtggacctgggcccccccaagcccagcgaccaggagaccggggagcaggtgagcagccccagcagccacccagccctgcacaccaccacagaggacagcgctggggtgcagacagagttctag

SEQ ID NO: 31070 - DNA, 1191 bp, Artificial Sequence
  derived and/or modified sequence
atggtgcccaccagccagggcttcacagaggtgagagatgtgttcttcaaggaggtgacagacatgaacctgaatgtcatcaatgaaggaggcatcgacaagctgggggagtacatggagaagctgagccggctggcctaccaccccctgaagatgcagagctgctatgagaagatggagagcctgcggctggatggcctgcagcagagatttgatgtgagcagcacctctgtgttcaagcagagggcccagatccacatgagggagcagatggacaatgctgtgtacacctttgagaccctgctgcaccaggagctgggcaagggccccaccaaggaggagctgtgcaagagcatccagagggtgctggagcgggtgctgaagaagtatgactatgacagcagctctgtgaggaagcgcttcttccgggaggccctgctgcagatcagcatccccttcctgctgaagaagctggcccccacctgcaagtctgagctgccccgcttccaggagctgatctttgaagattttgcccgcttcatcctggtggagaacacctatgaggaggtggtgctgcagacagtgatgaaggacatcctgcaggccgtgaaggaggccgctgtgcagaggaagcacaacctgtacagagacagcatggtgatgcacaacagcgaccccaacctgcacctgctggccgagggcgcccccatcgactggggcgaggagtacagcaacagcggcggcggcggcagccccagccccagcaccccagagagcgccaccctgtctgagaagagaagaagagccaagcaggtggtgtctgtggtgcaggatgaggaggtgggcctgccctttgaggccagccctgagagccccccaccagccagcccagatggagtgacagagatccggggcctgctggcccagggcctgcggcctgagagccccccacctgctggccccctgctgaatggagccccagctggggagagcccccagcccaaggccgcccctgaggccagcagccccccagccagccccctgcagcacctgctgcccgggaaggctgtggacctgggcccccccaagcccagcgaccaggagactggagagcaggtgagcagccccagcagccacccagccctgcacaccaccacagaagattctgctggggtgcagacagagttctag

SEQ ID NO: 31071 - DNA, 2202 bp, Artificial Sequence
  derived and/or modified sequence
atgggctggatgggcgagaagaccggcaagatcctgaccgagttccttcagttttacgaagaccaatacggcgtagccctatttaatagcatgcggcatgaaatagaggggacggggctgccacaggcccaactgctgtggaggaaagtgccgctggatgaacggatcgtgttctcagggaatctgtttcaacaccaagaggatagcaagaaatggcgcaaccgtttttctttagtaccccacaactacggcctggtactgtatgagaataaggccgcctatgaacgccaagtgccccccagggccgtgatcaacagcgctggttataaaatcctcacaagtgtcgaccagtatcttgaactgatcggtaacagcctgcctggtaccacggcgaagagcggctctgcccctatcctgaagtgccctactcagtttcctctgattctctggcacccatacgctagacattactatttctgtatgatgaccgaagcagaacaggataagtggcaagcagttctgcaagattgcatcagacactgcaataacggtatccctgaggattccaaagttgaaggccccgcctttacggatgccattcggatgtatcggcagtccaaagagctgtatggaacctgggagatgctatgcggtaacgaagttcaaatcctgtcgaatcttgtgatggaggaattggggccggaactgaaggcagagctcggcccacgattgaagggcaagccccaggagcgccagagacagtggattcagatttccgacgcagtataccatatggtgtatgagcaggccaaggcacgttttgaggaggtgctcagcaaagtacaacaagtccagccagctatgcaggccgtgatcaggactgatatggaccagatcattacctctaaggagcacctcgctagcaagatcagggctttcatcctacccaaggccgaggtctgtgtgaggaaccatgtgcaaccctatatcccgagcatcctggaagctttaatggtgccaacaagtcagggattcaccgaggtgcgggacgtgttctttaaggaagttaccgatatgaatctgaacgtgattaacgagggtggtattgacaagcttggggagtacatggaaaagttgagtcgcctcgcctaccatccattaaaaatgcaaagctgttacgagaagatggagtcactgcgcttagacgggctccagcagcggttcgacgtgtccagcacttccgtcttcaagcagcgcgcccagatccacatgcgggagcagatggacaatgcagtgtacacttttgaaacattattgcatcaagagctgggcaagggtccgacgaaagaggaactctgtaaatctatccaacgcgtactggaaagagtgcttaaaaagtatgactacgattccagctctgtgagaaagcgattcttccgcgaagctctgctacagattagcattccattcttgcttaaaaaactggcaccaacatgtaagagtgagttgccacggttccaggagctgatctttgaagacttcgctcgtttcatcctggtagaaaacacgtatgaggaagtggtgctccagaccgtgatgaaggacatccttcaggctgtgaaagaagcggctgtgcagagaaagcacaatctgtaccgggatagcatggtaatgcacaattcggatcctaatctgcaccttcttgccgaaggagcccccattgactggggagaggaatattccaatagcgggggaggtgggtctccgtctccaagtacaccggagtcagctaccctcagcgagaagcggcggcgggcgaagcaggtagtgtcagtcgtgcaggacgaagaggtgggcctgcccttcgaggcatcccccgagagtccacctcccgccagtccagacggtgtcacagagattcggggtctactagctcaggggctgagacctgagtcaccccccccggctggacctctcctgaatggagcgccggcgggggaaagccctcagccaaaggccgcccccgaagcttcgtccccacctgccagtcctctgcagcacttgctccctgggaaagccgtggacctcggtccccctaaacccagtgatcaggaaactggggaacaggtgtcctcgccctcatctcacccagcgctgcacacaaccacagaagattctgccggggtgcaaaccgagttctag

SEQ ID NO: 31072 - DNA, 1191 bp, Artificial Sequence
  derived and/or modified sequence
atggtgcccaccagccagggcttcaccgaggtgcgggacgtgttcttcaaggaggtcacagatatgaacctcaatgtaattaatgagggcgggatcgacaaattgggggagtatatggagaaacttagtcgcctggcttaccacccgctcaagatgcagtcctgctacgaaaagatggagagcctgcggctcgatggtctccagcagagattcgacgtgagtagcacaagcgtttttaagcagcgtgcacagattcatatgagggaacagatggacaacgcagtctacacatttgagaccctgttacaccaggaactggggaaaggccctaccaaagaggaactttgcaagagcatccagagggtactcgagcgcgttctcaagaagtacgactacgactcctcgagtgtgagaaagcgattttttagagaggctttgctccagatatctatcccctttctgctgaagaaactcgcccctacatgtaagtcggaactccctaggttccaggagctcatttttgaggatttcgcccggttcatccttgtagagaatacgtatgaggaggtagtgctgcagaccgtcatgaaagacatcctgcaagctgtaaaggaagccgcggtgcagagaaaacataacctttatcgagatagtatggtgatgcacaactccgatcctaacttacacctgctcgccgagggagcgccaatcgactggggagaagagtattccaattcggggggggggggatctccttctccgtccacccctgagagtgctactttgtctgagaaacgcagaagggcaaaacaggtggttagtgttgtgcaggacgaggaagttggactcccatttgaagcttccccggaaagccccccgcccgcaagccctgacggtgttactgagataaggggactgttggctcagggactccgccctgagtctcccccacccgcgggacctctccttaacggcgcacccgccggtgaaagccctcagcctaaggcagccccagaggcctcaagtcctcctgcaagccccttgcagcatctgttgcccggaaaagcggttgatcttggccctccgaaaccgagcgatcaggagacgggagagcaggttagcagcccttctagtcaccccgcgctgcacacaaccacagaagattcagctggtgtgcagaccgagttctag

SEQ ID NO: 31073 - DNA, 2202 bp, Artificial Sequence
  derived and/or modified sequence
atgggatggatgggagagaagactggcaagatcctgacagaattcctgcagttctacgaggaccaatatggagtggcactcttcaatagcatgcgccacgagatagaaggaaccggcctcccccaggctcagctgctgtggcggaaagtgccccttgacgagcgcatcgtgtttagcggtaatctctttcagcaccaagaggactctaagaagtggaggaacaggttttctctggtgccccataactacggcttggtcctatacgagaacaaggccgcatacgaaagacaggtccctccccgtgctgtgattaatagtgctggatataagatcctgacctccgttgatcagtatcttgaactgatcggtaattcacttcccggaacaacagcaaagtccggcagcgctccaattttgaaatgcccaacccagttcccactgatcttatggcatccttacgccagacattactatttctgcatgatgacggaggcggaacaggataagtggcaagctgtcttacaggattgcatcagacactgtaataacggcatcccagaagactctaaggttgagggtccagcttttaccgacgccatacgaatgtatcgacaaagtaaagaattgtatggcacatgggaaatgctgtgcggtaacgaggttcagatcctctccaacctcgttatggaggagctagggccagagctgaaagctgaactcggccctcgcctaaaggggaaaccccaggagcggcaaagacagtggatccagatcagcgacgcagtctatcatatggtctatgagcaggctaaagcaagattcgaagaggtgctttctaaggttcagcaggtacagccggctatgcaagcagttatcagaaccgatatggaccagatcatcaccagcaaggaacacctggcatccaagattagagccttcattttgccaaaggccgaagtctgcgttcggaaccacgtgcagccatacatccccagcattctggaggccctcatggttccgacaagtcaaggctttaccgaagtgagagacgtgttcttcaaggaggttacggacatgaacctgaatgttattaatgagggcggaatcgataaattaggcgaatacatggaaaaattgagccggctggcttaccacccactcaagatgcaaagttgctatgaaaagatggaatctctccggctcgatggcctgcaacagagatttgacgtgagcagtaccagtgtgtttaaacagcgggctcagatacacatgagagagcagatggacaatgccgtgtacaccttcgaaactcttcttcaccaagaattgggtaagggtccaacaaaagaggagttgtgtaaatctattcagcgtgtactagaacgcgtgctgaaaaagtatgactacgattcctcaagcgttagaaagcgtttttttagggaagcgctcttgcagatatcaataccattcctcctgaagaagctggctccgacgtgcaagagcgaactgcctcggttccaggaactgatttttgaggattttgcccgttttatattggtcgagaacacatatgaggaagtggtgcttcaaaccgttatgaaggatatcctccaggcggtgaaggaggccgctgtgcagcggaagcataatctctaccgggattcgatggtcatgcacaattcagatccaaaccttcacctgctagccgagggtgccccaatcgattggggcgaagagtacagcaactcaggcggtggaggtagcccatcccctagcactcccgagtcagctacgctaagtgaaaagcggaggagggccaagcaggtagtaagtgtcgtccaggacgaagaggtcggtctgccctttgaagcatcaccagaatccccaccgcctgcgagcccggatggggttacggagatcagaggcctcttagcccagggtctgcgccctgagtctcctccacccgcaggccctctgctcaacggcgctcccgctggagagtctccgcaaccaaaagcagccccagaggcatcttctccacctgcgagccccctgcagcacttgctgcctgggaaagccgtcgatctaggcccaccaaaacctagcgaccaggagactggggagcaggtaagctcgccctcctcacaccccgcactccacactaccactgaagactccgccggtgtccagaccgaattctag

SEQ ID NO: 31074 - DNA, 1191 bp, Artificial Sequence
  derived and/or modified sequence
atggtacctacctctcagggttttacagaggtgagggatgtgtttttcaaagaagttaccgatatgaacctgaatgtcattaatgaaggaggaatcgacaaactcggggagtatatggagaagctgtcccgacttgcctatcaccctttaaagatgcagtcctgctacgagaaaatggaatccctgagacttgatggcctccagcaaagatttgacgtgtccagtaccagcgtgttcaaacaacgggcacagattcacatgcgcgaacaaatggacaacgctgtgtacaccttcgaaactctgttgcaccaggagctgggcaagggtccaacaaaggaagaactgtgtaagtcaatacaaagagtcctagaacgcgtgctcaagaagtatgactatgactcctcaagcgtcagaaaacgatttttccgcgaagctctgctgcagatctcaattcccttcctgcttaaaaaactcgccccaacgtgtaagagtgaactgccaaggtttcaggagctgatcttcgaagacttcgccagatttatattagtggaaaatacctatgaggaagttgtgctgcaaactgtgatgaaggacatcttgcaagctgtgaaagaggcagctgttcagcggaaacacaatctgtacagggattccatggtgatgcataactccgatcccaacctacacctgttagccgagggagctccaattgactggggggaagagtattcgaattccgggggaggcggttctccatcaccatcaacaccagagtccgccaccctctctgaaaaaagacgcagagccaagcaggtggtatctgtcgtgcaggacgaagaagttgggttaccctttgaggcgagccccgaaagcccaccccctgctagcccagacggcgtaactgagattagaggcctgttggcccaaggtctgcgacctgagtctccgcctcccgctgggccactccttaatggcgcaccagcaggggaatctccccagcccaaggcggctccggaagcctcatctcccccagcctctcctctgcagcacttacttccaggcaaagctgtggacctgggccctccaaagcctagtgaccaggagacaggagagcaggtaagttccccatcaagccaccctgcactgcatacaacgaccgaagattccgctggggtacagactgagttttag

SEQ ID NO: 31075 - DNA, 2202 bp, Artificial Sequence
  derived and/or modified sequence
atgggctggatgggcgagaagaccggcaagatcctgaccgagttcctgcagttctacgaggaccagtacggcgtggccctgttcaacagcatgagacacgagatcgagggcaccggcctgccccaggcccagctgctgtggagaaaggtgcccctggacgagagaatcgtgttcagcggcaacctgttccagcaccaggaggacagcaagaagtggagaaacagattcagcctggtgccccacaactacggcctggtgctgtacgagaacaaggccgcctacgagagacaggtgccccccagagccgtgatcaacagcgccggctacaagatcctgaccagcgtggaccagtacctggagctgatcggcaacagcctgcccggcaccaccgccaagagcggcagcgcccccatcctgaagtgccccacccagttccccctgatcctgtggcacccctacgccagacactactacttctgcatgatgaccgaggccgagcaggacaagtggcaggccgtgctgcaggactgcatcagacactgcaacaacggcatccccgaggacagcaaggtggagggccccgccttcaccgacgccatcagaatgtacagacagagcaaggagctgtacggcacctgggagatgctgtgcggcaacgaggtgcagatcctgagcaacctggtgatggaggagctgggccccgagctgaaggccgagctgggccccagactgaagggcaagccccaggagagacagagacagtggatccagatcagcgacgccgtgtaccacatggtgtacgagcaggccaaggccagattcgaggaggtgctgagcaaggtgcagcaggtgcagcccgccatgcaggccgtgatcagaaccgacatggaccagatcatcaccagcaaggagcacctggccagcaagatcagagccttcatcctgcccaaggccgaggtgtgcgtgagaaaccacgtgcagccctacatccccagcatcctggaggccctgatggtgcccaccagccagggcttcaccgaggtgagagacgtgttcttcaaggaggtgaccgacatgaacctgaacgtgatcaacgagggcggcatcgacaagctgggcgagtacatggagaagctgagcagactggcctaccaccccctgaagatgcagagctgctacgagaagatggagagcctgagactggacggcctgcagcagagattcgacgtgagcagcaccagcgtgttcaagcagagagcccagatccacatgagagagcagatggacaacgccgtgtacaccttcgagaccctgctgcaccaggagctgggcaagggccccaccaaggaggagctgtgcaagagcatccagagagtgctggagagagtgctgaagaagtacgactacgacagcagcagcgtgagaaagagattcttcagagaggccctgctgcagatcagcatccccttcctgctgaagaagctggcccccacctgcaagagcgagctgcccagattccaggagctgatcttcgaggacttcgccagattcatcctggtggagaacacctacgaggaggtggtgctgcagaccgtgatgaaggacatcctgcaggccgtgaaggaggccgccgtgcagagaaagcacaacctgtacagagacagcatggtgatgcacaacagcgaccccaacctgcacctgctggccgagggcgcccccatcgactggggcgaggagtacagcaacagcggcggcggcggcagccccagccccagcacccccgagagcgccaccctgagcgagaagagaagaagagccaagcaggtggtgagcgtggtgcaggacgaggaggtgggcctgcccttcgaggccagccccgagagccccccccccgccagccccgacggcgtgaccgagatcagaggcctgctggcccagggcctgagacccgagagccccccccccgccggccccctgctgaacggcgcccccgccggcgagagcccccagcccaaggccgcccccgaggccagcagcccccccgccagccccctgcagcacctgctgcccggcaaggccgtggacctgggcccccccaagcccagcgaccaggagaccggcgagcaggtgagcagccccagcagccaccccgccctgcacaccaccaccgaggacagcgccggcgtgcagaccgagttctag

SEQ ID NO: 31076 - DNA, 1191 bp, Artificial Sequence
  derived and/or modified sequence
atggtgcccaccagccagggcttcaccgaggtgagagacgtgttcttcaaggaggtgaccgacatgaacctgaacgtgatcaacgagggcggcatcgacaagctgggcgagtacatggagaagctgagcagactggcctaccaccccctgaagatgcagagctgctacgagaagatggagagcctgagactggacggcctgcagcagagattcgacgtgagcagcaccagcgtgttcaagcagagagcccagatccacatgagagagcagatggacaacgccgtgtacaccttcgagaccctgctgcaccaggagctgggcaagggccccaccaaggaggagctgtgcaagagcatccagagagtgctggagagagtgctgaagaagtacgactacgacagcagcagcgtgagaaagagattcttcagagaggccctgctgcagatcagcatccccttcctgctgaagaagctggcccccacctgcaagagcgagctgcccagattccaggagctgatcttcgaggacttcgccagattcatcctggtggagaacacctacgaggaggtggtgctgcagaccgtgatgaaggacatcctgcaggccgtgaaggaggccgccgtgcagagaaagcacaacctgtacagagacagcatggtgatgcacaacagcgaccccaacctgcacctgctggccgagggcgcccccatcgactggggcgaggagtacagcaacagcggcggcggcggcagccccagccccagcacccccgagagcgccaccctgagcgagaagagaagaagagccaagcaggtggtgagcgtggtgcaggacgaggaggtgggcctgcccttcgaggccagccccgagagccccccccccgccagccccgacggcgtgaccgagatcagaggcctgctggcccagggcctgagacccgagagccccccccccgccggccccctgctgaacggcgcccccgccggcgagagcccccagcccaaggccgcccccgaggccagcagcccccccgccagccccctgcagcacctgctgcccggcaaggccgtggacctgggcccccccaagcccagcgaccaggagaccggcgagcaggtgagcagccccagcagccaccccgccctgcacaccaccaccgaggacagcgccggcgtgcagaccgagttctag

SEQ ID NO: 31077 - protein, 649 aa, Artificial Sequence
  derived and/or modified sequence
MAPGEKIKAKIKKNLPVTGPQAPTIKELMRWYCLNTNTHGCRRIVVSRGRLRRLLWIGFTLTAVALILWQCALLVFSFYTVSVSIKVHFRKLDFPAVTICNINPYKYSTVRHLLADLEQETREALKSLYGFPESRKRREAESWNSVSEGKQPRFSHRIPLLIFDQDEKGKARDFFTGRKRKVGGSIIHKASNVMHIESKQVVGFQLCSNDTSDCATYTFSSGINAIQEWYKLHYMNIMAQVPLEKKINMSYSAEELLVTCFFDGVSCDARNFTLFHHPMHGNCYTFNNRENETILSTSMGGSEYGLQVILYINEEEYNPFLVSSTGAKVIIHRQDEYPFVEDVGTEIETAMVTSIGMHLTESFKLSEPYSQCTEDGSDVPIRNIYNAAYSLQICLHSCFQTKMVEKCGCAQYSQPLPPAANYCNYQQHPNWMYCYYQLHRAFVQEELGCQSVCKEACSFKEWTLTTSLAQWPSVVSEKWLLPVLTWDQGRQVNKKLNKTDLAKLLIFYKDLNQRSIMESPANSIEMLLSNFGGQLGLWMSCSVVCVIEIIEVFFIDFFSIIARRQWQKAKEWWAWKQAPPCPEAPRSPQGQDNPALDIDDDLPTFNSALHLPPALGTQVPGTPPPKYNTLRLERAFSNQLTDTQMLDEL

SEQ ID NO: 31078 - protein, 473 aa, Artificial Sequence
  derived and/or modified sequence
MAAEAAGGKYRSTVSKSKDPSGLLISVIRTLSTSDDVEDRENEKGRLEEAYEKCDRDLDELIVQHYTELTTAIRTYQSITERITNSRNKIKQVKENLLSCKMLLHCKRDELRKLWIEGIEHKHVLNLLDEIENIKQVPQKLEQCMASKHYLSATDMLVSAVESLEGPLLQVEGLSDLRLELHSKKMNLHLVLIDELHRHLYIKSTSRVVQRNKEKGKISSLVKDASVPLIDVTNLPTPRKFLDTSHYSTAGSSSVREINLQDIKEDLELDPEENSTLFMGILIKGLAKLKKIPETVKAIIERLEQELKQIVKRSTTQVADSGYQRGENVTVENQPRLLLELLELLFDKFNAVAAAHSVVLGYLQDTVVTPLTQQEDIKLYDMADVWVKIQDVLQMLLTEYLDMKNTRTASEPSAQLSYASTGREFAAFFAKKKPQRPKNSLFKFESSSHAISMSAYLREQRRELYSRSGELQG

SEQ ID NO: 31079 - DNA, 1604 bp, Artificial Sequence
  derived and/or modified sequence
ggagcctagcggctctccccgcgtccaagatggcggcagaagcagctggtgggaaatacagaagcacagtcagcaaaagcaaagacccctcggggctgctcatctctgtgatcaggactctgtctactagtgacgatgtcgaagacagggaaaatgaaaagggtcgccttgaagaagcctacgagaaatgtgaccgtgacctggatgaattgattgtacagcactacacagaattgacgacagccattcgcacataccagagcatcacagagcgcatcactaactcccgaaataaaataaagcaggtaaaagagaacctgctttcatgcaagatgctgctgcactgcaaacgggatgagcttcggaaactgtggattgaaggaattgagcataagcatgtcctgaacttgttggatgaaattgagaatatcaagcaagtgcctcaaaagctggaacagtgcatggccagcaagcactatctcagtgccactgacatgttggtgtcagcagttgagtctttggagggccccctgctccaggtggaaggactgagtgaccttcgactagagcttcacagcaagaagatgaaccttcacttggttctcatagatgaactacaccggcacctgtacatcaaatcgactagccgagttgtgcagcgtaacaaggaaaaagggaaaatcagctccctcgtgaaagatgcttctgttcctctgattgatgttacaaacctccctactcctcgaaaattccttgatacctctcactattctactgctggaagctcaagtgtgagggagataaatctgcaggacatcaaggaagatttagaattggatccagaggaaaacagcaccctgtttatgggtatcctcattaagggcttggcgaaactgaagaagatcccagaaacagttaaggcaatcatagagcgcttggagcaggagttgaagcaaattgtgaagaggtctacaacccaggtggcagacagtggctatcagcggggggagaacgttactgtggagaaccaaccaaggttgcttctagaactgctggagttactgtttgacaagtttaatgctgtagccgctgcacactctgtggtcctgggatacctgcaggacactgtagtgactccactgactcagcaggaagatatcaaactgtatgatatggcagatgtatgggtgaagatccaagatgttctacagatgctattaactgagtacttggatatgaaaaatactcgtacggcctctgaaccatcagctcaactaagctatgccagcactggacgagagtttgcagccttttttgccaagaagaaacctcaaaggccaaaaaattctcttttcaagttcgaatcgtcctcccatgccatcagtatgagcgcctatctgcgagaacagagaagggagctctatagtcggagtggagaactgcaagggtagcggcgaagaaatccaccagaaagacaatcaaagtaacattaaaaagctcaaattttacaaaagttaagttcctgccaacattttcaatttatcatacaattagaaatgtgactcagtctaacaacacccaagaggataaaaggattaaaaaaa

SEQ ID NO: 31080 - DNA, 1422 bp, Artificial Sequence
  derived and/or modified sequence
atggcagccgaggccgcgggcggcaaataccgaagtaccgtgagcaagtctaaagacccgagcggtttgttgatttccgtcatcaggaccctgagcacgagtgatgatgttgaagacagggagaatgagaaaggccggctagaggaggcctatgagaaatgtgatagagatttagacgagttgatcgtgcagcattacacagagttaaccacagctattaggacctaccagtccatcaccgagaggatcaccaattcccggaacaaaataaagcaggttaaggagaatttactcagctgcaaaatgctgctccactgcaagcgtgacgagctgcgcaagctctggattgagggtatcgaacacaagcatgttctgaacctgctggatgaaatcgaaaatatcaagcaggtcccccagaagctggagcagtgcatggcaagcaaacattacctatccgccaccgacatgctggtgagtgccgtggagagcttggagggaccgcttcttcaggtggaaggtctgtcagatctgcgtctcgaattgcactcaaagaagatgaatctccacctggtcctgattgatgaactacaccggcacctgtatatcaaaagtacatccagggtagtgcagagaaataaggagaaggggaagatctcctcactggtcaaggacgcctccgtgcccctaattgatgtgaccaacctcccgaccccaagaaaatttctcgacacaagtcattatagcacagcgggctcgagttctgtcagggagatcaatttgcaagatatcaaggaagatttggaactcgacccagaggagaatagtaccttgtttatgggcatcctgattaagggacttgccaagcttaagaagatcccggaaacagtaaaggccatcattgagcgactggaacaggagctcaagcagattgtcaagcggagtactacgcaggtggctgattctggatatcagaggggtgagaatgtcaccgtagagaatcaacctcgccttctgcttgagcttctggaactgctgtttgataaatttaatgcagtagccgccgcccattcagttgtactgggctatctgcaggacactgtagtcacacctctcactcaacaggaggatattaagttatacgacatggccgacgtgtgggtgaaaatccaggacgtgctgcaaatgctactaaccgagtacctggatatgaagaacacaaggactgcttctgagccttccgctcagctctcgtacgcatccacgggccgcgagttcgcggcgttttttgcaaagaagaagccacaacggccgaaaaattccctatttaagtttgaatcttcttcccacgctatcagtatgtccgcttaccttcgggaacagaggcgggaattgtacagcaggtccggagaactgcagggctag

SEQ ID NO: 31081 - DNA, 1422 bp, Artificial Sequence
  derived and/or modified sequence
atggctgctgaggccgccggcggcaagtaccgcagcacagtgtccaagagcaaggaccccagcggcctgctgatcagcgtcatccgcaccctgagcaccagtgatgatgtggaggacagagaaaatgagaagggccgcctggaggaggcctatgaaaaatgtgaccgggacctggatgagctgattgtgcagcactacacagagctgaccacagccatccgcacctaccagagcatcacagagcgcatcaccaacagcaggaacaagatcaagcaggtgaaggagaacctgctgagctgcaagatgctgctgcactgcaagagagatgagctgaggaagctgtggattgagggcatcgagcacaagcacgtgctgaacctgctggatgaaattgagaacatcaagcaggtgccccagaagctggagcagtgcatggccagcaagcactacctgagcgccacagacatgctggtgtctgctgtggagagcctggagggccccctgctgcaggtggagggcctgagtgacctgcggctggagctgcacagcaagaagatgaacctgcacctggtgctgattgatgagctgcaccgccacctgtacatcaagagcaccagccgggtggtgcagaggaacaaggagaagggcaagatcagcagcctggtgaaggatgcctctgtgcccctgattgatgtgaccaacctgcccacccccaggaagttcctggacaccagccactacagcacagctggcagcagctctgtgcgggagatcaacctgcaggacatcaaggaggacctggagctggaccctgaggagaacagcaccctcttcatgggcatcctgatcaagggcctggccaagctgaagaagatccctgagaccgtgaaggccatcatcgagcggctggagcaggagctgaagcagatcgtgaagaggagcaccacccaggtggccgacagcggctaccagagaggagaaaatgtgacagtggagaaccagccccggctgctgctggagctgctggagctgctgtttgacaagttcaatgctgtggccgccgcccacagcgtggtgctgggctacctgcaggacacagtggtgacccccctgacccagcaggaggacatcaagctgtatgacatggctgatgtgtgggtgaagatccaggatgtgctgcagatgctgctgacagagtacctggacatgaagaacaccaggacagccagcgagcccagcgcccagctgtcctatgccagcacaggccgggagtttgctgccttctttgccaagaagaagccccagaggcccaagaacagcctcttcaagtttgagagcagcagccacgccatctccatgtctgcctacctgcgggagcagaggcgggagctgtacagccgcagcggggagctgcagggctag

SEQ ID NO: 31082 - DNA, 1422 bp, Artificial Sequence
  derived and/or modified sequence
atggccgccgaggccgccggcggcaagtaccggagcaccgtgagcaagagtaaagatccctcgggcttgctgatctccgtgatccggacattgtccacatccgacgacgtcgaagacagagaaaacgagaaggggcggctggaagaagcttatgaaaagtgcgacagagatctggacgagctaatagtccaacattacactgagttaaccactgctataagaacttaccagtcaatcaccgagcgcataacaaattcacggaataaaataaaacaagtgaaagagaatctcttaagctgcaagatgcttctccattgcaaacgtgatgagctaagaaagctgtggattgaaggaatcgagcacaagcacgtcctaaacctcctcgacgagatagagaatattaagcaggtcccccagaaactggaacagtgcatggcttccaagcattatctgtccgctaccgacatgctagtgtcggccgtcgagagcctggaaggtccgctcctgcaggtggaggggctgtccgaccttagactggagctacactccaagaagatgaatctgcatttagtgctcatcgacgaactgcacagacacttgtacataaaatctacctcccgtgtggtgcagaggaataaggagaagggcaaaatcagttctcttgtgaaagacgcgagcgtacccctgatcgacgtcaccaacctgcccacccctagaaagttccttgacacctcacattacagcactgcaggatcaagcagtgtgcgtgagattaacctgcaggacataaaagaggacctcgaactggatcccgaagagaattccactctgtttatgggcattctcattaagggtctcgccaagttaaaaaagatcccggaaactgtgaaagcaattatcgaacggctggaacaggaattgaagcaaatcgtcaagagaagcaccactcaggtcgctgatagcgggtaccagcgcggggagaacgtaaccgtcgagaaccagcctagacttctcctcgagctactcgagttactgttcgacaaatttaacgccgtagctgctgctcactctgttgttctcggctatcttcaagatactgtcgtgacacccctcacacagcaggaggatatcaaactttacgacatggcagatgtctgggtgaagatccaagatgtgctgcagatgctgcttaccgaatacttagatatgaagaatactcgaacagcaagcgagccgagcgcacagctgtcgtatgcatcaacaggccgcgaattcgccgcctttttcgcgaaaaaaaagccgcaaaggccaaaaaattctctgttcaagttcgagagctcttcccatgccataagtatgagtgcatacctgcgtgagcagcggcgggagctgtattccagaagcggagagctccagggctag

SEQ ID NO: 31083 - DNA, 1422 bp, Artificial Sequence
  derived and/or modified sequence
atggccgcagaagccgctggaggcaaatatagaagtactgtgtccaagagcaaagaccctagcggattacttatcagtgtgatacggacattgagtacctccgacgacgtggaggacagagagaacgaaaaggggaggctggaggaagcatacgagaagtgtgatcgggacctggacgagctgattgtgcagcactatacggaattgactacggcaatccgaacatatcagagcatcacagagagaataaccaattctaggaataaaattaaacaggtgaaagagaatctactcagttgtaaaatgctcttgcactgtaagcgagatgaattaaggaagctgtggatcgaggggattgagcacaagcatgtgctaaatttgctggatgaaattgaaaatattaaacaggtcccccagaagctggagcaatgcatggccagcaagcactatctgagcgccacagacatgctggtgtctgccgttgaatccttggagggtcccctgctgcaggtggagggactgtctgatctgcgcctagagcttcacagcaagaagatgaacctgcatcttgtgttaatagacgagttgcaccgacacctgtatattaagtctacctctagggttgtccaaagaaacaaagaaaaagggaagatctcgagtctggtcaaagacgcaagtgtgcccttgatcgatgtgaccaacctcccgacccccaggaagtttctagacacctcacattactcgaccgccggatcttcgtctgtacgggaaatcaaccttcaggatattaaggaggatcttgaattggatccggaggagaattccacacttttcatgggaatcctgatcaagggcctcgctaagctgaaaaaaatacctgagacggtgaaggctatcattgagaggctcgagcaggaactgaagcaaatcgtgaagcggagcaccacccaggtcgcggattccggctaccaacgtggggaaaacgtgacggtggaaaatcagcctcgcctgctgctggagctgcttgagctgctgtttgacaagttcaatgccgtggccgcagcccatagcgttgttctgggctatctccaggataccgtagtgaccccactcacgcagcaagaagacatcaaactgtacgacatggctgatgtctgggtgaagatacaggacgttctccagatgcttttaacggagtacctggacatgaaaaataccagaaccgcctctgagccctcagcccaactctcctacgcgtctacgggcagggaattcgccgcattctttgctaaaaagaagccacaaagacctaaaaacagtctcttcaagtttgaatcctcatcacacgctataagtatgtctgcctatctgagggagcagcgacgggaactctacagtcgatccggcgagctacagggctag

SEQ ID NO: 31084 - DNA, 1422 bp, Artificial Sequence
  derived and/or modified sequence
atggccgccgaggccgccggcggcaagtacagaagcaccgtgagcaagagcaaggaccccagcggcctgctgatcagcgtgatcagaaccctgagcaccagcgacgacgtggaggacagagagaacgagaagggcagactggaggaggcctacgagaagtgcgacagagacctggacgagctgatcgtgcagcactacaccgagctgaccaccgccatcagaacctaccagagcatcaccgagagaatcaccaacagcagaaacaagatcaagcaggtgaaggagaacctgctgagctgcaagatgctgctgcactgcaagagagacgagctgagaaagctgtggatcgagggcatcgagcacaagcacgtgctgaacctgctggacgagatcgagaacatcaagcaggtgccccagaagctggagcagtgcatggccagcaagcactacctgagcgccaccgacatgctggtgagcgccgtggagagcctggagggccccctgctgcaggtggagggcctgagcgacctgagactggagctgcacagcaagaagatgaacctgcacctggtgctgatcgacgagctgcacagacacctgtacatcaagagcaccagcagagtggtgcagagaaacaaggagaagggcaagatcagcagcctggtgaaggacgccagcgtgcccctgatcgacgtgaccaacctgcccacccccagaaagttcctggacaccagccactacagcaccgccggcagcagcagcgtgagagagatcaacctgcaggacatcaaggaggacctggagctggaccccgaggagaacagcaccctgttcatgggcatcctgatcaagggcctggccaagctgaagaagatccccgagaccgtgaaggccatcatcgagagactggagcaggagctgaagcagatcgtgaagagaagcaccacccaggtggccgacagcggctaccagagaggcgagaacgtgaccgtggagaaccagcccagactgctgctggagctgctggagctgctgttcgacaagttcaacgccgtggccgccgcccacagcgtggtgctgggctacctgcaggacaccgtggtgacccccctgacccagcaggaggacatcaagctgtacgacatggccgacgtgtgggtgaagatccaggacgtgctgcagatgctgctgaccgagtacctggacatgaagaacaccagaaccgccagcgagcccagcgcccagctgagctacgccagcaccggcagagagttcgccgccttcttcgccaagaagaagccccagagacccaagaacagcctgttcaagttcgagagcagcagccacgccatcagcatgagcgcctacctgagagagcagagaagagagctgtacagcagaagcggcgagctgcagggctag

SEQ ID NO: 31085 - protein, 857 aa, Artificial Sequence
  derived and/or modified sequence
MNYQQQLANSAAIRAEIQRFESVHPNIYSIYELLERVEEPVLQNQIREHVIAIEDAFVNSQEWTLSRSVPELKVGIVGNLASGKSALVHRYLTGTYVQEESPEGGRFKKEIVVDGQSYLLLIRDEGGPPEAQFAMWVDAVIFVFSLEDEISFQTVYHYYSRMANYRNTSEIPLVLVGTQDAISSANPRVIDDARARKLSNDLKRCTYYETCATYGLNVERVFQDVAQKIVATRKKQQLSIGPCKSLPNSPSHSSVCSAQVSAVHISQTSNGGGSLSDYSSSVPSTPSTSQKELRIDVPPTANTPTPVRKQSKRRSNLFTSRKGSDPDKEKKGLESRADSIGSGRAIPIKQGMLLKRSGKSLNKEWKKKYVTLCDNGVLTYHPSLHDYMQNVHGKEIDLLRTTVKVPGKRPPRATSACAPISSPKTNGLSKDMSSLHISPNSGNVTSASGSQMASGISLVSFNSRPDGMHQRSYSVSSADQWSEATVIANSAISSDTGLGDSVCSSPSISSTTSPKLDPPPSPHANRKKHRRKKSTSNFKADGLSGTAEEQEENFEFIIVSLTGQTWHFEATTYEERDAWVQAIESQILASLQSCESSKNKSRLTSQSEAMALQSIRNMRGNSHCVDCETQNPNWASLNLGALMCIECSGIHRNLGTHLSRVRSLDLDDWPVELIKVMSSIGNELANSVWEESSQGRTKPSVDSTREEKERWIRAKYEQKLFLAPLPCTELSLGQHLLRATADEDLRTAILLLAHGSRDEVNETCGEGDGRTALHLACRKGNVVLAQLLIWYGVDVTARDAHGNTALAYARQASSQECIDVLLQYGCPDERFVLMATPNLSRRNNNRNNSSGRVPTII

SEQ ID NO: 31086 - protein, 696 aa, Artificial Sequence
  derived and/or modified sequence
MANYRNTSEIPLVLVGTQDAISSANPRVIDDARARKLSNDLKRCTYYETCATYGLNVERVFQDVAQKIVATRKKQQLSIGPCKSLPNSPSHSSVCSAQVSAVHISQTSNGGGSLSDYSSSVPSTPSTSQKELRIDVPPTANTPTPVRKQSKRRSNLFTSRKGSDPDKEKKGLESRADSIGSGRAIPIKQGMLLKRSGKSLNKEWKKKYVTLCDNGVLTYHPSLHDYMQNVHGKEIDLLRTTVKVPGKRPPRATSACAPISSPKTNGLSKDMSSLHISPNSGNVTSASGSQMASGISLVSFNSRPDGMHQRSYSVSSADQWSEATVIANSAISSDTGLGDSVCSSPSISSTTSPKLDPPPSPHANRKKHRRKKSTSNFKADGLSGTAEEQEENFEFIIVSLTGQTWHFEATTYEERDAWVQAIESQILASLQSCESSKNKSRLTSQSEAMALQSIRNMRGNSHCVDCETQNPNWASLNLGALMCIECSGIHRNLGTHLSRVRSLDLDDWPVELIKVMSSIGNELANSVWEESSQGRTKPSVDSTREEKERWIRAKYEQKLFLAPLPCTELSLGQHLLRATADEDLRTAILLLAHGSRDEVNETCGEGDGRTALHLACRKGNVVLAQLLIWYGVDVTARDAHGNTALAYARQASSQECIDVLLQYGCPDERFVLMATPNLSRRNNNRNNSSGRVPTII

SEQ ID NO: 31087 - DNA, 2574 bp, Artificial Sequence
  derived and/or modified sequence
atgaattatcaacagcagctcgcgaactcagccgctatccgggccgaaatacagaggtttgaaagcgtgcaccccaatatctatagcatctatgagcttctggaaagagtggaggagccggttcttcagaaccagataagagagcacgtgatcgccatcgaggacgccttcgttaactcccaggagtggactctgagccggtctgtccccgagttaaaagtgggtattgtcgggaatctcgccagtggcaagagtgctctggtgcaccgttatctaacggggacatatgtgcaggaagaatctccggagggcggcaggttcaaaaaagaaattgtagtcgacggacagtcttatctgttactgatacgggatgagggaggaccccctgaggctcagttcgcgatgtgggtagatgccgtgatctttgtcttcagcctggaggatgaaataagcttccagaccgtctaccactactattctagaatggccaactaccgcaacaccagcgaaattcccctagtgttagtgggcacgcaggacgcaatatcctcagctaaccccagagtgatagacgatgccagagcgcggaagctctctaatgatttgaaacgatgcacatactacgagacttgtgccacctatggcctgaatgtcgagagggtattccaggacgtagctcagaaaatcgtagccacccggaaaaaacagcaattgagtataggaccctgtaagagcctccccaactctccgtcccactcgtctgtttgttcggcccaggtctccgctgtgcatatttctcaaacctcaaacggcggcggtagcctttcagattacagctctagtgtgcccagtaccccatcgaccagccagaaggaactcagaattgatgtgccaccaaccgcaaacacgccgacccctgttcggaagcagtccaagaggaggtctaacttgtttactagtcggaaaggcagtgacccagataaggagaagaagggactagaatcccgcgccgattcaataggctcagggcgggccatcccaatcaaacagggtatgctgctgaaaaggagtggaaaatccctcaacaaggaatggaaaaaaaaatacgttacgctgtgcgacaatggggttctcacctaccacccttccctacatgattacatgcagaatgttcacggcaaagagatcgacctgctgaggaccacagtgaaagtcccagggaagcgaccgcctcgcgccactagcgcctgcgcaccaatctcaagccctaaaactaatggcctgagcaaagacatgtctagtctgcatatatcaccgaatagcggaaacgttaccagcgcctctggaagccagatggcatctggaatctcattggtctcatttaacagcaggcctgacgggatgcatcagcgcagttattccgtcagctctgcagaccagtggtccgaggccaccgtaattgccaactccgccatctctagtgacactggattaggcgattccgtttgcagctcaccgtcaatttcaagcacaacttccccaaagctagatccccctccatccccgcacgctaaccgaaagaagcaccgccggaaaaaaagcaccagtaactttaaagctgacggactgagcggtactgccgaggaacaagaggagaactttgagttcatcattgtcagcctgaccggccagacatggcatttcgaagccactacatatgaagaacgcgatgcatgggttcaagccatagaaagccagatcctggcatccctccagagctgtgaatcttctaaaaataaatccaggctcacatcgcaatctgaggcaatggccttgcaatcgattagaaatatgcgaggcaatagtcattgcgtggattgcgaaacgcaaaaccccaattgggcctcactgaacctgggcgcgctgatgtgcatcgagtgtagtggcatccatcgcaacctgggaactcacttatcacgggttaggagtttggatcttgacgactggcccgtggaactgatcaaagtgatgtctagcatcggtaacgagttggctaacagcgtgtgggaggagtcatcgcaggggcgcactaagccgagcgtagatagtacacgcgaagagaaagagagatggatcagggcaaaatacgaacagaagctttttctggccccccttccctgcaccgagttgagcctgggacaacaccttttgcgggccaccgccgacgaggacctgcgaactgctattctgctcctggcccacgggagccgcgacgaagtgaatgaaacttgtggcgaaggagacggtaggacagctctgcacctggcctgccgcaaagggaatgtggttctggcccagttgctcatatggtacggtgtggacgtgacggccagggacgcgcatggcaacaccgccctcgcatacgctcggcaggcctctagccaagagtgcatcgacgtcctgctgcagtacggctgtcctgacgaaagatttgtgctgatggcaactcccaatctgtcacgcagaaacaacaatcgcaacaactcctcaggcagagttccaacaatcatttag

SEQ ID NO: 31088 - DNA, 2574 bp, Artificial Sequence
  derived and/or modified sequence
atgaactaccagcagcagctggccaacagcgctgccatccgggcagagatccagagatttgagagcgtgcaccccaacatctacagcatctatgagctgctggagcgggtggaggagcctgtgctgcagaaccagatccgggagcacgtgattgccattgaagatgcctttgtgaacagccaggagtggaccctgagccgctctgtgcctgagctgaaggtgggcatcgtgggcaacctggccagcggcaagagcgccctggtgcaccgctacctgaccggcacctacgtgcaggaggagagccctgagggcggccgcttcaagaaggagatcgtggtggatggccagagctacctgctgctgatcagagatgagggcggccccccagaggcccagtttgccatgtgggtggatgctgtgatctttgtgttcagcctggaggatgagatctccttccagacagtgtaccactactacagcaggatggccaactacagaaacaccagcgagatccccctggtgctggtgggcacccaggatgccatcagcagcgccaacccccgggtgattgatgatgcccgggccaggaagctgagcaatgacctgaagcgctgcacctactatgagacctgtgccacctacggcctgaatgtggagagggtcttccaggatgtggcccagaagatcgtggccaccaggaagaagcagcagctgagcatcggcccctgcaagagcctgcccaacagccccagccacagctctgtgtgcagcgcccaggtgtctgctgtgcacatcagccagaccagcaatggaggcggcagcctgagtgactacagcagctctgtgcccagcacccccagcaccagccagaaggagctgagaattgatgtgcccccaacagccaacacccccacccctgtgaggaagcagagcaagagaagaagcaacctcttcaccagcaggaagggcagtgaccctgacaaggagaagaagggcctggagagcagagctgacagcatcggcagcggccgggccatccccatcaagcagggcatgctgctgaagaggtctgggaagagcctgaacaaggagtggaagaagaagtatgtgaccctgtgtgacaatggagtgctgacctaccaccccagcctgcatgactacatgcagaatgtgcacggcaaggagattgacctgctgcggaccaccgtgaaggtgcctgggaagaggcctccccgggccaccagcgcctgtgcccccatcagcagccccaagaccaacggcctgagcaaggacatgagcagcctgcacatcagccccaacagcggaaatgtgaccagcgccagcggcagccagatggccagcggcatcagcctggtgtccttcaacagcaggccagatggcatgcaccagaggagctacagcgtgtcctctgctgaccagtggagcgaggccaccgtgattgccaacagcgccatcagcagtgacaccggcctgggggacagcgtgtgcagcagccccagcatcagcagcaccaccagccccaagctggaccccccacccagcccccacgccaacaggaagaagcacaggaggaagaagagcaccagcaacttcaaggcagatggcctgagcggcacagctgaggagcaggaggagaactttgagttcatcatcgtgtccctgaccggccagacctggcactttgaggccaccacctatgaggagagagatgcctgggtgcaggccatcgagagccagatcctggccagcctgcagagctgtgagagcagcaagaacaagagccggctgaccagccagagcgaggccatggccctgcagagcatccggaacatgaggggcaacagccactgtgtggactgtgagacccagaaccccaactgggccagcctgaacctgggcgccctgatgtgcatcgagtgcagcggcatccacaggaacctgggcacccacctgagccgggtgcgcagcctggacctggatgactggcctgtggagctgatcaaggtgatgagcagcattggaaatgagctggccaacagcgtgtgggaggagagcagccagggccgcaccaagcccagcgtggacagcacccgggaggagaaggagcgctggatccgggccaagtatgagcagaagctgttcctggcccccctgccctgcacagagctgagcctgggccagcacctgctgcgggccacagcagatgaggacctgaggacagccatcctgctgctggcccacggcagcagagatgaggtgaatgagacctgtggggagggagatggccgcacagccctgcacctggcctgcaggaaaggaaatgtggtgctggcccagctgctgatctggtatggagtggatgtgacagccagagatgcccacggcaacacagccctggcctatgcccggcaggccagcagccaggagtgcattgatgtgctgctgcagtatggctgcccagatgaaagatttgtgctgatggccacccccaacctgagcagaagaaacaacaacagaaacaacagcagcggccgggtgcccaccatcatctag

SEQ ID NO: 31089 - DNA, 2574 bp, Artificial Sequence
  derived and/or modified sequence
atgaactaccagcagcagctggccaacagcgccgccatccgggccgaaatccagcgctttgaaagcgttcatccgaacatttactccatttatgaattacttgagagggtggaggaacctgtacttcaaaaccagatcagagaacacgtgatcgctatcgaggatgcctttgtaaacagtcaagagtggaccctgtctcgctcagtaccggagctgaaagttggaattgtaggaaatctggcctcaggaaagtcggccttagtgcaccggtacctgaccggaacctatgtgcaggaggagtccccagagggggggcgtttcaaaaaagagatagtggtcgatggacagagctatctgctcttgattagggacgagggaggtcctccggaagcacagtttgccatgtgggtagacgccgtaatcttcgttttttccctggaagatgaaatctcttttcagacagtgtatcattactattctcgcatggcaaactatcgcaacacaagcgaaatcccactcgtgctcgtgggcacccaggatgccatcagtagcgcaaaccccagggtcattgatgacgcgcgagccaggaaactatctaacgatctaaagcgctgcacttattacgagacttgcgcgacctatgggttaaatgttgaaagggtatttcaggacgttgcccagaaaatcgtcgccacacgcaaaaagcagcagctgagtatcgggccctgtaagtcgctgcccaacagcccttcgcactcctccgtgtgcagtgcccaggtatccgcagtacatatttcccagaccagcaacggcggtggctcattgagcgactactcctcatccgtgcctagtaccccttccacttctcaaaaagagctgcgaattgatgtgccccctaccgccaatacacctacccccgtaagaaagcagtccaaacgaagatccaacttgtttacctcacggaaaggctctgaccccgataaagaaaaaaaagggcttgagtcccgcgctgactctatcggcagtggccgggccatccctatcaagcaggggatgctcctcaagcgcagcggcaagtccctgaacaaggagtggaaaaagaaatacgtgactctgtgtgataacggggtgttgacttaccacccatctctgcacgactacatgcaaaacgtgcatggtaaagaaattgatctgctccggactaccgtgaaagtgcctggaaaaagaccccctcgggcaacctcagcctgcgcccctattagtagtcctaaaacaaacggcttatctaaagatatgagtagcctacacatatcaccgaactcagggaatgtgacctcggcctcaggcagccaaatggcttcaggcatcagcttggtttcctttaactctcgcccggacgggatgcaccagagatcttattcggtcagctccgctgaccagtggagcgaagctaccgtgattgctaactctgcaatctcttccgacaccgggctgggggattcggtctgctcctctccctctatttcgtccacaaccagcccgaagttggatccacctccatctccacacgctaacagaaaaaagcacagacggaagaagtcaacatccaatttcaaagcagatggattaagcgggaccgcagaggagcaagaggaaaatttcgaattcattattgtctcgctaacaggccaaacttggcactttgaagcgacaacctacgaggagagggacgcttgggtccaagctatcgagtcacaaattttggccagcctccagtcctgcgagtcgagtaagaacaagtccagactcacatcccagtccgaagccatggcgctgcagtccatccggaacatgcggggcaacagccattgtgtggattgcgaaacgcagaaccctaattgggcaagcctcaacctcggagcactcatgtgcattgagtgcagtggcattcaccgcaacctgggcacacatctatcacgagtaaggtctttggacttagacgactggccagtggaattgatcaaggtgatgtccagcatagggaatgagttggcaaactccgtttgggaagaaagctcacaaggtcgaacgaaaccgtctgtcgattcaacccgtgaagaaaaagagagatggataagagccaagtatgagcaaaaactgtttctggcccctctgccatgcaccgaactgtcattgggtcagcaccttctgagagcgactgctgatgaagatctccggaccgccatcctcctcctggctcacggctcccgggacgaggttaatgagacatgcggagagggagatgggcgaaccgctctgcacttggcatgccgaaagggcaacgtggtgctcgcgcagttactgatctggtatggtgtcgatgttacagccagagacgcgcacggaaacaccgcgctcgcctatgctaggcaggcatcaagtcaggagtgcattgatgtgctgctgcagtatggatgcccggacgaacggttcgtactaatggcaacccctaatctgagccgcagaaataacaataggaacaattcttcagggcgcgtacccactataatctag

SEQ ID NO: 31090 - DNA, 2574 bp, Artificial Sequence
  derived and/or modified sequence
atgaattaccaacagcagctcgccaatagcgcggcaattcgtgcagagatccagcgcttcgaatccgtgcaccccaacatatacagcatctatgaattactggaacgagtggaggagccagtgctgcaaaatcagattcgagaacacgtaatcgctattgaagacgcctttgttaatagccaggagtggactctctctcggtctgttcccgaactaaaggttgggatcgtgggtaacctggcctcgggcaaaagcgccctggtccacagatatctcaccggtacctatgtccaggaagaaagccctgaaggcggtagatttaagaaagagatcgtagtcgatggtcagagttacctcctgttgattcgggacgaaggtggcccacccgaggctcaattcgctatgtgggtagacgcagtaatcttcgtgttttcgcttgaggacgagatctcattccaaactgtgtatcactactactcaaggatggccaattatagaaacaccagcgaaatcccactggtactggtgggtacacaggacgctattagtagcgccaatccgagggtcatcgatgacgctcgagctcgaaaacttagcaatgatctgaagcgctgtacttattatgagacctgtgccacgtatggacttaatgttgagagggtgtttcaggacgttgcccagaaaatcgttgctactagaaagaagcaacaactgagcatcggcccttgcaagtccctgccgaactctccctcacacagtagcgtttgttctgcgcaggtatcagccgtgcacatcagccagacctccaatggcggaggaagcctgtcagactactcttcaagcgtgccctctacacccagcacctcccagaaggagcttcggattgacgttccgccaaccgcaaatacgcccacgccggtgcggaagcagtccaagagaaggagtaacctcttcacatcaagaaagggatcagacccagataaggaaaagaaaggcttggagtctcgcgctgattccataggatctgggcgtgctattcctattaagcaaggcatgttgttgaagagaagtggaaagagtctgaataaagaatggaagaagaagtacgtcacactctgcgacaacggtgtgctgacctaccacccaagcctgcacgactatatgcaaaatgttcacggaaaggagatcgatctgctgaggactacagtaaaggtccctggcaagaggcctcccagagcgacatccgcctgtgcacccatcagcagcccaaagacgaatggactctccaaggacatgtcctctcttcacatctcacccaattccggaaacgtgactagcgcttctggctcacagatggccagcggcatttcccttgtgtcattcaattcgagaccagatgggatgcaccagaggagttactccgtcagttccgcagaccagtggtctgaggctacagtgattgcaaatagtgcaattagcagcgacaccgggttgggcgatagcgtgtgctcctccccctcaatctcctccacaactagccccaaactcgacccacctcctagcccgcacgcaaacagaaaaaaacatcgcagaaaaaaatccacgagcaacttcaaggcagacggcctgtctggcaccgccgaggaacaagaagaaaattttgaattcataattgtgtcgctcacgggacagacctggcattttgaagccactacatatgaagagcgcgatgcatgggtgcaggcaattgagagccaaatattggcatccttacaatcatgcgaatccagtaaaaataaatcccggcttactagccaatccgaggctatggcgctccaaagcattaggaatatgagaggcaactcccattgcgtggactgtgagacccaaaatcccaactgggcgtcactcaacctgggagccctgatgtgcatcgagtgttccggcatccacaggaatctcggcacccatctcagtagagtgcggtctttagatctggacgattggcccgtggagcttattaaggttatgagctctatagggaatgaactggccaacagcgtgtgggaagagagttcccagggacggactaaaccaagtgtggactcaacaagggaggagaaagaacggtggatccgggctaagtacgagcaaaaactgttcttggctccactaccatgtaccgaactctcactcgggcagcatctcctccgagccacagcagacgaagacttacgaactgcaatcttactgctggcacacggtagcagggacgaagtgaacgagacttgtggggagggcgacggacgtactgcgctacacttggcatgcaggaagggcaatgtggtgttagcccagctgctcatatggtatggggttgacgtgaccgcccgagacgcccacggtaatacagccttggcctatgctcggcaggcgtcatctcaggaatgcatcgacgtattactgcagtacggctgtcccgatgagcggttcgttcttatggctacgcccaatctctcccggagaaacaataataggaacaattcatcaggccgagtgccaacaatcatctag

SEQ ID NO: 31091 - DNA, 5586 bp, Artificial Sequence
  derived and/or modified sequence
cgcggcttgcaaggcgcctgcgactcggtcccaggtcggcgggcggcgcacggcgggctcgcgcgggggccccggcgcgccgggcggcgcagtacgcagcgcgcggacccacgccacggccaggagcccagagcagcgcggccacactgcccaggggtcggccctcggccccggcgctcggagcgcggcggctgcctgggctttaatggctgctccgcggagcagcgcctagggctggaaggcggctgcggctcaggaagtcacccgagcaagcctccttcggggccggccgcacccgccgcggcgcgctccatgggggcgcgctccccccgggcggcccgctgacccgggacgccggggcccgctcgctcgccggccgcgcgtcccggccatgaactgagcccgcgggccagccccgcgcctgctccgcccgcgcctttcttctcgcgcctcctccgcccgccgccggcgggcccggctccccgggggctgcggcgccccgggctcggcggcccgcgggccccggggcgcggggcggcggcggcggggggcgcgcggctccgggcgcggcgcctgcaccatgaactaccagcagcagctggccaactcggctgccatccgggccgagatccagcgcttcgagtcggtccaccccaacatctactccatctacgagctgctggagcgcgtggaggagccggtgctgcagaaccagatccgggagcacgtcatcgccatcgaagatgccttcgtgaacagccaggaatggacgctgagtcgatctgtcccggagctcaaagtgggaattgtgggtaacttggccagcggcaagtctgccctggtgcaccggtacctgacgggcacatatgtccaggaggagtctccggaaggtggcaggttcaagaaagagattgtcgttgatggacagagctatctgctgctgatcagagatgaagggggccccccggaggcgcagtttgccatgtgggtggacgctgttatatttgtcttcagcttggaggatgaaataagtttccagaccgtttaccactactacagtcgaatggccaactatcggaacacgagcgagattcctctggttctggtgggaacccaggatgccataagttctgctaacccgagggtcatcgatgacgccagggcgaggaagctctccaacgacctgaaacggtgcacgtactacgagacgtgtgctacatacgggctgaatgtggagagggtcttccaggacgttgcccagaagattgttgccacaaggaagaagcagcagctgtccataggaccctgcaagtcgctacctaattctcccagccattcctccgtctgttccgcgcaggtgtctgccgtgcacatcagccagacaagtaatggaggtgggagtttaagcgactattcctcctccgttccatcgactcccagcaccagccagaaggaacttcggatcgatgttcctcccactgccaacacgcccacgcccgttcgcaagcagtctaagcgccggtccaacctgttcacctctcggaaagggagcgacccagacaaagagaagaaaggcctggagagtcgtgcggacagcattgggagcggccgagccatcccaattaaacagggcatgctgttgaagcgaagtggcaaatcgttgaataaagagtggaaaaagaaatatgtcaccctgtgtgacaatggcgtgctgacctatcatcccagtttacatgattacatgcagaatgttcatggtaaggagattgaccttctgagaaccactgtgaaagtcccagggaagaggccaccccgagccacgtcagcctgcgcacccatctccagccctaaaaccaatggcctatccaaggacatgagcagtttacacatctcacccaattcagggaatgtcactagtgcatctgggtctcagatggcaagcggcatcagcctggtctccttcaacagccgacccgacggcatgcaccagcgctcctactcagtctccagtgccgaccagtggagtgaggctacggtcattgcaaactcggccatcagcagtgacacagggctgggtgactccgtatgctccagccccagtatctccagcaccaccagccccaagctcgacccgcccccctcccctcacgccaacagaaagaagcaccgaaggaagaaaagcactagcaacttcaaagccgacggcctgtccggcactgctgaagaacaagaagaaaattttgagtttatcattgtgtccctcactggccaaacatggcactttgaagccacgacgtatgaggagcgggacgcctgggtccaagccatcgagagccagatcctggccagcctgcagtcgtgcgagagcagcaagaacaagtcccggctgacgagccagagcgaggccatggccctgcagtcgatccggaacatgcgcgggaactcccactgtgtggactgcgagacccagaatcccaactgggccagtttgaacttgggagccctcatgtgcatcgaatgctcagggatccaccggaatcttggcacccacctttcccgagtccgatctctggacctggatgactggccagtcgagctcatcaaggtgatgtcatccatcgggaacgagctagccaacagcgtctgggaagagagcagccaggggcggacgaaaccatcggtagactccacaagggaagagaaggaacggtggatccgtgccaagtacgagcagaagctcttcctggccccgctgccctgcacggagctgtccctgggccagcacctgctgcgggccaccgccgacgaggacctgcggacggccatcctgctgctggcacacggctcccgggacgaggtgaacgagacctgcggggagggagacggccgcacggcgctgcatctggcctgccgcaaggggaatgtggtcctggcgcagctcctgatctggtacggagtggacgtcacggcccgagatgcccacgggaacacagctctggcctacgcccggcaggcctccagccaggagtgcatcgacgtgctgctgcagtacggctgccccgacgagcgcttcgtgctcatggccacccctaacctgtccaggagaaacaataaccggaacaacagcagtgggagggtgcccaccatcatctgaggaacagccgtgcccgcctgctcgccgcacctgggacgcggcagcctcgccgcattctcgctcagaagtcgcagcacgtgagtcccgtcgcatcccctccctcttcctggtggccacctccctcccgcccacccactctcaccccaaacaaaatcacaaaacctggacatccctcaaggggcgaagaggcggccgggagactgcagaagtggctccttttcataaactcccctaaaccacacacaggagagagcgacgggcctcggccctttgatgatagcacatggcgcaggacccttgtcctggtggcacaagggatggggacgcgagggggaggggaggcgaggaacaaggagaaggggcaactttccttaactggcagttgagcacatagtacatttcccctctaccaaacggaacacttggattccatctcttctctgaggagctcgacggcataaatcagaagcaagcacagagtttgtcaggtttgaagcccctatgatggtgtgtgtcaaatcagttgtagctaatctgtccagggagaatactggcttcattacacttgtacagccgagttcttcccgcattactgctgtttaatagaacgtgattagtcatcgccgagaagaaagcatattagccgaggaggtagtcacgcggcacgcgccggtgattgccacgatgtgattgcaatactcttagaagcaccatattatcccagacatgttctttcaagcccttggagccctctctaaattcactgtcatcatttagtatctgtttaatttttcagtccaaagagaggaaatcagtcgctgagtattatttgactccggtctccttggtgcaaaaacaaaatgggaaaaataaataagaataactcagaaactcaaaaggaaaccacaaattcagctaataatagcatttcgagtatatttcgtaaactaaggaaatacacaaaaggctgttttttccgactgtaagagatatttgatgtccttttgccgaggtggatgtgttagtctcaggccctcctggaccacgttgcccaagtcacacaggcttctgtgttatgtatttagataagatgtgtgaaaatatatttgaataaaagaagttcataaatatgcattgatttttgtacagacaaatggcacctctcttaatttataaattgaactggatgtgaactaataatgtgcaactagttgagataagagggttacagatcattgtacatggaaaatattcccagcagtaaacacttccattaatgtgatctacggcttttgaaaaggagcatctcagaataagatggtggtacaatttgcttattaaaattgagaaagaaaaaaaaagacacactggagtatattagaaaggaaaaagaaggaatgtggtctctcatgattgaaagcatgatttagatcggatacggcttttgctaaccaaggaccaagggactctggcaagatggggtggttttccgaatgccagaccgaggtgccttacgaaggcagctgccaatggttctgtggcacagactggctcctgagaacccagacgaccttgacctggcagcccggccctccacgctagtacctcgcctgattttccatcgttgcggtatccagccgcttcagacgtccgccgccttcagtggtggtagtcaaatgtagtcaaccaaaccacagcatcccttaggttaaaagcaaacggggcagctttgcctagagctcattgacagtgtgatggggggagaagggttgtcacaatggaagatgaggacactagactcatgtagcacagaaacatgaagccacacgcaccggcagcctccggggtgttcctcgctctctcgtatgttaaaccttatattttataagagtttttcctcttatttcactttttaaaaaaaattaaagtaggtggggaaaaaaataaagctttacacagaatttatatgtgggtaagtgtttcatggaaatttctaatcttaacgaagctaagtggagctcactcgtatccaaaagtataacaggtgcagaagccacaagtctgagaaccttgacgacagttccatcgtcctgccatttgatttttcagtctgcgtttcatcactgtgtagctattgtaaatgtgaatagaaaaaaacaggtcattgcctatttttgaagaacgcgttggtgttcgagtccactagacacactcgctccacacagccttcaccgtagactctgtagtggacacagatatagcataaatgaaattgttaaattatttcattgtagttaattcccactataggaatgctttatcatagtgaagtttcttttgagaagaaacggaactccttgaggcttctctttgggatgtatatgagcgtgtacatattattctatgtgtttataatataatattttcccaaa

SEQ ID NO: 31092 - DNA, 2574 bp, Artificial Sequence
  derived and/or modified sequence
atgaactaccagcagcagctggccaacagcgccgccatcagagccgagatccagagattcgagagcgtgcaccccaacatctacagcatctacgagctgctggagagagtggaggagcccgtgctgcagaaccagatcagagagcacgtgatcgccatcgaggacgccttcgtgaacagccaggagtggaccctgagcagaagcgtgcccgagctgaaggtgggcatcgtgggcaacctggccagcggcaagagcgccctggtgcacagatacctgaccggcacctacgtgcaggaggagagccccgagggcggcagattcaagaaggagatcgtggtggacggccagagctacctgctgctgatcagagacgagggcggcccccccgaggcccagttcgccatgtgggtggacgccgtgatcttcgtgttcagcctggaggacgagatcagcttccagaccgtgtaccactactacagcagaatggccaactacagaaacaccagcgagatccccctggtgctggtgggcacccaggacgccatcagcagcgccaaccccagagtgatcgacgacgccagagccagaaagctgagcaacgacctgaagagatgcacctactacgagacctgcgccacctacggcctgaacgtggagagagtgttccaggacgtggcccagaagatcgtggccaccagaaagaagcagcagctgagcatcggcccctgcaagagcctgcccaacagccccagccacagcagcgtgtgcagcgcccaggtgagcgccgtgcacatcagccagaccagcaacggcggcggcagcctgagcgactacagcagcagcgtgcccagcacccccagcaccagccagaaggagctgagaatcgacgtgccccccaccgccaacacccccacccccgtgagaaagcagagcaagagaagaagcaacctgttcaccagcagaaagggcagcgaccccgacaaggagaagaagggcctggagagcagagccgacagcatcggcagcggcagagccatccccatcaagcagggcatgctgctgaagagaagcggcaagagcctgaacaaggagtggaagaagaagtacgtgaccctgtgcgacaacggcgtgctgacctaccaccccagcctgcacgactacatgcagaacgtgcacggcaaggagatcgacctgctgagaaccaccgtgaaggtgcccggcaagagaccccccagagccaccagcgcctgcgcccccatcagcagccccaagaccaacggcctgagcaaggacatgagcagcctgcacatcagccccaacagcggcaacgtgaccagcgccagcggcagccagatggccagcggcatcagcctggtgagcttcaacagcagacccgacggcatgcaccagagaagctacagcgtgagcagcgccgaccagtggagcgaggccaccgtgatcgccaacagcgccatcagcagcgacaccggcctgggcgacagcgtgtgcagcagccccagcatcagcagcaccaccagccccaagctggaccccccccccagcccccacgccaacagaaagaagcacagaagaaagaagagcaccagcaacttcaaggccgacggcctgagcggcaccgccgaggagcaggaggagaacttcgagttcatcatcgtgagcctgaccggccagacctggcacttcgaggccaccacctacgaggagagagacgcctgggtgcaggccatcgagagccagatcctggccagcctgcagagctgcgagagcagcaagaacaagagcagactgaccagccagagcgaggccatggccctgcagagcatcagaaacatgagaggcaacagccactgcgtggactgcgagacccagaaccccaactgggccagcctgaacctgggcgccctgatgtgcatcgagtgcagcggcatccacagaaacctgggcacccacctgagcagagtgagaagcctggacctggacgactggcccgtggagctgatcaaggtgatgagcagcatcggcaacgagctggccaacagcgtgtgggaggagagcagccagggcagaaccaagcccagcgtggacagcaccagagaggagaaggagagatggatcagagccaagtacgagcagaagctgttcctggcccccctgccctgcaccgagctgagcctgggccagcacctgctgagagccaccgccgacgaggacctgagaaccgccatcctgctgctggcccacggcagcagagacgaggtgaacgagacctgcggcgagggcgacggcagaaccgccctgcacctggcctgcagaaagggcaacgtggtgctggcccagctgctgatctggtacggcgtggacgtgaccgccagagacgcccacggcaacaccgccctggcctacgccagacaggccagcagccaggagtgcatcgacgtgctgctgcagtacggctgccccgacgagagattcgtgctgatggccacccccaacctgagcagaagaaacaacaacagaaacaacagcagcggcagagtgcccaccatcatctag

SEQ ID NO: 31093 - protein, 1304 aa, Artificial Sequence
  derived and/or modified sequence
MQLKIMPKKKRLSAGRVPLILFLCQMISALEVPLDPKLLEDLVQPPTITQQSPKDYIIDPRENIVIQCEAKGKPPPSFSWTRNGTHFDIDKDPLVTMKPGTGTLIINIMSEGKAETYEGVYQCTARNERGAAVSNNIVVRPSRSPLWTKEKLEPITLQSGQSLVLPCRPPIGLPPPIIFWMDNSFQRLPQSERVSQGLNGDLYFSNVLPEDTREDYICYARFNHTQTIQQKQPISVKVISVDELNDTIAANLSDTEFYGAKSSRERPPTFLTPEGNASNKEELRGNVLSLECIAEGLPTPIIYWAKEDGMLPKNRTVYKNFEKTLQIIHVSEADSGNYQCIAKNALGAIHHTISVRVKAAPYWITAPQNLVLSPGEDGTLICRANGNPKPRISWLTNGVPIEIAPDDPSRKIDGDTIIFSNVQERSSAVYQCNASNEYGYLLANAFVNVLAEPPRILTPANTLYQVIANRPALLDCAFFGSPLPTIEWFKGAKGSALHEDIYVLHENGTLEIPVAQKDSTGTYTCVARNKLGMAKNEVHLEIKDPTWIVKQPEYAVVQRGSMVSFECKVKHDHTLSLTVLWLKDNRELPSDERFTVDKDHLVVADVSDDDSGTYTCVANTTLDSVSASAVLSVVAPTPTPAPVYDVPNPPFDLELTDQLDKSVQLSWTPGDDNNSPITKFIIEYEDAMHKPGLWHHQTEVSGTQTTAQLKLSPYVNYSFRVMAVNSIGKSLPSEASEQYLTKASEPDKNPTAVEGLGSEPDNLVITWKPLNGFESNGPGLQYKVSWRQKDGDDEWTSVVVANVSKYIVSGTPTFVPYLIKVQALNDMGFAPEPAVVMGHSGEDLPMVAPGNVRVNVVNSTLAEVHWDPVPLKSIRGHLQGYRIYYWKTQSSSKRNRRHIEKKILTFQGSKTHGMLPGLEPFSHYTLNVRVVNGKGEGPASPDRVFNTPEGVPSAPSSLKIVNPTLDSLTLEWDPPSHPNGILTEYTLKYQPINSTHELGPLVDLKIPANKTRWTLKNLNFSTRYKFYFYAQTSAGSGSQITEEAVTTVDEAGILPPDVGAGKVQAVNPRISNLTAAAAETYANISWEYEGPEHVNFYVEYGVAGSKEEWRKEIVNGSRSFFGLKGLMPGTAYKVRVGAVGDSGFVSSEDVFETGPAMASRQVDIATQGWFIGLMCAVALLILILLIVCFIRRNKGGKYPVKEKEDAHADPEIQPMKEDDGTFGEYSDAEDHKPLKKGSRTPSDRTVKKEDSDDSLVDYGEGVNGQFNEDGSFIGQYSGKKEKEPAEGNESSEAPSPVNAMNSFV

SEQ ID NO: 31094 - DNA, 3915 bp, Artificial Sequence
  derived and/or modified sequence
atgcagctcaaaatcatgcccaaaaagaagagactaagtgcaggccgggttcctctgatcctcttcctctgtcagatgatctctgccctcgaagtacctttggaccctaagcttctggaggatctggtgcaaccacctacaatcacccagcaaagcccgaaggattacattattgacccccgggagaacattgtcattcagtgcgaagccaaggggaagccaccccctagttttagttggacacgcaatggcacccatttcgacatcgacaaggacccactggttacaatgaaacccggaacaggtacccttatcattaacattatgtccgaaggcaaggcagagacctacgagggagtgtatcagtgcacggctaggaatgagaggggcgctgccgtgtcaaacaatattgtggtgcgtccttcccggtcccccctctggaccaaggaaaaattagaacccataacactccagtctggccagagcttagtgcttccttgtaggcctccaattggtctgcccccaccaattatattttggatggataatagctttcaacgccttccacaaagtgaaagggtctcccagggcttgaatggagacttgtatttttcaaatgtgctcccagaagataccagagaagactatatttgctacgctaggtttaaccacacacagactattcaacagaagcagccgatcagtgttaaggtgatctcagtggatgagctaaacgatacaattgctgccaatctcagtgacaccgagttttacggggctaagagctcaagggagcgacctcccacattcttgactcctgagggcaacgcatctaacaaggaggagttgcgcggaaacgttctctcactggagtgcatagcagagggcctaccaaccccaattatatactgggcaaaagaagacggaatgctgccaaagaaccgcactgtgtacaaaaatttcgaaaagactcttcagatcattcacgtctctgaggccgactctggaaactatcagtgtatcgccaaaaatgctttaggagcaattcatcacactatttctgtgcgcgtgaaagccgccccatattggatcacagccccccagaaccttgtgttgtccccaggggaggacgggactctcatctgtagagcaaacgggaatcccaaacccagaatttcctggcttaccaatggtgtacctatcgaaatcgcacctgacgatccaagtcgaaaaattgacggagacaccatcattttttctaacgttcaggaacgttcatcagcagtgtatcagtgtaacgcatccaacgaatacgggtatctgctcgctaacgcctttgtaaacgtccttgccgagcccccacggatcctgaccccggctaataccctgtaccaggttattgctaatcgccccgccctgttagattgcgccttcttcggttctcccctgcccacaatagagtggttcaaaggcgctaagggaagtgcacttcacgaagacatctacgtgctccatgaaaatggaacattggagatccctgtggctcagaaagattccacaggaacctacacatgtgttgccagaaacaaattgggaatggccaaaaatgaggtacacctagaaatcaaagatccaacatggattgtgaagcagccagagtacgctgtggttcagagagggtcaatggtttcgtttgagtgcaaggttaaacacgatcatactctgtccctgacggtattgtggctgaaggataatcgtgagctgcccagtgatgagaggttcacagtggacaaggaccacctagtggtcgcagacgtttctgacgatgattctggcacatatacttgcgtcgctaataccactctggatagcgtctctgccagcgccgtgctgagtgtagttgctccaacccctacacccgcccccgtctatgatgtgcccaacccgccctttgaccttgaactgacagatcagctcgacaagtctgtgcagctatcctggacgccaggagacgacaataattcacctatcaccaaatttatcattgagtacgaagacgcaatgcacaaacccgggctatggcatcaccagactgaggtttctgggactcagacaactgctcagctgaagctcagcccgtacgtcaactactctttccgagtgatggccgtcaattctattggaaagagcctcccctcagaagcatctgaacagtatctaacgaaagcatccgaacctgacaagaaccctaccgccgtcgaaggcctaggtagcgagcccgataatttggttatcacgtggaagccgctgaatggtttcgagagcaacggaccgggcttgcagtataaggtcagctggcgacagaaggacggagatgatgagtggaccagcgtggtagttgcaaatgtatccaaatacatcgtatccggcacacccacgtttgtcccatatctgatcaaggttcaggctctgaacgatatgggttttgcgcctgagcccgccgtggttatggggcatagcggcgaggaccttcccatggtggcccccgggaacgtgcgggtcaacgttgtgaatagcactcttgccgaagtgcactgggatcccgtgcccctgaaaagcatacggggacacctacaggggtatagaatttattactggaaaacccagtctagcagcaagcgtaacaggcgccatattgagaagaagatattgacattccaaggaagcaaaacccatggaatgctcccgggcttagaacccttctctcattacactctgaatgtccgcgttgtgaacggcaaaggtgaagggccggcttccccagaccgtgtgtttaacacccctgagggagttccgagcgcaccaagcagtttgaaaatagtgaatcctacattggactcactgactctggagtgggaccccccttctcaccccaatggcattttgaccgaatacacacttaagtaccagcccattaactctacacacgagctcggaccccttgtagacctgaagattccggctaacaagaccagatggaccttgaagaacttgaacttttccacacgttataagttctatttttacgcccaaacctctgccgggagcggttcccagataactgaggaagccgtcactacggtggatgaggcgggcattctccccccagatgtcggagccggcaaagttcaggccgtaaaccccaggatttctaacctcaccgccgctgctgccgaaacatatgccaatataagctgggagtacgaaggacctgagcacgtaaatttctacgtggagtacggggtcgctggttccaaggaagaatggaggaaggagattgtcaacgggtcccggagtttctttgggctcaaaggcttgatgcccggtacagcgtataaagtgcgagtcggcgccgtaggggatagcggctttgttagttccgaggacgtctttgaaactggtcctgcgatggcttctagacaagtggacatcgctactcaaggatggttcattggcctgatgtgcgccgtggctctcctgatcctcatcctgctcatcgtgtgtttcatccgcaggaacaagggcggcaagtacccagtgaaggaaaaggaggacgcacacgctgaccctgaaatacaacccatgaaagaggacgatgggactttcggcgagtattcagatgcagaggatcacaaacccctaaagaaaggctccaggacaccatcggaccggactgtgaagaaggaggactcggacgactccctggtggactatggggaaggtgtgaatggccagttcaacgaagacggctcatttatcgggcagtacagcggcaagaaagagaaggaaccagccgagggcaacgaatccagcgaggccccatcaccggttaacgctatgaactcatttgtgtag

SEQ ID NO: 31095 - DNA, 3915 bp, Artificial Sequence
  derived and/or modified sequence
atgcaactcaagataatgcctaagaagaaaagactgagtgcggggcgggtgcccctcattctttttttatgtcagatgattagtgccctagaggttccactcgatccaaagctgctcgaggacctggtccaaccacctactattactcagcagtctcctaaggactacattatagaccctcgagagaacattgttattcagtgtgaggccaagggtaagccaccaccttccttctcatggacgcgcaatggcactcacttcgatattgataaagacccactggtgactatgaagcctgggaccggcactctcatcattaatataatgagcgaagggaaagccgagacatacgaaggcgtataccaatgcacagcacggaatgagagaggcgccgcggttagtaacaacatcgtagtacggcctagtaggagtcctctctggactaaggagaagttagagccgattacgctccagagcggacagtctctggtgttgccctgtcgaccgcctatcgggctgccaccacccattatcttctggatggacaattctttccagcgtctgcctcagtccgagcgcgtatctcagggtctgaacggcgatctttacttttcaaatgttctccctgaggacacacgagaagattatatctgctatgccagatttaatcatactcagacaattcagcagaaacagcctatctctgtcaaggtgatctccgtggacgagttgaatgataccatagccgcgaacttgtccgatacagagttttacggcgcgaaatcgtctcgggaaagaccccctacatttttgactccggaaggcaatgcctctaacaaggaggaactaagagggaatgtgctgagcctcgagtgcatcgccgaggggctgcccacgcctatcatctactgggcaaaggaggatggaatgcttcccaagaatcggactgtgtacaagaacttcgagaaaactctgcaaattattcacgtgtcagaggctgactcgggcaactaccagtgtatagccaagaatgcactcggcgcgattcaccataccatttcggtccgcgtgaaagctgcaccatactggattacagcccctcagaatcttgtgttgtcacctggagaggatggcactttgatctgccgcgctaacggaaatcctaagcctcggattagttggctgactaacggtgtccccattgagatcgcccctgacgacccttccagaaagatcgacggcgacaccatcatcttcagtaatgtgcaggaacgcagtagcgccgtatatcagtgcaacgcctccaacgagtacggttacttgctcgcaaatgcttttgttaatgtactcgcggagccacccaggatcttaacaccagccaacaccctgtatcaggtcatcgcgaaccgtcccgcgctactcgactgtgcgtttttcggctctccgttgcctaccattgagtggtttaagggggccaaggggagcgccttacacgaggacatttatgtgctgcacgaaaacggtacgctggagattcccgtggcccagaaggacagtaccggcacttacacatgtgttgcccgcaacaagctgggcatggcaaaaaatgaggtgcacctggaaataaaggacccaacgtggatcgtcaagcagcccgaatacgccgtcgttcagcgcgggagcatggtgtcctttgaatgcaaagttaaacatgatcatacactgtccctgaccgtactttggctgaaggacaaccgcgagttgccctccgacgagcggttcacggtcgacaaagaccacttggtcgtggctgacgtcagcgacgacgattccgggacatacacgtgtgtggccaacacaaccctggatagcgtctcagcttcagcggtgctctccgttgtggctcccacccccacccccgcaccagtgtacgatgtccctaacccacccttcgacctggaattgacagaccagctggacaaaagtgtgcagttgagttggacccctggggacgataacaatagcccgattaccaagtttataatcgagtatgaagatgcaatgcacaagcccggtctgtggcatcatcagactgaggtttcagggacccagacgactgcccagctgaagctgagcccttacgtgaattactcctttagggtgatggctgtgaattccattgggaaatccttaccatctgaagcaagcgagcagtacctgacaaaagcctccgagcctgataagaatcccactgccgtagagggcctcggctcagaacccgataatctcgtgatcacatggaagcctctgaatggatttgagtccaacgggcccggattgcagtataaagtctcatggcgccagaaagatggggatgatgagtggacctcggtcgttgtggccaacgtcagtaaatatatcgtgtctggaactccaacatttgtcccttacctaatcaaagttcaggccctgaatgacatgggcttcgctcccgaaccagctgtggtgatgggccattccggggaggacctgcctatggttgctccgggtaatgtgagagtaaacgtggtgaactctactttggctgaagtgcattgggatccggtgccgctgaaatctattagaggtcacctgcaggggtacaggatctactactggaaaactcagtcatctagtaagcgcaacaggaggcacattgaaaagaaaatactcacatttcaggggtctaaaacccacggtatgctgcccgggctggaaccgttctctcattacaccttaaatgtgagagttgtcaatggtaagggcgaagggcccgcctcgcctgatcgtgtgttcaataccccagaaggagtgccctcagccccttcctcgctcaaaattgtgaatcctaccctggactccctgacccttgaatgggaccccccttcccatcccaatggcatcctgaccgaatacacactcaagtatcagcccataaattccacacacgagctgggtccactggttgacctgaagataccggctaacaagacgcggtggactcttaaaaacctgaacttctcaacccggtacaaattctacttttacgctcagacatctgccggaagtggttcccagatcacagaggaggctgtgactaccgtcgatgaggcgggtattctgcccccagatgtgggcgctggcaaggtccaggcagtgaatccaagaatctccaatcttacagccgccgccgccgaaacttatgcgaacatcagctgggaatacgaaggccctgagcacgttaatttttatgtggagtatggggttgccgggtcaaaggaggaatggcggaaggagatcgtgaatggctcccggtctttctttgggctcaagggcttgatgccagggactgcttacaaagtgcgggttggtgctgtgggtgactccggattcgtatcgagtgaagatgtgtttgaaacagggcccgcaatggcatccaggcaagtggacatcgcaacccagggctggttcatcggcttaatgtgcgccgtggccctattgattttgatccttttaatagtgtgttttatccgtcgaaacaagggcggcaaatacccagttaaggaaaaggaggacgcccacgctgatccagagatccaacccatgaaagaggacgatgggactttcggcgaatacagtgacgcagaagatcacaagcctctgaaaaagggctccagaaccccctctgacagaacagtgaaaaaggaggactctgatgatagcctggtcgactacggcgaaggagttaacggccagtttaacgaggacggctcctttatcggccaatatagtgggaaaaaggagaaggagcccgcagagggcaatgagagcagcgaggcccccagtcccgtgaatgccatgaattcgttcgtgtag

SEQ ID NO: 31096 - DNA, 3915 bp, Artificial Sequence
  derived and/or modified sequence
atgcagctgaagatcatgcccaagaagaagaggctgtctgctggccgggtgcccctcatcctcttcctgtgccagatgatcagcgccctggaggtgcccctggaccccaagctgctggaggacctggtgcagccccccaccatcacccagcagagccccaaggactacatcatcgacccccgggagaacatcgtcatccagtgtgaggccaagggcaagcccccacccagcttctcctggaccagaaatggcacccactttgatattgacaaggaccccctggtgaccatgaagccaggcaccggcaccctcatcatcaacatcatgtctgagggcaaggccgagacctatgaaggagtgtaccagtgcacagccagaaatgaaagaggagctgctgtgagcaacaacatcgtggtgcggcccagccgcagccccctgtggaccaaggagaagctggagcccatcaccctgcagagcggccagagcctggtgctgccctgcaggcctcccatcggcctgcccccacccatcatcttctggatggacaacagcttccagaggctgccccagagcgagcgggtgtcccagggcctgaatggagacctgtacttcagcaatgtgctgcctgaggacacccgggaggactacatctgctacgcccgcttcaaccacacccagaccatccagcagaagcagcccatctctgtgaaggtgatctctgtggatgagctgaatgacaccatcgccgccaacctgagtgacacagagttctacggggccaagagcagccgggagaggcctcccaccttcctgaccccagagggcaatgccagcaacaaggaggagctgcggggaaatgtgctgagcctggagtgcatcgccgagggcctgcccacccccatcatctactgggccaaggaggatggcatgctgcccaagaacagaacagtgtacaagaactttgagaagaccctgcagatcatccacgtgtctgaggccgacagcggcaactaccagtgcatcgccaagaatgccctgggcgccatccaccacaccatctctgtgcgggtgaaggccgccccctactggatcacagccccccagaacctggtgctgagccctggagaagatggcaccctcatctgccgggccaatggaaaccccaagccccgcatctcctggctgaccaatggagtgcccattgaaattgccccagatgaccccagcaggaagattgatggagacaccatcatcttcagcaatgtgcaggagaggagcagcgctgtgtaccagtgcaatgccagcaatgaatatggctacctgctggccaatgcctttgtgaatgtgctggccgagcccccacgcatcctgaccccagccaacaccctgtaccaggtgattgccaacagacctgccctgctggactgtgccttcttcggcagccccctgcccaccatcgagtggttcaagggggccaagggcagcgccctgcacgaggacatctacgtgctgcatgaaaatggcaccctggagatccctgtggcccagaaggacagcacaggcacctacacctgtgtggccaggaacaagctgggcatggccaagaatgaggtgcacctggagatcaaggaccccacctggatcgtgaagcagccagaatatgctgtggtgcagaggggctccatggtgtcctttgagtgcaaggtgaagcatgaccacaccctgagcctgactgtgctgtggctgaaggacaaccgggagctgcccagtgatgagcgcttcaccgtggacaaggaccacctggtggtggctgatgtgtctgatgatgattctggcacctacacctgtgtggccaacaccaccctggacagcgtgtctgccagcgctgtgctgtctgtggtggcccccacccccaccccagcccctgtgtatgatgtgcccaaccccccatttgacctggagctgacagaccagctggacaagtctgtgcagctgtcctggaccccaggagatgacaacaacagccccatcaccaagttcatcatcgagtatgaagatgccatgcacaagccaggcctgtggcaccaccagacagaggtgtctggcacccagaccacagcccagctgaagctgagcccctacgtgaactacagcttccgggtgatggctgtgaacagcatcggcaagagcctgcccagcgaggccagcgagcagtacctgaccaaggccagcgagccagacaagaaccccacagctgtggagggcctgggcagcgagccagacaacctggtgatcacctggaagcccctgaatggatttgagagcaatggacctggcctgcagtacaaggtgtcctggaggcagaaggatggagatgatgagtggacctctgtggtggtggccaacgtgtccaagtacatcgtgtctggcacccccacctttgtgccctacctgatcaaggtgcaggccctgaatgacatgggctttgcccctgagcctgctgtggtgatgggccacagcggggaggacctgcccatggtggcccctggaaatgtgcgggtgaatgtggtgaacagcaccctggccgaggtgcactgggaccctgtgcccctgaagagcatccggggccacctgcagggctaccgcatctactactggaagacccagagcagcagcaagaggaacagaagacacatcgagaagaagatcctgaccttccagggcagcaagacccacggcatgctgcccggcctggagcccttcagccactacaccctgaatgtgcgggtggtgaatggcaagggggagggccctgccagcccagacagagtcttcaacaccccagagggcgtgcccagcgcccccagcagcctgaagatcgtgaaccccaccctggacagcctgaccctggagtgggacccccccagccaccccaacggcatcctgacagagtacaccctgaagtaccagcccatcaacagcacccatgagctgggccccctggtggacctgaagatcccagccaacaagacccgctggaccctgaagaacctgaacttcagcacccgctacaagttctacttctacgcccagaccagcgctggcagcggcagccagatcacagaggaggccgtgaccaccgtggatgaagctggcatcctgcccccagatgtgggcgctgggaaggtgcaggccgtgaacccccgcatcagcaacctgacagctgctgctgctgagacctacgccaacatctcctgggagtatgagggccctgagcacgtgaacttctacgtggagtatggagtggccggcagcaaggaggagtggaggaaggagatcgtgaatggcagccgctccttcttcggcctgaagggcctgatgcctggaacagcctacaaggtgcgggtgggcgctgtgggggacagcggctttgtgtccagtgaagatgtgtttgaaacaggccctgccatggccagccggcaggtggacatcgccacccagggctggttcatcggcctgatgtgtgctgtggccctgctgatcctgatcctgctgattgtgtgcttcatcagaagaaacaagggcggcaagtaccctgtgaaggagaaggaggatgcccacgccgaccctgagatccagcccatgaaggaggatgatggcaccttcggggagtacagtgatgctgaggaccacaagcccctgaagaagggcagcaggacccccagcgacagaacagtgaagaaggaggacagtgatgacagcctggtggactatggagaaggagtgaatggccagttcaatgaagatggcagcttcatcggccagtacagcggcaagaaggagaaggagcctgctgagggcaatgaatcttctgaggcccccagccctgtgaatgccatgaacagctttgtgtag

SEQ ID NO: 31097 - DNA, 3915 bp, Artificial Sequence
  derived and/or modified sequence
atgcagctgaagatcatgcccaagaagaagcggctgagcgccggccgcgtgccattgatcctcttcctgtgtcagatgatttcagcacttgaggtacctctcgatcctaagctgttggaagacctagtgcaaccaccaaccatcacccagcagtcgcctaaggactacattattgatccacgtgagaatattgttattcagtgcgaggccaaagggaagcctcctccttcgttctcttggacccggaacggaactcatttcgatattgataaggacccactcgtcaccatgaaaccaggaaccggcactcttattatcaatattatgtctgaaggcaaagcagagacctacgagggggtctaccagtgtactgcccgcaacgagcgtggggcagcggtgtccaacaacatcgttgtccgaccatccagaagccctctttggaccaaggagaagctggaaccaataaccctccaaagtgggcaatccctggtcctgccctgcaggccccctattggcctcccgccccctatcatcttctggatggataatagttttcaacgactcccacagtcggaacgcgtcagccagggccttaacggcgacctctacttcagcaacgttctcccagaggatacaagggaggactacatatgttacgccagattcaaccacacgcaaacaatccagcaaaagcagcctatctcagtgaaagtgatcagtgtagacgagctgaatgataccatcgccgccaacctctccgacacagaattctatggggcgaaaagttcgcgagaacggccccctacatttctcacacccgagggaaatgcctccaacaaggaggaattgcggggaaatgtgttgtccctcgagtgcatagccgagggcttacccacaccgatcatttattgggccaaagaggacggcatgcttccaaagaataggaccgtctacaagaatttcgaaaagaccctgcagatcatccacgtcagcgaagcagatagtggcaattatcagtgtatcgctaagaatgcgctgggcgctatccaccacacaatctcggtgagagtgaaggctgcaccttattggatcaccgccccccagaatctcgtgctatccccaggggaagacgggaccttaatctgtcgggctaacggaaaccctaagcctagaatttcctggctgacaaacggtgtccccattgagattgcacccgatgacccctctagaaagatcgacggagataccatcatctttagtaacgtacaggagaggtccagtgctgtgtaccaatgtaacgcttcaaatgaatacggttatctcctggcaaatgctttcgtcaatgttctcgctgagccaccccgcatcctcacccctgccaacactttgtatcaggtgatcgccaacagacccgccttactagactgcgccttctttggcagccccctgccaactattgagtggttcaagggagcgaaagggtcagccctccacgaagacatttatgtcctgcatgagaatgggactcttgagattcccgttgcgcagaaagacagcacaggcacctacacctgtgtggccaggaataaattaggcatggctaagaatgaagtccacctggagatcaaagaccccacttggatagtaaaacaacccgaatacgctgtggtacagaggggatcgatggtctcatttgaatgtaaggtgaaacacgatcacaccctcagccttactgtcctctggcttaaagataatagggagctgccctccgatgaacgctttacggtcgacaaagatcatcttgtggtggccgatgtctctgatgatgactcagggacgtacacctgtgtggctaatacgactcttgacagtgtgagtgccagtgccgttctctctgtggtcgctcccacgccaacccccgcccccgtctatgacgtcccaaacccccccttcgatctggagctgaccgaccaactggataaatccgtgcagctttcctggacaccaggagatgataacaatagtccaatcacgaagttcatcatagaatacgaggacgcaatgcacaagcccggactctggcatcatcaaactgaggtgagcggcacgcagacaactgcccagctgaagctgtctccttacgtgaattactcctttagagtcatggccgtgaactctatcggtaagtccctcccctcggaagcttccgagcagtacctgaccaaagcatcggagccagataaaaatccgacagcggtggaaggcttgggatctgaacctgacaacctggtcattacctggaaacctcttaacggttttgagtcaaacggccctggactgcagtataaggtcagttggagacaaaaagatggcgacgatgagtggacgtccgtcgtggttgccaatgtttccaagtacatagtgtccgggaccccaaccttcgtcccttacctgattaaggttcaagccttaaacgacatgggcttcgcaccagagccggccgtggtgatgggccatagcggcgaagatttgcccatggtggcccctggcaatgttagggtcaacgttgtcaactctactcttgctgaagtgcattgggaccccgttccactaaagtctatccggggacatctgcagggatacagaatctactactggaagactcagagctcatcaaagaggaaccggagacatattgagaagaaaatcttgacttttcagggttcaaaaactcatgggatgcttcccgggctggagccgttctcccactatactctgaacgtgcgggttgtaaatggtaagggagaagggcccgcatcccccgaccgcgttttcaatactcctgagggtgtgcccagcgctccttctagcctaaagatcgtcaatcccacacttgactccctcaccctggaatgggaccccccgtcacatccaaacgggattctgactgaatacaccctaaaataccagcctatcaacagcacccacgagctcggaccacttgtggacttgaaaataccagctaacaaaacaaggtggaccctgaaaaacctaaatttctctactaggtacaaattttacttttatgcccagacctccgcaggctctggctcacagattactgaagaggccgtcaccaccgtcgatgaggctggaatcttgccaccagatgttggggcaggtaaggtccaagcagtgaatccccgaataagtaacctgactgctgctgccgctgagacctacgccaatatctcttgggagtacgaaggacccgaacacgtgaacttctacgtcgagtacggcgtggcgggtagcaaagaagaatggcggaaagagattgtaaacggctcgcgatcattttttggcctcaaggggcttatgccagggacagcatacaaggtacgcgttggggcagtcggagatagtggctttgtttcttcagaggatgtatttgaaaccggccccgcgatggcatccaggcaagttgacatcgccacccagggatggtttattggtctcatgtgcgctgtagccctcttaattctaatcctgctcatagtatgtttcatacggagaaacaaagggggtaagtatccagtgaaggaaaaggaagacgcccatgccgatcccgagatccagcctatgaaagaggacgatggaactttcggtgaatattccgacgctgaagatcacaagcctttaaaaaagggttccagaacaccatccgaccgaaccgtgaagaaggaggactctgatgacagcctggtcgattacggggagggagtgaatggacagtttaatgaggatgggagctttattggtcagtactccgggaagaaggaaaaggagccagccgagggaaacgagagctcagaggccccatcgcccgttaatgccatgaactctttcgtgtag

SEQ ID NO: 31098 - DNA, 3915 bp, Artificial Sequence
  derived and/or modified sequence
atgcagctgaagatcatgcccaagaagaagcggctgagcgccggcagggttcccctcatcctgttcttgtgtcagatgatctcggccctggaagtaccactggatcccaaactgcttgaagacttggtgcagccccccacgatcacccagcaatcccccaaggattatattatcgatccacgggagaacattgtgatccagtgcgaggcaaaagggaagccaccaccctcttttagctggacacgaaatggcacccatttcgacatagacaaagacccattagtgactatgaagccaggcacgggaacactgatcatcaatatcatgtcagaggggaaggctgagacctacgaaggggtgtatcaatgcaccgcaaggaacgaacggggcgccgccgtgtctaataatattgtggtgagacccagtcgtagccctctgtggaccaaggaaaagctcgagcctatcactctacagtccgggcagtccttggtccttccctgtagaccacctatcggactgcccccgccaattattttttggatggacaactccttccagagactgccacagagtgaaagagtcagccaagggttgaacggagatctgtacttctccaatgttctccccgaagatacacgcgaggactacatttgttatgctcggttcaatcacacccagaccattcagcagaaacagccgatttcagttaaggtgatatctgtggacgaacttaacgacactattgccgccaacttgagtgataccgagttttacggcgctaagtcctcccgcgagaggcctcccacttttctgacgcccgaagggaacgcctcaaacaaggaagaactgaggggcaacgtgctaagtcttgagtgcatcgccgaaggtctcccaactcccattatctactgggcgaaagaggacggaatgctccccaaaaacaggaccgtttacaagaatttcgaaaagaccttgcaaattatccacgtttcagaggctgatagtggcaactaccagtgcatcgctaagaacgctcttggtgctatccaccacaccatttctgtgcgagttaaagctgcaccttattggatcaccgcaccacagaatctggtgctgtcgccgggagaggatggcaccctgatttgcagagccaacggcaaccccaagccgcggatttcctggctgaccaacggagtgcccatcgagattgcacctgatgacccctcacgtaaaatcgacggagacactataatttttagcaacgtccaggaaaggtcttctgccgtatatcaatgcaacgctagtaacgaatacggatatctgttggccaacgcctttgtgaacgtcctcgccgagccccctcgaatcctaacacctgctaatactctgtaccaggtcatagctaatcgcccggctctcctagactgtgctttttttggttctcccctgccgactatcgagtggttcaaaggcgccaagggttctgccttacatgaagacatatacgtcctgcatgaaaatggcaccctggaaatccccgtggcccaaaaagattccactgggacttacacctgtgtggcgcggaataaactcgggatggccaagaatgaagtgcacctggagatcaaagacccgacctggatcgtgaagcagcctgagtacgcagtcgttcagcgaggaagcatggtgtcgtttgaatgcaaggtgaagcacgaccacactctgtccctgactgttctctggcttaaggacaaccgggaactcccctcagacgagcggtttacagtggataaagatcaccttgttgtggctgatgtgtctgacgatgatagcggaacctatacatgcgtagccaacactacacttgactcggttagcgcaagcgctgtactgtccgtggtcgcacccaccccaacccccgccccagtttacgatgtgcccaacccaccattcgaccttgagctcaccgaccagctggacaagtctgtacagctctcctggacaccaggggacgataacaacagccctataacaaaattcattatcgaatatgaggacgccatgcacaaaccaggactctggcatcaccagacggaggtctccggcacccagacaacagcccagctgaagttaagtccatacgtgaactactcctttagggtaatggctgtgaattcaatcggtaagtcccttccatcagaggcttcagaacaatacttgaccaaggcctctgagcctgataagaatcctaccgccgtagagggccttggctcagaaccagacaatttagtgatcacttggaaaccgctaaatggattcgaatccaatggccccggactccagtacaaggtaagttggagacagaaggatggagacgatgagtggactagcgtggtggtcgctaacgtaagcaagtatattgtgtctgggactcctactttcgttccctatctcatcaaagtgcaggctctgaacgacatgggctttgctccagagcccgctgtcgtgatggggcactcaggagaagacctgcccatggtggctcccggtaacgtgcgcgtcaatgtcgttaactccaccttagctgaggttcattgggacccagtgccccttaagtcgatccggggacacctgcagggttacaggatctactactggaaaacccagtcttcttcaaagcggaatcgcaggcacattgagaagaaaattctaacattccagggtagtaagacccatggaatgctgcctggtctcgagccttttagtcactatactctaaatgtacgggtagtgaacggtaaaggcgagggcccagcaagccccgatagggttttcaacacgcccgaaggggtgccttccgcaccctcctcactgaaaattgtgaaccctaccctggatagtctcaccttagaatgggatcctccgtcccatccaaacgggattcttacagagtatacattgaaataccaacctattaatagtactcacgaactagggccgctggtggatctgaagatacctgcaaataagacaagatggaccctcaaaaatctaaacttttcaaccagatataaattctatttttatgctcagacttccgccggatcgggtagccagattaccgaagaggccgtcactactgtcgacgaagccgggatcttaccacccgatgtgggtgcaggcaaagtgcaagcagtgaatccccgcattagcaatttgactgctgccgccgcggaaacctatgcaaatatttcatgggagtacgaaggtcccgaacacgtgaacttttatgtagagtatggggtggccggcagcaaagaggagtggaggaaagagatcgtgaacgggtcgagaagttttttcggacttaagggactgatgcccggcacagcttataaagtgcgggtcggtgctgtaggcgacagtggatttgtgtcgtccgaggatgtcttcgagaccggccccgcgatggctagccgccaggtggatattgctacacaaggctggttcatcggtcttatgtgcgcggtggccttgctgatcctgatactgctgatcgtgtgctttatcaggcggaataaaggcgggaagtaccccgtcaaggaaaaggaggacgctcacgcggatcccgaaatccagcccatgaaggaggatgatgggacattcggcgaatactccgatgccgaagatcacaagcccctgaaaaagggttcacggacccccagcgataggacagtgaagaaagaggatagtgacgacagtcttgttgattatggagagggtgttaacggccagttcaacgaggatgggagctttatcggtcaatattccggcaaaaaagagaaggagccggccgagggaaacgaatcaagtgaggccccttctccagttaacgccatgaactctttcgtgtag

SEQ ID NO: 31099 - DNA, 6659 bp, Artificial Sequence
  derived and/or modified sequence
cgcgcgggcgcgggggacggcgcaggggccgcctggctggagcagccagaggggatagcttcgtcgagaacggaggacaccggcggtccagggtcctgggcagtcgcgccagagctgagcggagggcgcggcgcgagaacgaatctttgtgacattctctctcagcattctttatcccctgtttgctgaagacttcgacaaaagctggtcttagctgttggcattctcctgagaaaaggatagcttcagaaatcagaaaaacatttgggaggtgtctagcccagtggaccttctgaagagcaatgctaagaagacgtttggtttaaagaattaaaaggaagaacaacttaagagcttcttcaaagtttcccgcatgaaaattacttaaacgttgcacacaacgtttcacaaaatcttttgtgaaagaagaaaaggaaattcagtgtgtgagtctcagcaggagttaagctaatgcagcttaaaataatgccgaaaaagaagcgcttatctgcgggcagagtgcccctgattctcttcctgtgccagatgattagtgcactggaagtacctcttgatccaaaacttcttgaagacttggtacagcctccaaccatcacccaacagtctccaaaagattacattattgaccctcgggagaatattgtaatccagtgtgaagccaaagggaaaccgcccccaagcttttcctggacccgtaatgggactcattttgacatcgataaagaccctctggtcaccatgaagcctggcacaggaacgctcataattaacatcatgagcgaagggaaagctgagacctatgaaggagtctatcagtgtacagcaaggaacgaacgcggagctgcagtttctaataacattgttgtccgcccatccagatcaccattgtggaccaaagaaaaacttgaaccaatcacacttcaaagtggtcagtctttagtacttccctgcagacccccaattggattaccaccacctataatattttggatggataattcctttcaaagacttccacaaagtgagagagtttctcaaggtttgaatggggacctttatttttccaatgtcctcccagaggacacccgcgaagactatatctgttatgctagatttaatcatactcaaaccatacagcagaagcaacctatttctgtgaaggtgatttcagtggatgaattgaatgacactatagctgctaatttgagtgacactgagttttatggtgctaaatcaagtagagagaggccaccaacatttttaactccagaaggcaatgcaagtaacaaagaggaattaagaggaaatgtgctttcactggagtgcattgcagaaggactgcctaccccaattatttactgggcaaaggaagatggaatgctacccaaaaacaggacagtttataagaactttgagaaaaccttgcagatcattcatgtttcagaagcagactctggaaattaccaatgtatagcaaaaaacgcattaggagccatccaccataccatttctgttagagttaaagcggctccatactggatcacagcccctcaaaatcttgtgctgtccccaggagaggatgggaccttgatctgcagagctaatggcaaccccaaacccagaattagctggttaacaaatggagtcccaatagaaattgcccctgatgaccccagcagaaaaatagatggcgataccattattttttcaaatgttcaagaaagatcaagtgcagtctatcagtgcaatgcctctaatgaatatggatatttactggcaaacgcatttgtaaatgtgctggctgagccaccacgaatcctcacacctgcaaacacactctaccaggtcattgcaaacaggcctgctttactagactgtgccttctttgggtctcctctcccaaccatcgagtggtttaaaggagctaaaggaagtgctcttcatgaagatatttatgttttacatgaaaatggaactttggaaattcctgtggcccaaaaggacagtacaggaacttatacgtgtgttgcaaggaataaattagggatggcgaagaatgaagttcacttagaaatcaaagatcctacatggatcgttaaacagcccgaatatgcagttgtgcaaagagggagcatggtgtcctttgaatgcaaagtgaaacatgatcacaccttatccctcactgtcctgtggctgaaggacaacagggaactgcccagtgatgaaaggttcactgttgacaaggatcatctagtggtagctgatgtcagtgacgatgacagcgggacctacacgtgtgtggccaacaccactctggacagcgtctccgccagcgctgtgcttagcgttgttgctcctactccaactccagctcccgtttacgatgtcccaaatcctccctttgacttagaactgacagatcaacttgacaaaagtgttcagctgtcatggaccccaggcgatgacaacaatagccccattacaaaattcatcatcgaatatgaagatgcaatgcacaagccagggctgtggcaccaccaaactgaagtttctggaacacagaccacagcccagctgaagctgtctccttacgtgaactactccttccgcgtgatggcagtgaacagcattgggaagagcttgcccagcgaggcgtctgagcagtatttgacgaaagcctcagaaccagataaaaaccccacagctgtggaaggactgggatcagagcctgataatttggtgattacgtggaagcccttgaatggtttcgaatctaatgggccaggccttcagtacaaagttagctggcgccagaaagatggtgatgatgaatggacatctgtggttgtggcaaatgtatccaaatatattgtctcaggcacgccaacctttgttccatacctgatcaaagttcaggccctgaatgacatggggtttgcccccgagccagctgtagtcatgggacattctggagaagacctcccaatggtggctcctgggaacgtgcgtgtgaatgtggtgaacagtaccttagccgaggtgcactgggacccagtacctctgaaaagcatccgaggacacctacaaggctatcggatttactattggaagacccagagttcatctaaaagaaacagacgtcacattgagaaaaagatcctcaccttccaaggcagcaagactcatggcatgttgccggggctagagccctttagccactacacactgaatgtccgagtggtcaatgggaaaggggagggcccagccagccctgacagagtctttaatactccagaaggagtccccagtgctccctcgtctttgaagattgtgaatccaacactggactctctcactttggaatgggatccaccgagccacccgaatggcattttgacagagtacaccttaaagtatcagccaattaacagcacacatgaattaggccctctggtagatttgaaaattcctgccaacaagacacggtggactttaaaaaatttaaatttcagcactcgatataagttttatttctatgcacaaacatcagcaggatcaggaagtcaaattacagaggaagcagtaacaactgtggatgaagctggtattcttccacctgatgtaggtgcaggcaaagttcaagcagtaaatcccaggatcagcaatcttactgctgcagctgctgagacctatgccaatatcagttgggaatatgagggaccagagcatgtgaacttttatgttgaatatggtgtagcaggcagcaaagaagaatggagaaaagaaattgtaaatggttctcggagcttctttgggttaaagggtctaatgccaggaacagcatacaaagttcgagttggtgctgtgggggactctggttttgtgagttcagaggatgtgtttgagacaggcccagcgatggcaagccggcaggtggatattgcaactcagggctggttcattggtctgatgtgtgctgttgctctccttatcttaattttgctgattgtttgcttcatcagaagaaacaagggtggtaaatatccagttaaagaaaaggaagatgcccatgctgaccctgaaatccagcctatgaaggaagatgatgggacatttggagaatacagtgatgcagaagaccacaagcctttgaaaaaaggaagtcgaactccttcagacaggactgtgaaaaaagaagatagtgacgacagcctagttgactatggagaaggggttaatggccagttcaatgaggatggctcctttattggacaatacagtggtaagaaagagaaagagccggctgaaggaaacgaaagctcagaggcaccttctcctgtcaacgccatgaattcctttgtttaatttttaagctctttgccaatattccatttctctagaatgtttatcctaagcacttgtttgtcagccctctcatactatgaacatatgggtagagagtatattttctgctgtatgttagtattatgagaatagttacagcaaaaacataactcagtcaaatgatatgttaatatgaactggaatgcaaagtgcatactttttcattcaaaatgggtattcttgatttcctcagaactgataaaaaataatgcaacatcaccaacagatcctgttatttcctctgcaggatacagttcaatatgatgcatgaaaaatgctccacatttaaaggacatacccgtgtatgttatgaaaacatggtttgatactttgtttatactaccctcagctgaacccctatatatgaattccgttttcattgtcaagaatgttactgtagtattctctagaacttcaatgtctttgtggacattgttgtgaaattggtgactatgtatagctgtcgttagtctttttgggagactgttaggaacagtttgtacagtatatacttgctaaatgagttcattatgacagtcacattgctgatgcttactgagaactattacctactcttggctcctgttactccgtaggcttcttaatcttccaggcattacagcagcacagtgttctactttttacatcatttctatgttcggttgtttttaggcataaacaatgtgtattgcagtgcatttcggcatttgtgccatactgaaagaatcaaaaacaaatcatccaaattaaatttcaaacattatttcagagaacacagggcaagacacatacagtgccttcagatattaagcattccacaacatcgtgcattctgtatcagctggtccagtccattctgggtcctagattactgtcattgtctaaaagtaacttttaaaaagcagagttcatgaaaactgcaatgctgggaaaagaaggaaacatgaaaataaaaataagacagtttattagaaatagcatttcctcataagcataaaaagaaaatctttgttgccaactgaagcacatgatgattttgtggtcctttatggtttctattacattcagtaagaaagatgtcaacatgctagaaaattaattttaaaactaagttattccaacactaaaagcatacaacagcatgccaacagtaatatattattctccaagactttacctatgtaagtgttcaaaactctgcagcattaaacaacgtgtatgcaaattgttatggatacatttcagaatctaagaaatcaggcaagtgcttaaaaggccaacggtccaagggattacatctgcagtttaaaaagtaaatatatattctatcgtattcataaacaatatctatcaaatgggttacctccaaatatgaaaatctataacaacctatggttgaaggaatgctcagtttcatttgccaataaattggtttctcataacttgcatcaagtttaattttaagtaaagctttttatatgtagatattttgttgaatttgtaaatacacttaaaatgtagatgctatatgcttataggtgttacatacaaataaacatgcaatgtttatgttgtactgtataagaggtaagctaattaatgcagtgaatgggattggaaagcatctacttaaatatctattgggttcccccctccccccaccttttttgctgtgaaactgaaatagtgaacttttctacgtattgacagcagatttttcgatgaaatcttcagagctttgcctatggggcacagtaggcctagtaacctggcatgtttgatatatgtaggtaaagcataatttaaagtaatcccaggtaaagatggccctaaatactttcatgtctctatattcatttttcacagatccacctgtctcttgaaaatataaaaagacaaaacaggtttgccttggcatcagagagcacaaagattaaaagttactttaaatttgccaatattttgggagaacaataaaactacattttttcctcttccatactggtagatgcgaaatttatctgtgcatgaaagggtcacttctgtaatagtgcaacagatttggtattaaaaattaaatgtggttttaaaagttcctctctcttttgtaatttatgttcccaattgagtgtgaatgtccaagtaatggtgtatgtaatggtacaggcaaatgtgactggatttccctcaaaaaagtaactattaaacagtcttgatctctttgtgacttttaa

SEQ ID NO: 31100 - DNA, 3915 bp, Artificial Sequence
  derived and/or modified sequence
atgcagcttaaaataatgccgaaaaagaagcgcttatctgcgggcagagtgcccctgattctcttcctgtgccagatgattagtgcactggaagtacctcttgatccaaaacttcttgaagacttggtacagcctccaaccatcacccaacagtctccaaaagattacattattgaccctcgggagaatattgtaatccagtgtgaagccaaagggaaaccgcccccaagcttttcctggacccgtaatgggactcattttgacatcgataaagaccctctggtcaccatgaagcctggcacaggaacgctcataattaacatcatgagcgaagggaaagctgagacctatgaaggagtctatcagtgtacagcaaggaacgaacgcggagctgcagtttctaataacattgttgtccgcccatccagatcaccattgtggaccaaagaaaaacttgaaccaatcacacttcaaagtggtcagtctttagtacttccctgcagacccccaattggattaccaccacctataatattttggatggataattcctttcaaagacttccacaaagtgagagagtttctcaaggtttgaatggggacctttatttttccaatgtcctcccagaggacacccgcgaagactatatctgttatgctagatttaatcatactcaaaccatacagcagaagcaacctatttctgtgaaggtgatttcagtggatgaattgaatgacactatagctgctaatttgagtgacactgagttttatggtgctaaatcaagtagagagaggccaccaacatttttaactccagaaggcaatgcaagtaacaaagaggaattaagaggaaatgtgctttcactggagtgcattgcagaaggactgcctaccccaattatttactgggcaaaggaagatggaatgctacccaaaaacaggacagtttataagaactttgagaaaaccttgcagatcattcatgtttcagaagcagactctggaaattaccaatgtatagcaaaaaacgcattaggagccatccaccataccatttctgttagagttaaagcggctccatactggatcacagcccctcaaaatcttgtgctgtccccaggagaggatgggaccttgatctgcagagctaatggcaaccccaaacccagaattagctggttaacaaatggagtcccaatagaaattgcccctgatgaccccagcagaaaaatagatggcgataccattattttttcaaatgttcaagaaagatcaagtgcagtctatcagtgcaatgcctctaatgaatatggatatttactggcaaacgcatttgtaaatgtgctggctgagccaccacgaatcctcacacctgcaaacacactctaccaggtcattgcaaacaggcctgctttactagactgtgccttctttgggtctcctctcccaaccatcgagtggtttaaaggagctaaaggaagtgctcttcatgaagatatttatgttttacatgaaaatggaactttggaaattcctgtggcccaaaaggacagtacaggaacttatacgtgtgttgcaaggaataaattagggatggcgaagaatgaagttcacttagaaatcaaagatcctacatggatcgttaaacagcccgaatatgcagttgtgcaaagagggagcatggtgtcctttgaatgcaaagtgaaacatgatcacaccttatccctcactgtcctgtggctgaaggacaacagggaactgcccagtgatgaaaggttcactgttgacaaggatcatctagtggtagctgatgtcagtgacgatgacagcgggacctacacgtgtgtggccaacaccactctggacagcgtctccgccagcgctgtgcttagcgttgttgctcctactccaactccagctcccgtttacgatgtcccaaatcctccctttgacttagaactgacagatcaacttgacaaaagtgttcagctgtcatggaccccaggcgatgacaacaatagccccattacaaaattcatcatcgaatatgaagatgcaatgcacaagccagggctgtggcaccaccaaactgaagtttctggaacacagaccacagcccagctgaagctgtctccttacgtgaactactccttccgcgtgatggcagtgaacagcattgggaagagcttgcccagcgaggcgtctgagcagtatttgacgaaagcctcagaaccagataaaaaccccacagctgtggaaggactgggatcagagcctgataatttggtgattacgtggaagcccttgaatggtttcgaatctaatgggccaggccttcagtacaaagttagctggcgccagaaagatggtgatgatgaatggacatctgtggttgtggcaaatgtatccaaatatattgtctcaggcacgccaacctttgttccatacctgatcaaagttcaggccctgaatgacatggggtttgcccccgagccagctgtagtcatgggacattctggagaagacctcccaatggtggctcctgggaacgtgcgtgtgaatgtggtgaacagtaccttagccgaggtgcactgggacccagtacctctgaaaagcatccgaggacacctacaaggctatcggatttactattggaagacccagagttcatctaaaagaaacagacgtcacattgagaaaaagatcctcaccttccaaggcagcaagactcatggcatgttgccggggctagagccctttagccactacacactgaatgtccgagtggtcaatgggaaaggggagggcccagccagccctgacagagtctttaatactccagaaggagtccccagtgctccctcgtctttgaagattgtgaatccaacactggactctctcactttggaatgggatccaccgagccacccgaatggcattttgacagagtacaccttaaagtatcagccaattaacagcacacatgaattaggccctctggtagatttgaaaattcctgccaacaagacacggtggactttaaaaaatttaaatttcagcactcgatataagttttatttctatgcacaaacatcagcaggatcaggaagtcaaattacagaggaagcagtaacaactgtggatgaagctggtattcttccacctgatgtaggtgcaggcaaagttcaagcagtaaatcccaggatcagcaatcttactgctgcagctgctgagacctatgccaatatcagttgggaatatgagggaccagagcatgtgaacttttatgttgaatatggtgtagcaggcagcaaagaagaatggagaaaagaaattgtaaatggttctcggagcttctttgggttaaagggtctaatgccaggaacagcatacaaagttcgagttggtgctgtgggggactctggttttgtgagttcagaggatgtgtttgagacaggcccagcgatggcaagccggcaggtggatattgcaactcagggctggttcattggtctgatgtgtgctgttgctctccttatcttaattttgctgattgtttgcttcatcagaagaaacaagggtggtaaatatccagttaaagaaaaggaagatgcccatgctgaccctgaaatccagcctatgaaggaagatgatgggacatttggagaatacagtgatgcagaagaccacaagcctttgaaaaaaggaagtcgaactccttcagacaggactgtgaaaaaagaagatagtgacgacagcctagttgactatggagaaggggttaatggccagttcaatgaggatggctcctttattggacaatacagtggtaagaaagagaaagagccggctgaaggaaacgaaagctcagaggcaccttctcctgtcaacgccatgaattcctttgtttaa

SEQ ID NO: 31101 - DNA, 3915 bp, Artificial Sequence
  derived and/or modified sequence
atgcagctgaagattatgcccaagaagaagcgcctgtccgcaggtagggtcccactgattctctttctgtgccagatgatctccgcactcgaagtgccactcgatccaaaactgctggaggaccttgtgcagccacccacaatcactcaacagtcaccaaaagactatattatagacccaagagaaaacatcgtgattcaatgtgaagctaaagggaagccgcctccttccttcagttggactagaaacgggactcacttcgacatcgataaggacccattggtcacaatgaagcccggaactggaaccctgataataaatatcatgtccgaggggaaggcggagacatatgaaggggtttatcagtgcactgccagaaacgaaaggggggctgccgtcagcaacaatatagtcgtacgaccatctcggtcacccttgtggaccaaagaaaagttggaacctatcacgcttcagtctggacaatcgctggtgctcccctgtagacccccaataggcctcccacccccaatcatcttttggatggataattcttttcagaggctccctcaatcagaaagggtgtcacagggcttgaacggagacctatacttctccaatgtcctgccagaagacaccagggaggactacatttgctatgccagattcaatcatacccagaccattcaacagaagcagcctattagcgtcaaagtgattagcgtggacgaactcaatgacacgatcgctgccaacttatccgacactgagttctacggcgctaagtcctcaagggaaagaccacccacgttcttgaccccggaaggaaacgcttccaacaaagaggagctgaggggcaacgtactatccctcgagtgtatagctgagggcctccctactccgatcatttattgggccaaagaggacgggatgctgccgaagaaccggacggtgtacaaaaactttgagaagacccttcagattatccatgtatctgaagcagatagcggaaactaccagtgtatagccaaaaatgctctcggggcaattcaccataccatttcagttcgagtgaaagctgcgccatactggataacagcaccccagaatctagtcctgtccccgggagaagacggaaccttaatctgtcgggcaaacggaaatcccaaacccaggatatcttggctgacgaacggcgttcctattgaaatagccccagacgaccctagcaggaaaatcgatggggacaccatcattttttcgaatgtacaggagcgttcctccgctgtgtaccagtgcaatgccagcaatgaatacggttatctgctggctaatgcattcgtcaatgttctggccgagccacctagaatcctcacgccagccaacactctgtaccaggtgatagctaaccggccagcgttgctcgactgcgccttcttcgggagtcccctgcctactattgagtggttcaaaggcgctaaagggagcgccctccacgaggacatctatgtcctgcacgagaacggaaccctggagattccagttgcgcagaaggactcgacgggcacatatacttgtgttgcccgtaataagcttggcatggctaagaatgaagtgcacttggaaataaaagacccgacttggattgtgaagcaacctgagtacgcagtggtgcagcgcggttctatggtctcatttgaatgtaaagtcaagcatgaccataccttaagccttactgtgctgtggctgaaggataaccgcgaactcccctccgacgagcgctttacagtcgataaagaccatttggtcgttgcagacgttagtgatgacgactccggtacttacacatgtgtcgcaaacaccactctagacagcgtgtcagcttccgcggtcctttcagttgtggccccaaccccgacgcccgctcctgtgtatgacgtaccaaatccaccattcgacctggagctgacagaccaactggacaaaagtgtgcagctgagctggacccccggagacgacaataattcccctatcacaaaatttatcatcgagtacgaggacgcaatgcacaagccaggcctgtggcaccaccagaccgaagtgtcggggacccagaccaccgcacagctcaagctttctccctacgtaaattattcatttagggtcatggccgtgaactcaattggcaaaagtctcccctctgaagcctcagaacaatacctcactaaggcatccgagcccgacaagaaccccaccgcagtcgaaggcctcggtagcgagcccgataaccttgtcataacatggaagcctctgaacggtttcgagagcaacgggcctgggttgcagtacaaggtcagctggcgccagaaggacggggacgacgagtggactagcgtggtggtcgcaaatgtctccaaatacatcgtgtccggaacccccacttttgtcccgtacctgattaaagtccaggctctcaatgacatgggcttcgctcctgaacctgcagtcgtcatggggcatagcggcgaagaccttcccatggttgcacccggaaatgttcgagtcaatgtggtgaactctaccttagccgaagtgcactgggatcccgtcccccttaaatcgattcggggacatttgcagggttaccgcatctattactggaagactcaatcctctagtaaacgaaaccgcaggcatatagagaagaagatactgacattccagggcagcaagacccatgggatgctgcccggacttgaaccgttcagccattacacactgaatgtgcgagtagtgaatggcaaaggagaagggcctgcatcccccgaccgcgtcttcaacacccccgaaggagtcccttcagcccctagttctctgaagatcgtcaacccgacattggactctttgacacttgagtgggacccccctagccaccccaatggaattctgacagaatataccttgaaataccaacccatcaactccacccacgaactagggccactggtcgatttgaagatccccgctaacaaaactagatggactttgaagaacctcaatttttctactaggtacaagttttacttctatgctcaaacctctgccggttcaggctcgcagattacagaagaagccgtcacgaccgtcgatgaggctgggatactgcccccagatgtcggtgctggcaaagtgcaggcggtgaatccacgtatttcgaatctcactgctgccgcagcagagacctacgcgaacattagttgggagtacgaggggcctgagcacgtgaatttctatgtcgagtacggcgtcgctggaagtaaggaggaatggcgcaaagaaatagtgaacggaagccgcagcttcttcggcctgaagggcctgatgccaggcaccgcttacaaggtcagggtgggcgcagtgggggatagcggatttgtgtcatccgaagacgttttcgaaacggggcctgccatggccagtagacaagttgatattgctactcaaggctggttcattggtcttatgtgcgccgtcgcattactaatcctgatcctgttgattgtgtgctttattaggaggaataaagggggaaagtaccctgtgaaggagaaggaagacgctcatgctgatccagagatccagccgatgaaggaggacgacggcaccttcggagagtactctgacgcggaggatcataagccactgaagaaagggagcaggaccccatctgaccgaactgtcaagaaggaggatagtgatgacagcttggttgattacggtgagggcgttaatggccaatttaatgaagatggatccttcatcggacagtactccggtaagaaggagaaagaaccagccgaagggaatgagtcctccgaggcaccttctccagtgaatgccatgaattcctttgtctag

SEQ ID NO: 31102 - DNA, 3915 bp, Artificial Sequence
  derived and/or modified sequence
atgcagctcaaaatcatgcccaaaaagaaaagactgagtgctggaagagtgcctctgattttgtttctgtgtcagatgatctcagccctcgaggttccactcgatcctaagttattagaggacctcgtgcagcctccaaccatcacccagcagtccccaaaagattacattatcgatcccagggaaaatattgtgattcagtgtgaagcaaaggggaaaccacctccgagtttcagttggacccgaaacggcacccacttcgatattgacaaggatccactggttacgatgaaacctggcacgggtacattgatcataaatatcatgtccgaggggaaagctgaaacatatgaaggcgtgtaccagtgtaccgctcgcaacgaaagaggtgctgctgtctccaacaacattgtggtcaggccttctcgctcaccactatggactaaggagaaacttgaacctatcacactgcagtcgggccaatctcttgtgctgccctgcaggccccctatcgggcttcctcctcctataattttctggatggataattccttccagagactgccgcagtccgaacgagtgtcacagggactgaacggcgatctttacttttccaatgttcttcccgaggacaccagagaggattacatttgttatgcccgtttcaaccatacacagacaatccagcagaagcaaccaattagcgtaaaagtcataagcgtggatgagctgaacgacactattgccgcaaacctgtccgataccgagttttatggcgcaaagagctcccgagaacgccctcccacttttctcactccagaggggaatgccagtaataaagaagagttacgcggtaacgtgctgtccctggaatgtattgctgaagggctccctacacctatcatctactgggccaaggaggatggtatgctgcctaaaaataggacagtctacaagaatttcgaaaagaccctgcagattatccatgtgagtgaagcggacagcggtaattaccagtgcattgctaaaaatgctttgggggctatccatcacaccatctctgttcgtgtgaaagctgccccatattggataactgcaccccagaacctggtgctttccccaggggaggacggcaccctgatctgccgagccaatggaaaccccaaacctcgcatctcatggctgactaacggcgttcccattgagatcgctccagatgatccctcccggaaaatcgacggcgacacaattatttttagcaacgtgcaggagcgaagtagcgcagtgtaccagtgtaacgcctcaaatgagtatggatacctcctggccaatgcttttgtgaatgtgctcgcagagccacctagaatcctgaccccagccaacacgctgtaccaggtaatcgctaatcgccctgccctgctcgattgcgcgttttttggctccccacttccaacaatcgaatggttcaagggggctaaaggatctgccttacatgaagacatctatgttctccatgagaacgggaccctggaaataccagtcgctcagaaggatagcactggtacatacacttgcgtggcacggaataagcttggtatggccaaaaacgaagttcacctggagatcaaggacccgacctggatcgtcaagcaaccagagtacgctgtcgtgcaacggggaagcatggtctcatttgagtgcaaagtcaaacatgatcacacgctgtctttaaccgtgctctggctgaaagacaatagggaacttccttctgatgagcgctttaccgtggacaaggatcaccttgtggtggccgacgtcagcgatgacgacagtggtacatacacttgtgtagccaacactacgctcgattctgtgtcggcgagcgccgtcctcagtgtggtcgctcccaccccaacccctgcgcctgtgtacgacgtccctaatcctccatttgatcttgaacttacagaccaacttgacaagtctgtccagctgtcttggactcccggagacgacaataatagccctatcacaaagtttataattgaatacgaggacgccatgcataagcccggtttatggcaccaccaaactgaagtttcaggcacccagaccacagctcagctaaagctcagtccctacgtgaactatagctttcgggttatggccgtcaactccattggcaagagcctgccttcagaagcgtccgaacaatacctgacaaaagcttccgagcctgataaaaaccccaccgccgtggaaggtctgggctcagaacccgacaacctagtgattacctggaagcctctgaacggattcgagtccaatggcccaggccttcaatataaggtgagttggagacaaaaagatggcgatgacgaatggacgtccgtagtggtcgctaacgtttctaagtatatagtttccggaacacctacgttcgtcccttacctcataaaggtgcaggctctgaatgatatgggattcgcacctgaacccgctgttgtgatgggccattctggcgaggacctgccgatggtggccccaggcaacgtgcgagtgaacgtggtgaactctacacttgcagaggtccactgggaccctgttccactgaagagcataagaggccacctacagggttatagaatctattattggaaaacacaaagttcatcaaaaagaaatcgcagacatatcgagaaaaagatcttaacctttcaaggttctaagacgcacgggatgctgcccggtttggaacctttttcacactatactctaaacgttcgggtggtaaacggtaagggtgaggggccagctagtcctgatagggtcttcaacacacccgagggagtaccatctgccccatcatctctaaaaattgttaaccccaccttggatagtctcacgctcgaatgggacccaccaagccacccgaatggcatcctcaccgaatacacgcttaagtatcaacctattaatagcacccatgaactaggacccctggtggacctcaagattccagctaacaagactagatggacactgaagaatctgaacttctccactcgttacaagttctacttttacgctcaaacatccgcaggctccgggagtcagattacggaagaggcggtgaccacagtagatgaggccggaatcctccccccagatgtgggagccggtaaagttcaggccgttaaccccaggattagtaatctgactgctgctgccgcagagacatacgctaacatctcatgggagtatgaaggccctgaacacgtcaatttttacgtggagtacggagtggctgggagtaaagaagaatggcgaaaggaaatagttaatgggagtcgatccttttttggactcaaaggcctcatgccaggcactgcgtataaagtcagagtgggcgctgtgggcgactcgggcttcgtgtcctcagaagacgtattcgaaactggccctgccatggcgagcaggcaggtcgacatagctacgcaaggatggttcataggtctcatgtgcgctgtcgccctgctgattcttatactcctgattgtctgcttcatcagacgaaataaggggggtaagtatcctgtgaaagagaaagaagatgcgcatgctgatcccgagatccagcctatgaaggaggacgatggcactttcggcgaatactctgacgccgaggatcacaagcctctcaagaaaggcagccgaacaccatccgaccgcacagtgaagaaggaagattccgacgatagcctggtagattacggagaaggcgtaaacggccagttcaatgaagatggctcgttcattgggcaatatagcggtaagaaggagaaggaacctgcagaggggaatgaatccagcgaggcaccaagcccagtaaacgctatgaatagctttgtctag

SEQ ID NO: 31103 - DNA, 3915 bp, Artificial Sequence
  derived and/or modified sequence
atgcagctgaagatcatgcccaagaagaagagactgagcgccggcagagtgcccctgatcctgttcctgtgccagatgatcagcgccctggaggtgcccctggaccccaagctgctggaggacctggtgcagccccccaccatcacccagcagagccccaaggactacatcatcgaccccagagagaacatcgtgatccagtgcgaggccaagggcaagcccccccccagcttcagctggaccagaaacggcacccacttcgacatcgacaaggaccccctggtgaccatgaagcccggcaccggcaccctgatcatcaacatcatgagcgagggcaaggccgagacctacgagggcgtgtaccagtgcaccgccagaaacgagagaggcgccgccgtgagcaacaacatcgtggtgagacccagcagaagccccctgtggaccaaggagaagctggagcccatcaccctgcagagcggccagagcctggtgctgccctgcagaccccccatcggcctgcccccccccatcatcttctggatggacaacagcttccagagactgccccagagcgagagagtgagccagggcctgaacggcgacctgtacttcagcaacgtgctgcccgaggacaccagagaggactacatctgctacgccagattcaaccacacccagaccatccagcagaagcagcccatcagcgtgaaggtgatcagcgtggacgagctgaacgacaccatcgccgccaacctgagcgacaccgagttctacggcgccaagagcagcagagagagaccccccaccttcctgacccccgagggcaacgccagcaacaaggaggagctgagaggcaacgtgctgagcctggagtgcatcgccgagggcctgcccacccccatcatctactgggccaaggaggacggcatgctgcccaagaacagaaccgtgtacaagaacttcgagaagaccctgcagatcatccacgtgagcgaggccgacagcggcaactaccagtgcatcgccaagaacgccctgggcgccatccaccacaccatcagcgtgagagtgaaggccgccccctactggatcaccgccccccagaacctggtgctgagccccggcgaggacggcaccctgatctgcagagccaacggcaaccccaagcccagaatcagctggctgaccaacggcgtgcccatcgagatcgcccccgacgaccccagcagaaagatcgacggcgacaccatcatcttcagcaacgtgcaggagagaagcagcgccgtgtaccagtgcaacgccagcaacgagtacggctacctgctggccaacgccttcgtgaacgtgctggccgagccccccagaatcctgacccccgccaacaccctgtaccaggtgatcgccaacagacccgccctgctggactgcgccttcttcggcagccccctgcccaccatcgagtggttcaagggcgccaagggcagcgccctgcacgaggacatctacgtgctgcacgagaacggcaccctggagatccccgtggcccagaaggacagcaccggcacctacacctgcgtggccagaaacaagctgggcatggccaagaacgaggtgcacctggagatcaaggaccccacctggatcgtgaagcagcccgagtacgccgtggtgcagagaggcagcatggtgagcttcgagtgcaaggtgaagcacgaccacaccctgagcctgaccgtgctgtggctgaaggacaacagagagctgcccagcgacgagagattcaccgtggacaaggaccacctggtggtggccgacgtgagcgacgacgacagcggcacctacacctgcgtggccaacaccaccctggacagcgtgagcgccagcgccgtgctgagcgtggtggcccccacccccacccccgcccccgtgtacgacgtgcccaacccccccttcgacctggagctgaccgaccagctggacaagagcgtgcagctgagctggacccccggcgacgacaacaacagccccatcaccaagttcatcatcgagtacgaggacgccatgcacaagcccggcctgtggcaccaccagaccgaggtgagcggcacccagaccaccgcccagctgaagctgagcccctacgtgaactacagcttcagagtgatggccgtgaacagcatcggcaagagcctgcccagcgaggccagcgagcagtacctgaccaaggccagcgagcccgacaagaaccccaccgccgtggagggcctgggcagcgagcccgacaacctggtgatcacctggaagcccctgaacggcttcgagagcaacggccccggcctgcagtacaaggtgagctggagacagaaggacggcgacgacgagtggaccagcgtggtggtggccaacgtgagcaagtacatcgtgagcggcacccccaccttcgtgccctacctgatcaaggtgcaggccctgaacgacatgggcttcgcccccgagcccgccgtggtgatgggccacagcggcgaggacctgcccatggtggcccccggcaacgtgagagtgaacgtggtgaacagcaccctggccgaggtgcactgggaccccgtgcccctgaagagcatcagaggccacctgcagggctacagaatctactactggaagacccagagcagcagcaagagaaacagaagacacatcgagaagaagatcctgaccttccagggcagcaagacccacggcatgctgcccggcctggagcccttcagccactacaccctgaacgtgagagtggtgaacggcaagggcgagggccccgccagccccgacagagtgttcaacacccccgagggcgtgcccagcgcccccagcagcctgaagatcgtgaaccccaccctggacagcctgaccctggagtgggacccccccagccaccccaacggcatcctgaccgagtacaccctgaagtaccagcccatcaacagcacccacgagctgggccccctggtggacctgaagatccccgccaacaagaccagatggaccctgaagaacctgaacttcagcaccagatacaagttctacttctacgcccagaccagcgccggcagcggcagccagatcaccgaggaggccgtgaccaccgtggacgaggccggcatcctgccccccgacgtgggcgccggcaaggtgcaggccgtgaaccccagaatcagcaacctgaccgccgccgccgccgagacctacgccaacatcagctgggagtacgagggccccgagcacgtgaacttctacgtggagtacggcgtggccggcagcaaggaggagtggagaaaggagatcgtgaacggcagcagaagcttcttcggcctgaagggcctgatgcccggcaccgcctacaaggtgagagtgggcgccgtgggcgacagcggcttcgtgagcagcgaggacgtgttcgagaccggccccgccatggccagcagacaggtggacatcgccacccagggctggttcatcggcctgatgtgcgccgtggccctgctgatcctgatcctgctgatcgtgtgcttcatcagaagaaacaagggcggcaagtaccccgtgaaggagaaggaggacgcccacgccgaccccgagatccagcccatgaaggaggacgacggcaccttcggcgagtacagcgacgccgaggaccacaagcccctgaagaagggcagcagaacccccagcgacagaaccgtgaagaaggaggacagcgacgacagcctggtggactacggcgagggcgtgaacggccagttcaacgaggacggcagcttcatcggccagtacagcggcaagaaggagaaggagcccgccgagggcaacgagagcagcgaggcccccagccccgtgaacgccatgaacagcttcgtgtag

SEQ ID NO: 31104 - protein, 925 aa, Artificial Sequence
  derived and/or modified sequence
MATSADSPSSPLGAEDLLSDSSEPPGLNQVSSEVTSQLYASLRLSRQAEATARAQLYLPSTSPPHEGLDGFAQELSRSLSVGLEKNLKKKDGSKHIFEMESVRGQLQTMLQTSRDTAYRDPLIPGAGSERREEDSFDSDSTATLLNTRPLQDLSPSSSAQALEELFPRYTSLRPGPPLNPPDFQGLRDALDSEHTRRKHCERHIQSLQTRVLELQQQLAVAVAADRKKDTMIEQLDKTLARVVEGWNRHEAERTEVLRGLQEEHQAAELTRSKQQETVTRLEQSLSEAMEALNREQESARLQQRERETLEEERQALTLRLEAEQQRCCVLQEERDAARAGQLSEHRELETLRAALEEERQTWAQQEHQLKEHYQALQEESQAQLEREKEKSQREAQAAWETQHQLALVQSEVRRLEGELDTARRERDALQLEMSLVQARYESQRIQLESELAVQLEQRVTERLAQAQESSLRQAASLREHHRKQLQDLSGQHQQELASQLAQFKVEMAEREERQQQVAEDYELRLAREQARVCELQSGNQQLEEQRVELVERLQAMLQAHWDEANQLLSTTLPPPNPPAPPAGPSSPGPQEPEKEERRVWTMPPMAVALKPVLQQSREARDELPGAPPVLCSSSSDLSLLLGPSFQSQHSFQPLEPKPDLTSSTAGAFSALGAFHPDHRAERPFPEEDPGPDGEGLLKQGLPPAQLEGLKNFLHQLLETVPQNNENPSVDLLPPKSGPLTVPSWEEAPQVPRIPPPVHKTKVPLAMASSLFRVPEPPSSHSQGSGPSSGSPERGGDGLTFPRQLMEVSQLLRLYQARGWGALPAEDLLLYLKRLEHSGYKPGRKEEGFSGWKLDYGEWSGTDGRGDNVPRRNTDSRLGEIPRKEIPSQAVPRRLATAPKTEKPPARKKSGHPAPSSMRSRGGVWR

SEQ ID NO: 31105 - DNA, 2778 bp, Artificial Sequence
  derived and/or modified sequence
atggccaccagcgccgacagccccagcagccccctgggcgccgaggacctgctgagcgacagcagcgagccccccggcctgaaccaggtgagcagcgaggtgaccagccagctgtacgccagcctgagactgagcagacaggccgaggccaccgccagagcccagctgtacctgcccagcaccagccccccccacgagggcctggacggcttcgcccaggagctgagcagaagcctgagcgtgggcctggagaagaacctgaagaagaaggacggcagcaagcacatcttcgagatggagagcgtgagaggccagctgcagaccatgctgcagaccagcagagacaccgcctacagagaccccctgatccccggcgccggcagcgagagaagagaggaggacagcttcgacagcgacagcaccgccaccctgctgaacaccagacccctgcaggacctgagccccagcagcagcgcccaggccctggaggagctgttccccagatacaccagcctgagacccggcccccccctgaacccccccgacttccagggcctgagagacgccctggacagcgagcacaccagaagaaagcactgcgagagacacatccagagcctgcagaccagagtgctggagctgcagcagcagctggccgtggccgtggccgccgacagaaagaaggacaccatgatcgagcagctggacaagaccctggccagagtggtggagggctggaacagacacgaggccgagagaaccgaggtgctgagaggcctgcaggaggagcaccaggccgccgagctgaccagaagcaagcagcaggagaccgtgaccagactggagcagagcctgagcgaggccatggaggccctgaacagagagcaggagagcgccagactgcagcagagagagagagagaccctggaggaggagagacaggccctgaccctgagactggaggccgagcagcagagatgctgcgtgctgcaggaggagagagacgccgccagagccggccagctgagcgagcacagagagctggagaccctgagagccgccctggaggaggagagacagacctgggcccagcaggagcaccagctgaaggagcactaccaggccctgcaggaggagagccaggcccagctggagagagagaaggagaagagccagagagaggcccaggccgcctgggagacccagcaccagctggccctggtgcagagcgaggtgagaagactggagggcgagctggacaccgccagaagagagagagacgccctgcagctggagatgagcctggtgcaggccagatacgagagccagagaatccagctggagagcgagctggccgtgcagctggagcagagagtgaccgagagactggcccaggcccaggagagcagcctgagacaggccgccagcctgagagagcaccacagaaagcagctgcaggacctgagcggccagcaccagcaggagctggccagccagctggcccagttcaaggtggagatggccgagagagaggagagacagcagcaggtggccgaggactacgagctgagactggccagagagcaggccagagtgtgcgagctgcagagcggcaaccagcagctggaggagcagagagtggagctggtggagagactgcaggccatgctgcaggcccactgggacgaggccaaccagctgctgagcaccaccctgcccccccccaacccccccgccccccccgccggccccagcagccccggcccccaggagcccgagaaggaggagagaagagtgtggaccatgccccccatggccgtggccctgaagcccgtgctgcagcagagcagagaggccagagacgagctgcccggcgccccccccgtgctgtgcagcagcagcagcgacctgagcctgctgctgggccccagcttccagagccagcacagcttccagcccctggagcccaagcccgacctgaccagcagcaccgccggcgccttcagcgccctgggcgccttccaccccgaccacagagccgagagacccttccccgaggaggaccccggccccgacggcgagggcctgctgaagcagggcctgccccccgcccagctggagggcctgaagaacttcctgcaccagctgctggagaccgtgccccagaacaacgagaaccccagcgtggacctgctgccccccaagagcggccccctgaccgtgcccagctgggaggaggccccccaggtgcccagaatccccccccccgtgcacaagaccaaggtgcccctggccatggccagcagcctgttcagagtgcccgagccccccagcagccacagccagggcagcggccccagcagcggcagccccgagagaggcggcgacggcctgaccttccccagacagctgatggaggtgagccagctgctgagactgtaccaggccagaggctggggcgccctgcccgccgaggacctgctgctgtacctgaagagactggagcacagcggctacaagcccggcagaaaggaggagggcttcagcggctggaagctggactacggcgagtggagcggcaccgacggcagaggcgacaacgtgcccagaagaaacaccgacagcagactgggcgagatccccagaaaggagatccccagccaggccgtgcccagaagactggccaccgcccccaagaccgagaagccccccgccagaaagaagagcggccaccccgcccccagcagcatgagaagcagaggcggcgtgtggagatag

SEQ ID NO: 31106 - DNA, 2778 bp, Artificial Sequence
  derived and/or modified sequence
atggctacctcagcagatagtccaagctccccgctcggggccgaagacctgctgtctgacagctccgagccaccaggcctgaaccaggttagctctgaagtcacctctcagctttacgcaagcctgcgtctgagtcgccaagctgaggccaccgctcgcgcacagttatatctgccctccaccagccctccacatgaggggctggacggcttcgcacaggaactttcgagatctttgagtgttggattagaaaagaacctaaaaaaaaaagacggttccaaacacatctttgagatggagagcgtgagagggcagctccagactatgctccagacaagccgggacacagcgtaccgcgaccctctcatccccggagcggggagcgagaggcgggaggaggactctttcgattccgattccacagccacgctcctcaacacgcgcccgctacaggaccttagtccgagttccagtgcgcaggctctagaagagttgtttcctagatatacatctctgaggcccggccctcccctgaatcctcctgactttcagggtctcagagatgccctagactcagagcatacccgccggaagcactgcgaaaggcacatacagtctttgcagacccgtgtcctggagttacagcagcaactggctgtggctgtagccgccgatagaaagaaagacactatgatcgagcaactcgataagaccctggcccgggtggtggaaggctggaatagacacgaggctgagcgcactgaggtgttgcgcggactgcaggaggagcatcaggctgctgagttgacgcggtctaagcagcaggagaccgtgactcgattggaacaatccttgtcagaagccatggaagccctgaaccgtgaacaggaaagtgctcgcctccaacagcgtgagcgggaaacgctggaagaagaacggcaggctttgactctgagacttgaagccgagcagcagaggtgttgtgtcctgcaggaagaaagagatgcagccagagcagggcaactgtctgaacacagagaactcgaaaccctgcgcgcagccctcgaggaggaacgacaaacttgggctcaacaagaacatcagctcaaggaacattaccaggccttgcaggaagagtcacaggctcagctggaaagagaaaaggagaaaagtcagcgggaggctcaggctgcttgggaaacacaacatcagctggctctggtgcagtctgaggttcgtcgcctggagggagagttggatacagccagacgcgagcgcgatgcactacagctcgagatgtctctggttcaggctaggtacgagtctcagcggatacaactcgaaagcgaactagccgtgcagctggaacagcgcgtgactgagcggttagcgcaggcgcaggaatcttccctacggcaggctgcctctctgagggagcaccaccggaagcaactgcaagacctgtcagggcagcatcagcaggagcttgcgagtcagttggcccaattcaaagtggaaatggccgaaagagaggagcggcagcagcaggtggctgaggattatgagctcaggcttgcaagggagcaagcacgagtttgtgaattgcagagcggcaatcagcaattggaagagcaaagggtggagctggttgagagacttcaggcgatgctacaagcccattgggatgaagccaaccagctgctctccacaacactccctcctccaaacccaccggcaccccccgcgggaccaagttccccaggcccacaggagccagaaaaggaggaacgaagagtctggaccatgccaccgatggcagtggcacttaagccagtgctccagcagagtcgcgaggctcgggatgagttaccaggtgccccccccgttctgtgctcatcgagctcagacctcagcctcttgctgggcccttctttccagagccagcattcattccagccacttgagcctaagcctgatttgacctcgagcaccgccggagctttttcagccctgggcgcattccaccccgaccaccgagcagagcgaccctttcctgaggaagaccctggacccgacggggagggtctcttgaagcaggggctccccccagcccaacttgagggcttgaagaatttccttcaccagctgcttgagaccgtgccccagaataatgaaaacccgtccgtggacctgctgccgccaaagtccggtcccctgacggttcccagttgggaggaagccccgcaggtgcctagaattcctcctcctgtgcataaaacaaaagtgccgttggcaatggcatcgagcctcttcagggtcccagaaccccccagctcacacagccagggtagtggtccatccagtggatcgccagagcgcggaggggacggactgacattccctaggcaattaatggaggtctcccagttgctcaggctctatcaggctcgaggatggggcgccttacctgctgaggatctgctgctgtacctgaaacgcctggagcatagcggatacaaacctgggagaaaggaggagggattcagcggttggaaactggattatggtgaatggtcagggaccgacgggcgtggagacaatgtaccgagacgcaatactgattcccgtctgggtgagatcccccggaaggagatcccgtcccaagctgtgcctcgcagactagcaacagccccaaaaaccgaaaagccgccagcacgcaaaaaatctgggcatcctgcgccgtcctcgatgcgcagcagggggggagtgtggcggtag

SEQ ID NO: 31107 - DNA, 2778 bp, Artificial Sequence
  derived and/or modified sequence
atggccaccagcgctgacagccccagcagccccctgggcgctgaggacctgctgagtgacagcagcgagcccccaggcctgaaccaggtgagcagcgaggtgaccagccagctgtatgccagcctgcggctgagccggcaggccgaggccacagcccgggcccagctgtacctgcccagcaccagcccccctcatgagggcctggatggctttgcccaggagctgagccgcagcctgtctgtgggcctggagaagaacctgaagaagaaggatggcagcaagcacatctttgagatggagagcgtgcggggccagctgcagaccatgctgcagaccagccgggacacagcctacagagaccccctcatccctggggccggcagcgagcggcgggaggaggacagctttgacagcgacagcacagccaccctgctgaacacccggcccctgcaggacctgagccccagcagcagcgcccaggccctggaggagctgttcccccgctacaccagcctgcggcccggcccccccctgaaccccccagacttccagggcctgagagatgccctggacagcgagcacaccaggaggaagcactgtgagcggcacatccagagcctgcagaccagggtgctggagctgcagcagcagctggccgtggccgtggccgctgacaggaagaaggacaccatgattgagcagctggacaagaccctggcccgggtggtggagggctggaacagacatgaagctgagaggacagaggtgctgcggggcctgcaggaggagcaccaggccgctgagctgaccaggagcaagcagcaggagaccgtgacccggctggagcagagcctgtctgaggccatggaggccctgaaccgggagcaggagagcgcccggctgcagcagcgggagcgggagaccctggaggaggagcggcaggccctgaccctgcggctggaggccgagcagcagcgctgctgcgtgctgcaggaggagagagatgctgcccgggccggccagctgtctgagcaccgggagctggagaccctgcgggccgccctggaggaggagcggcagacctgggcccagcaggagcaccagctgaaggagcactaccaggccctgcaggaggagagccaggcccagctggagcgggagaaggagaagagccagcgggaggcccaggccgcctgggagacccagcaccagctggccctggtgcagagcgaggtgcggcggctggagggggagctggacacagcccggcgggagagagatgccctgcagctggagatgagcctggtgcaggcccgctatgagagccagaggatccagctggagagcgagctggccgtgcagctggagcagagggtgacagagcggctggcccaggcccaggagagcagcctgcggcaggccgccagcctgcgggagcaccacaggaagcagctgcaggacctgagcggccagcaccagcaggagctggccagccagctggcccagttcaaggtggagatggccgagcgggaggagcggcagcagcaggtggctgaagattatgagctgcggctggcccgggagcaggcccgggtgtgtgagctgcagagcggcaaccagcagctggaggagcagagggtggagctggtggagcggctgcaggccatgctgcaggcccactgggatgaggccaaccagctgctgagcaccaccctgcccccacccaaccccccagcccccccagctggccccagcagccctggcccccaggagcctgagaaggaggagaggagagtgtggaccatgccacccatggctgtggccctgaagcctgtgctgcagcagagccgggaggccagagatgagctgcccggggcccctcctgtgctgtgcagcagcagcagtgacctgagcctgctgctgggccccagcttccagagccagcacagcttccagcccctggagcccaagccagacctgaccagcagcacagctggggccttcagcgccctgggcgccttccacccagaccacagagctgagcggcccttcccagaagaagatcctggcccagatggagagggcctgctgaagcagggcctgcccccagcccagctggagggcctgaagaacttcctgcaccagctgctggagaccgtgccccagaacaatgaaaaccccagcgtggacctgctgccccccaagagcggccccctgactgtgcccagctgggaggaggccccccaggtgccccgcatccccccacctgtgcacaagaccaaggtgcccctggccatggccagcagcctcttccgggtgcctgagccccccagcagccacagccagggcagcggccccagcagcggcagccctgagagaggaggagatggcctgaccttcccccggcagctgatggaggtgtcccagctgctgcggctgtaccaggcccggggctggggcgccctgcctgctgaggacctgctgctgtacctgaagaggctggagcacagcggctacaagccaggcaggaaggaggagggcttcagcggctggaagctggactatggagagtggagcggcacagatggccgcggggacaacgtgcccaggaggaacacagacagccggctgggggagatccccaggaaggagatccccagccaggccgtgccccggcggctggccacagcccccaagacagagaagcccccagccaggaagaagagcggccacccagcccccagctccatgaggagcagaggaggagtgtggaggtag

SEQ ID NO: 31108 - DNA, 3770 bp, Artificial Sequence
  derived and/or modified sequence
gtggtctcgcgggcgggtgacgtcatcgaggcgagagaggcggagccgtggacagtgggcgggaggctgccaacggttttgagcgtagggggaggcgtgagagggggatctcaggggaggaggtcaatcgcttgccccccactttggcaaattggggactgaggactggaagggtggagagtaggcggaaccaggtggtcgtcggggcagaggatctcgggctaggcttgagggcggcgtgcttcttagggacgacttagggcgtgactgagggttcacaaggtttcttttggggtggtcgggagggagagattctagggaacaaggaagctcgctatggctttcttgccaggaggggtcgaagggaaagtacaagggagctggagctgaccctgggtagaacgggtgaagggatgggggagcgtgaggttccgccctctcttgagactggaaccaattgagggactagtagggcagggggacagaaattgggctcctagtggatttgggtccgtttccgttgggacgttttgggtgtgagaacttaagagctcagttgaccggggatagcctgtgccggagttgatctgcagcttccagcactcgtagtcgggaagaggagcttcagcagcgctgttgtcccacagtaggtcttctgtccgcacccgctctgcgctgcaccctcttaacgctgttcccaggagctggggaaagggatgcttttgcccactcccatggcccctggaactggtggaaacctttcctctaaccagaaagcctcgatatccttaattcaccaaggatccttggcgtggagtcttcctcccttctcccaagtctttctccgtgaacttttcctcctggactttgctaaagcagaacctcccagctctttgctgtctccggttgtctcttccctgtattcatggcaacatcagctgacagccccagttcacccctcggggcggaggatctcctgagtgattcatcagaaccccctgggctcaaccaagtgtcgtctgaagtgacctcccagctctatgcttctttgcgcctcagccggcaggcggaggccacggcccgagcccagctgtatttaccctccacctccccgcctcatgaagggttagacggcttcgcccaagaattgagtcgaagcttgtcagtcggattggaaaagaacttgaagaaaaaggatggttctaagcatatctttgagatggaaagtgttcggggtcagctccagaccatgctccaaacctcacgtgatacagcctatcgggatcctctcattcctggcgctggctcagagagacgggaagaggactcctttgacagtgatagcacagccaccttgctcaacacccggcccctgcaagacttgtctccatctagctcagcccaagccctggaggagctgtttccccgctacaccagccttcggccagggcctccactcaatcccccagattttcaggggctgagagatgcattggattcagagcatacccgccgcaagcattgtgagcgccatattcagagcctgcagacccgagtgttagagctacagcaacaattagccgtggctgtggctgccgaccgcaagaaagataccatgattgaacaactggacaagaccctggcccgtgtggtggagggctggaaccggcatgaggctgagcggacagaggttctcaggggacttcaagaggaacaccaggcagcagagctcaccagaagcaagcagcaggagacagtaacccgcctggaacaaagcctttctgaggccatggaggccctgaatcgtgagcaggaaagtgccagactgcagcaacgggaaagagagacactggaggaggaaaggcaagctctgactctgaggttggaggcagaacagcagcggtgctgtgtcctgcaggaagagcgggatgcagctcgggctgggcaactgagtgagcatcgagagttggagactcttcgggctgccctagaagaagaacggcagacctgggcccagcaagagcaccagcttaaggaacactaccaggcgctgcaggaggagagccaggctcagctggaaagggagaaggagaagagccagagggaagcccaggccgcctgggagacccagcaccagttggcattggtgcagtctgaggtgcggcggctggaaggagagctggatacagctcggagagagagagatgccctgcagctggaaatgagcttggtgcaggcccggtatgaaagccagcggatccagctggagtcggagctggctgtgcagctggagcagcgggtgacagagcggctggcgcaggctcaggagagcagcctacggcaagcagcctccctcagggaacatcacaggaagcagctgcaggacctgagtggacagcaccagcaggagctggccagtcagctagctcagttcaaggtggaaatggcagaacgagaggaacggcaacagcaggtggctgaggactacgagctcagactggcccgggagcaagcgcgagtgtgcgaactgcagagtgggaaccagcagctggaggagcagcgggtggagctggtggaaagactgcaggccatgctgcaggcccactgggatgaggccaaccagctgctcagcaccactctcccgccgcccaaccctccagctcctcctgctggaccctccagccccgggcctcaggagcccgagaaggaggagaggagggtctggactatgcctcccatggccgtggccctgaagcctgtattgcagcagagccgggaagcaagggacgagctacctggagcgcctcctgttctttgcagttcctcctcagatcttagcctcctgttgggcccctcttttcagagccagcattctttccagcccctggagcccaaaccagacctcacttcatccacagctggggccttctctgcacttggggccttccatcccgatcatagggcagaaaggccattccctgaggaagatcctggacctgacggggagggcctcctaaagcaagggctgccgcctgctcagctggagggcctcaagaattttttgcaccagttgctggagacagtgccccagaacaatgagaacccttctgtcgacctgttgccccctaagtctggtcctctgactgtcccatcttgggaggaagcccctcaagtgccacgtattccaccgcctgtccacaaaaccaaagttcccttagccatggcatccagtcttttccgggtccctgagcctccctcctcccattcacaaggcagtggtcccagcagtggttccccagagagaggtggagatgggcttacattcccaaggcagctgatggaggtgtctcaactgttgcgactctaccaggctcggggctggggggctctgcctgctgaggatctcctgctctacctgaagaggctggaacacagcgggtacaagcctgggaggaaggaggaaggattctccgggtggaagctggattatggggagtggagtgggactgatggccgaggggataatgtccccagaaggaacacagactcccgcttgggtgagatcccccggaaagagattccctcccaggctgtccctcgccgccttgctacagcccccaagactgaaaaacctcccgcacggaagaaaagtgggcaccctgccccgagtagcatgaggagccgggggggagtctggagatgagcccccctaccctctctcctctttgttctctcattgttgttattttaataaatgctcattagtctgt

SEQ ID NO: 31109 - DNA, 2778 bp, Artificial Sequence
  derived and/or modified sequence
atggccaccagcgccgacagccccagcagccccctgggcgccgaggaccttttgtccgactcctcagagccccctgggctcaaccaggttagtagcgaagtgacttctcagttatacgcgagcttacgactcagcagacaggccgaagcaaccgcccgggcccagttatacctgccttccacgagccctccacacgagggactggatggatttgctcaggaattgagccgaagcctttccgttgggcttgaaaagaatctgaagaagaaggacggctcaaaacatatcttcgagatggagagcgtgagaggccaactgcaaacaatgctgcaaactagcagagacacagcatatagagatccgctgatacccggtgccggatccgaacgccgggaggaagactctttcgatagtgactctaccgccaccctgctgaacaccagacccttacaggatctatccccttcctcctctgcccaggccctggaagaattgtttcccagatatacctcccttagaccagggccccccctgaatccaccggattttcagggactcagagatgcccttgactccgagcacacccgaaggaaacactgcgaacggcacatccagtcgctccagacccgagtcctggagcttcagcaacagcttgcagttgcagtcgcagccgaccgtaaaaaagatacaatgattgagcagctggataagaccctggctagggtggtcgagggctggaatagacacgaggcggagcgcacggaggtactccgcggtctgcaggaggaacaccaggctgccgagttaacaagatctaaacaacaggaaacagtgactaggttggaacagtcactgtctgaagccatggaggcattaaatcgagagcaggaaagtgctagactccagcagagggagcgagaaaccttggaggaagagagacaggcgctgaccctgcggctggaagcagaacaacaacgttgttgtgtgctgcaggaggaacgcgacgctgctagagccggacagctgtcagagcacagggagttggaaacccttagagccgcactcgaggaagaacgccaaacgtgggcgcagcaggagcatcagcttaaggagcactatcaggccctgcaggaggaatcccaggcccagttagagcgcgagaaagagaagagtcagagagaagcccaggcagcgtgggaaactcagcatcaattggctctggtgcaatcggaagttaggagactggaaggagagttggacactgctcgcagggaaagagatgccttacaattagagatgagtctggtgcaggcccgctacgagagtcagaggattcaactcgaatctgagctcgcagtccaattggaacagagggtgacagaaagactcgcccaagctcaggaatcctccttgcggcaggccgcatcattacgggaacatcaccggaagcagctgcaggatctgtctggccagcaccagcaagagctcgcatcccagctggcacaattcaaggtggagatggctgagcgggaagagcgacagcagcaggtagctgaagattatgagctgcggctggcccgtgagcaggcacgggtatgcgagctgcagtccggaaatcagcagctcgaggagcagcgagtagaactggtcgaaaggctgcaggcaatgcttcaagcccattgggacgaggccaatcagctcctatctaccactcttcctccaccaaatccaccagctccacccgcaggcccttcttctccaggcccacaggagcccgagaaggaagagcggcgggtgtggactatgcccccaatggcagtggcactgaaacccgtcttgcagcagtccagagaagctagggatgaactgcccggtgcgcctccagtgctctgctcttctagcagtgatttgtccctgctactaggtccatcctttcagtcgcagcactctttccaacccctcgaaccaaagcctgatcttacaagcagcactgctggcgcattctctgctctgggagcctttcatccagatcatagggctgaacgtcctttcccagaagaagatccagggccagacggcgagggcctccttaagcagggattgcctcccgctcaattggaaggcctcaagaattttctgcaccaattgctagagacggtgccacagaataacgagaacccctctgtcgatcttctgccccctaagtcaggacccctaaccgtgccatcctgggaggaagctccccaggtgccacgaatccctccccccgtccacaagactaaagtaccgttggctatggcctcctctcttttccgggttccagaacccccatcaagtcacagccaaggatccggtccctcctccggcagtcccgaaagaggaggcgacggcctcacctttccacggcagctgatggaggtttctcaattgctacgcctctatcaagcccgtggttggggcgcactcccagctgaggacttgctattatatctgaaacgccttgaacactcagggtacaagcccgggagaaaagaggaggggttcagcgggtggaagttagattatggtgaatggagcggcacagatggcaggggcgataatgtgccccgccgcaacacagattcaaggttgggggaaatcccccggaaggagataccgtctcaggccgttcctagaagactggctacagcccccaagaccgaaaaaccgcctgcacgaaagaaatctggacatccagctccttctagtatgagatcccgcggcggtgtttggagatag

SEQ ID NO: 31110 - DNA, 2778 bp, Artificial Sequence
  derived and/or modified sequence
atggcaacgagcgctgatagccctagttcacccctcggagcggaagatctgctgagtgacagctctgagccacctgggctgaaccaggtgtcctccgaggtcacatcacaactgtacgccagtctgcgcttatcccgccaagccgaagccacagctcgtgcacaactctatctccctagcacatcccccccacacgagggactagacggtttcgcacaggagctgtctcggagccttagtgtgggactcgaaaaaaacctaaagaaaaaggatggatccaaacatatttttgagatggagtcagttagagggcaactgcagacaatgcttcagacctctcgagacaccgcatacagagatcccttgatccctggtgcgggatcagagcggagagaggaggacagcttcgattctgacagcacagctaccctcctgaatacaaggccgctgcaagacctgagtcctagctcatccgcccaggcactggaggagctgttccccagatacacaagcctgcgccctgggccacccctcaaccctcccgactttcaggggctgagagacgcgctcgattccgaacatacacgtcgcaagcattgtgaacggcacatccaaagtttgcagacccgggtcctggagctccagcagcaattggccgtggccgttgctgctgacaggaagaaggacaccatgatagagcaactggataaaacactggctcgtgtagtcgaggggtggaacaggcatgaagcggagagaaccgaggtattacgcggtctccaggaggaacaccaagcagctgagcttacacggtctaagcagcaagagaccgtcacccgcttggaacagagcttaagtgaggcaatggaagcactcaaccgagagcaagagtcagcacgcctgcaacagcgcgagcgcgaaacccttgaggaggaacggcaagctctgacattgcgcctcgaggcggagcaacagagatgctgcgtgctgcaggaagagagagacgccgcaagggccggacagctgtccgagcatcgggagctcgagacacttagagcagctctggaggaggaacgccagacctgggcccagcaggaacatcaactcaaggagcattaccaggcccttcaggaagaatcccaggcccagcttgagagggagaaagagaagtctcagagggaagctcaggcggcttgggaaacacagcaccaacttgccttggtgcagagcgaggtgagacggcttgaaggtgagctggataccgcgcgacgcgagagagatgcactccaattagagatgagcctcgtgcaggcgaggtacgaatctcaacgcatccagctcgaatcggagttagcagtgcagttggagcagcgggtgactgagcgcctcgctcaggcacaggagagttctctccggcaagccgcatccctgagagagcaccatagaaagcagcttcaggacttgtcgggccagcatcaacaagaactcgcctctcagctcgcacagtttaaggttgagatggccgagcgggaggagcgccagcaacaagtggccgaagactatgagctaaggctagcccgtgagcaggcaagggtgtgtgagcttcagtctggcaaccagcagcttgaggaacagagggtggaactcgtagagcgcctgcaggccatgctgcaggcgcattgggatgaagccaatcagcttttaagtacgacgctcccaccccctaaccctccagccccaccagcaggaccatcttccccgggacctcaagaaccggaaaaggaggagcgacgggtgtggacaatgccccctatggctgtcgctttgaaacctgttctgcaacagtcacgggaggctagggacgaactacctggcgcacctcccgttctttgcagcagcagcagcgacctatccctgctcttggggccatcctttcagagtcagcattccttccagccgttagagcccaaacccgacctgacaagcagcaccgccggagctttctctgcactgggcgcatttcaccctgaccacagggcagagcggcctttcccagaagaggatcccggacctgacggagagggcctgttaaaacagggcctcccaccagctcagctggaaggcctgaagaactttcttcaccagctgcttgaaactgtgccacagaataatgagaaccccagcgttgacttgttacccccaaaatcaggtccactgacagtcccaagttgggaggaggctccgcaggttccacggataccaccccctgttcacaaaactaaggttcccctagcgatggcatccagcctttttagagttcctgaacctcccagtagtcatagtcagggcagtggacctagctccggaagtcctgagagaggaggggatggtctaacatttccgaggcagctgatggaagtttctcaactccttaggctataccaagctagagggtggggagccctcccggctgaggacctccttttatatctcaagcgactagaacactctggctataagcctggaagaaaagaagaagggttttctgggtggaaactcgattacggagagtggagtgggaccgatggaagaggcgacaacgtacccagaaggaataccgatagccggcttggcgagatccccaggaaggaaataccctcacaggccgtgcctcgaagactggccactgcacccaaaactgaaaaaccccctgcgcgaaaaaaatccggacacccggctccatcgagcatgcgttccagaggcggagtatggaggtag

SEQ ID NO: 31111 - protein, 158 aa, Artificial Sequence
  derived and/or modified sequence
MGSGSSRSSRTLRRRRSPESLPAGPGAAALEGGTRRRVPVAAAEVPGAAAEEAPGRDPSPVAPPDGRDETLRLLDELLAESAAWGPPEPAPRRPARLRPTAVAGSAVCAEQSTEGHPGSGNVSEAPGSGRKKPERPAAISYDHSEEGLMASIEREYCR

SEQ ID NO: 31112 - DNA, 477 bp, Artificial Sequence
  derived and/or modified sequence
atgggcagcggcagcagcagaagcagcagaaccctgagaagaagaagaagccccgagagcctgcccgccggccccggcgccgccgccctggagggcggcaccagaagaagagtgcccgtggccgccgccgaggtgcccggcgccgccgccgaggaggcccccggcagagaccccagccccgtggccccccccgacggcagagacgagaccctgagactgctggacgagctgctggccgagagcgccgcctggggcccccccgagcccgcccccagaagacccgccagactgagacccaccgccgtggccggcagcgccgtgtgcgccgagcagagcaccgagggccaccccggcagcggcaacgtgagcgaggcccccggcagcggcagaaagaagcccgagagacccgccgccatcagctacgaccacagcgaggagggcctgatggccagcatcgagagagagtactgcagatag

SEQ ID NO: 31113 - DNA, 477 bp, Artificial Sequence
  derived and/or modified sequence
atgggctctggctcaagccgcagctccaggaccctgcggcgtcggcggtcacctgagtccttacccgctggacctggtgcagctgccttggagggcggtacccgtagacgcgtgcctgtggccgccgccgaagttcctggcgccgccgcagaagaggctcccggacgggatccctcacccgtagccccccctgacggtcgggatgaaacactgcgtctgctggacgaactcctggccgagtcagcggcatgggggccccctgagcctgcacccagacgacctgcaagattacggcccactgcggttgccggatccgctgtttgcgccgaacagtcaacagagggccatccgggtagcggtaacgtgtcagaggctccgggctctgggcgcaagaaaccagagcgaccggctgccattagctacgaccatagcgaggaaggcctcatggcttctatcgagcgcgagtactgcagatag

SEQ ID NO: 31114 - DNA, 477 bp, Artificial Sequence
  derived and/or modified sequence
atgggcagcggcagcagccgcagcagcaggaccctgcggaggagaagaagccctgagagcctgcctgctggccctggagctgctgccctggagggcggcacccggcggcgggtgcctgtggccgctgctgaggtgcctggagctgctgctgaggaggcccctggccgggaccccagccctgtggcccccccagatggaagagatgagaccctgcggctgctggatgagctgctggccgagagcgctgcctggggccccccagagcccgccccccggcggcctgcccggctgcggcccacagctgtggccggcagcgctgtgtgtgccgagcagagcacagagggccaccctggcagcggaaatgtgtctgaggcccctggcagcggcaggaagaagccagagaggcctgctgccatctcctatgaccacagcgaggagggcctgatggccagcattgaaagagagtactgcaggtag

SEQ ID NO: 31115 - DNA, 2738 bp, Artificial Sequence
  derived and/or modified sequence
gctcgcacccccgtcctccggccgcgacccccgcccgggaaccctagcccctggccgcggtcgcttcccggacctcgccccgcgcctccccctgcagcccgccccggccgcaccccctagcgtccccgcccccggccgcgccccctcatgggggccccctcggcggtccgggaggcggcgggcgcgccatgggcagcggcagcagccggagcagccggactctgaggcggcggcgcagccccgagagcctccccgcggggcccggagcggcagccctggagggcgggacccgccggcgggtgccggtggcggcggccgaggtcccgggggcagccgcggaggaggcgcccggccgcgaccccagccccgtggcgccccccgacggcagggacgagacgctgcgcctgctggacgagctgctggccgagtcggcggcctggggccccccggagcccgccccgcgccgcccagcccggctccgacccaccgcggtcgcggggagcgcggtgtgcgcagagcagagcacagagggccacccggggagcggcaatgtctctgaagccccaggcagcggtcgcaagaagcccgagaggccggcagccatctcctacgaccactcggaagaggggctgatggcgagcatcgagcgggagtactgccgctgaggacagcatgctccacccccgccaggcctcggaggcacctgctggctggggcaccctctgcttgcacagagctctagcaggagctgaaccacctccaaaacgcagtcactcccggatattcaaagctgccctttcaaatccactttcagaccgcgctgacctgggccagccactggcggtcatggttgctggtgggggcgattagctgtgtagacccacaggtgcgtgggcctgggccgccggcgcctcctccccaacgcggggagcctgcccagttcttctggagcctgaaatgcgtgcccctcttggttgcccgctctccacagtggggagggctcacgaggactaggtgacacaagcgagcccctcctggcatccgcgccacaacacttccggaaggttctgctgtggaaggtgcacccgcgctgctccctcagtctcgggcccatctctccaggggtggccgggtcagcttagtgcttctcaactttaactccctaatgagcagcctgggggtgctgttgacttgcagggcctgaggttctgtacgtctaaccagctcccagcccaggcccgagctccgaagccccaactgcactttgaggagcgagaaccccagctctgatctgccttgcagtgggaggtagagctcgtcactgcctctctgggcctcagtttccctctctggaaaatcagctctggcagctcttggaggccctccccagctctgacaatctggaactgctgccactgctggtcccctgccccaggcacagcagtgccttccctgcggggagccagcgcccaggtccaaccgggagagggtctgcctgatactggctttccagttctccctctcacaggcagcctggccagtgcctgcggggcttttaaattctcttcctgcctgggtggaaggtgggaaaccacagcagtgaggcaggaagagccttggaatgttcctggttgacagatgggaaaactgacctgcccaggacgccctgggaacagggggcggagctccggctagaggggactcctgtgtgggcgggcaggtctggagcctgggcccaggtgtggcctgctgggggacagctccgggggagagctgtggggagaacagcggtctagggaggcaggaggcaggcggcaggctcctccccagcagcctgcagggcatcaggacagagggggaaggaggagacagaagggaaagaaggagatagagggggaaggaggaaacagcgcggcttctgctgaagccagtacaagcctggttatctggcttgacccgcccacacggaggcctccccagcgttttctttttcccgagaagagctccagctcgcaggtccttagaacacagcagagcaggagcatctcaggaaccaacggccagctccttggcgctgtccccagccccacaggcctgctgcggccatccgcaaacgggcatttccttgaacttttgagagtgcctttgaccagctgttcgcagctgggaaactccaacttttgaagtcagagcttggagcggcccccgcaagggcgtggctcaaaccctccccagagctgggagccattgcttatgcaagcccgtttcttttgatgtaaagatggaagtcgttactatattttaataatgcaaatacatcttttaaaataagttaacatttcttaccaccagatggatcaggctttgaatttaaacatgtaaatgtttgtaattttatgtcattttgttaaaatgggacgctttcaattggtttccaagaaagatgatacctctgcattttctggtggaaaaggtgtaatacccttaatgagatcaaagtgttaggggaaaaaaattccaaaagtagttacaagctatatcaatgtcaaagtaaatgcacttcatcaaagctaagaagtcacaggaattgttctcaggtttttaaaaaaatttttcctgaattcaggaagtgtcttctgaatagcagctagccaaataaagcggtgtgtgtgtactgcagctgtaggtgaacttaaaaataataataaaaagaacaaataaagcagtgtgtaccagcc

SEQ ID NO: 31116 - DNA, 477 bp, Artificial Sequence
  derived and/or modified sequence
atgggcagcggcagcagccggagcagccggaccctgcggcggcggaggagcccggagagcttgcctgccggaccaggcgctgcagcccttgaggggggtactcggagaagagtgcctgtcgctgccgctgaggtgcccggggctgcggctgaagaagctccagggcgagatcccagtccagtggccccccctgacggcagggatgaaacgcttagattactcgacgagctactggccgaatccgccgcctggggtccgcccgaaccagccccccgcaggcccgccagattgaggccaaccgctgtggcaggctctgccgtctgtgctgaacagagcactgagggtcaccctggatccgggaatgtgagcgaagctccggggtcgggcaggaagaagcctgaacgacccgccgcaataagctatgatcactctgaagaaggactcatggcaagcattgagagagagtactgccggtag

SEQ ID NO: 31117 - DNA, 477 bp, Artificial Sequence
  derived and/or modified sequence
atgggaagtgggtcctcccgcagcagccggaccctacgtcgacgcagatcccctgaatctctgcccgctgggcctggagcggcagccctggagggcggaacacggcgtcgggtccccgtcgccgctgcagaggtaccgggagccgctgctgaggaggctcccggaagagatcctagccccgtggcaccgcctgatggcagagacgagactctgcgactcctcgatgaactgctcgcggaatcggccgcttggggaccccctgagcccgcacccagacggccagccagattgagacccacagcagtagcgggatccgccgtctgcgctgagcaatctaccgagggtcaccctggctccggcaatgtaagcgaagctccaggatccgggcgaaagaagcccgagcggccagctgcaatcagttatgaccacagcgaggagggcctgatggcctctatcgagcgcgagtattgcagatag

SEQ ID NO: 31118 - protein, 421 aa, Artificial Sequence
  derived and/or modified sequence
MAATLILEPAGRCCWDEPVRIAVRGLAPEQPVTLRASLRDEKGALFQAHARYRADTLGELDLERAPALGGSFAGLEPMGLLWALEPEKPLVRLVKRDVRTPLAVELEVLDGHDPDPGRLLCRVRHERYFLPPGVRREPVRAGRVRGTLFLPPEPGPFPGIVDMFGTGGGLLEYRASLLAGKGFAVMALAYYNYEDLPKTMETLHLEYFEEAVNYLLSHPEVKGPGVGLLGISKGGELCLSMASFLKGITAAVVINGSVANVGGTLRYKGETLPPVGVNRNRIKVTKDGYADIVDVLNSPLEGPDQKSFIPVERAESTFLFLVGQDDHNWKSEFYANEACKRLQAHGRRKPQIICYPETGHYIEPPYFPLCRASLHALVGSPIIWGGEPRAHAMAQVDAWKQLQTFFHKHLGGHEGTIPSKV

SEQ ID NO: 31119 - DNA, 1266 bp, Artificial Sequence
  derived and/or modified sequence
atggcagcaaccctgatacttgagccagctggcaggtgctgctgggatgaaccagtgaggattgccgtacgcggcctggcacctgagcagccagttacactgagagcttccctgagggacgagaaaggggcactgtttcaggcacatgccagataccgggctgatacactcggggagttggatcttgagcgggctcccgcactagggggatctttcgctggtttggaacctatgggtctgctgtgggccctcgagccagagaagcccttggttaggctggtaaagagagacgtccgaactcccctagcagtggaactggaagtcttggatggccacgatcccgatccagggcgcctgctgtgcagggtgaggcacgaacggtactttctgccaccaggcgtaagacgtgaacctgtgcgcgcggggagagtgcgaggaaccctcttcctgccccctgaaccaggcccttttcccggaatcgtggacatgtttgggacagggggcgggctgctagaatatagagccagccttttggctgggaaagggttcgccgttatggcactcgcatattacaactatgaggacttgcctaagaccatggagaccctgcacctcgaatactttgaagaggcggtgaactacctgttatctcaccccgaagtgaaaggtcctggcgtgggcctgctgggtatttcaaaagggggggagttgtgtttgagcatggcctcgttcctgaaggggatcacagccgctgtggtaataaatggatcagtcgcaaacgtgggcggaactctaaggtacaagggagagaccctgccgcccgtgggggtgaacagaaaccggatcaaggtcacgaaggatggatacgctgacattgtagatgtgttaaactccccccttgagggccccgatcaaaagtcttttatacctgtcgaacgagccgaatccaccttcttattcctagtcgggcaggacgatcacaattggaagagtgagttctacgccaacgaggcctgtaagagattgcaggcccacggccgacgcaagcctcaaatcatttgctatcctgagacaggtcattacatcgagcccccttattttcctctgtgtcgcgcatccctccacgcgttggtgggatcccctatcatctggggcggggaacctcgtgctcacgctatggcccaagttgatgcatggaaacagctgcagacattctttcacaaacatctgggcggccatgaaggaactattccatctaaggtgtag

SEQ ID NO: 31120 - DNA, 1266 bp, Artificial Sequence
  derived and/or modified sequence
atggccgccaccctcatcctggagcccgccggccgctgctgctgggatgagcctgtgagaattgctgtgcggggcctggcccctgagcagcctgtgaccctgcgggccagcctgagagatgagaagggggccctcttccaggcccacgcccgctacagagctgacaccctgggggagctggacctggagcgggccccagccctgggcggcagctttgctggcctggagcccatgggcctgctgtgggccctggagcctgagaagcccctggtgcggctggtgaagagagatgtgaggacccccctggccgtggagctggaggtgctggatggccatgaccctgaccccggccgcctgctgtgccgggtgagacatgagcgctacttcctgcccccaggagtgagaagagagcctgtgcgggccggccgggtgcggggcaccctcttcctgcccccagagcccggccccttccctggcatcgtggacatgtttggcaccggcggcggcctgctggagtaccgggccagcctgctggccgggaaaggatttgctgtgatggccctggcctactacaactatgaggacctgcccaagaccatggagaccctgcacctggagtactttgaggaggccgtgaactacctgctgagccaccctgaggtgaagggccctggggtgggcctgctgggcatcagcaaaggaggagagctgtgcctgtccatggccagcttcctgaagggcatcacagctgctgtggtgatcaatggatctgtggccaacgtgggcggcaccctgcgctacaagggggagaccctgccccctgtgggcgtgaacagaaaccgcatcaaggtgaccaaggatggctacgccgacatcgtggatgtgctgaacagccccctggagggccctgaccagaagagcttcatccctgtggagcgggcagagagcaccttcctgttcctggtgggccaggatgaccacaactggaagtctgagttctacgccaatgaggcctgcaagaggctgcaggcccatggaagaaggaagccccagatcatctgctacccagagaccggccactacatcgagcccccctacttccccctgtgccgggccagcctgcacgccctggtgggcagccccatcatctggggcggggagccccgggcccacgccatggcccaggtggatgcctggaagcagctgcagaccttcttccacaagcacctgggcggccacgagggcaccatccccagcaaggtgtag

SEQ ID NO: 31121 - DNA, 1266 bp, Artificial Sequence
  derived and/or modified sequence
atggccgccaccctgatcctggagcccgccggccggtgctgctgggatgagcccgtacgaatcgccgttcgcgggttggctccagagcagcctgtgactctgcgggcttctctgagagatgagaaaggcgccctgtttcaggcccatgcccgataccgagccgatactctcggtgagctggacttggagcgtgccccagctctggggggctcattcgctggactggagcccatggggttgctgtgggctttggagccagagaagcctcttgtgagattggttaagcgagatgtcagaaccccactggctgtcgagctggaagtccttgacgggcacgacccagaccctggacggctgctatgccgcgtcaggcatgagagatactttctcccacctggcgtgcgcagggagcctgtgagagccggccgtgtcagaggtaccttattcctcccccccgagcctggaccatttcccggaattgtagatatgttcggcacaggcgggggccttctcgagtatcgagcatcccttctcgcaggaaaaggatttgccgtgatggccttggcctattacaattatgaagatctccccaaaaccatggagacgttgcacctggagtacttcgaagaggctgtgaattacctcctgtcacaccctgaagtgaaaggacccggggtcggactgctggggattagtaaaggaggtgaactctgtttgtctatggcatcattcctcaaaggaattaccgcagcagtggtgatcaatggctcagttgccaatgtcggaggaacccttcgttacaagggggaaaccttgccccctgttggagtgaatcgtaacaggattaaggttactaaggacggatatgcagatattgtcgatgtccttaactccccactcgaaggaccagatcaaaaatcctttattcccgtggaaagagccgaatctacattcttgtttttggtgggccaggacgatcacaactggaaaagtgaattttacgccaacgaggcttgtaagaggttacaggcccatggtcgaagaaagcctcaaatcatttgctacccagagactggtcactacatagaaccaccttactttccattgtgccgcgcatcgttgcacgctcttgtgggatctcctatcatatgggggggggagccgagagcccacgctatggcacaggtggacgcgtggaagcagctccaaacgttcttccacaaacacctgggagggcacgaggggactattccctctaaggtttag

SEQ ID NO: 31122 - DNA, 1266 bp, Artificial Sequence
  derived and/or modified sequence
atggcggctactctgattctggaacccgcaggcaggtgctgttgggatgagccagtgcggatcgcagtgcgcggtctggccccagaacagcccgtcaccctcagggcctcactgcgggacgaaaaaggtgcactgttccaggcccacgccagatacagggctgacactctgggagaactggatttggagcgggcacccgctctgggcggatccttcgccggactagaacccatgggcctgctctgggccctggaacctgaaaagccccttgttagattagtgaagcgtgacgtccgtaccccactcgctgttgagctggaggtgttggacgggcatgaccctgatcctggccgacttctgtgtcgggtgcgccacgaacggtatttcctaccaccgggagtaagacgcgagcccgttagagcaggccgtgttaggggcactttattcctgcccccagaaccaggtcccttccccggaatcgtcgacatgttcggcactgggggaggcctactggagtaccgagcctctttgctggccggaaaagggttcgctgtgatggcactggcttattataactatgaggacctgcctaagacgatggagaccttgcatcttgaatactttgaggaggcagttaactacctactttcccacccagaggttaagggccctggggtgggactgcttgggatatctaaggggggtgagctctgcttgtctatggctagcttccttaaaggcattacggccgcagttgtgatcaacggttcggtggccaacgtcggagggactttaaggtataaaggggagacattgccccctgtgggagtgaatcggaatagaataaaggtaaccaaagatggatacgccgatatcgtcgatgtgcttaactccccactcgagggtcccgatcagaagtctttcattcccgtcgagcgcgctgagagtacattcctgtttctggttgggcaggacgaccataactggaaatccgagttttacgcaaatgaagcttgtaaaagactgcaggcccacggaagacgcaagcctcagatcatttgctatccagagacgggtcattatatagagcccccatacttccctctttgtcgtgccagcctccacgccctggtgggaagccccattatttggggaggtgagcctcgggctcatgccatggcgcaggtggacgcttggaagcaactgcaaaccttcttccacaaacatctgggcggtcatgagggcaccatcccttctaaagtatag

SEQ ID NO: 31123 - DNA, 1266 bp, Artificial Sequence
  derived and/or modified sequence
atggccgccaccctgatcctggagcccgccggcagatgctgctgggacgagcccgtgagaatcgccgtgagaggcctggcccccgagcagcccgtgaccctgagagccagcctgagagacgagaagggcgccctgttccaggcccacgccagatacagagccgacaccctgggcgagctggacctggagagagcccccgccctgggcggcagcttcgccggcctggagcccatgggcctgctgtgggccctggagcccgagaagcccctggtgagactggtgaagagagacgtgagaacccccctggccgtggagctggaggtgctggacggccacgaccccgaccccggcagactgctgtgcagagtgagacacgagagatacttcctgccccccggcgtgagaagagagcccgtgagagccggcagagtgagaggcaccctgttcctgccccccgagcccggccccttccccggcatcgtggacatgttcggcaccggcggcggcctgctggagtacagagccagcctgctggccggcaagggcttcgccgtgatggccctggcctactacaactacgaggacctgcccaagaccatggagaccctgcacctggagtacttcgaggaggccgtgaactacctgctgagccaccccgaggtgaagggccccggcgtgggcctgctgggcatcagcaagggcggcgagctgtgcctgagcatggccagcttcctgaagggcatcaccgccgccgtggtgatcaacggcagcgtggccaacgtgggcggcaccctgagatacaagggcgagaccctgccccccgtgggcgtgaacagaaacagaatcaaggtgaccaaggacggctacgccgacatcgtggacgtgctgaacagccccctggagggccccgaccagaagagcttcatccccgtggagagagccgagagcaccttcctgttcctggtgggccaggacgaccacaactggaagagcgagttctacgccaacgaggcctgcaagagactgcaggcccacggcagaagaaagccccagatcatctgctaccccgagaccggccactacatcgagcccccctacttccccctgtgcagagccagcctgcacgccctggtgggcagccccatcatctggggcggcgagcccagagcccacgccatggcccaggtggacgcctggaagcagctgcagaccttcttccacaagcacctgggcggccacgagggcaccatccccagcaaggtgtag

SEQ ID NO: 31124 - protein, 259 aa, Artificial Sequence
  derived and/or modified sequence
MRDRRGPLGTCLAQVQQAGGGDSDKLSCSLKKRMPEGPWPADAPSWMNKPVVDGNSQSEALSLEMRKDPSGAGLWLHSGGPVLPYVRESVRRNPASAATPSTAVGLFPAPTECFARVSCSGVEALGRRDWLGGGPRATDGHRGQCPKGEPRVSRLPRHQKVPEMGSFQDDPPSAFPKGLGSELEPACLHSILSATLHVYPEVLLSEETKRIFLDRLKPMFSKQTIEFKKMLKSTSDGLQITLGLLALQPFELANTLCHS

SEQ ID NO: 31125 - protein, 120 aa, Artificial Sequence
  derived and/or modified sequence
MRDRRGPLGTCLAQVQQAGGGDSDKLSCSLKKRMPEGPWPADAPSWMNKPVVDGNSQSEALSLEMRKDPSGAGLWLHSGGPVLPYVRESVRRNPASAATPSTAVGLFPAPTECFARVSCS

SEQ ID NO: 31126 - protein, 109 aa, Artificial Sequence
  derived and/or modified sequence
MRDRRGPLGTCLAQVQQAGGGDSDKLSCSLKKRMPEGPWPADAPSWMNKPVVDGNSQSEALSLEMRKDPSGAGLWLHSGGPVLPYVRESVRRNPASAATPSTAVGLFPA

SEQ ID NO: 31127 - protein, 271 aa, Artificial Sequence
  derived and/or modified sequence
MRDRRGPLGTCLAQVQWAGGGDSDKLSYSLKKRMPTEGPWPADAPSWMNKPAVDGNSQSEALSLEMAGLSLPSGGPVLPYVKESARRNPASAATPSAAVGLFPAPTEYFARVSCSGVEALGRDWLGGGPRATHGHRGQCPKGEPRVSRLTRHQKLPEMGSFWDDPPSAFPSGLGSELEPSCLHSILSATLHACPEVLLKDETKRIFLDLLNPMFSKQTIEFKKMFKSTSDGLQITLGLLALQHFELANSLCHSLKYKQNNASRLILRVVLE

SEQ ID NO: 31128 - DNA, 780 bp, Artificial Sequence
  derived and/or modified sequence
atgcgtgatagacggggcccactagggacctgtctggcccaggtgcaacaggcgggaggcggcgactccgataaactgtcctgttcattgaagaaaaggatgccggagggtccctggcctgccgacgcgccttcatggatgaacaagcctgtagtggacgggaatagtcagtcagaggctctcagcctcgaaatgcgcaaggaccctagcggagcaggcctttggctccactccggaggcccagttctgccgtacgtgagggaaagtgtgaggcgcaatccggcaagtgccgccaccccatcaacagcggtgggactgtttcccgcacccactgagtgctttgcacgggtatcgtgcagcggagtggaagcactcggaagacgggactggttaggcggcgggccgagggccacagatggacaccgcggccaatgcccaaagggcgagccaagagtgagtagactgccacgccatcagaaggtgcctgagatgggcagctttcaggacgatcccccttccgcctttccaaagggcttgggatccgaactggagccagcgtgtctgcatagcatcctaagtgccactctccacgtttaccctgaggtgcttctttcggaagagactaagagaatctttttggatcgccttaaaccaatgtttagtaagcaaaccatcgagttcaaaaaaatgctcaagtcgactagtgatggcctacaaatcactttgggtcttcttgccctccagcctttcgaactcgccaacacattgtgtcatagctag

SEQ ID NO: 31129 - DNA, 363 bp, Artificial Sequence
  derived and/or modified sequence
atgagggaccggcgcggtcctcttgggacctgccttgcacaagtacagcaagcaggaggcggggacagcgataagttgagctgcagcctgaagaagaggatgcccgagggtccttggcccgctgacgcgccaagctggatgaacaaacccgtagttgatggaaattcccagagcgaagccctgagtctcgagatgcgtaaagacccctcaggagccggactttggttgcactccggagggccagttttaccctacgtgcgagagtcagtgagaaggaaccccgccagcgccgcgacaccaagtaccgccgtgggtttgttccctgctcctactgagtgtttcgctcgagtcagctgctcctag

SEQ ID NO: 31130 - DNA, 330 bp, Artificial Sequence
  derived and/or modified sequence
atgagggaccggcgaggcccccttgggacctgtctggcgcaagtccaacaggctggcggcggcgatagcgacaaactctcttgcagtctcaaaaaaaggatgcctgagggcccttggccagcagacgcgccatcatggatgaataaaccagtggtcgatgggaattcacagagtgaggcgttaagtctcgaaatgagaaaggatcccagcggcgccggactatggcttcacagcggcggtccagtgctgccgtacgtcagagagtctgtgagacgcaatcccgcctctgccgccacaccaagtaccgccgttgggctgtttccagcttag

SEQ ID NO: 31131 - DNA, 780 bp, Artificial Sequence
  derived and/or modified sequence
atgagggaccggcggggccccctgggcacctgcctggcccaggtgcagcaggccggcggcggggacagcgacaagctgagctgcagcctgaagaagaggatgcctgagggcccctggccagcagatgcccccagctggatgaacaagcctgtggtggatggcaacagccagagcgaggccctgagcctggagatgaggaaggaccccagcggggccggcctgtggctgcacagcggcggccctgtgctgccctacgtgcgggagagcgtgagaagaaatcctgccagcgctgccacccccagcacagctgtgggcctcttccctgcccccacagagtgctttgcccgggtgtcctgcagcggcgtggaggccctgggcagaagagactggctgggcggcggcccccgggccacagatggccaccggggccagtgccccaagggggagccccgggtgtcccggctgcccaggcaccagaaggtgcctgagatgggcagcttccaggatgatcctccttctgccttccccaagggcctgggcagcgagctggagcccgcctgcctgcacagcatcctgagcgccaccctgcacgtgtacccagaggtgctgctgtctgaggagaccaagaggatcttcctggaccggctgaagcccatgttcagcaagcagaccatcgagttcaagaagatgctgaagagcaccagtgatggcctgcagatcaccctgggcctgctggccctgcagccctttgagctggccaacaccctgtgccacagctag

SEQ ID NO: 31132 - DNA, 363 bp, Artificial Sequence
  derived and/or modified sequence
atgagggaccggcggggccccctgggcacctgcctggcccaggtgcagcaggccggcggcggggacagcgacaagctgagctgcagcctgaagaagaggatgcctgagggcccctggccagcagatgcccccagctggatgaacaagcctgtggtggatggcaacagccagagcgaggccctgagcctggagatgaggaaggaccccagcggggccggcctgtggctgcacagcggcggccctgtgctgccctacgtgcgggagagcgtgagaagaaatcctgccagcgctgccacccccagcacagctgtgggcctcttccctgcccccacagagtgctttgcccgggtgtcctgcagctag

SEQ ID NO: 31133 - DNA, 330 bp, Artificial Sequence
  derived and/or modified sequence
atgagggaccggcggggccccctgggcacctgcctggcccaggtgcagcaggccggcggcggggacagcgacaagctgagctgcagcctgaagaagaggatgcctgagggcccctggccagcagatgcccccagctggatgaacaagcctgtggtggatggcaacagccagagcgaggccctgagcctggagatgaggaaggaccccagcggggccggcctgtggctgcacagcggcggccctgtgctgccctacgtgcgggagagcgtgagaagaaatcctgccagcgctgccacccccagcacagctgtgggcctcttccctgcctag

SEQ ID NO: 31134 - DNA, 780 bp, Artificial Sequence
  derived and/or modified sequence
atgcgggaccggcggggccccctgggcacctgcctggcccaggtgcaacaggccggaggaggcgattctgataaactcagttgtagcctgaagaagcggatgccagagggtccatggcctgcagatgccccatcgtggatgaataaacccgtggtcgacggcaattcacagtccgaggctttatcccttgaaatgcggaaggaccccagtggagctggcctatggcttcacagcggcggtccagtgctgccctatgtcagggagtcagttcgaaggaatcctgcatccgccgccaccccttccaccgctgtaggcctctttcccgctcccaccgagtgctttgcgcgcgtgtcatgctctggtgtggaagctttaggaagaagagactggctcggcggcggccctcgcgccaccgacggtcaccgcgggcagtgccctaagggtgagcctagggtcagtcgtctaccaaggcaccaaaaggtacccgaaatggggtccttccaggatgatcccccttctgccttccctaaaggattagggtctgaactggaacccgcctgtctgcactctatcttgagcgccactctgcacgtctatcccgaggtccttctgtcagaggagacgaagcgcattttccttgaccgtttgaagcccatgttttctaagcaaaccatagagttcaagaaaatgcttaagtctaccagtgacggcctccaaatcactctagggttgctggctctacagccttttgaactggccaataccttgtgccattcatag

SEQ ID NO: 31135 - DNA, 363 bp, Artificial Sequence
  derived and/or modified sequence
atgcgggaccggcggggccccctgggcacctgcctggcccaggtgcagcaggccggtggtggggatagtgataagttatcatgttcgctaaaaaagcggatgcccgagggtccttggcccgccgacgcaccctcttggatgaataaacccgtggtggacgggaactctcagagcgaagcccttagtctggagatgcgcaaggatcccagtggtgctgggctttggttgcactcgggtgggccagtactcccatatgttagagaatcggtgaggcgcaatcccgcgtcagccgctaccccctcgaccgccgtcgggttatttcctgcacctaccgaatgcttcgctcgcgtgagttgctcatag

SEQ ID NO: 31136 - DNA, 330 bp, Artificial Sequence
  derived and/or modified sequence
atgcgggaccggcggggccccctgggcacctgcctggcccaggtgcagcaagccggaggaggagactctgataaactgtcttgttcactgaaaaaacgcatgcctgaagggccatggcccgccgacgcaccttcttggatgaacaagcccgtcgtggatgggaattcacagagcgaggccttatcattagagatgcgtaaggacccctccggcgctgggctgtggctgcactctggtggtccagtgctcccctacgtcagagaaagtgtgagacgcaacccggccagtgcggccactcctagcaccgctgtgggtctgttccctgcctag

SEQ ID NO: 31137 - DNA, 780 bp, Artificial Sequence
  derived and/or modified sequence
atgcgcgaccggaggggacctctaggaacctgtctggcccaggtccagcaggccggaggcggagatagtgataaactctcttgctcactcaaaaaaaggatgcccgaaggcccttggcccgcagacgctccaagctggatgaataagcccgtagttgacgggaattctcagtcggaagcactctcgttggaaatgcgcaaggacccctccggagctggactgtggctccacagcggcggtccagtactgccctacgtgcgagagtccgtacgcaggaaccccgcaagcgctgcaaccccatccacggcagttggcctgttcccagccccaacggagtgctttgctagagtctcatgtagcggggtggaggcactcgggaggagggattggctcggcggtgggcctagggccaccgacggccatagagggcagtgtccaaaaggcgaaccgagagtcagccgcctacctagacaccagaaagtcccagagatgggcagcttccaagatgatccaccgtcagcatttcctaaggggctgggaagtgagctggagcctgcctgcctgcactccatcctctcagccacacttcacgtctatcctgaagtgctcctgtccgaagagacaaaacgtatattcctggatcggctcaagcccatgttctccaaacaaaccatcgaatttaaaaagatgctcaaatccacttctgatggcttgcagataaccctcggcctgctcgcgcttcagccctttgaactcgctaacaccctctgccactcctag

SEQ ID NO: 31138 - DNA, 363 bp, Artificial Sequence
  derived and/or modified sequence
atgcgcgatcgaagagggcctttaggtacctgcttggcccaggtccagcaggccggaggcggagattcagacaagctgtcgtgctcattgaaaaagcggatgcccgaggggccatggcctgctgacgccccatcatggatgaacaaacctgtggtggacggtaatagtcagagtgaagccctgtcactggagatgcggaaggatccatctggagccggtttgtggcttcatagcggcggtcccgtcctaccttacgtgcgagaaagcgtccgcaggaatcccgcaagcgctgctacaccttcgacggcggtgggtctgtttcctgcccctactgaatgtttcgccagagttagttgcagctag

SEQ ID NO: 31139 - DNA, 330 bp, Artificial Sequence
  derived and/or modified sequence
atgcgggacagacgtgggcctctggggacctgcttggcccaggtgcaacaggctggtggcggagactccgacaaactctcttgttcgttgaagaagagaatgcctgaaggcccatggcctgccgacgctccttcatggatgaacaaacctgtcgtcgatggcaattcccagtccgaagcactatccctggagatgagaaaggacccttccggagccggtttatggctccattcggggggacctgtactgccctacgtccgcgagagcgtgcgcagaaatccagccagtgctgctacaccctccaccgcagtgggtctgtttcctgcctag

SEQ ID NO: 31140 - DNA, 2214 bp, Artificial Sequence
  derived and/or modified sequence
cggccaggctggtacaggcggctgctcgcggaggcacttctccgagcgtgacgtgcggactccgctccactgcggcccgcccgcccgccggtctagccgccgcctccttcgctccctgagcacgccaggcgagggtcagctgccggggcgacgcggcgcggagagggcgggcgggggggctgtgggagcgccggtctctatatggcggcggctctgtcgggcctggctgtccggctctcgcgctcggccgccgcccgctcctatggggtcttctgcaaggggctgactcgcacgctgctcatcttcttcgacctggcctggcggctgcgtatcaacttcccctacctctacatcgtggcttccatgatgctcaacgtccgcctgcaggttcatattgagatccattgaaggccctcccagactgacgaaggcgtgacctcaggcccaccgcatccaagaacacgaagcatgagggacagaagagggcccctcggcacctgcctggcacaagtgcagcaggccggaggaggtgactcggacaaactatcatgcagccttaagaaaagaatgccggagggcccttggcctgcagatgcaccctcctggatgaataagcctgtggttgatggaaattcacaaagtgaggcattatcactggaaatgagaaaggatccgagcggggctggcctctggcttcacagtggcggcccagtgcttccatatgtgagagaatcagtaagaagaaatccagcctcagcagccactccgagcacagccgtgggtttgttccctgctccaacagagtgttttgctcgggtgtcctgcagtggtgttgaagctctggggcggcgagactggctgggaggagggcccagggccactgacggccacagaggacagtgccccaaaggagagcctcgggtgtcacgactgccacgccatcaaaaagtgccggaaatgggaagttttcaggatgacccaccaagtgcttttcccaagggtctgggctctgagttggaacccgcttgcctgcactccatcctgtctgcaacgctgcacgtgtatcccgaagtgctcctgagtgaggagacaaaacgcattttccttgaccgtttaaagcccatgttttcaaagcaaacaatagaattcaagaaaatgcttaaaagcacctcagatggtctgcagataacactggggttactggctctgcaaccttttgaattagcaaatacattatgccatagttaaggtacaagcagaacaataccaatagattaattttaagagttgtcttagaatgatttctttcgcattaagtctggatgcaaactgtgcagcccttaggttcctgctgtagttttgtacgacctggcagacttaaagtaaattgagtttaaattcaaagccagttgatgcggaaggaacttttttggcatgtgttaaattgtgctttaaaagacatataaagaattgggaaacatttcaggagacgatcatagcctgtataaataccagattagaacatacggatttaccatgaagttctgtcttcaacatccattctaaagggctactgtcccaaatcctgtgtgtccttttgacttgtctgatcacccaatggaagtggatacttgtaaagtctacaccactgtacttggcgttaaatcttgctgaattcgtggtaagctgttaccatgtctacattttgtagaatgattttggtctgcagcaaaattcgatttcacttctcatacccctttccttccacttgaaatgcaatttagacagaggccctgtggtgaaagttgcaatattaagtttacctttagaagatcccttctcaaactcagaaccctagcagtgttaccttaaacaaaaatgagctcgagaaaaaagtagctcagttacagagaagcaaatcgagttatttcccacataaaaagtttcccagattctaagaattgcagtatcctgtaccctaaaatttttcaaggtgactcctgttgtcgtctgttgataactttaataaaggtcatttaaggacataagtttttaaagactcccaaagtgaaacttaaacattttcgggattatcgattgcatatatcagtttatgctgtgtgctgaattactatgccatgtgctattttagtgtttggggaaaatgaaaaataaaatttgttctttagcttaataaatatgtcttattttata

SEQ ID NO: 31141 - DNA, 502 bp, Artificial Sequence
  derived and/or modified sequence
attgttgtccggcaggtcagctgggcagggatctgcgaggaaggtgaccgctcctgttgtggttcatattgagatccattgaaggccctcccagactgacgaaggcgtgacctcaggcccaccgcatccaagaacacgaagcatgagggacagaagagggcccctcggcacctgcctggcacaagtgcagcaggccggaggaggtgactcggacaaactatcatgcagccttaagaaaagaatgccggagggcccttggcctgcagatgcaccctcctggatgaataagcctgtggttgatggaaattcacaaagtgaggcattatcactggaaatgagaaaggatccgagcggggctggcctctggcttcacagtggcggcccagtgcttccatatgtgagagaatcagtaagaagaaatccagcctcagcagccactccgagcacagccgtgggtttgttccctgctccaacagagtgttttgctcgggtgtcctgcagt

SEQ ID NO: 31142 - DNA, 558 bp, Artificial Sequence
  derived and/or modified sequence
gtgacgtcaggctgcgcggccaggctggtacaggcggctgctcgcggaggcacttctccgagcgtgacgtgcggactccgctccactgcggcccgcccgcccgccggtctagccgccgcctccttcgctccctgagcacgccaggcgagggttcatattgagatccattgaaggccctcccagactgacgaaggcgtgacctcaggcccaccgcatccaagaacacgaagcatgagggacagaagagggcccctcggcacctgcctggcacaagtgcagcaggccggaggaggtgactcggacaaactatcatgcagccttaagaaaagaatgccggagggcccttggcctgcagatgcaccctcctggatgaataagcctgtggttgatggaaattcacaaagtgaggcattatcactggaaatgagaaaggatccgagcggggctggcctctggcttcacagtggcggcccagtgcttccatatgtgagagaatcagtaagaagaaatccagcctcagcagccactccgagcacagccgtgggtttgttccctgct

SEQ ID NO: 31143 - DNA, 780 bp, Artificial Sequence
  derived and/or modified sequence
atgagagacagaagaggccccctgggcacctgcctggcccaggtgcagcaggccggcggcggcgacagcgacaagctgagctgcagcctgaagaagagaatgcccgagggcccctggcccgccgacgcccccagctggatgaacaagcccgtggtggacggcaacagccagagcgaggccctgagcctggagatgagaaaggaccccagcggcgccggcctgtggctgcacagcggcggccccgtgctgccctacgtgagagagagcgtgagaagaaaccccgccagcgccgccacccccagcaccgccgtgggcctgttccccgcccccaccgagtgcttcgccagagtgagctgcagcggcgtggaggccctgggcagaagagactggctgggcggcggccccagagccaccgacggccacagaggccagtgccccaagggcgagcccagagtgagcagactgcccagacaccagaaggtgcccgagatgggcagcttccaggacgacccccccagcgccttccccaagggcctgggcagcgagctggagcccgcctgcctgcacagcatcctgagcgccaccctgcacgtgtaccccgaggtgctgctgagcgaggagaccaagagaatcttcctggacagactgaagcccatgttcagcaagcagaccatcgagttcaagaagatgctgaagagcaccagcgacggcctgcagatcaccctgggcctgctggccctgcagcccttcgagctggccaacaccctgtgccacagctag

SEQ ID NO: 31144 - DNA, 363 bp, Artificial Sequence
  derived and/or modified sequence
atgagagacagaagaggccccctgggcacctgcctggcccaggtgcagcaggccggcggcggcgacagcgacaagctgagctgcagcctgaagaagagaatgcccgagggcccctggcccgccgacgcccccagctggatgaacaagcccgtggtggacggcaacagccagagcgaggccctgagcctggagatgagaaaggaccccagcggcgccggcctgtggctgcacagcggcggccccgtgctgccctacgtgagagagagcgtgagaagaaaccccgccagcgccgccacccccagcaccgccgtgggcctgttccccgcccccaccgagtgcttcgccagagtgagctgcagctag

SEQ ID NO: 31145 - DNA, 330 bp, Artificial Sequence
  derived and/or modified sequence
atgagagacagaagaggccccctgggcacctgcctggcccaggtgcagcaggccggcggcggcgacagcgacaagctgagctgcagcctgaagaagagaatgcccgagggcccctggcccgccgacgcccccagctggatgaacaagcccgtggtggacggcaacagccagagcgaggccctgagcctggagatgagaaaggaccccagcggcgccggcctgtggctgcacagcggcggccccgtgctgccctacgtgagagagagcgtgagaagaaaccccgccagcgccgccacccccagcaccgccgtgggcctgttccccgcctag

SEQ ID NO: 31146 - DNA, 816 bp, Artificial Sequence
  derived and/or modified sequence
atgagagacagaagaggccccctgggcacctgcctggcccaggtgcagtgggccggcggcggcgacagcgacaagctgagctacagcctgaagaagagaatgcccaccgagggcccctggcccgccgacgcccccagctggatgaacaagcccgccgtggacggcaacagccagagcgaggccctgagcctggagatggccggcctgagcctgcccagcggcggccccgtgctgccctacgtgaaggagagcgccagaagaaaccccgccagcgccgccacccccagcgccgccgtgggcctgttccccgcccccaccgagtacttcgccagagtgagctgcagcggcgtggaggccctgggcagagactggctgggcggcggccccagagccacccacggccacagaggccagtgccccaagggcgagcccagagtgagcagactgaccagacaccagaagctgcccgagatgggcagcttctgggacgacccccccagcgccttccccagcggcctgggcagcgagctggagcccagctgcctgcacagcatcctgagcgccaccctgcacgcctgccccgaggtgctgctgaaggacgagaccaagagaatcttcctggacctgctgaaccccatgttcagcaagcagaccatcgagttcaagaagatgttcaagagcaccagcgacggcctgcagatcaccctgggcctgctggccctgcagcacttcgagctggccaacagcctgtgccacagcctgaagtacaagcagaacaacgccagcagactgatcctgagagtggtgctggagtag

SEQ ID NO: 31147 - DNA, 2138 bp, Artificial Sequence
  derived and/or modified sequence
caggcggcggctcgcggaggcgcttctctgagcatgacgcgcggactccgctcccgcagcccgcccgcccgccggtctagcagccgcctccctcgcttcttgcgcccgccaagcgaaggccagtggccgcagcgacgcggcgcggagaggtggtgggtgctctatatggcggcggatctgtcgggcctggctgtccggctctagggctcggccgccgcccgcccccgtggggtcttctgcaaggggctgactcgcaagctgctgtcttcttcgatctggcctggcggctgcgcatcaacttcccctacctctacatggtggcttccatgatgctcaacgtccgcctgcaggttcatattgagatccactgaaggccctcccggactgacgaaggcgtgacctcaggcccaccgcatccaaaaacacgaagcatgagggacagaagagggccccttggcacctgcctggctcaagtacagtgggccggaggaggtgactcggacaaactatcatacagccttaagaaaagaatgccgacggagggcccttggcctgcagatgcaccctcctggatgaataagcctgcggttgatggaaattcacagagtgaggcattatcactggaaatggctggcctctcgcttcccagtggcggcccagttcttccatatgtgaaagaatcagcaagaagaaatccagcctcagcagctactccgagcgcagccgtgggtttgttccctgctccaacagagtattttgctcgggtgtcctgcagtggtgttgaagctctggggcgggactggctgggaggagggcccagggccacccacggccacagaggacagtgccccaaaggagagcctcgggtgtcacgactgacacgccatcaaaaactgccggaaatgggaagtttttgggatgacccaccaagtgcttttcccagtggtctgggctctgagttggaaccctcttgcctgcattccatcctgtctgcaacactgcacgcgtgccccgaagtgctcctgaaagatgagacgaaacgcattttccttgaccttttaaaccccatgttttcaaagcaaacaatagaattcaagaaaatgtttaaaagcacctcagatggtctgcagataacactggggttactggcgctgcaacattttgaattagcaaattcattatgccatagtttaaagtacaagcagaacaatgcaagtagattaattttaagagttgtcttagaatgatttctttcgcattaagtctggatgcaaactatgcagcccttaggttcctggtgtggtttgtacgacctggcagacttagttgagtttgaattcaaagccggttgatgcggaaggaaattttttagcatgtgttaaattgtgctttaaaagacatataaaaaattgggaaacatttcaggagacgatcatagcctgtataaatatcagattagaacatacggatttaccatgaagttctgtcttcaacacccaacactgtctaaagggctactgtcccaaatcctgtgtgtcccttcggcttgtctgatcacccaatggaagtggatacttgtgaagtctacactgctgtacttggcgttaaatcttgctgaattcatggtaagctattatcatttctacattttgtagaatgattttggtctgcagcaaaattctatttcacttctcacacctctttccttccacttgaaatgcaatttagacagaggcattgtggtgaaagttgcaatattaaacttacctttagaagatcccttctcaaactcggaaccctagcagtgttaccttaaaaatgagctagagaaaaaaatagctcagttacagagaagcaaatcaagttatttcccacataaaaagtttcccagattctaggaattgcagtatcttgtaccctaaagtttttccaggtgactcctttggttgtctgttgataactttgataaaggtcatttaagggcataaggttttaaagactcccaaagtgagacttaaccattttcgggattagtgattgcatataccagtttatgttgtgtgctgaattactatgccatgtgctattttagtgtttggggaaaatgaaaaataaaatttgttctttagcgtaataaa

SEQ ID NO: 31148 - DNA, 816 bp, Artificial Sequence
  derived and/or modified sequence
atgcgtgaccggcggggcccattagggacatgtctggcccaggtgcagtgggccggcggcggcgactccgataaactgagttactccctcaagaagcggatgccgacggagggcccgtggcctgccgacgcgcccagctggatgaacaaacctgctgttgacggtaactcacagagtgaagccctgtcgcttgaaatggccggactgtccctgccctctggcgggcctgtcctgccatatgtgaaggagtctgcccggcgtaatccagcttctgccgcgacccctagtgccgcagtgggcctgtttccagccccaactgagtacttcgcccgtgtgtcttgttccggcgtagaggccctgggtagagactggctgggcggtggcccccgcgcaactcacggacaccgtggccaatgtccaaaaggagagccacgcgtgtctagactgacccgccatcaaaaacttccagagatgggctctttttgggatgatccaccctcggcctttcctagcgggctcgggtctgagctcgaaccttcttgtctacactccatactctcagcaactctgcatgcatgcccggaggtcctactgaaggacgagaccaagaggattttcctagacctcttgaacccaatgttttcaaagcagaccattgagtttaaaaaaatgttcaaatctacaagcgacggcctgcagatcacactcgggctgcttgctctacagcactttgaacttgccaactctctatgccatagcctgaagtacaaacagaataatgcctctagacttatactcagagtcgttctggagtag

SEQ ID NO: 31149 - DNA, 816 bp, Artificial Sequence
  derived and/or modified sequence
atgagggaccggcggggccccctgggcacctgcctggcccaggtgcagtgggccggcggcggggacagcgacaagctgagctacagcctgaagaagaggatgcccacagagggcccctggccagcagatgcccccagctggatgaacaagccagctgtggatggcaacagccagagcgaggccctgagcctggagatggccggcctgagcctgcccagcggcggccctgtgctgccctacgtgaaggagagcgccaggagaaatcctgccagcgctgccacccccagcgctgctgtgggcctcttccctgcccccacagagtactttgcccgggtgtcctgcagcggcgtggaggccctgggccgggactggctgggcggcggcccccgggccacccacggccaccggggccagtgccccaagggggagccccgggtgtcccggctgaccaggcaccagaagctgcctgagatgggcagcttctgggatgatcctccttctgccttccccagcggcctgggcagcgagctggagcccagctgcctgcacagcatcctgagcgccaccctgcacgcctgcccagaggtgctgctgaaggatgagaccaagaggatcttcctggacctgctgaaccccatgttcagcaagcagaccatcgagttcaagaagatgttcaagagcaccagtgatggcctgcagatcaccctgggcctgctggccctgcagcactttgagctggccaacagcctgtgccacagcctgaagtacaagcagaacaatgccagccgcctcatcctgcgggtggtgctggagtag

SEQ ID NO: 31150 - DNA, 816 bp, Artificial Sequence
  derived and/or modified sequence
atgcgggaccggcggggccccctgggcacctgcctggcccaggtgcagtgggcaggtgggggcgatagcgacaaactcagttatagcctgaaaaagaggatgccaaccgagggcccatggcctgctgatgctcccagctggatgaataagcctgctgtggatggtaactcccagagcgaggccttgagtctggagatggccgggctgtccctcccatcaggaggcccggtgctcccatatgtgaaagaaagtgcccgtagaaaccctgcgtccgccgccacaccctcagcagcagtcggcctgttcccagcccccacggagtattttgcccgcgtcagttgttctggcgtggaggcactcggcagagattggctcggggggggcccacgggctacacatggacaccgcggccagtgtcccaagggggagccaagagtttcccgccttacaagacatcagaagctgccggagatgggctctttttgggacgacccaccaagcgcctttcctagcggattaggctctgagctggagcccagctgtctgcattcaatactcagtgccacacttcatgcctgtcctgaggtgctgttgaaagacgaaacaaagcgcattttccttgacttactgaatcctatgttctccaaacaaactatcgaattcaaaaagatgtttaagtccacatccgatggactgcaaataacactgggcctcctggccctccagcactttgaattagctaactctttatgccactctctaaagtataagcaaaacaatgcatccaggctaatcctgagggtggtcttggagtag

SEQ ID NO: 31151 - DNA, 816 bp, Artificial Sequence
  derived and/or modified sequence
atgagagacaggagggggcctttgggcacatgcctggcccaggtgcagtgggcaggtggcggtgactccgataagctgagttattccctgaagaagaggatgccaaccgagggaccatggccagcagacgccccatcgtggatgaataagcccgcagtggatggtaactctcaatctgaagcactgagtttggaaatggcaggactgtccctacctagtgggggtcccgtgctgccctacgtgaaggagtctgcccgaagaaatccagcatctgcagccactccttctgcggctgtgggccttttcccagcccctactgagtattttgctcgcgtgtcatgctcaggggtggaggcccttggcagagattggctcggcggaggccctcgcgcaactcacggtcaccgaggacagtgccccaaaggagagccaagagtctccagattgaccagacatcaaaaattaccggaaatgggatcattttgggatgaccctccttcggcttttcctagtggactcggtagtgaattagagccaagttgcctgcattcaattctgtccgccactttgcacgcttgtcctgaagtactgttaaaggatgaaaccaaacggatttttctggacctgctaaaccccatgttttcaaagcaaacgatagagttcaagaagatgttcaagagcacctctgacggactacagataaccttgggcctcctggcactgcagcacttcgagctggcaaactccttgtgccacagtctcaaatataagcagaacaatgcaagtcgcctcattctgcgagtggttttggaatag

SEQ ID NO: 31152 - protein, 733 aa, Artificial Sequence
  derived and/or modified sequence
MAEVGEDSGARALLALRSAPCSPVLCAAAAAAAFPAAAPPPAPAQPQPPPGPPPPPPPPLPPGAIAGAGSSGGSSGVSGDSAVAGAAPALVAAAAASVRQSPGPALARLEGREFEFLMRQPSVTIGRNSSQGSVDLSMGLSSFISRRHLQLSFQEPHFYLRCLGKNGVFVDGAFQRRGAPALQLPKQCTFRFPSTAIKIQFTSLYHKEEAPASPLRPLYPQISPLKIHIPEPDLRSMVSPVPSPTGTISVPNSCPASPRGAGSSSYRFVQNVTSDLQLAAEFAAKAASEQQADTSGGDSPKDESKPPFSYAQLIVQAISSAQDRQLTLSGIYAHITKHYPYYRTADKGWQNSIRHNLSLNRYFIKVPRSQEEPGKGSFWRIDPASEAKLVEQAFRKRRQRGVSCFRTPFGPLSSRSAPASPTHPGLMSPRSGGLQTPECLSREGSPIPHDPEFGSKLASVPEYRYSQSAPGSPVSAQPVIMAVPPRPSSLVAKPVAYMPASIVTSQQPAGHAIHVVQQAPTVTMVRVVTTSANSANGYILTSQGAAGGSHDAAGAAVLDLGSEARGLEEKPTIAFATIPAAGGVIQTVASQMAPGVPGHTVTILQPATPVTLGQHHLPVRAVTQNGKHAVPTNSLAGNAYALTSPLQLLATQASSSAPVVVTRVCEVGPKEPAAAVAATATTTPATATTASASASSTGEPEVKRSRVEEPSGAVTTPAGVIAAAGPQGPGTGE

SEQ ID NO: 31153 - protein, 489 aa, Artificial Sequence
  derived and/or modified sequence
MVSPVPSPTGTISVPNSCPASPRGAGSSSYRFVQNVTSDLQLAAEFAAKAASEQQADTSGGDSPKDESKPPFSYAQLIVQAISSAQDRQLTLSGIYAHITKHYPYYRTADKGWQNSIRHNLSLNRYFIKVPRSQEEPGKGSFWRIDPASEAKLVEQAFRKRRQRGVSCFRTPFGPLSSRSAPASPTHPGLMSPRSGGLQTPPIPHDPEFGSKLASVPEYRYSQSAPGSPVSAQPVIMAVPPRPSSLVAKPVAYMPASIVTSQQPAGHAIHVVQQAPTVTMVRVVTTSANSANGYILTSQGAAGGSHDAAGAAVLDLGSEARGLEEKPTIAFATIPAAGGVIQTVASQMAPGVPGHTVTILQPATPVTLGQHHLPVRAVTQNGKHAVPTNSLAGNAYALTSPLQLLATQASSSAPVVVTRVCEVGPKEPAAAVAATATTTPATATTASASASSTGEPEVKRSRVEEPSGAVTTPAGVIAAAGPQGPGTGE

SEQ ID NO: 31154 - protein, 583 aa, Artificial Sequence
  derived and/or modified sequence
MRQPSVTIGRNSSQGSVDLSMGLSSFISRRHLQLSFQEPHFYLRCLGKNGVFVDGAFQRRGAPALQLPKQCTFRFPSTAIKIQFTSLYHKEEAPASPLRPLYPQISPLKIHIPEPDLRSMVSPVPSPTGTISVPNSCPASPRGAGSSSYRFVQNVTSDLQLAAEFAAKAASEQQADTSGGDSPKDESKPPFSYAQLIVQAISSAQDRQLTLSGIYAHITKHYPYYRTADKGWQNSIRHNLSLNRYFIKVPRSQEEPGKGSFWRIDPASEAKLVEQAFRKRRQRGVSCFRTPFGPLSSRSAPASPTHPGLMSPRSGGLQTPECLSREGSPIPHDPEFGSKLASVPEYRYSQSAPGSPVSAQPVIMAVPPRPSSLVAKPVAYMPASIVTSQQPAGHAIHVVQQAPTVTMVRVVTTSANSANGYILTSQGAAGGSHDAAGAAVLDLGSEARGLEEKPTIAFATIPAAGGVIQTVASQMAPGVPGHTVTILQPATPVTLGQHHLPVRAVTQNGKHAVPTNSLAGNAYALTSPLQLLATQASSSAPVVVTRVCEVGPKEPLPPPPLPPPLPLESPRSKGPGWRSPVVL

SEQ ID NO: 31155 - DNA, 2202 bp, Artificial Sequence
  derived and/or modified sequence
atggccgaggtgggcgaggacagcggcgccagagccctgctggccctgagaagcgccccctgcagccccgtgctgtgcgccgccgccgccgccgccgccttccccgccgccgcccccccccccgcccccgcccagccccagcccccccccggcccccccccccccccccccccccccctgccccccggcgccatcgccggcgccggcagcagcggcggcagcagcggcgtgagcggcgacagcgccgtggccggcgccgcccccgccctggtggccgccgccgccgccagcgtgagacagagccccggccccgccctggccagactggagggcagagagttcgagttcctgatgagacagcccagcgtgaccatcggcagaaacagcagccagggcagcgtggacctgagcatgggcctgagcagcttcatcagcagaagacacctgcagctgagcttccaggagccccacttctacctgagatgcctgggcaagaacggcgtgttcgtggacggcgccttccagagaagaggcgcccccgccctgcagctgcccaagcagtgcaccttcagattccccagcaccgccatcaagatccagttcaccagcctgtaccacaaggaggaggcccccgccagccccctgagacccctgtacccccagatcagccccctgaagatccacatccccgagcccgacctgagaagcatggtgagccccgtgcccagccccaccggcaccatcagcgtgcccaacagctgccccgccagccccagaggcgccggcagcagcagctacagattcgtgcagaacgtgaccagcgacctgcagctggccgccgagttcgccgccaaggccgccagcgagcagcaggccgacaccagcggcggcgacagccccaaggacgagagcaagccccccttcagctacgcccagctgatcgtgcaggccatcagcagcgcccaggacagacagctgaccctgagcggcatctacgcccacatcaccaagcactacccctactacagaaccgccgacaagggctggcagaacagcatcagacacaacctgagcctgaacagatacttcatcaaggtgcccagaagccaggaggagcccggcaagggcagcttctggagaatcgaccccgccagcgaggccaagctggtggagcaggccttcagaaagagaagacagagaggcgtgagctgcttcagaacccccttcggccccctgagcagcagaagcgcccccgccagccccacccaccccggcctgatgagccccagaagcggcggcctgcagacccccgagtgcctgagcagagagggcagccccatcccccacgaccccgagttcggcagcaagctggccagcgtgcccgagtacagatacagccagagcgcccccggcagccccgtgagcgcccagcccgtgatcatggccgtgccccccagacccagcagcctggtggccaagcccgtggcctacatgcccgccagcatcgtgaccagccagcagcccgccggccacgccatccacgtggtgcagcaggcccccaccgtgaccatggtgagagtggtgaccaccagcgccaacagcgccaacggctacatcctgaccagccagggcgccgccggcggcagccacgacgccgccggcgccgccgtgctggacctgggcagcgaggccagaggcctggaggagaagcccaccatcgccttcgccaccatccccgccgccggcggcgtgatccagaccgtggccagccagatggcccccggcgtgcccggccacaccgtgaccatcctgcagcccgccacccccgtgaccctgggccagcaccacctgcccgtgagagccgtgacccagaacggcaagcacgccgtgcccaccaacagcctggccggcaacgcctacgccctgaccagccccctgcagctgctggccacccaggccagcagcagcgcccccgtggtggtgaccagagtgtgcgaggtgggccccaaggagcccgccgccgccgtggccgccaccgccaccaccacccccgccaccgccaccaccgccagcgccagcgccagcagcaccggcgagcccgaggtgaagagaagcagagtggaggagcccagcggcgccgtgaccacccccgccggcgtgatcgccgccgccggcccccagggccccggcaccggcgagtag

SEQ ID NO: 31156 - DNA, 1752 bp, Artificial Sequence
  derived and/or modified sequence
atgagacagcccagcgtgaccatcggcagaaacagcagccagggcagcgtggacctgagcatgggcctgagcagcttcatcagcagaagacacctgcagctgagcttccaggagccccacttctacctgagatgcctgggcaagaacggcgtgttcgtggacggcgccttccagagaagaggcgcccccgccctgcagctgcccaagcagtgcaccttcagattccccagcaccgccatcaagatccagttcaccagcctgtaccacaaggaggaggcccccgccagccccctgagacccctgtacccccagatcagccccctgaagatccacatccccgagcccgacctgagaagcatggtgagccccgtgcccagccccaccggcaccatcagcgtgcccaacagctgccccgccagccccagaggcgccggcagcagcagctacagattcgtgcagaacgtgaccagcgacctgcagctggccgccgagttcgccgccaaggccgccagcgagcagcaggccgacaccagcggcggcgacagccccaaggacgagagcaagccccccttcagctacgcccagctgatcgtgcaggccatcagcagcgcccaggacagacagctgaccctgagcggcatctacgcccacatcaccaagcactacccctactacagaaccgccgacaagggctggcagaacagcatcagacacaacctgagcctgaacagatacttcatcaaggtgcccagaagccaggaggagcccggcaagggcagcttctggagaatcgaccccgccagcgaggccaagctggtggagcaggccttcagaaagagaagacagagaggcgtgagctgcttcagaacccccttcggccccctgagcagcagaagcgcccccgccagccccacccaccccggcctgatgagccccagaagcggcggcctgcagacccccgagtgcctgagcagagagggcagccccatcccccacgaccccgagttcggcagcaagctggccagcgtgcccgagtacagatacagccagagcgcccccggcagccccgtgagcgcccagcccgtgatcatggccgtgccccccagacccagcagcctggtggccaagcccgtggcctacatgcccgccagcatcgtgaccagccagcagcccgccggccacgccatccacgtggtgcagcaggcccccaccgtgaccatggtgagagtggtgaccaccagcgccaacagcgccaacggctacatcctgaccagccagggcgccgccggcggcagccacgacgccgccggcgccgccgtgctggacctgggcagcgaggccagaggcctggaggagaagcccaccatcgccttcgccaccatccccgccgccggcggcgtgatccagaccgtggccagccagatggcccccggcgtgcccggccacaccgtgaccatcctgcagcccgccacccccgtgaccctgggccagcaccacctgcccgtgagagccgtgacccagaacggcaagcacgccgtgcccaccaacagcctggccggcaacgcctacgccctgaccagccccctgcagctgctggccacccaggccagcagcagcgcccccgtggtggtgaccagagtgtgcgaggtgggccccaaggagcccctgccccccccccccctgcccccccccctgcccctggagagccccagaagcaagggccccggctggagaagccccgtggtgctgtag

SEQ ID NO: 31157 - DNA, 2202 bp, Artificial Sequence
  derived and/or modified sequence
atggccgaggtgggcgaggactcaggagctcgtgccttgctggcgctcagatctgccccttgcagccccgtgctctgtgcagcagccgctgcggctgcatttccagccgcagcaccgccacctgcgcctgcacagccccagccgcctcctggccctcctcccccccccccaccccctctgcctcctggggcaatcgctggagccgggagctcagggggttcatctggagtctccggggatagcgccgtggccggggcagctccagccctcgtggctgcagcggccgcctccgtgcgccaatctcctgggcctgctcttgccagattagaaggccgcgagtttgagttcctgatgcggcagccatccgtcaccattggccgaaactcctcgcagggttcagttgacctctccatgggactatcgagctttatttcccggaggcacttacagctgagttttcaagagccacatttttaccttcgctgcttgggaaaaaacggcgtgtttgtggatggcgcatttcaaaggcgcggagctccagccctgcagctccccaaacagtgcacgtttcgtttcccaagcaccgcaatcaagatccagtttacctccctatatcataaagaggaagccccagcttcacccttaagacccctgtaccctcaaatatcccccctgaagatccacatccccgagcccgacctaaggagcatggtgagtcccgtcccgtcaccaaccggtacaatttcagtccctaattcctgccccgcaagtcccaggggtgcaggatcctcttcatatcggtttgttcaaaatgtgacttctgacctgcaactcgcggccgaatttgccgccaaggccgccagcgaacaacaggcagacacctccggaggagactcgccgaaggacgagtcaaagccccccttttcctatgctcagctcatcgtccaggccatctctagtgcacaggaccgccagctgacactctccggcatctacgcacacataacaaaacattacccgtactatcggacggcagataaagggtggcagaatagcattcgccataatctgagcctaaatcgttacttcataaaagtgccgcggtcacaagaagagcccggaaaggggtctttctggcgaattgaccctgccagcgaggccaagctcgtggagcaggctttcaggaaaagacggcaaaggggggtgagctgcttccggactccatttggacccctatcttctagaagcgctcccgcctcaccaacccacccaggcctgatgagtccacggagtgggggcttgcaaacaccggaatgcttgtctcgggagggctctcccatccctcatgatcccgagtttggttcaaagttggcctctgttcccgaatatagatacagccaatcggctcccgggagtccagtgtccgcacaacctgtcatcatggccgtgcctcctaggccgagttctctcgtagccaagcccgtggcatacatgcctgcaagcattgttacatcccaacagcctgctggtcacgcaatccacgtggtacagcaggctcctaccgtgaccatggtgagagttgttactacttctgcaaacagcgcgaacggttatatcctaacatcccaaggcgcggctggcggaagccatgatgctgcaggcgcagccgttcttgatcttggtagtgaggcccgcggactggaggagaaacccaccatcgcattcgctactatccccgcggccggcggggtgattcagacagtggcctcacagatggccccaggggttcccgggcacacggtcacgatcttgcagccagccactcctgtgacactcgggcagcatcacctgcctgtcagggcagttacccaaaacgggaaacatgccgtgccaacaaattctctagcaggaaacgcttatgccctgacatcacccctgcaattgcttgccacccaggcctcaagttccgcccctgtagtcgtcactcgggtctgcgaagtcggcccgaaagaaccagctgcagcggtggctgctaccgccaccacaacgccagccaccgctaccactgcctccgcctctgcctcaagcaccggagaaccagaagtgaagaggtcaagggtagaagaaccatccggcgccgttactacccccgctggagtgattgctgccgcagggcctcagggaccaggcacaggcgagtag

SEQ ID NO: 31158 - DNA, 1752 bp, Artificial Sequence
  derived and/or modified sequence
atgcgccagccctccgtgaccattgggcggaattcttcccagggttcagtagatctgagcatgggcctgagttccttcatatcacgcaggcatctgcagctcagcttccaggaacctcacttctacctgcgatgtttaggcaagaatggcgtgtttgtggatggcgcctttcaaaggagaggagcacccgccctacagctgcctaaacagtgcactttcaggttccctagcacagccattaagatccaattcacaagtttgtaccacaaggaggaagcccctgcaagcccactgagacccctttatccccagatttcaccgctgaaaattcacatcccagagccagacctgagaagcatggtttccccagtcccgtctccgacaggtacgattagtgtgccaaattcttgtcctgccagccctcggggggcaggctcttctagctacaggttcgtccagaacgtaactagcgatctgcaattggcggcagagtttgccgctaaagccgcgtctgagcaacaggcagatacctcaggcggtgatagtcccaaggatgagagtaagccccctttcagctacgctcaattgatcgtgcaggctatatcttctgctcaggatcggcaactgactctgtctggcatttacgcgcatattacaaagcactatccatactacagaaccgccgacaaaggctggcaaaactccattagacacaacttgtctttgaatcggtattttataaaggttcctaggagccaggaggagcccggaaagggctcattctggcggattgaccccgcgagcgaggctaagctagtcgaacaagcatttcggaagaggaggcagcgcggagtatcgtgttttcgaactccattcgggccgttgagctctcgatccgctcctgcgagccctacccaccctggcctgatgagccccaggtcagggggtctccaaacccctgagtgtcttagtcgagagggtagccccatcccacatgacccggagttcggctctaagttggccagcgttccagagtacaggtacagccagagcgctcccgggagccccgtgtccgcacaaccggtgattatggccgtacctccaaggccctcatccctcgtcgccaaacccgtcgcttatatgccagcttccatagtgacaagtcaacagcctgcagggcacgcaatccacgtggtgcagcaggcgccaacggtcactatggttagggtggtgacgacatccgccaattctgccaacgggtatatcctgacttcgcagggcgctgcaggcggctcacacgatgccgccggagcggctgtgttggacttgggctcggaggccagggggttagaagaaaagcctacaatcgcatttgccactatccctgcggcaggaggagtgattcagacagtggcatcccagatggccccaggggtgcctggccacacagtcacaatcctgcaacccgccactccagtgaccttgggccagcaccacctgccagtgagagccgtcacacaaaatgggaagcatgcagttccgacaaatagcctggcgggcaacgcttacgcgctgacaagcccccttcagctgttagctacccaagcctcatcctcagctcctgtggtggtcacgcgcgtgtgcgaggtgggccctaaggaaccactgccaccacctcccctgcctccccctctcccactggaaagcccccgttctaagggaccgggctggaggagtcccgttgtgttatag

SEQ ID NO: 31159 - DNA, 11181 bp, Artificial Sequence
  derived and/or modified sequence
atggccgaagtcggcgaggacagcggcgcccgcgccctgctcgcgctgcgctcggcgccctgcagcccagtgctgtgcgccgcagccgccgccgccgccttccccgcggccgcacccccgccggcccccgcgcagccccagcctccgcccgggccgccgccgccgccgccaccgccgctgcctccgggcgcgatcgcgggcgcgggctcctccgggggctcctccggggtatccggggactccgcggtcgcgggcgcggcgccggccctggtggccgcggcggccgcctcggtacggcagagcccggggccggcgctggcgcggctggagggccgcgagttcgagttcctcatgcgccagcccagcgtcaccatcggccgcaactcgtcgcagggctcggtggacttgagcatgggcctgtccagcttcatctcgcggcgccacctgcagctcagcttccaggagccgcacttctacctgcgctgcctcggcaagaacggcgtcttcgtggacggggccttccagagacgcggcgcgcccgccctgcagctgcccaagcagtgtaccttccggtttcccagcacggccatcaagatccagttcacgtcgctctatcacaaagaagaggccccagcctccccgctgcggccactgtacccccagatctcccctctgaagatccacatcccggagccggacctccggagcatggtcagccccgtcccctccccgacgggcaccatcagtgtccccaactcctgcccagccagtccacgcggtgccggctcctccagttaccgctttgtgcagaacgtgacctcggacctgcagctggcagcagagtttgcagcaaaggccgcgtcggagcagcaggcagacacgtctggaggagacagccccaaggatgagtcaaagccgccgttctcctacgcgcagctgatcgtgcaggccatctcctccgcccaggaccggcagctgaccctgagcgggatctacgcccacatcaccaagcattacccctactaccggacggccgacaaaggctggcagaattctatccggcacaacctctctttgaaccgttactttatcaaagtcccacgttcccaggaggagcctgggaaggggtccttttggcgaatagaccctgcctctgaagccaagctcgtggaacaggcattccggaaacggaggcagaggggtgtctcctgcttccgcacccccttcgggcctctgtcctcaaggagcgctccagcttcgcccacacaccccgggctgatgtcccctcgctccggcggcctgcagaccccagagtgcctgtctcgggagggctcccccattccacacgaccctgagtttgggtccaagttagcttctgtcccagagtaccggtattcccaaagcgcacccggctcccccgtcagcgcccagccagtgatcatggccgtgcctccccgaccgtccagcctcgtggccaagcccgtggcctacatgcccgcctccatcgtaacctcacagcagcccgcgggccacgccatccacgtcgtgcagcaggcccccaccgtcaccatggtcagggtggtcaccacatctgccaactcggccaacggatacatcctcaccagccagggcgcggcggggggctcccatgatgcggcgggcgcagccgtgctggacctgggcagcgaggccagaggcctggaggagaaacccaccattgcgtttgccacaatccccgcggctggtggagtcatccagacggtggccagccagatggcccccggggtccccggacacacggtcaccatcctgcagcccgccacacccgtgaccctcgggcagcaccaccttccagtccgggccgtgacccagaacggaaagcatgcggttcccacgaacagtttagccggcaacgcttacgccctcaccagccctttgcagctccttgcgacccaagcgagttcatccgcgccggtggtggtcacccgggtgtgcgaggtggggcccaaggagccagcagcagccgtcgcggccacggccaccaccaccccagccactgccaccaccgcctctgcctccgcctcttccactggagagcccgaggtcaaaaggtcccgggtggaggagcccagtggtgctgtaaccacaccggctggagtgatcgcagctgccggcccccaggggccaggcaccggggagtgaggtcacctgcaacgcgggggagtgggactcacccagcggcgaccccgaagctggacccggcagctcaggcggccgcacccacagacggaggagaacagcccgcggcggcctgtgggcatcggcggcacctggacacacccagccctttccatttgatcgcctgccttcccgtggtttaagacaaaaacacataaacaagttcagacaactgattgtatgattctgggaattctttgctttcctttccttctccctcggcaccacctcctctccccaggcctccctgtcgggcatggggaggaggttggagctcagcatcttgaggaatgtgtcaagacagcccctccgctccgcgctgcacggccagccgcctttgtccgggaggacagacagaaacgcagcaaggcacacaccaaggctgccggggaggcccgggcaccggacagatgcctgttgggaagccaggagctgccgagccacggaccacctaacagcctctccgcccggaacgtgacatagagagtgttggcattaactcggggggtgtccgatttcacttcagaccccaagtttttctttgtttgtttaaacatggaattcagacttcattgtacacctgagacagacacaaaagggatcatgtatttttgaggattttacctgttgacgtctgatgaccggccgtaggtccagggttcccgctgggtttaatcccctcgaagagtaaacctgccgctctgtctgataacttcaagtaagagcagcggcttcctgggttggcgttcgcggtggaaggttcctaggatgaaaggtgagcctggatccgccggccgcagacatcgcgctgctggggacgattggggccgctgctctgcagaccagaccttcccgaattatccgtggctccgatgtcccggtgctgacggccacatggggacctaacagtgccaaacgccatctgctccagctgctttttcacccagttgcagagtcctcaccactcccacattgatctgctgttttcaattggaaccatttctcctgcctgaaactccagggcccctccctgggctgtccgtgagcaggagaccccaccccagcagcagtggtgagcaggcctgtgcctccacgcccagcccccgccaacgcgactggttttgtttgccacacggtgagaaccggaggacgggatgctccagccagttgggtggttctggggtccctgaggaagccccctcctgcacttccattaagacagccagtggttcctggatctttgtcaccaagcagcgttgagccagagctgtctaatgctgagcccagctcaggaaggagagaggagtccttcagtgtgtcttggagatgcgaagtgcgtcctcgtaaaggtcagctgtcagttttgctggccgctccggcgctggctctcctgtccgggaccacaacgagaaacagcgacagattcgacgcagagctccggaagtgcctgaggagcagtggttcttggaaatcgcccgtcctccgcatcacagcctctcaccagcaaagcagcctctgcccaggccctggcgggagagctgcagagggacccaggtgcctggagggcatttgagggaggtggctggacaggtgtctccctgaagaagaagggagaacacttttcaaagtgattccgaggcagtgcgggaggacacacgtgctgtgcagtggagtggggtcgcccgtggcccccatcagagtccccgtcccccaggacaagtgcagaacctctgtgggccccctccttccacctagatagagaaaaccccttgttcggtttccttcccgtgtcccgttgtttttctaagccccccgaattgagtcgtttctatggcactaacctttccatgggaaataagctctttgtggaagtccgtacctgttgccctgggtgaggtttcagagaaacgggggcaggatgaacacagccggctgtcctgggtgcagttacgtccgtggagggtgagagattgcgccccgttccacacttgtgtcgcctgctgttgtctgtgggccttttctttccgtggtgcctggtgtgtgcgtgcatggcgtgagagaacggggggtgggggttggaggtggctccccgacaccggtgcctgtgtggcctgagccggcgccctcccgggagcgcccgtcacggggggcctctgtgattacctgctgctgctctctcccgcgtggtgactatatgtcctcagggctgcctgtggccaccctgatgggagacctctgtttgcttctgggccactgcaggttggcctcctcaatacaagctgatgtctgcagggagcgccgcgtgctgggattgcaccacgtgttggtcacaaatcgaggtcgccttttggcctggtctgctcaggctggccctgacccacgtggtttcctggcttctgagacgcagcgcattcttcctgttagcggtagcgttctctgatttcactgcttcattgccaagggcgtggaaagggggtggtggatggagccgggaggtggcgagcacaggaccccggggctgcattctgccgtgtggggttctgcactgtctagcttctgcggggactgcaaagagggatgaagggacgtggtcctaggggtcggctcagactcggagcagggcagggagaggagggcaaggagaggaggcctgggtcctggatccactgctctgggctcataaccatgagattttgaaagagtttttggtcatctgagcaggtaccatgcctggctcatgccggaacttgtcttggaaccggtagccagaggcccaggaagggacagggcccaaaagggttgcatgtcccggccacaaagccctccctgtgtgccctgagccagcccagcaagcgcctcccagccaggcgctttcgcagaagcaagagcacaggccagggggaccgggagagcctcagcccccagcctgggcggcctgtgaccctgagccgtgtggagccaggacccaagaaccttctctaggttctcaagggtgagctgacccgggcaatgtgcaggaatgtggggagcaaaagtagctgattccagccccgttctggggtcactggggaggcagaggctgagggcctgttctctggtcaccagggactgggggcacggtccacagcggatgagaacagcaggtcacagtagtggctttgggaagggcccctcctgctttgccctgttcggaaaggggctccctcagagcccctgggcccagtaacccgcttctgtctcctgactcctgctggataaattgccaggtttatcaaatacaagaaaacacctgctttggctaggaggtaagtcccaaaaagaacgtcttaagtagagcaaaggcatccaccgaggccatttggtggcccctgggaagtggggaagcagggcctgagcgtccccaggctgctagggcagcagctggctcagggcacactctctcgtgccagcttctgccaccagcccagtgtccacggagccgcggggccagaggagctcagggagacctggctgtctagggcatggtacccagtatcccggtgtgtgcccatcctcagccacttgtgtctttctttccatgtgggagttctcccggtgacacctgccctccgttgagggtggaatctgtcactcatgcctttgagggacccagatggaccatccctcttctgcttgctttctacattcctaaaaacctcaacgttaatccctcaccagtcgggccgagtgtggcctcatggttctgccgcggcccagtcttctcccactggcttcacgctagagggcgccatgcgctctgggtgaaatgagacgctggtgtggggtccccatgtagagaccctcaggtccctatccagagaccctccaggcagtgctgggaagacactggtggcggggaccatgaccaggcgggtggagccatgtgtgtctcacacctgccgcccctcactttccttcccgaggtctggtaggtcctctttgggatttgctgtttatttgtatctcccttttctttgatttaagaacaatgccaagtgaaaaagctgggaatgaatttctgagttgctgagtgttccctgctcctaggtaccacgctctgtgcttctcaggcagggaggagatggattcggtggagttgggccaggacgggggcttcaccctgccccctccagactgccgaagcccccaagaagttttgagcccagctgggcctcgcctccccggctcctgggtccattttctgtactggtttgagatcacaggcatcattcagcgaatgctcttgtgtcctctgcataaagagggccctccctggagcacccccggggagctgggactctccagaaagccccgggtgagggctccgtcttgagagagagagaaatcccttctttgggcgattcagtgagttcaggaggaggaggaagcttttccttggctttgaaatcagtgtttttatggagacaaagaacagacctcagtgggaaaaatgaaaacgtaatggaacacggggaggtgtcggagaagaaaggattttccccttcgctttcagagccggcgggagtgcaggtctgttttgcttcagaagcctcacattctgctttgcccttgagtgacttcatgcgggatgaggaactgttgacccctctagagaggacaccccaagtccatcctgggctcctcctcacccctctgagaaagcccccctaaaaaaaggcttcagagtcaccggcatgccgcctcacgttgcaggacggaatcgcgcgctcctcacgctggagtaagttacgaaacatgatcgtcaggctctttgcaaacgcagagccccagaacgctggatggaggcctcctcggccctgcgggcggcctggctgcggtaggtctgctgcaaggagccaccacggggactgcgccacactcctgatgaaaacgtgtttacccacagcctcgcctcgagcctccttgacaataccgctgcttcaaagcaatattatttaatgagaatactttacattgctcacatgtgctgctatgaagacaggattagtctgtagacgggactcagctccagaggttcctgggtaatgtattgtggctcttggaaatgagggtagaatttgaaatataacaaatggtctctcgcccggttctgtcccttatttttagattgttttcctgcatcttacaatttccttttcttttcaaagttcctttctccaggcctgtttttcagtgctcaggacacggttttcatcacatacttactgtttttttggttgggttttgatacgaaaagctgctacgtttggtgaccagagggagggtttggaatctgtgctttgcaggggatctcggtgggtaccgcggcccctcgcagggtggcgagtggggtccgtgcctcgagaagggggcccttacccacaccgtgcggcttgaattctgtcggagttgaatctgtggaaaggattgtcccattagagctgctgcgtcctttcctctgtcctccctgtcacccaaaccccgaagtcacagctgcttagaagaatgggattttggggatacaaccacacacatttccctctggactgaaattttaaaaacagacccatttcactgacttctttttttttttttttttttttttttttttgagacggagtctcgctctgtcgcccaggctggagtgcagtggcgtgatctcggctcactgcaagctccgcctcccgggttcacgccattctcctgcctcagcctcccgagtagctgggactacaggcgcccgctaccacgcccggctaattttttgtatttttagtagagacggggtttcaccgtgttagccaggatggtctcgatctcctgacctcgtgatccgcccgcctcggcctcccaaagtgctgggattacaggcgtgagccaccgcgcccggcccactgacttctttagggaaaatagtttcagtcttgggttgtcttgtgagcccacgggcatgggaccctgtctctgctgggcttttccggccccgtcccagctcctcctcaggcagaggctgcagccctcagctctgctgctggatggaacatttcaaccccctccgggaaggtgggcagggtggagggcccagggctaggcctgccatgcaccatgagcaggggtgctacctgggtgtgtgaagttgggctggcttttcctggaggtgggtgagaaggctctccgggcaaatcagaaggccacgagagagagaggagcggggagagtggtgaggaggattcgtctctgactgatgaacctcgccgtgcctgtctgtcacatccaagtctgtgccagctgctgggaggtcagactcctgccctgagaaacagcccagtccttggagaatgaaaccctgagggtcagtgagtggaggccttccctcggggccagccattcccgggaggcctgagtgtgacctggaagctctgtgggtcaccaagactggcattttccttgtatttttgtgcagggctgaagtgagcgttcctcctctgaattggtgaggctttggaaattttttgtttcttctactcatcctaatggctggttttggctgcccggagtatcagagaatatcactaagagggcagtcagtttatttttaggcatctttctttctgtccagggagaaacccctcggaagaatcttagtcactctttgcacctgccctgtcattctcgccatggggaaaatgcgttgaaaagaaaaataccggggccagggagaagccgtgaatgtatttatttgctttggtgaagctgctgaacactggctgcggagggccccccgcccccatcccgcttcaggccccagtgacccagttgcgtcttaagttccatcgtccagatttcaggccaccagaggctgccaaaggtgactgaagcggtctccaagtcactctgtcaccactttttttttttttgagatggagtctcgctctatcgcccaggctggagtgcagtggcccaatctcggctcactgcaacctccgcctcccaggttcgagcgaattctcctgcctcaacctcccaagtagctgggattacaggcacctgccaccacacccggctaatttttgtatttctaatagagatgagagtgttaccatgttggtcaggctggtcttgaactcctgacctcaggtgatctgcccacctcaacctcccaaagtgctgggattataggcatgagccaccgcgcctggcctctgtcactttttttgctccttacccagtttttgttttttgttgttttgttttgttttagcgtgatactacaatggaaagactcctagttggttattctttatctcggattcttttttctggaattgtttgctcatttgagtggttggtggtttgccctgtgtcagacacggtgaaaagagtgcaggaaagctggggccaggggaagcgaagtggcttcaatccgggctgacagccaagaagagttttcctcccttcggtgacagggcctgcccctccgagtctagaggtaaaagcagcttctagaactggcccctaagtctccaaatgtgttggctaagctgaaatgagagactctgaattagagtttttgtttgtttgtttgttctctgcatgaagttcacaggcctgtatggatgttaaattgtgtctatagcctctaaatctccaggttaactggtccagattttttttttttaatcagtaacaatgggaatttaaaatcaaatatttggccaggtgcggtggctcatgcccgtaatcccagcactttgggaggccgaggcaggcgcatcacctgaggagtttgagaccagcctgaccaacatggtgaaatcctgtctctactaaaaatacaaaaaattagccaggcgtggtggcgtgtgcctgtaatcccagctaccagggaggctgaggcatgagaatcgcttgaacctgggagatggaggttgcagtgagccgagatcatgccactgcactccagcctgggcaacagagggagactctgtctcaaaaataataatcaaatcaagtattttaagtttggctcttctttttttcaagaaaggctttttggatacctagaataccttcatgtatgtggcttgatttctgtttcaggaaaaggggggcgggaggagagacaacagccgtgttccagagtctgtcctgagatgtcgctgagtccagacacttgggctgcacgtgccctgcagatgacaaaggccggcagctcagcacacgtgcaggaggggttaaagccaatattgagtttttgttcttgttgttttaatctgaacgattattctcctgtaaaaataatttgggaggggcgggtgttgttcggtgtgtgtgtgtgtgtgtgtgtgtgtgtgtgtgtgtgtatttttttttttacagtggcgcctgtctaaagtatttttcacaacatgtttgataatcagtgctttaaaaagcagcagtgtcctatgaagtggaaatgtcagttctagagcattggatgtgaagttctggtcatgtcaccttgcgtgtctcaccctggaggagtgaaggtgggcgcccggcgggggggtgtggctgcaccccagcaccgggagggggcacgcacgacaccagaggaagggacagccccacccatgtcaacagcaggcaacctgtgttttcatttcaagtgggatacagtatttttttaataaggagccatacttttttttaagagtttgagatctgaatgtgatttctaattgtatcagacgttaatgttttaaagctataacaaagtttaaaatttctactttttgtttttcatttattttaactgttcttttatctattaaattgttgtatgtggatggggaagttttgtttctcctcttagcatttgtttctataaccagaaataaaattctatattaaagaaatgac

SEQ ID NO: 31160 - DNA, 11167 bp, Artificial Sequence
  derived and/or modified sequence
ccgcgcgaacatggccgaagtcggcgaggacagcggcgcccgcgccctgctcgcgctgcgctcggcgccctgcagcccagtgctgtgcgccgcagccgccgccgccgccttccccgcggccgcacccccgccggcccccgcgcagccccagcctccgcccgggccgccgccgccgccgccaccgccgctgcctccgggcgcgatcgcgggcgcgggctcctccgggggctcctccggggtatccggggactccgcggtcgcgggcgcggcgccggccctggtggccgcggcggccgcctcggtacggcagagcccggggccggcgctggcgcggctggagggccgcgagttcgagttcctcatgcgccagcccagcgtcaccatcggccgcaactcgtcgcagggctcggtggacttgagcatgggcctgtccagcttcatctcgcggcgccacctgcagctcagcttccaggagccgcacttctacctgcgctgcctcggcaagaacggcgtcttcgtggacggggccttccagagacgcggcgcgcccgccctgcagctgcccaagcagtgtaccttccggtttcccagcacggccatcaagatccagttcacgtcgctctatcacaaagaagaggccccagcctccccgctgcggccactgtacccccagatctcccctctgaagatccacatcccggagccggacctccggagcatggtcagccccgtcccctccccgacgggcaccatcagtgtccccaactcctgcccagccagtccacgcggtgccggctcctccagttaccgctttgtgcagaacgtgacctcggacctgcagctggcagcagagtttgcagcaaaggccgcgtcggagcagcaggcagacacgtctggaggagacagccccaaggatgagtcaaagccgccgttctcctacgcgcagctgatcgtgcaggccatctcctccgcccaggaccggcagctgaccctgagcgggatctacgcccacatcaccaagcattacccctactaccggacggccgacaaaggctggcagaattctatccggcacaacctctctttgaaccgttactttatcaaagtcccacgttcccaggaggagcctgggaaggggtccttttggcgaatagaccctgcctctgaagccaagctcgtggaacaggcattccggaaacggaggcagaggggtgtctcctgcttccgcacccccttcgggcctctgtcctcaaggagcgctccagcttcgcccacacaccccgggctgatgtcccctcgctccggcggcctgcagaccccacccattccacacgaccctgagtttgggtccaagttagcttctgtcccagagtaccggtattcccaaagcgcacccggctcccccgtcagcgcccagccagtgatcatggccgtgcctccccgaccgtccagcctcgtggccaagcccgtggcctacatgcccgcctccatcgtaacctcacagcagcccgcgggccacgccatccacgtcgtgcagcaggcccccaccgtcaccatggtcagggtggtcaccacatctgccaactcggccaacggatacatcctcaccagccagggcgcggcggggggctcccatgatgcggcgggcgcagccgtgctggacctgggcagcgaggccagaggcctggaggagaaacccaccattgcgtttgccacaatccccgcggctggtggagtcatccagacggtggccagccagatggcccccggggtccccggacacacggtcaccatcctgcagcccgccacacccgtgaccctcgggcagcaccaccttccagtccgggccgtgacccagaacggaaagcatgcggttcccacgaacagtttagccggcaacgcttacgccctcaccagccctttgcagctccttgcgacccaagcgagttcatccgcgccggtggtggtcacccgggtgtgcgaggtggggcccaaggagccagcagcagccgtcgcggccacggccaccaccaccccagccactgccaccaccgcctctgcctccgcctcttccactggagagcccgaggtcaaaaggtcccgggtggaggagcccagtggtgctgtaaccacaccggctggagtgatcgcagctgccggcccccaggggccaggcaccggggagtgaggtcacctgcaacgcgggggagtgggactcacccagcggcgaccccgaagctggacccggcagctcaggcggccgcacccacagacggaggagaacagcccgcggcggcctgtgggcatcggcggcacctggacacacccagccctttccatttgatcgcctgccttcccgtggtttaagacaaaaacacataaacaagttcagacaactgattgtatgattctgggaattctttgctttcctttccttctccctcggcaccacctcctctccccaggcctccctgtcgggcatggggaggaggttggagctcagcatcttgaggaatgtgtcaagacagcccctccgctccgcgctgcacggccagccgcctttgtccgggaggacagacagaaacgcagcaaggcacacaccaaggctgccggggaggcccgggcaccggacagatgcctgttgggaagccaggagctgccgagccacggaccacctaacagcctctccgcccggaacgtgacatagagagtgttggcattaactcggggggtgtccgatttcacttcagaccccaagtttttctttgtttgtttaaacatggaattcagacttcattgtacacctgagacagacacaaaagggatcatgtatttttgaggattttacctgttgacgtctgatgaccggccgtaggtccagggttcccgctgggtttaatcccctcgaagagtaaacctgccgctctgtctgataacttcaagtaagagcagcggcttcctgggttggcgttcgcggtggaaggttcctaggatgaaaggtgagcctggatccgccggccgcagacatcgcgctgctggggacgattggggccgctgctctgcagaccagaccttcccgaattatccgtggctccgatgtcccggtgctgacggccacatggggacctaacagtgccaaacgccatctgctccagctgctttttcacccagttgcagagtcctcaccactcccacattgatctgctgttttcaattggaaccatttctcctgcctgaaactccagggcccctccctgggctgtccgtgagcaggagaccccaccccagcagcagtggtgagcaggcctgtgcctccacgcccagcccccgccaacgcgactggttttgtttgccacacggtgagaaccggaggacgggatgctccagccagttgggtggttctggggtccctgaggaagccccctcctgcacttccattaagacagccagtggttcctggatctttgtcaccaagcagcgttgagccagagctgtctaatgctgagcccagctcaggaaggagagaggagtccttcagtgtgtcttggagatgcgaagtgcgtcctcgtaaaggtcagctgtcagttttgctggccgctccggcgctggctctcctgtccgggaccacaacgagaaacagcgacagattcgacgcagagctccggaagtgcctgaggagcagtggttcttggaaatcgcccgtcctccgcatcacagcctctcaccagcaaagcagcctctgcccaggccctggcgggagagctgcagagggacccaggtgcctggagggcatttgagggaggtggctggacaggtgtctccctgaagaagaagggagaacacttttcaaagtgattccgaggcagtgcgggaggacacacgtgctgtgcagtggagtggggtcgcccgtggcccccatcagagtccccgtcccccaggacaagtgcagaacctctgtgggccccctccttccacctagatagagaaaaccccttgttcggtttccttcccgtgtcccgttgtttttctaagccccccgaattgagtcgtttctatggcactaacctttccatgggaaataagctctttgtggaagtccgtacctgttgccctgggtgaggtttcagagaaacgggggcaggatgaacacagccggctgtcctgggtgcagttacgtccgtggagggtgagagattgcgccccgttccacacttgtgtcgcctgctgttgtctgtgggccttttctttccgtggtgcctggtgtgtgcgtgcatggcgtgagagaacggggggtgggggttggaggtggctccccgacaccggtgcctgtgtggcctgagccggcgccctcccgggagcgcccgtcacggggggcctctgtgattacctgctgctgctctctcccgcgtggtgactatatgtcctcagggctgcctgtggccaccctgatgggagacctctgtttgcttctgggccactgcaggttggcctcctcaatacaagctgatgtctgcagggagcgccgcgtgctgggattgcaccacgtgttggtcacaaatcgaggtcgccttttggcctggtctgctcaggctggccctgacccacgtggtttcctggcttctgagacgcagcgcattcttcctgttagcggtagcgttctctgatttcactgcttcattgccaagggcgtggaaagggggtggtggatggagccgggaggtggcgagcacaggaccccggggctgcattctgccgtgtggggttctgcactgtctagcttctgcggggactgcaaagagggatgaagggacgtggtcctaggggtcggctcagactcggagcagggcagggagaggagggcaaggagaggaggcctgggtcctggatccactgctctgggctcataaccatgagattttgaaagagtttttggtcatctgagcaggtaccatgcctggctcatgccggaacttgtcttggaaccggtagccagaggcccaggaagggacagggcccaaaagggttgcatgtcccggccacaaagccctccctgtgtgccctgagccagcccagcaagcgcctcccagccaggcgctttcgcagaagcaagagcacaggccagggggaccgggagagcctcagcccccagcctgggcggcctgtgaccctgagccgtgtggagccaggacccaagaaccttctctaggttctcaagggtgagctgacccgggcaatgtgcaggaatgtggggagcaaaagtagctgattccagccccgttctggggtcactggggaggcagaggctgagggcctgttctctggtcaccagggactgggggcacggtccacagcggatgagaacagcaggtcacagtagtggctttgggaagggcccctcctgctttgccctgttcggaaaggggctccctcagagcccctgggcccagtaacccgcttctgtctcctgactcctgctggataaattgccaggtttatcaaatacaagaaaacacctgctttggctaggaggtaagtcccaaaaagaacgtcttaagtagagcaaaggcatccaccgaggccatttggtggcccctgggaagtggggaagcagggcctgagcgtccccaggctgctagggcagcagctggctcagggcacactctctcgtgccagcttctgccaccagcccagtgtccacggagccgcggggccagaggagctcagggagacctggctgtctagggcatggtacccagtatcccggtgtgtgcccatcctcagccacttgtgtctttctttccatgtgggagttctcccggtgacacctgccctccgttgagggtggaatctgtcactcatgcctttgagggacccagatggaccatccctcttctgcttgctttctacattcctaaaaacctcaacgttaatccctcaccagtcgggccgagtgtggcctcatggttctgccgcggcccagtcttctcccactggcttcacgctagagggcgccatgcgctctgggtgaaatgagacgctggtgtggggtccccatgtagagaccctcaggtccctatccagagaccctccaggcagtgctgggaagacactggtggcggggaccatgaccaggcgggtggagccatgtgtgtctcacacctgccgcccctcactttccttcccgaggtctggtaggtcctctttgggatttgctgtttatttgtatctcccttttctttgatttaagaacaatgccaagtgaaaaagctgggaatgaatttctgagttgctgagtgttccctgctcctaggtaccacgctctgtgcttctcaggcagggaggagatggattcggtggagttgggccaggacgggggcttcaccctgccccctccagactgccgaagcccccaagaagttttgagcccagctgggcctcgcctccccggctcctgggtccattttctgtactggtttgagatcacaggcatcattcagcgaatgctcttgtgtcctctgcataaagagggccctccctggagcacccccggggagctgggactctccagaaagccccgggtgagggctccgtcttgagagagagagaaatcccttctttgggcgattcagtgagttcaggaggaggaggaagcttttccttggctttgaaatcagtgtttttatggagacaaagaacagacctcagtgggaaaaatgaaaacgtaatggaacacggggaggtgtcggagaagaaaggattttccccttcgctttcagagccggcgggagtgcaggtctgttttgcttcagaagcctcacattctgctttgcccttgagtgacttcatgcgggatgaggaactgttgacccctctagagaggacaccccaagtccatcctgggctcctcctcacccctctgagaaagcccccctaaaaaaaggcttcagagtcaccggcatgccgcctcacgttgcaggacggaatcgcgcgctcctcacgctggagtaagttacgaaacatgatcgtcaggctctttgcaaacgcagagccccagaacgctggatggaggcctcctcggccctgcgggcggcctggctgcggtaggtctgctgcaaggagccaccacggggactgcgccacactcctgatgaaaacgtgtttacccacagcctcgcctcgagcctccttgacaataccgctgcttcaaagcaatattatttaatgagaatactttacattgctcacatgtgctgctatgaagacaggattagtctgtagacgggactcagctccagaggttcctgggtaatgtattgtggctcttggaaatgagggtagaatttgaaatataacaaatggtctctcgcccggttctgtcccttatttttagattgttttcctgcatcttacaatttccttttcttttcaaagttcctttctccaggcctgtttttcagtgctcaggacacggttttcatcacatacttactgtttttttggttgggttttgatacgaaaagctgctacgtttggtgaccagagggagggtttggaatctgtgctttgcaggggatctcggtgggtaccgcggcccctcgcagggtggcgagtggggtccgtgcctcgagaagggggcccttacccacaccgtgcggcttgaattctgtcggagttgaatctgtggaaaggattgtcccattagagctgctgcgtcctttcctctgtcctccctgtcacccaaaccccgaagtcacagctgcttagaagaatgggattttggggatacaaccacacacatttccctctggactgaaattttaaaaacagacccatttcactgacttctttttttttttttttttttttttttttttgagacggagtctcgctctgtcgcccaggctggagtgcagtggcgtgatctcggctcactgcaagctccgcctcccgggttcacgccattctcctgcctcagcctcccgagtagctgggactacaggcgcccgctaccacgcccggctaattttttgtatttttagtagagacggggtttcaccgtgttagccaggatggtctcgatctcctgacctcgtgatccgcccgcctcggcctcccaaagtgctgggattacaggcgtgagccaccgcgcccggcccactgacttctttagggaaaatagtttcagtcttgggttgtcttgtgagcccacgggcatgggaccctgtctctgctgggcttttccggccccgtcccagctcctcctcaggcagaggctgcagccctcagctctgctgctggatggaacatttcaaccccctccgggaaggtgggcagggtggagggcccagggctaggcctgccatgcaccatgagcaggggtgctacctgggtgtgtgaagttgggctggcttttcctggaggtgggtgagaaggctctccgggcaaatcagaaggccacgagagagagaggagcggggagagtggtgaggaggattcgtctctgactgatgaacctcgccgtgcctgtctgtcacatccaagtctgtgccagctgctgggaggtcagactcctgccctgagaaacagcccagtccttggagaatgaaaccctgagggtcagtgagtggaggccttccctcggggccagccattcccgggaggcctgagtgtgacctggaagctctgtgggtcaccaagactggcattttccttgtatttttgtgcagggctgaagtgagcgttcctcctctgaattggtgaggctttggaaattttttgtttcttctactcatcctaatggctggttttggctgcccggagtatcagagaatatcactaagagggcagtcagtttatttttaggcatctttctttctgtccagggagaaacccctcggaagaatcttagtcactctttgcacctgccctgtcattctcgccatggggaaaatgcgttgaaaagaaaaataccggggccagggagaagccgtgaatgtatttatttgctttggtgaagctgctgaacactggctgcggagggccccccgcccccatcccgcttcaggccccagtgacccagttgcgtcttaagttccatcgtccagatttcaggccaccagaggctgccaaaggtgactgaagcggtctccaagtcactctgtcaccactttttttttttttgagatggagtctcgctctatcgcccaggctggagtgcagtggcccaatctcggctcactgcaacctccgcctcccaggttcgagcgaattctcctgcctcaacctcccaagtagctgggattacaggcacctgccaccacacccggctaatttttgtatttctaatagagatgagagtgttaccatgttggtcaggctggtcttgaactcctgacctcaggtgatctgcccacctcaacctcccaaagtgctgggattataggcatgagccaccgcgcctggcctctgtcactttttttgctccttacccagtttttgttttttgttgttttgttttgttttagcgtgatactacaatggaaagactcctagttggttattctttatctcggattcttttttctggaattgtttgctcatttgagtggttggtggtttgccctgtgtcagacacggtgaaaagagtgcaggaaagctggggccaggggaagcgaagtggcttcaatccgggctgacagccaagaagagttttcctcccttcggtgacagggcctgcccctccgagtctagaggtaaaagcagcttctagaactggcccctaagtctccaaatgtgttggctaagctgaaatgagagactctgaattagagtttttgtttgtttgtttgttctctgcatgaagttcacaggcctgtatggatgttaaattgtgtctatagcctctaaatctccaggttaactggtccagattttttttttttaatcagtaacaatgggaatttaaaatcaaatatttggccaggtgcggtggctcatgcccgtaatcccagcactttgggaggccgaggcaggcgcatcacctgaggagtttgagaccagcctgaccaacatggtgaaatcctgtctctactaaaaatacaaaaaattagccaggcgtggtggcgtgtgcctgtaatcccagctaccagggaggctgaggcatgagaatcgcttgaacctgggagatggaggttgcagtgagccgagatcatgccactgcactccagcctgggcaacagagggagactctgtctcaaaaataataatcaaatcaagtattttaagtttggctcttctttttttcaagaaaggctttttggatacctagaataccttcatgtatgtggcttgatttctgtttcaggaaaaggggggcgggaggagagacaacagccgtgttccagagtctgtcctgagatgtcgctgagtccagacacttgggctgcacgtgccctgcagatgacaaaggccggcagctcagcacacgtgcaggaggggttaaagccaatattgagtttttgttcttgttgttttaatctgaacgattattctcctgtaaaaataatttgggaggggcgggtgttgttcggtgtgtgtgtgtgtgtgtgtgtgtgtgtgtgtgtgtgtatttttttttttacagtggcgcctgtctaaagtatttttcacaacatgtttgataatcagtgctttaaaaagcagcagtgtcctatgaagtggaaatgtcagttctagagcattggatgtgaagttctggtcatgtcaccttgcgtgtctcaccctggaggagtgaaggtgggcgcccggcgggggggtgtggctgcaccccagcaccgggagggggcacgcacgacaccagaggaagggacagccccacccatgtcaacagcaggcaacctgtgttttcatttcaagtgggatacagtatttttttaataaggagccatacttttttttaagagtttgagatctgaatgtgatttctaattgtatcagacgttaatgttttaaagctataacaaagtttaaaatttctactttttgtttttcatttattttaactgttcttttatctattaaattgttgtatgtggatggggaagttttgtttctcctcttagcatttgtttctataaccagaaataaaattctatattaaagaaatgac

SEQ ID NO: 31161 - DNA, 1870 bp, Artificial Sequence
  derived and/or modified sequence
atgcgccagcccagcgtcaccatcggccgcaactcgtcgcagggctcggtggacttgagcatgggcctgtccagcttcatctcgcggcgccacctgcagctcagcttccaggagccgcacttctacctgcgctgcctcggcaagaacggcgtcttcgtggacggggccttccagagacgcggcgcgcccgccctgcagctgcccaagcagtgtaccttccggtttcccagcacggccatcaagatccagttcacgtcgctctatcacaaagaagaggccccagcctccccgctgcggccactgtacccccagatctcccctctgaagatccacatcccggagccggacctccggagcatggtcagccccgtcccctccccgacgggcaccatcagtgtccccaactcctgcccagccagtccacgcggtgccggctcctccagttaccgctttgtgcagaacgtgacctcggacctgcagctggcagcagagtttgcagcaaaggccgcgtcggagcagcaggcagacacgtctggaggagacagccccaaggatgagtcaaagccgccgttctcctacgcgcagctgatcgtgcaggccatctcctccgcccaggaccggcagctgaccctgagcgggatctacgcccacatcaccaagcattacccctactaccggacggccgacaaaggctggcagaattctatccggcacaacctctctttgaaccgttactttatcaaagtcccacgttcccaggaggagcctgggaaggggtccttttggcgaatagaccctgcctctgaagccaagctcgtggaacaggcattccggaaacggaggcagaggggtgtctcctgcttccgcacccccttcgggcctctgtcctcaaggagcgctccagcttcgcccacacaccccgggctgatgtcccctcgctccggcggcctgcagaccccagagtgcctgtctcgggagggctcccccattccacacgaccctgagtttgggtccaagttagcttctgtcccagagtaccggtattcccaaagcgcacccggctcccccgtcagcgcccagccagtgatcatggccgtgcctccccgaccgtccagcctcgtggccaagcccgtggcctacatgcccgcctccatcgtaacctcacagcagcccgcgggccacgccatccacgtcgtgcagcaggcccccaccgtcaccatggtcagggtggtcaccacatctgccaactcggccaacggatacatcctcaccagccagggcgcggcggggggctcccatgatgcggcgggcgcagccgtgctggacctgggcagcgaggccagaggcctggaggagaaacccaccattgcgtttgccacaatccccgcggctggtggagtcatccagacggtggccagccagatggcccccggggtccccggacacacggtcaccatcctgcagcccgccacacccgtgaccctcgggcagcaccaccttccagtccgggccgtgacccagaacggaaagcatgcggttcccacgaacagtttagccggcaacgcttacgccctcaccagccctttgcagctccttgcgacccaagcgagttcatccgcgccggtggtggtcacccgggtgtgcgaggtggggcccaaggagccactgccaccaccgcctctgcctccgcctcttccactggagagcccgaggtcaaaaggtcccgggtggaggagcccagtggtgctgtaaccacaccggctggagtgatcgcagctgccggcccccaggggccaggcaccggggagtgaggtcacctgcaacgcgggggagtgggactcacccagcggcgaccccgaagctggacccg

SEQ ID NO: 31162 - DNA, 2202 bp, Artificial Sequence
  derived and/or modified sequence
atggccgaggtgggggaggacagcggggcccgggccctgctggccctgcggagcgccccctgcagccctgtgctgtgtgccgctgctgctgctgctgccttccctgctgctgcccctcctccagccccagcccagccccagcccccacctggccccccacctcctcctcctccacccctgcccccaggggccatcgccggggccggcagcagcggcggcagcagtggagtgtctggggacagcgctgtggccggggccgccccagccctggtggccgctgctgctgcctctgtgcggcagagccctggccctgccctggcccggctggagggccgggagtttgagttcctgatgaggcagcccagcgtgaccatcggcaggaacagcagccagggctctgtggacctgtccatgggcctgagcagcttcatcagccgccgccacctgcagctgtccttccaggagccccacttctacctgcgctgcctgggcaagaatggagtgtttgtggatggagccttccagaggagaggagccccagccctgcagctgcccaagcagtgcaccttccgcttccccagcacagccatcaagatccagttcaccagcctgtaccacaaggaggaggccccagccagccccctgcggcccctgtacccccagatcagccccctgaagatccacatccctgagccagacctgcgctccatggtgtcccctgtgcccagccccaccggcaccatctctgtgcccaacagctgcccagccagccccagaggagctggcagcagcagctacagatttgtgcagaatgtgaccagtgacctgcagctggccgctgagtttgctgccaaggccgccagcgagcagcaggccgacaccagcggcggggacagccccaaggatgagagcaagccacccttctcctatgcccagctgattgtgcaggccatcagcagcgcccaggaccggcagctgaccctgagcggcatctatgcccacatcaccaagcactacccctactacagaacagctgacaagggctggcagaacagcatccgccacaacctgagcctgaaccgctacttcatcaaggtgcccaggagccaggaggagcccgggaagggcagcttctggagaattgatcctgccagcgaggccaagctggtggagcaggccttcaggaagaggcggcagaggggcgtgtcctgcttccgcaccccatttggccccctgagcagccgcagcgccccagccagccccacccaccctggcctgatgagccccaggtctgggggcctgcagaccccagagtgcctgagccgggagggcagccccatcccccatgaccctgagtttggcagcaagctggcctctgtgcctgagtaccgctacagccagagcgcccctggcagccctgtgtctgcccagcccgtcatcatggctgtgcccccccggcccagcagcctggtggccaagcctgtggcctacatgcctgccagcatcgtgaccagccagcagcctgctggccacgccatccacgtggtgcagcaggcccccaccgtgaccatggtgcgggtggtgaccaccagcgccaacagcgccaacggctacatcctgaccagccagggcgccgccggcggcagccatgatgctgctggagctgctgtgctggacctgggcagcgaggcccggggcctggaggagaagcccaccatcgcctttgccaccatcccagctgctggaggagtcatccagacagtggccagccagatggcccctggggtgcccggccacacagtgaccatcctgcagcctgccacccctgtgaccctgggccagcaccacctgcctgtgcgggctgtgacccagaatggcaagcatgctgtgcccaccaacagcctggccggaaatgcctatgccctgaccagccccctgcagctgctggccacccaggccagcagcagcgcccctgtggtggtgaccagggtgtgtgaggtgggccccaaggagcctgctgctgctgtggccgccacagccaccaccaccccagccacagccaccacagccagcgccagcgccagcagcactggagagcctgaggtgaagaggagccgggtggaggagcccagcggggctgtgaccaccccagctggggtgattgctgctgctggcccccagggccctggcactggagagtag

SEQ ID NO: 31163 - DNA, 1752 bp, Artificial Sequence
  derived and/or modified sequence
atgaggcagcccagcgtgaccatcggcaggaacagcagccagggctctgtggacctgtccatgggcctgagcagcttcatcagcagaagacacctgcagctgtccttccaggagccccacttctacctgcgctgcctgggcaagaatggagtgtttgtggatggagccttccagaggagaggagccccagccctgcagctgcccaagcagtgcaccttccgcttccccagcacagccatcaagatccagttcaccagcctgtaccacaaggaggaggccccagccagccccctgcggcccctgtacccccagatcagccccctgaagatccacatccctgagccagacctgcgctccatggtgtcccctgtgcccagccccaccggcaccatctctgtgcccaacagctgcccagccagccccaggggggccggcagcagcagctacagatttgtgcagaatgtgaccagtgacctgcagctggccgctgagtttgctgccaaggccgccagcgagcagcaggccgacaccagcggcggggacagccccaaggatgagagcaagccacccttctcctatgcccagctgattgtgcaggccatcagcagcgcccaggaccggcagctgaccctgagcggcatctatgcccacatcaccaagcactacccctactacagaacagctgacaagggctggcagaacagcatccgccacaacctgagcctgaaccgctacttcatcaaggtgcccaggagccaggaggagcccgggaagggcagcttctggagaattgatcctgccagcgaggccaagctggtggagcaggccttcaggaagaggcggcagaggggcgtgtcctgcttccgcacccccttcggccccctgagcagccgcagcgccccagccagccccacccaccctggcctgatgagccccaggtctgggggcctgcagaccccagaatgtctgagccgggagggcagccccatcccccatgaccctgagtttggcagcaagctggcctctgtgcctgagtaccgctacagccagagcgcccctggcagccctgtgtctgcccagcctgtgatcatggctgtgcccccccggcccagcagcctggtggccaagcctgtggcctacatgcctgccagcatcgtgaccagccagcagcctgctggccacgccatccacgtggtgcagcaggcccccaccgtgaccatggtgcgggtggtgaccaccagcgccaacagcgccaacggctacatcctgaccagccagggcgctgctgggggcagccatgatgctgctggagctgctgtgctggacctgggcagcgaggcccggggcctggaggagaagcccaccatcgcctttgccaccatcccagctgctgggggcgtcatccagacagtggccagccagatggcccctggggtgcccggccacacagtgaccatcctgcagcctgccacccctgtgaccctgggccagcaccacctgcctgtgcgggctgtgacccagaatggcaagcatgctgtgcccaccaacagcctggccggaaatgcctatgccctgaccagccccctgcagctgctggccacccaggccagcagcagcgcccctgtggtggtgaccagggtgtgtgaggtgggccccaaggagcccctgcccccaccacccctgcccccacccctgcccctggagagccccaggagcaaaggacctggctggaggagccctgtggtgctgtag

SEQ ID NO: 31164 - DNA, 2202 bp, Artificial Sequence
  derived and/or modified sequence
atggccgaggtgggcgaggacagcggcgcccgggccctgctggccctacggagtgctccgtgtagtcctgtcttatgcgcggcggccgccgctgctgccttccctgctgcggctccaccaccggcacctgctcagccccaaccccctcccggcccgccaccgccccctccgccgccgcttccacccggcgcaatcgcaggtgctggatcctctggtggctcttccggagtatctggagactcagccgtggcaggggcagccccagcactggtggccgcggccgctgccagcgtgagacaatcacccggccccgctctggcgcgactcgagggacgggagtttgagttcttgatgcggcagcctagtgtaactatcggccggaatagctcacaaggctccgttgatcttagcatgggactgtcctctttcattagccgcaggcatctacagttgtcgtttcaggaaccccatttttacctgagatgcctcgggaagaacggagtcttcgtggatggtgcttttcagcgccgcggcgcccccgccctgcagttacccaaacagtgcacattcagatttccctccaccgcaattaaaattcagtttacatctctgtaccataaagaggaggcccctgcgagtccattgcggcccttgtatccgcagatttccccgcttaagatccacatacccgagcctgacttacggtctatggtgagcccagtgccctctcctactggaaccatctctgtccctaactcctgcccagcatcccccaggggcgccggttcgtccagctatcgattcgtgcaaaacgtgacatcggatctgcagctcgccgccgaatttgccgctaaggctgcgtcagagcagcaggccgacacatccggtggggattcccctaaagatgagagcaaaccccccttctcctatgctcagttgatcgtgcaagctatatctagcgctcaggatcgccaacttaccctgagcgggatatatgcccacatcactaagcactacccttattataggacagcagacaagggctggcagaattctatccgtcataatttgagcctgaatagatatttcatcaaggtgccaagaagccaggaagagccaggaaaaggaagcttctggcgcatagatcccgctagcgaggcaaagctcgtggagcaggcttttagaaagcgccgccagcgcggggtcagttgcttccggactccatttgggcccctcagctccaggagtgcgcccgcctctcccacgcaccccgggttgatgtctccgagaagtggtgggttacaaacgccagagtgcctgagtagggaggggtcgcccatccctcacgatcccgagtttggctcaaagctggcctctgtgccagagtatcggtattcccagtcagctcccggatccccggtttctgcacagcccgtcattatggctgtgccacctagaccgagttcattggtggccaaacctgtcgcttacatgcctgccagcattgtgacttcccagcagcctgcaggacatgcaattcacgtagttcagcaggccccaactgtcactatggttcgcgtggtgactacgtcagcaaacagcgccaacgggtacattctcaccagccagggggctgccggaggttcacacgatgccgcaggggccgccgtgctagacctcggctctgaggccagggggctggaagagaagccgactatcgcctttgcaacgattccagccgccgggggcgtcatccagactgtggccagccagatggcaccaggcgtgccggggcacacagttaccattctccagcctgcaaccccggtgacactcggacagcaccacctccctgtacgtgccgttacacagaatgggaagcatgccgtgccgacaaattccctggctggcaacgcctacgctttgactagcccccttcagctcctagccactcaggctagtagttccgctccagtggtggtgacccgcgtgtgtgaggtgggacctaaggaaccagcagccgctgtggccgccacagccactacgaccccagctacggccacaaccgcctcggcttctgcctcctctaccggcgaacccgaagtgaagcgctcccgagtggaagaacctagcggcgccgtgactacaccggccggagtgatcgcagctgccggaccgcagggccccggcacgggcgagtag

SEQ ID NO: 31165 - DNA, 1752 bp, Artificial Sequence
  derived and/or modified sequence
atgcggcagcccagcgtgaccatcggccggaacagcagccagggctctgtcgatctctccatgggcctgtcctcatttatatcacgcaggcatttgcagctcagctttcaagagcctcacttctatctgcggtgtttaggtaaaaacggggtgtttgtggatggcgcgttccagaggagaggggctcctgctttgcagctgcccaagcagtgcacatttcgcttccccagtactgctattaagattcagtttacttccttgtaccacaaggaggaggcccccgcgtctcctctgcgcccactctatccacaaatttccccattaaagattcatattccagagccagatctgcggtcgatggttagtcccgtgccgtctcccactggtaccatcagtgtgccgaatagctgtcctgcgagccctcgcggcgcaggctccagtagctatcggtttgtacagaacgtaacctctgatttacagctggctgctgaattcgccgccaaagccgcatccgaacagcaggctgatacgagcggcggcgattcaccgaaggacgagtctaagccaccattctcctacgcccagctaatcgtgcaggctattagcagtgctcaggatcgacagctgaccctgagtggcatctacgcccacatcaccaaacattacccgtactatagaaccgccgataaaggatggcaaaattctatccgccataatctttcactgaaccgatacttcataaaggtgccacgtagccaagaggaaccagggaaggggagcttctggagaatagaccctgctagtgaggctaagctggtcgaacaagcctttcgcaagcggcgccagcgaggcgtttcctgctttcgcactcctttcggcccactgagttcccgaagcgcgccagccagtcctacccacccaggcttaatgagtcctcgatcaggtgggctccagacaccagagtgcctatctcgggagggatcacctattccacacgaccctgaatttggatcgaagttggcaagcgtgcccgagtataggtattcccagagcgcgcctggctctcccgtgagcgcccagcccgtcatcatggcagtccctcctcgtccttcttctctggttgcgaagccagtggcttacatgcccgctagtatcgtaacaagccaacagccagctgggcatgcaatacacgtggtccagcaggctcccacagtgaccatggtaagagtggttaccacttctgcgaattctgccaacggctacatattaacatcacagggagctgctggaggctcacatgacgctgccggtgccgctgtgctagatcttgggtccgaggctcgtggcctcgaggagaaacccactatagctttcgcaactatccccgccgctggaggggtcattcagactgtggcctctcagatggcgcccggagtaccaggccataccgtcaccatcctgcaacccgccacccccgtgactcttggccagcaccatctcccagttagggccgttacacagaacggcaagcatgccgtgcccaccaacagtctcgcaggaaatgcctacgctttgacctcacctctgcaactacttgctacccaagcctccagcagtgcacctgtggttgtgacaagggtatgtgaagtgggaccaaaggaacccctgcctcctcctcctttacccccccccctgcccctggaatccccccggtcaaagggccccggctggcggtccccggtggtgctgtag

SEQ ID NO: 31166 - DNA, 2202 bp, Artificial Sequence
  derived and/or modified sequence
atggcagaggtgggtgaggacagtggagcacgcgcattattggcccttcggagcgcaccatgctctcccgtcctttgcgctgccgcagcggctgctgcttttccagctgcagcccctccacccgctccagcccagccgcaacccccacctggaccccctccacctcctccacctccgttgcctcccggagccatcgccggagccggatcttcgggcggatcctctggcgtgagtggtgacagtgccgtcgctggcgctgccccagccctggttgccgctgcggcagcatccgttcgccagtcgcctgggccagcccttgcgaggttggaagggcgagagttcgagtttctgatgagacagccgtctgtgaccatcggcagaaactcctctcaaggcagtgttgatttgagcatgggactcagctctttcatctctcggaggcacttacagttaagcttccaggaaccgcatttttatctgcggtgcctgggcaaaaacggagtgttcgtggacggcgctttccagagaagaggagctccggctctgcagctgcctaagcagtgcacttttagatttcctagtactgcgattaagattcaattcactagcctctatcataaggaagaagcacccgcttccccactgcgccctctctatcctcagatctctccactaaaaatacacatacctgagccagacttgaggagcatggtaagtcccgtgcctagcccgacagggactatttccgttcctaattcctgccctgcgtcgcctcggggtgctggatccagctcctatcgattcgtgcagaatgtgacaagtgacctgcaactcgctgcggaattcgcagcgaaggctgcaagcgagcagcaggctgatacaagcggtggtgacagcccaaaagacgagagcaaaccgcctttttcctacgcccagctaatcgtgcaggcaataagctctgcccaggaccgccaactgaccctctctgggatctatgcccacattaccaaacattacccatactacagaacagcagataaaggttggcagaatagcatacggcacaatctctccctgaatagatactttatcaaggtcccacgatcccaggaggagcccggaaaaggcagcttctggaggatagatcctgcttcagaagcaaaactggttgagcaagcttttagaaaacgcaggcagcggggagtgagctgctttcggaccccctttggacctttgtcctctcggtcagcaccagctagtcccactcatcccggacttatgtctccgcgatctggcggactccagaccccagagtgtttgagcagggaaggaagccccatcccccacgatccggagttcggctccaaactggcctcagtgcccgaataccgctacagtcagtctgcccctgggtcgccggtctcggcacagcctgtcatcatggccgtgcccccaagaccctcctccttggttgccaaacctgttgcctacatgccggcaagcattgtgacttcccagcagcctgcgggacatgccattcatgttgttcagcaggcacccacagttactatggtccgggtcgttactacgtccgccaacagtgcgaatggctacattttgacctcgcagggcgcagcagggggatctcatgatgctgctggcgcagctgtactggacctcggtagtgaggcacggggtctggaggagaagcccactattgccttcgccactattcccgctgccggtggggtcattcaaaccgtcgcttctcagatggcacccggagtaccagggcatactgtaaccatccttcaaccagcaacacccgtgacgctaggacagcaccaccttcctgtgcgagcggtgacccagaatggcaagcacgctgtacctacaaatagcctcgccggaaacgcctacgccttgactagtcctctgcagttgctagcaactcaggcatcctccagcgcacccgtagtggtgactagagtctgtgaagtggggccaaaagaacccgctgccgctgttgccgcaactgcaaccactacacccgctaccgcaaccactgcgagcgccagcgccagctcaaccggggagcccgaagtcaagaggagccgagtagaggaacccagcggcgcagttacaacgccagccggagttatcgccgcagcaggtccacaaggcccaggcactggagaatag

SEQ ID NO: 31167 - DNA, 1752 bp, Artificial Sequence
  derived and/or modified sequence
atgaggcaaccttcagtcaccatagggagaaactcgtcccagggaagtgtcgacctgagtatgggcctgagcagctttatcagtcgcagacatctgcaactgagctttcaggagccacacttctatctccgttgcctgggtaagaatggcgtttttgtcgatggagcttttcagaggagaggggcaccagccctgcagttaccaaaacagtgcacattccggtttcccagtaccgccatcaaaatccagttcacatctctctaccataaagaggaagcaccagcgtcccctctgagaccgttatacccacagatttctccgctgaagatccacatccctgaacccgaccttagatccatggtctccccagtgccgagtcctaccgggaccatcagcgtgccgaacagttgcccagcttcccccagaggcgctgggagcagcagctacagatttgtgcaaaacgtgacaagcgaccttcagctagcggctgaatttgcggcaaaggccgcttctgagcagcaagctgacacctcaggcggtgattcgcctaaagacgagtcaaagccccctttctcttatgcccagctgattgtccaagcaatctcttcagcccaagataggcaacttacactttctgggatatacgcccatatcacaaaacactacccttactataggaccgccgataaggggtggcagaacagtattaggcataatctgtcgttgaatcggtacttcatcaaggtgcctaggtctcaggaagaacctggcaagggatccttttggcggattgatcccgcatcagaggcaaagttagtggaacaggcctttcgtaagcggaggcagcgtggggtgtcatgcttccgcacaccatttggcccactgtcgagccgatcggctccagcttccccaacacacccgggactcatgtctcccaggtcggggggtctgcagacacctgaatgtctgtctcgtgaagggtcgccaatccctcacgatcctgaattcggctccaagctggctagcgtgccagagtaccgctacagccagtctgcgccaggcagccccgtgagtgctcagcctgtcatcatggccgtccctccacgcccttcctctctggttgccaaacctgtcgcatacatgcctgcctccattgtgaccagccaacagccagctggccacgctattcacgtggttcagcaggccccaacagtgactatggtgagggtggtgactacgtctgccaattccgcaaacggctacattttgacttcacagggcgcagcaggcggatcacacgatgcggcaggtgctgccgtcttggacctgggatccgaggccaggggacttgaggaaaaacctactatcgcgttcgctaccatccccgcagcaggcggagtcatccagaccgttgcgagccagatggcacctggtgttcccggacacacagtgaccatcctgcagcccgctacaccagtcacccttgggcagcaccacctgcccgtcagggccgttacccagaacgggaagcacgccgtgcctacaaatagtctcgcaggtaacgcctacgctctgacttcccctctgcagctgttggctactcaggcctcatcaagcgccccagtggtcgtcactcgagtgtgtgaggtaggccctaaagagcctctgcctccgcctccgctgccaccacctcttcctctggaatccccacggagtaaagggccaggttggaggtccccagtcgttctgtag

SEQ ID NO: 31168 - protein, 448 aa, Artificial Sequence
  derived and/or modified sequence
MRRAALRLCALGKGQLTPGRGLTQGPQNPKKQGIFHIHEACSSIHVNHVRDKLREIVGASTNWRDHVKAMEERKLLHSFLAKSQDGLPPRRMKDSYIEVLLPLGSEPELREKYLTVQNTVRFGRILEDLDSLGVLICYMHNKIHSAKMSPLSIVTALVDKIDMCKKSLSPEQDIKFSGHVSWVGKTSMEVKMQMFQLHGDEFCPVLDATFVMVARDSENKGPAFVNPLIPESPEEEELFRQGELNKGRRIAFSSTSLLKMAPSAEERTTIHEMFLSTLDPKTISFRSRVLPSNAVWMENSKLKSLEICHPQERNIFNRIFGGFLMRKAYELAWATACSFGGSRPFVVAVDDIMFQKPVEVGSLLFLSSQVCFTQNNYIQVRVHSEVASLQEKQHTTTNVFHFTFMSEKEVPLVFPKTYGESMLYLDGQRHFNSMSGPATLRKDYLVEP

SEQ ID NO: 31169 - DNA, 1347 bp, Artificial Sequence
  derived and/or modified sequence
atgagacgtgccgcgctgcggctctgtgcgctgggcaaaggccagctcacacctgggcgcgggctaacccagggaccacagaatcccaagaaacaggggattttccacattcacgaggcctgtagttcaatacatgtcaaccacgtgagagataagctaagagaaatcgtgggtgccagcactaactggcgggaccacgtgaaagcaatggaagagaggaaactgttgcacagtttcctggcaaaaagccaggacggactgcctcctaggcgcatgaaggattcttatatcgaggtccttctcccactcggaagtgagccagaacttcgggaaaaataccttaccgttcagaatacagtcagattcggtcggatactggaggacttggacagcttgggtgttctcatttgctacatgcacaacaagatccattctgccaaaatgtctcccttgtctatcgttactgcactggtggataagatcgacatgtgtaagaagtccctatcgcccgaacaggatatcaagttcagcggacacgtcagctgggtgggtaagacatccatggaagtaaagatgcaaatgttccagttgcatggagacgaattctgccctgtgttggatgctaccttcgtaatggtagcacgcgacagtgaaaataagggtccagcttttgtgaacccattgatcccagagagccctgaagaagaggagctgtttcggcagggtgagctaaataagggacggcgtatagcgttctcgtctacctcgttgctgaagatggctcccagtgccgaggagagaactaccattcatgagatgttcctgtctacactggatccaaagaccatatctttcagatccagggtgttaccctcaaacgctgtttggatggagaattcaaaactgaaatctctcgaaatatgtcaccctcaggagcgtaacattttcaatcggatttttgggggtttcctcatgcgcaaggcctatgaactcgcctgggctacagcctgctctttcgggggatcacggccttttgtggtcgcagtcgatgatatcatgtttcaaaagccagtggaagtggggtccctcctcttcttaagtagccaggtttgctttacacaaaacaattatatccaggtgcgggtgcacagtgaggtagcgagtctccaggagaaacagcatacaaccactaatgttttccattttactttcatgtcagaaaaagaggtcccacttgtgtttcccaagacgtacggcgagtcaatgttgtacctcgacggtcagagacattttaactccatgtccggtcccgctactctgcggaaggactatctagtagagccatag

SEQ ID NO: 31170 - DNA, 1347 bp, Artificial Sequence
  derived and/or modified sequence
atgaggcgggccgccctgcggctgtgtgccctgggcaagggccagctgaccccaggccggggcctgacccagggcccccagaaccccaagaagcagggcatcttccacatccacgaggcctgcagcagcatccacgtgaaccacgtgcgggacaagctgcgggagatcgtgggcgccagcaccaactggagggaccacgtgaaggccatggaggagaggaagctgctgcacagcttcctggccaagagccaggacggcctgccccccaggaggatgaaggacagctacatcgaggtgctgctgcccctgggcagcgagcctgagctgcgggagaagtacctgactgtgcagaacacagtgcgcttcggccgcatcctggaggacctggacagcctgggcgtgctgatctgctacatgcacaacaagatccacagcgccaagatgagccccctgagcatcgtgacagccctggtggacaagattgacatgtgcaagaagagcctgagccctgagcaggacatcaagttcagcggccacgtgtcctgggtgggcaagacctccatggaggtgaagatgcagatgttccagctgcatggagatgagttctgccctgtgctggatgccacctttgtgatggtggcccgggacagcgagaacaagggccctgcctttgtgaaccccctcatccctgagagccctgaggaggaggagctgttccggcagggcgagctgaacaagggccgccgcatcgccttcagcagcaccagcctgctgaagatggcccccagcgctgaggagaggaccaccatccacgagatgttcctgagcaccctggaccccaagaccatctccttccgcagccgggtgctgcccagcaatgctgtgtggatggagaacagcaagctgaagagcctggagatctgccacccccaggagaggaacatcttcaaccgcatctttggaggcttcctgatgaggaaggcctatgagctggcctgggccacagcctgcagctttggaggcagccggccctttgtggtggccgtggatgacatcatgttccagaagcctgtggaggtgggcagcctgctcttcctgagcagccaggtgtgcttcacccagaacaactacatccaggtgcgggtgcacagcgaggtggccagcctgcaggagaagcagcacaccaccaccaacgtgttccacttcaccttcatgtctgagaaggaggtgcccctggtgttccccaagacctacggggagagcatgctgtacctggatggccagaggcacttcaacagcatgagcggccctgccaccctgaggaaggactacctggtggagccctag

SEQ ID NO: 31171 - DNA, 1347 bp, Artificial Sequence
  derived and/or modified sequence
atgcggcgggccgccctgcggctgtgcgccctgggcaagggccagctcacacctgggagaggcctgacacaagggccacaaaatcccaagaaacagggtattttccatatacatgaagcatgtagttcaattcacgtgaaccatgtccgggacaagctccgggaaatcgttggtgcttccacaaactggcgtgaccacgtcaaggcgatggaagagcgcaagctgctgcactctttcctcgccaagtcacaggatggtctgccacctcggaggatgaaggacagctacatcgaggtcctgctccccttaggctctgagccggagctgagagagaagtacctgaccgtccaaaataccgtcagattcggtcggatcttagaagacttagactccctaggtgtgcttatctgctatatgcacaacaaaatccattccgccaagatgtctcccctgtccatcgtaacggcgttggttgacaaaatcgacatgtgcaagaagagtctgtctcccgaacaggacattaaattcagtggccacgtgagttgggttgggaagacatctatggaggtcaagatgcagatgttccaactgcacggagacgaattttgccctgtgctggacgccacgttcgtgatggtcgcccgcgactctgagaacaaaggcccagcttttgtaaacccactgatcccagaatcccccgaggaagaagaactctttcgccagggagagctgaataaaggcagacggattgctttttctagtacgagcttattgaagatggctccatccgctgaagaacgcacgacgatacatgagatgttcctgtccactctcgatcctaaaaccatctcctttcgcagtcgcgtgctgccgagtaacgctgtttggatggagaacagcaaattaaaaagcctggaaatctgtcatccacaggaacggaacatttttaatagaatatttgggggctttctcatgcggaaagcctacgagctggcctgggctaccgcctgtagcttcgggggaagtaggccatttgtcgtggccgtggatgacatcatgttccagaaaccagtcgaagttggatctttgctgtttctgtcatcccaggtgtgtttcactcaaaataactacattcaggtgagagtgcattctgaggtggcaagcctccaggaaaagcaacacacgactactaatgtctttcacttcaccttcatgtccgagaaagaggtaccactggtctttccgaaaacatacggggagagtatgttatacctggacgggcagaggcactttaattcaatgtccggacctgcaactctccggaaggattacctggtcgagccttag

SEQ ID NO: 31172 - DNA, 1347 bp, Artificial Sequence
  derived and/or modified sequence
atgcggcgtgctgcccttaggctgtgtgcgcttggtaaaggtcagctgacaccaggacggggtttaacccagggtcctcaaaatccgaaaaagcagggtatattccacattcatgaggcctgctcaagcattcacgtaaaccatgttagggacaaattgcgggagatcgtgggtgcctctactaattggagagatcatgtgaaggccatggaggagcgcaaactattacatagctttttagccaaatcccaggatggtctccccccacggcgaatgaaggatagttacatcgaggtgctgcttcctcttggttccgagccggaactgagagagaagtacttaactgttcagaataccgtgcggtttgggagaatcctggaggatctggactcccttggggtcctgatctgttatatgcataacaaaatccactcagctaaaatgtccccactgagtatagtgacagccctggtggacaaaatagatatgtgtaagaaaagcctgagtccagagcaggacatcaagtttagtggccatgtaagctgggtggggaaaacaagcatggaggtcaaaatgcagatgtttcagctccacggcgacgagttctgcccggttttggatgctacattcgtcatggtggctagagactcagagaacaaaggacccgcatttgtgaaccctctaatccctgagagcccagaggaagaagaactgtttcggcagggagaattgaataaaggccgtcgtattgccttcagttccaccagcttactgaagatggccccatcagcggaggaaagaacaaccatccacgagatgttcctatctaccctggatccaaaaactatctcttttagatcccgggtactgccctctaatgccgtctggatggagaactccaagttgaaaagcttggagatctgtcatcctcaggaaagaaacatcttcaataggatctttggaggctttctgatgcgcaaggcttatgagctggcctgggccactgcatgctcttttggtggctcacggccatttgtagttgccgtggatgatataatgttccagaaaccagtcgaagtgggttccttactgttcctctcctcacaggtgtgtttcacccaaaacaactatatccaggttcgggtgcatagtgaggttgcttccctgcaagagaaacagcacacaacaacaaacgtctttcatttcacctttatgtcagagaaggaagtgccactcgtcttccctaagacttatggggagtcaatgctctatctggacggccagcgccactttaattccatgtcaggccctgcaactttaagaaaggattacctagtggagccctag

SEQ ID NO: 31173 - DNA, 1347 bp, Artificial Sequence
  derived and/or modified sequence
atgagaagagccgccctgagactgtgcgccctgggcaagggccagctgacccccggcagaggcctgacccagggcccccagaaccccaagaagcagggcatcttccacatccacgaggcctgcagcagcatccacgtgaaccacgtgagagacaagctgagagagatcgtgggcgccagcaccaactggagagaccacgtgaaggccatggaggagagaaagctgctgcacagcttcctggccaagagccaggacggcctgccccccagaagaatgaaggacagctacatcgaggtgctgctgcccctgggcagcgagcccgagctgagagagaagtacctgaccgtgcagaacaccgtgagattcggcagaatcctggaggacctggacagcctgggcgtgctgatctgctacatgcacaacaagatccacagcgccaagatgagccccctgagcatcgtgaccgccctggtggacaagatcgacatgtgcaagaagagcctgagccccgagcaggacatcaagttcagcggccacgtgagctgggtgggcaagaccagcatggaggtgaagatgcagatgttccagctgcacggcgacgagttctgccccgtgctggacgccaccttcgtgatggtggccagagacagcgagaacaagggccccgccttcgtgaaccccctgatccccgagagccccgaggaggaggagctgttcagacagggcgagctgaacaagggcagaagaatcgccttcagcagcaccagcctgctgaagatggcccccagcgccgaggagagaaccaccatccacgagatgttcctgagcaccctggaccccaagaccatcagcttcagaagcagagtgctgcccagcaacgccgtgtggatggagaacagcaagctgaagagcctggagatctgccacccccaggagagaaacatcttcaacagaatcttcggcggcttcctgatgagaaaggcctacgagctggcctgggccaccgcctgcagcttcggcggcagcagacccttcgtggtggccgtggacgacatcatgttccagaagcccgtggaggtgggcagcctgctgttcctgagcagccaggtgtgcttcacccagaacaactacatccaggtgagagtgcacagcgaggtggccagcctgcaggagaagcagcacaccaccaccaacgtgttccacttcaccttcatgagcgagaaggaggtgcccctggtgttccccaagacctacggcgagagcatgctgtacctggacggccagagacacttcaacagcatgagcggccccgccaccctgagaaaggactacctggtggagccctag

SEQ ID NO: 31174 - DNA, 3117 bp, Artificial Sequence
  derived and/or modified sequence
gtccggctcccgggctgtcctcagcaagggcgcggtctggtactcgtgcgtcttttatcgcctcagtttccctccgccgactagcgcgcggggcccggttctccatcgcgcgcacggcagcctagcgcaatgaggcgggcagcactgcggctttgtgccttgggcaaagggcagcttactcctggaagaggactgactcaaggaccccagaaccccaagaaacagggaatcttccacattcatgaagcatgttcatctatacatgtgaatcatgttcgagataagttgcgggagatagtaggagcatccacaaactggagagaccatgtgaaggcaatggaagaaaggaaattacttcatagtttcttggctaaatcacaggatggactgcctcctaggagaatgaaggacagttatattgaagttctcttgcctttgggcagtgagcctgaattacgagagaaatatttgactgttcaaaacaccgtaagatttggcaggattcttgaggatcttgacagcttgggagttcttatttgttacatgcacaacaaaatccactccgccaagatgtctcctttatcgatagttacagccctggtggataagattgatatgtgtaagaagagcttgagcccagaacaggacattaagttcagtggccatgttagctgggtcgggaagacatccatggaagtgaagatgcaaatgttccagttacatggtgatgaattttgtcctgttttggatgcaacatttgtaatggtggctcgtgattctgaaaataaagggccggcatttgtaaatccactcatccctgaaagcccagaggaagaggagctctttagacaaggggaattgaacaaggggagaagaattgccttcagctccacgtcgttactgaaaatggcccccagcgctgaggagaggaccaccatacatgagatgtttctcagcacactggatccaaagactataagttttcggagtcgagttttaccctctaatgcagtgtggatggagaattcaaaactgaagagtttggaaatttgccaccctcaggagcggaacattttcaatcggatctttggtggtttccttatgaggaaggcatatgaacttgcgtgggctactgcttgtagctttggtggttctcgaccgtttgtggtagcagtagatgacatcatgtttcagaaacctgttgaggttggctcattgctctttctttcttcacaggtatgctttactcagaataattatattcaagtcagagtacacagtgaagtggcctccctgcaggagaagcagcatacaaccaccaatgtctttcatttcacgttcatgtcggaaaaagaagtgccattggttttcccaaaaacatatggagagtccatgttgtacttagatgggcagcggcatttcaactccatgagtggcccagcgaccttgagaaaggactaccttgtggagccctaagaacaccacatttgttgaaaactagcactctacccacagtgacgtggtatctgatgaagacctgatcgagtgtattgattttagtattgcttcgtgtcctccacacaggaggaggatgtattcagcctttaggatgatcagaaaagcagaaagagagagtggccggatggggctgaggggagaaagaattattaaacaataaatactttcaagacaattttaattgtgaacctaccatgttgcctcccatcttctgaaaaaacaaaaaaattgagaggctgggcgtggtggctcatgcctataatcccagcactttgggaggctgaggcgggcggatcatgaagtcaggagatcaagaccatcctggccaacatggtgaaaccctgtctctactaaaaatacagaaaattagccgtggtggcatgtgcctgtagtcccagctacttgggaggctgaggcaggagaattgcttgaacccaggaggtggaggttgcagtgagctgagattgcaccattgcactccagcctgggcgacagagagagactgtctcaaaaattaattaattaattaattaattgaggataccattggatgcattcttttcttacacatattgcaactgtcagtatacaaggtttcctgccagggtatttggatgacgttctttaaacctaaccacttgctctgtgctgtctaaatcccatcagccgtacatgattcctttgcttccctctatttcccagcttttgttgtcagagggtagatgaaaagttggggcgaagggatttaacaaaagttactgcatccgtaaagatttgtgggaagatttaggtctgaaaccataccattagaaggtgtttagagatgatctagataaggaaatacaggaccatttggtcattctttcattcaccagacagctatttagcacattctgctagtggctccgcaggatatatctgatttaaaaaataggaaccacaataataatagctgcttatgcttatggagcattgccatgtgctagataggcaccatcctcagcccttggcaggtctgagctcctttatttcttccaatcaacactatgaggcaggttctgtaaccccccttagggttaggccactcgggaaactgaagcacagagagtttaagtaacttcctggaggtccgacgcgtaacatgtggaggtgctgggattcaaaaccaggcaatgtgggtcccgggcactcttgaccagtgcctgtacttcttccaaggaatagagcaagggaggtcataccgaatatcacagtgtcacctaggaagcccaagggaggtattcccgttaatctgcagccaaggccgggcgcggtagctcatgcctgtaatcccagcactttgggaggccaaggcggatggatcatgaggtcaggagttcaagaccagcctggccgagatggtgaaaccccgtttctactaaaaatacaaaaattagccgggcgtggtggcggacgcctgtaatcccagctactcgggaggctgaggcagagaactgcttgaacctgggaggcagaggttgcagtgagctgtgatcatgccactgcactccagcctgggtgacagaacgagactccatctcaaaaaaaaaaaaaaaaaaa

SEQ ID NO: 31175 - protein, 142 aa, Artificial Sequence
  derived and/or modified sequence
MNEVVHTSPTIGSNVEEIVINNTRFLMWDIGGQESLRSSWNTYYTNTEFVIVVVDSTDRERISVTREELYKMLAHEDLRKAGLLIFANKQDVKECMTVAEISQFLKLTSIKDHQWHIQACCALTGEGLCQGLEWMMSRLKIR

SEQ ID NO: 31176 - DNA, 429 bp, Artificial Sequence
  derived and/or modified sequence
atgaacgaggtggtgcacaccagccccaccatcggcagcaacgtggaggagatcgtgatcaacaacaccagattcctgatgtgggacatcggcggccaggagagcctgagaagcagctggaacacctactacaccaacaccgagttcgtgatcgtggtggtggacagcaccgacagagagagaatcagcgtgaccagagaggagctgtacaagatgctggcccacgaggacctgagaaaggccggcctgctgatcttcgccaacaagcaggacgtgaaggagtgcatgaccgtggccgagatcagccagttcctgaagctgaccagcatcaaggaccaccagtggcacatccaggcctgctgcgccctgaccggcgagggcctgtgccagggcctggagtggatgatgagcagactgaagatcagatag

SEQ ID NO: 31177 - DNA, 429 bp, Artificial Sequence
  derived and/or modified sequence
atgaacgaagtggtgcacacctcccctactataggttcaaatgtcgaggaaatcgtgattaacaatacaaggttcctcatgtgggacatagggggacaagagtccctgaggtcatcttggaacacctactacactaacactgagtttgtgattgtggtggtagatagcacagatcgtgaaagaatttccgtcaccagagaggaactctataagatgctggcccacgaggatttgaggaaggccggcttactcatttttgcgaataaacaagacgtcaaagaatgcatgacggtcgcagagatcagccagttcttaaagcttacatctataaaggaccatcagtggcacattcaggcttgctgcgcactcacaggagagggcttatgccagggcctggagtggatgatgtcaagacttaaaattcgttag

SEQ ID NO: 31178 - DNA, 429 bp, Artificial Sequence
  derived and/or modified sequence
atgaatgaggttgtgcatacgtctccaaccatcgggagcaatgtcgaggagatagtgatcaacaatactaggttcctcatgtgggacataggaggacaggagagcttaaggagctcctggaatacatattacacgaacactgaatttgtcatcgtggtagtggactctacagaccgtgagagaattagcgtcacacgcgaagagttgtacaagatgcttgctcatgaagatcttcgtaaagccgggctgttaatcttcgccaacaagcaagacgttaaagagtgtatgacagtggcagagatctctcaattccttaagctgacatcaatcaaggatcaccagtggcacatacaagcctgctgtgctctcacaggcgaaggcctttgccaagggttggagtggatgatgtcacggcttaaaattcggtag

SEQ ID NO: 31179 - DNA, 429 bp, Artificial Sequence
  derived and/or modified sequence
atgaatgaggtggtgcacaccagccccaccatcggcagcaatgtggaggagatcgtcatcaacaacacccgcttcctgatgtgggacatcggcggccaggagagcctgcggagctcctggaacacctactacaccaacacagaatttgtgattgtggtggtggacagcacagaccgggagcgcatctctgtgacccgggaggagctgtacaagatgctggcccacgaggacctgaggaaggccggcctgctgatctttgccaacaagcaggatgtgaaggagtgcatgacagtggccgagatcagccagttcctgaagctgaccagcatcaaggaccaccagtggcacatccaggcctgctgtgccctgaccggggagggcctgtgccagggcctggagtggatgatgagccggctgaagatcagatag

SEQ ID NO: 31180 - DNA, 429 bp, Artificial Sequence
  derived and/or modified sequence
atgaacgaggtggtgcacaccagccccaccatcggcagcaacgtggaagaaatagttattaacaatacccggttcctgatgtgggacattggcgggcaggaatcgctgcggtcaagctggaacacttactacacgaacacggagtttgtgattgtggtggtggatagcaccgaccgggagcggataagcgtcacacgcgaagagctgtacaaaatgctcgctcacgaggacctgcggaaggcagggttgctcatattcgccaacaaacaggacgtcaaggagtgcatgactgtcgcagagatctcacaatttctgaaactcacttccattaaggatcaccagtggcatattcaggcatgctgcgcactcacgggagagggactgtgccagggactcgaatggatgatgagtagactgaaaatccggtag

SEQ ID NO: 31181 - DNA, 429 bp, Artificial Sequence
  derived and/or modified sequence
atgaacgaggtggtgcacaccagccccaccatcggcagcaacgtggaggagatcgtgataaacaacacaaggtttctgatgtgggacattggggggcaggagagcctccgctctagctggaacacatattacaccaacactgaattcgtcattgtagtcgtggactctaccgacagagagcggatttccgtgacccgggaagaattatacaagatgctcgcccacgaggatctacgtaaggctggtctgttaatttttgccaacaagcaagatgtcaaggagtgcatgaccgtggccgaaatttcccagtttctgaaactgacctcgatcaaggatcatcagtggcacatccaggcctgttgtgctctcacgggcgaaggattgtgccagggactcgaatggatgatgtctcggctgaaaattaggtag

SEQ ID NO: 31182 - DNA, 429 bp, Artificial Sequence
  derived and/or modified sequence
atgaatgaagtggttcacacatctcctaccataggaagcaatgttgaggagatcgtaattaacaatactcgttttttgatgtgggacattggcggacaggaatcgttaaggtccagctggaacacatattacaccaatacggaattcgtgatcgtagtagtggactcgaccgatcgggaaaggatatctgtgacccgggaagagctgtataaaatgctggcccacgaggacctgagaaaagccggtttgttaattttcgcaaataagcaggatgtaaaggagtgtatgaccgtcgcggaaatcagccagttcctgaagcttactagcatcaaggaccaccagtggcatattcaggcctgttgcgcccttactggcgagggcctctgtcagggtttagagtggatgatgtccagactgaagatccgctag

SEQ ID NO: 31183 - DNA, 429 bp, Artificial Sequence
  derived and/or modified sequence
atgaatgaggtggtgcacaccagtcctactataggaagtaacgtggaggagatcgtgatcaacaataccaggttccttatgtgggacattggaggccaggaatcactccggagctcatggaatacctattacaccaacactgaatttgtcattgtcgtagtggactccacagatagggagcgaatttcagtaactagagaggaactttacaaaatgctggcgcatgaggatctcaggaaagccggactactcatctttgccaacaaacaggacgtgaaggaatgcatgacagtcgccgagatcagccagtttctgaagttgacaagtattaaggaccaccagtggcacatccaagcctgctgtgcactgacgggcgagggactttgtcagggactagagtggatgatgagtaggttgaaaatccgctag

SEQ ID NO: 31184 - protein, 290 aa, Artificial Sequence
  derived and/or modified sequence
MYHGMNPSNGDGFLEQQQQQQQPQSPQRLLAVILWFQLALCFGPAQLTGGFDDLQVCADPGIPENGFRTPSGGVFFEGSVARFHCQDGFKLKGATKRLCLKHFNGTLGWIPSDNSICVQEDCRIPQIEDAEIHNKTYRHGEKLIITCHEGFKIRYPDLHNMVSLCRDDGTWNNLPICQGCLRPLASSNGYVNISELQTSFPVGTVISYRCFPGFKLDGSAYLECLQNLIWSSSPPRCLALEGGRPEHLFPVLYFPHIRLAAAVLYFCPVLKSSPTPAPTCSSTSTTTSLF

SEQ ID NO: 31185 - DNA, 711 bp, Artificial Sequence
  derived and/or modified sequence
atgtaccacggcatgaaccccagcaacggcgacggcttcctggagcagcagcagcagcagcagcagccccagagcccccagagactgctggccgtgatcctgtggttccagctggccctgtgcttcggccccgcccagctgaccggcggcttcgacgacctgcaggtgtgcgccgaccccggcatccccgagaacggcttcagaacccccagcggcggcgtgttcttcgagggcagcgtggccagattccactgccaggacggcttcaagctgaagggcgccaccaagagactgtgcctgaagcacttcaacggcaccctgggctggatccccagcgacaacagcatctgcgtgcaggaggactgcagaatcccccagatcgaggacgccgagatccacaacaagacctacagacacggcgagaagctgatcatcacctgccacgagggcttcaagatcagataccccgacctgcacaacatggtgagcctgtgcagagacgacggcacctggaacaacctgcccatctgccagggctgcctgagacccctggccccccagcacacccccgcccagggcaccagaacccaggcccagggcagccagaagcccgtgaccgccagccaggccctgctgagctgcagcaaggtgtgcatccacctgcccggcgccaagagagcccccaccctgctgagaaccaccctgacctag

SEQ ID NO: 31186 - DNA, 321 bp, Artificial Sequence
  derived and/or modified sequence
atgtaccacggcatgaaccccagcaacggcgacggcttcctggagcagcagcagcagcagcagcagccccagagcccccagagactgctggccgtgatcctgtggttccagctggccctgtgcttcggccccgcccagctgaccggcgtgcacctgaccagagacctgctgggcttcgagggctgccccgagtgcccccccccccccggcttcaaggaggagagccaggagttcgcccagcaggtgacccccctgagaagcctgacccacgccaacccctggagcagcggccccctgtgcatccccaagagctggagctag

SEQ ID NO: 31187 - DNA, 873 bp, Artificial Sequence
  derived and/or modified sequence
atgtaccacggcatgaaccccagcaacggcgacggcttcctggagcagcagcagcagcagcagcagccccagagcccccagagactgctggccgtgatcctgtggttccagctggccctgtgcttcggccccgcccagctgaccggcggcttcgacgacctgcaggtgtgcgccgaccccggcatccccgagaacggcttcagaacccccagcggcggcgtgttcttcgagggcagcgtggccagattccactgccaggacggcttcaagctgaagggcgccaccaagagactgtgcctgaagcacttcaacggcaccctgggctggatccccagcgacaacagcatctgcgtgcaggaggactgcagaatcccccagatcgaggacgccgagatccacaacaagacctacagacacggcgagaagctgatcatcacctgccacgagggcttcaagatcagataccccgacctgcacaacatggtgagcctgtgcagagacgacggcacctggaacaacctgcccatctgccagggctgcctgagacccctggccagcagcaacggctacgtgaacatcagcgagctgcagaccagcttccccgtgggcaccgtgatcagctacagatgcttccccggcttcaagctggacggcagcgcctacctggagtgcctgcagaacctgatctggagcagcagcccccccagatgcctggccctggagggcggcagacccgagcacctgttccccgtgctgtacttcccccacatcagactggccgccgccgtgctgtacttctgccccgtgctgaagagcagccccacccccgcccccacctgcagcagcaccagcaccaccaccagcctgttctag

SEQ ID NO: 31188 - DNA, 711 bp, Artificial Sequence
  derived and/or modified sequence
atgtatcatggaatgaatccgtcaaatggtgacggattcctggaacagcagcaacagcagcagcagccacaatccccccagcggctgcttgcagtgatcctctggtttcaactggccttatgtttcgggcctgctcagctgacaggtggatttgacgacctgcaggtgtgtgcggacccagggattcctgagaacgggttccggaccccatccgggggagtcttttttgaaggcagtgtcgctaggtttcactgccaggacggcttcaagttgaaaggtgccactaagagactctgcctaaagcacttcaatggcacactaggttggatccctagtgataatagtatctgcgttcaagaagactgtcgcatcccacagatcgaagatgcagaaatccataacaaaacctaccgtcacggggagaagctcatcatcacttgccacgaaggctttaaaattcgctacccagatctgcataatatggtttccctgtgccgcgacgatgggacgtggaacaatctacccatctgtcaggggtgcttacgacccctggcgccccaacacacccccgctcaaggcactagaacgcaggctcagggcagtcagaaaccggttactgcctctcaagctctactgtcctgctctaaagtgtgtatccacctacctggtgccaaacgggcgcctacactactgcgtactactttaacctag

SEQ ID NO: 31189 - DNA, 321 bp, Artificial Sequence
  derived and/or modified sequence
atgtatcacgggatgaacccgagcaacggggacggcttcttggaacagcagcagcagcagcaacagccccaatcaccacagagactgcttgctgtcatcctttggttccaactggcactctgtttcggtccagcccagctgactggcgtccatttgacaagggacctactcgggttcgaagggtgtcccgagtgccctccaccccctggtttcaaggaggaatcacaggaatttgcacagcaggtcaccccactcagaagccttactcacgctaacccctggtcttctggaccactctgcattcctaaaagctggtcttag

SEQ ID NO: 31190 - DNA, 873 bp, Artificial Sequence
  derived and/or modified sequence
atgtatcatggtatgaacccttccaacggggacggattcctggagcagcagcagcagcagcagcagccccagtcccctcaacggctgctcgctgttattctgtggtttcaactggcactttgttttggccccgcgcagctgaccggggggttcgacgacctccaggtctgcgctgatcccggcattcccgaaaatggtttcagaactccatccggtggtgtgtttttcgagggctcagtggctcgcttccactgtcaagacggattcaaactgaagggtgcgacgaagcgtctgtgcctgaaacattttaatgggactctcgggtggattccttccgacaattctatatgcgtccaagaagattgccggatccctcagattgaggatgctgagattcataataagacctacaggcacggagaaaaactgattattacctgtcatgagggtttcaagattcggtaccccgatctacacaatatggtgagtctctgtcgagacgacggtacttggaataatcttcccatatgccaaggctgcttgcgacccctggcgtcaagcaatgggtacgtgaatatcagcgaattgcagacaagcttccccgtgggaaccgtgatttcttaccgctgttttccggggtttaagttggacggcagtgcctacttagaatgccttcagaacctgatttggtcgtccagtccaccaagatgcctcgccttagaaggcgggaggccggaacatcttttccccgtcctctacttcccgcacattcgattggctgcagcagttttgtacttttgtccggtgctgaagtcttcccccacacctgcccctacttgtagcagtacttccactactacctctttgttttag

SEQ ID NO: 31191 - DNA, 321 bp, Artificial Sequence
  derived and/or modified sequence
atgtatcatggaatgaatccgagtaatggggatggcttcctagaacagcagcagcagcagcagcagcctcagtctccacagagactcctcgccgtcattctatggttccaactggccttgtgctttgggccagctcaattgacaggggtacatttgacccgggacctgctcggttttgagggctgcccagagtgtccgccacccccagggtttaaggaggagtcccaggagttcgcccagcaagtgacccccctccggtcccttacccacgctaacccatggtccagtggacctctctgtatccctaaatcttggtcttag

SEQ ID NO: 31192 - DNA, 711 bp, Artificial Sequence
  derived and/or modified sequence
atgtaccacggcatgaaccccagcaatggagatggcttcctggagcagcagcagcagcagcagcagccccagagcccccagaggctgctggccgtcatcctgtggttccagctggccctgtgcttcggccctgcccagctgaccggcggctttgatgacctgcaggtgtgtgccgaccccggcatcccagaaaatggcttccgcaccccatctggaggagtcttctttgagggctctgtggcccgcttccactgccaggacggcttcaagctgaagggggccaccaagaggctgtgcctgaagcacttcaacggcaccctgggctggatccccagcgacaacagcatctgtgtgcaggaggactgccgcatcccccagattgaagatgctgagatccacaacaagacctacagacatggagagaagctgatcatcacctgccacgagggcttcaagatccgctacccagacctgcacaacatggtgtccctgtgcagagatgatggcacctggaacaacctgcccatctgccagggctgcctgcggcccctggccccccagcacaccccagcccagggcaccaggacccaggcccagggcagccagaagcctgtgacagccagccaggccctgctgagctgcagcaaggtgtgcatccacctgcccggggccaagagggcccccaccctgctgcggaccaccctgacctag

SEQ ID NO: 31193 - DNA, 321 bp, Artificial Sequence
  derived and/or modified sequence
atgtaccacggcatgaaccccagcaatggagatggcttcctggagcagcagcagcagcagcagcagccccagagcccccagaggctgctggccgtcatcctgtggttccagctggccctgtgcttcggccctgcccagctgactggagtgcacctgacccgggacctgctgggctttgagggctgcccagagtgccccccacctcctggcttcaaggaggagagccaggagtttgcccagcaggtgacccccctgcggagcctgacccacgccaacccctggagcagcggccccctgtgcatccccaagtcctggagctag

SEQ ID NO: 31194 - DNA, 873 bp, Artificial Sequence
  derived and/or modified sequence
atgtaccacggcatgaaccccagcaatggagatggcttcctggagcagcagcagcagcagcagcagccccagagcccccagaggctgctggccgtcatcctgtggttccagctggccctgtgcttcggccctgcccagctgaccggcggctttgatgacctgcaggtgtgtgccgaccccggcatcccagaaaatggcttccgcaccccatctggaggagtcttctttgagggctctgtggcccgcttccactgccaggacggcttcaagctgaagggggccaccaagaggctgtgcctgaagcacttcaacggcaccctgggctggatccccagcgacaacagcatctgtgtgcaggaggactgccgcatcccccagattgaagatgctgagatccacaacaagacctacagacatggagagaagctgatcatcacctgccacgagggcttcaagatccgctacccagacctgcacaacatggtgtccctgtgcagagatgatggcacctggaacaacctgcccatctgccagggctgcctgcggcccctggccagcagcaatggctacgtgaacatcagcgagctgcagaccagcttccctgtgggcaccgtcatctcctaccgctgcttccctggcttcaagctggatggcagcgcctacctggagtgcctgcagaacctgatctggagcagcagccccccacgctgcctggccctggagggcggccggcctgagcacctgtttcctgtgctgtacttcccccacatccggctggccgctgctgtgctgtacttctgccctgtgctgaagagcagccccaccccagcccccacctgcagcagcaccagcaccaccaccagcctcttctag

SEQ ID NO: 31195 - DNA, 711 bp, Artificial Sequence
  derived and/or modified sequence
atgtaccacggcatgaaccccagcaacggcgacggcttcctggagcaacagcagcagcagcagcagccccagtctccccagcgcctgctggcggtgatcctgtggttccagttagccctttgctttggccctgctcagctgactggcggctttgacgacctgcaggtatgtgcagacccaggaatccccgaaaacgggttcaggaccccatccggaggggtgttctttgagggtagcgtggcccgctttcactgccaggatggatttaaacttaaaggcgctactaaacggctatgcctcaagcatttcaatggtacacttggctggatcccctctgacaacagcatttgtgtacaagaggattgtcgcataccccagatcgaggatgccgaaatccacaacaaaacttacagacacggcgaaaagctgatcattacctgccatgaaggctttaagatacggtaccccgatctgcacaatatggtttcactttgtagagacgatggaacctggaataacctgcccatatgccagggctgcttacgccctttggctcctcagcacacacctgctcagggcacgcgaactcaagcccaaggctctcagaagcccgtcaccgccagtcaggcactgctttcttgttctaaggtctgtattcaccttccaggggcaaagagagctcctacactgctacggacaactttgacatag

SEQ ID NO: 31196 - DNA, 321 bp, Artificial Sequence
  derived and/or modified sequence
atgtaccacggcatgaaccccagcaacggcgacggcttcctggagcaacagcaacagcaacagcagcctcagagtccgcaaagactgctggccgtgatcctttggtttcagttggccctctgctttggccctgctcagcttaccggtgtccacctgacacgcgatctgttagggttcgagggctgccccgagtgcccccctccaccaggctttaaggaggaatcccaagagtttgcccagcaggttaccccactgcgttctctgacccacgcaaacccatggagctcgggacccctttgcattcccaaatcctggtcatag

SEQ ID NO: 31197 - DNA, 873 bp, Artificial Sequence
  derived and/or modified sequence
atgtaccacggcatgaaccccagcaacggcgacggcttcctggagcaacagcagcaacagcaacaaccccaaagccctcagcgcctgcttgctgtgatcctctggtttcagctcgccctctgtttcggcccagcgcaactgaccggcggttttgatgacctgcaagtgtgtgcggatcccggaatcccagagaatggcttccgtaccccaagcggaggggttttctttgagggatccgtggccagattccactgtcaggatggctttaagctcaaaggcgccactaagagactgtgccttaaacactttaatggcaccttgggctggatcccttccgataacagcatctgcgtgcaagaggattgtcggattccgcaaatagaagacgccgagatacacaataaaacctacagacatggggaaaagctcatcataacgtgccacgagggcttcaaaatccggtatcccgacctccataacatggtgtctctctgccgggacgatggcacctggaacaatcttcccatttgccagggttgtctgcggccactggcgagcagtaatggctacgtgaacattagcgaactccaaacgtcctttccggttgggacggtgatcagttatcgatgcttcccgggattcaagctggacggaagcgcttacctcgagtgtttgcagaacctcatatggtcctcctccccaccacgatgtctggcattagagggcggaaggccagagcatctgttccccgtcttgtattttcctcatatccggctggccgcagccgtactttacttttgtccagtactgaaaagttccccaacccccgcacctacctgttcttcgacctctacaactacctctctgttttag

SEQ ID NO: 31198 - DNA, 321 bp, Artificial Sequence
  derived and/or modified sequence
atgtaccacggcatgaaccccagcaacggcgacggcttcctggagcagcaacaacagcagcaacagcctcagtctccccagcgactgctggcagtgatcttatggtttcagctcgctttgtgttttggccccgcccagttgaccggtgttcatttgacccgggaccttcttggatttgagggctgcccagaatgcccccccccccctggattcaaagaagagtctcaggagttcgcacaacaagttaccccgctgcgcagcctgacacatgccaacccatggtcgagcgggcctttgtgtattccgaagtcatggtcgtag

SEQ ID NO: 31199 - DNA, 711 bp, Artificial Sequence
  derived and/or modified sequence
atgtaccacggcatgaacccctcgaatggtgacgggttcctggaacagcagcagcagcaacagcagccacaaagtccacagcgcttgctggctgtaattctgtggttccagctcgccctatgctttggccctgctcagctgaccggtggcttcgatgacttacaggtgtgcgctgatccgggtatcccagaaaacgggttccgtaccccaagcggtggcgtgttctttgaaggcagcgtggccaggttccattgtcaggatggctttaagctgaaaggggctaccaagcgcctttgtctcaaacatttcaacggtacattgggatggattccttccgataattccatctgtgtgcaggaggactgtaggattccccagatcgaagacgcggagatccataataagacgtataggcacggcgaaaaacttataatcacgtgccatgaaggtttcaagatacgctatcctgatttacataacatggtgtccctgtgccgcgacgacggtacctggaacaatctccctatttgccagggatgtctgaggccactcgcaccccagcacacccccgcacaggggactcgcacccaggctcagggctcccagaaaccggtaaccgcatctcaggctctgctcagctgtagtaaagtgtgcattcatctgccaggggctaagcgcgcaccaacgctgctgcggaccaccctcacgtag

SEQ ID NO: 31200 - DNA, 321 bp, Artificial Sequence
  derived and/or modified sequence
atgtaccacggaatgaacccctctaacggagacggttttctggaacagcagcagcagcagcaacagcctcagtcgccgcaaagattactggctgtaatattatggttccagctggccttgtgcttcggcccagctcagctaactggtgtacaccttactcgcgatttgcttggtttcgagggctgtcctgaatgtcctcccccacctgggttcaaagaagaatcgcaggagttcgctcagcaggtgacacccctcagatccttaacgcatgccaacccttggtctagcggcccactatgcattccaaagtcgtggtcctag

SEQ ID NO: 31201 - DNA, 873 bp, Artificial Sequence
  derived and/or modified sequence
atgtaccacggcatgaatcccagcaacggtgacggcttcctggaacagcagcagcagcagcaacaaccccagagtccacagcgcctgctggcagtgatcctctggtttcagctcgcactgtgctttggtccggctcagttgacaggcggattcgacgacttgcaggtgtgtgcagatcctgggattcccgagaacggcttccgaacaccttcaggcggtgtattttttgagggatctgtggctcggttccactgccaggatggcttcaaactaaagggggctacgaagcggctgtgtctgaaacatttcaacgggacactcggctggattccatcagataatagtatctgtgttcaggaggattgtcgcatccctcagattgaggacgccgaaatccataataaaacctacagacacggagagaagttgatcattacctgtcatgagggctttaaaatcagataccctgatctgcataatatggtttccttatgtagagatgacggcacttggaataatttgcctatttgccagggttgcctgaggccacttgcctcatccaacgggtatgttaatatctccgaactgcagacaagtttcccggttgggaccgtgataagttatagatgcttccctggcttcaagctggatggcagcgcatatctggagtgtctccagaacctaatctggtcgtccagcccccctagatgtctggccctagagggcggacggccagagcatctattccctgtactgtattttccccatatacggcttgccgctgctgtactctatttctgccccgtcctcaaatcaagtcccactcctgcacccacctgctccagtacctcaaccacaacgtcgctcttttag

SEQ ID NO: 31202 - DNA, 321 bp, Artificial Sequence
  derived and/or modified sequence
atgtatcatgggatgaatccttctaacggggacggattcctggaacagcagcagcaacagcaacagccacagtcacctcagagattgttggccgtgatcctctggtttcagctggcactctgctttgggccagcacagctgaccggagtgcatctgactagagacctgctcggttttgaaggctgccctgaatgcccccctccacctggatttaaagaggaatcccaggaatttgctcagcaggtgacccctctgcgaagtctcactcacgccaatccatggagttctggacctctgtgcattcctaaaagctggagctag

SEQ ID NO: 31203 - DNA, 892 bp, Artificial Sequence
  derived and/or modified sequence
gggagctggagccgagcgccgccgccgaagcttccgtctcgctcgctcgcgcagcggcggcagcagaggtcgcgcacagatgcgggttagactggcggggggaggaggcggaggagggaaggaagctgcatgcatgagacccacagactcttgcaagctggatgccctctgtggatgaaagatgtatcatggaatgaacccgagcaatggagatggatttctagagcagcagcagcagcagcagcaacctcagtccccccagagactcttggccgtgatcctgtggtttcagctggcgctgtgcttcggccctgcacagctcacgggcgggttcgatgaccttcaagtgtgtgctgaccccggcattcccgagaatggcttcaggacccccagcggaggggttttctttgaaggctctgtagcccgatttcactgccaagacggattcaagctgaagggcgctacaaagagactgtgtttgaagcattttaatggaaccctaggctggatcccaagtgataattccatctgtgtgcaagaagattgccgtatccctcaaatcgaagatgctgagattcataacaagacatatagacatggagagaagctaatcatcacttgtcatgaaggattcaagatccggtaccccgacctacacaatatggtttcattatgtcgcgatgatggaacgtggaataatctgcccatctgtcaaggctgcctgagacctctagccccccagcataccccggctcaggggacacggacacaggcccaggggagtcagaaacctgtgacagcgtctcaggctcttctgagctgctccaaagtctgtattcacctcccaggtgccaagagagcacccaccctgcttcggacaaccctgacataa

SEQ ID NO: 31204 - DNA, 727 bp, Artificial Sequence
  derived and/or modified sequence
tgccacattgtgagattcccagagtgaaatgtataggcccagggaaaagtgtcttcgcggccccgagacgcggggaggctctagactttcctgtggtgggcacagctgctgaatcccggggaccggcgcggagccaatactcttgcaagctggatgccctctgtggatgaaagatgtatcatggaatgaacccgagcaatggagatggatttctagagcagcagcagcagcagcagcaacctcagtccccccagagactcttggccgtgatcctgtggtttcagctggcgctgtgcttcggccctgcacagctcacgggcgtacacttgaccagagacctgctgggctttgagggatgcccagagtgccccccacccccaggcttcaaggaagagagccaagagtttgctcaacaagtgactcctttaaggtctctgactcatgcaaacccctggtccagcggccctctctgcatacccaagtcatggtcctagtgcagctgaattgagctcctggagccctcatttggttcatgtcgctgtagtgctgtgctctgtgccagcaggtggaaacagatgctttctgactgactcactgatttgtagtgttaagtcccttagttttattgagaaacattttcttacatggtagagtgaaagcttttcattcaatgctacatctaaaattcacaatttcaaactgcgcttaatctgtaagcaaagtccca

SEQ ID NO: 31205 - DNA, 1056 bp, Artificial Sequence
  derived and/or modified sequence
gtctcgctcgctcgcgcagcggcggcagcagaggtcgcgcacagatgcgggttagactggcggggggaggaggcggaggagggaaggaagctgcatgcatgagacccacagactcttgcaagctggatgccctctgtggatgaaagatgtatcatggaatgaacccgagcaatggagatggatttctagagcagcagcagcagcagcagcaacctcagtccccccagagactcttggccgtgatcctgtggtttcagctggcgctgtgcttcggccctgcacagctcacgggcgggttcgatgaccttcaagtgtgtgctgaccccggcattcccgagaatggcttcaggacccccagcggaggggttttctttgaaggctctgtagcccgatttcactgccaagacggattcaagctgaagggcgctacaaagagactgtgtttgaagcattttaatggaaccctaggctggatcccaagtgataattccatctgtgtgcaagaagattgccgtatccctcaaatcgaagatgctgagattcataacaagacatatagacatggagagaagctaatcatcacttgtcatgaaggattcaagatccggtaccccgacctacacaatatggtttcattatgtcgcgatgatggaacgtggaataatctgcccatctgtcaaggctgcctgagacctctagcctcttctaatggctatgtaaacatctctgagctccagacctccttcccggtggggactgtgatctcctatcgctgctttcccggatttaaacttgatgggtctgcgtatcttgagtgcttacaaaaccttatctggtcgtccagcccaccccggtgccttgctctggaaggaggaagacctgaacatcttttccctgtcctttatttcccacacatcaggttggcagctgctgtgctttatttttgccctgtgttaaagtcctctcccaccccagcacctacctgttcctcaactagcaccaccacatctctgttctaaatgttgttctcctgcaataaaggacgtttgaattaaa

SEQ ID NO: 31206 - DNA, 502 bp, Artificial Sequence
  derived and/or modified sequence
gggagctggagccgagcgccgccgccgaagcttccgtctcgctcgctcgcgcagcggcggcagcagaggtcgcgcacagatgcgggttagactggcggggggaggaggcggaggagggaaggaagctgcatgcatgagacccacagactcttgcaagctggatgccctctgtggatgaaagatgtatcatggaatgaacccgagcaatggagatggatttctagagcagcagcagcagcagcagcaacctcagtccccccagagactcttggccgtgatcctgtggtttcagctggcgctgtgcttcggccctgcacagctcacgggcgtacacttgaccagagacctgctgggctttgagggatgcccagagtgccccccacccccaggcttcaaggaagagagccaagagtttgctcaacaagtgactcctttaaggtctctgactcatgcaaacccctggtccagcggccctctctgcatacccaagtcatggtcctag

SEQ ID NO: 31207 - protein, 300 aa, Artificial Sequence [sequence omitted]

SEQ ID NO: 31208 - protein, 242 aa, Artificial Sequence
  derived and/or modified sequence
MEKTQETVQRILLEPYKYLLQLPGKQVRTKLSQAFNHWLKVPEDKLQIIIEVTEMLHNASLLIDDIEDNSKLRRGFPVAHSIYGIPSVINSANYVYFLGLEKVLTLDHPDAVKLFTRQLLELHQGQGLDIYWRDNYTCPTEEEYKAMVLQKTGGLFGLAVGLMQLFSDYKEDLKPLLNTLGLFFQIRDDYANLHSKEYSENKSFCEDLTEGKFSFPTIHAIWSRPESTQVQNILRQRTENID

SEQ ID NO: 31209 - protein, 230 aa, Artificial Sequence
  derived and/or modified sequence
MEKTQETVQRILLEPYKYLLQLPGKQVRTKLSQAFNHWLKVPEDKLQIIIEVTEMLHNASLLIDDIEDNSKLRRGFPVAHSIYGIPSVINSANYVYFLGLEKVLTLDHPDAVKLFTRQLLELHQGQGLDIYWRDNYTCPTEEEYKAMVLQKTGGLFGLAVGLMQLFSDYKEDLKPLLNTLGLFFQIRDDYANLHSKEYSENKSFCEDLTEGKFSFPTIHAIWSRPESTQV

SEQ ID NO: 31210 - DNA, 903 bp, Artificial Sequence
  derived and/or modified sequence
atggagaaaacgcaggagactgtgcagcgcattctgctcgagccatataaatacttgctgcagctgcccgggaagcaggttcggaccaagctgagtcaggccttcaaccactggttaaaagtgccagaggataagcttcagatcattatcgaggtgaccgaaatgctgcacaacgcctcactgctgatagacgatatcgaggacaacagcaagctaaggcggggtttcccggtcgcacactcgatctacgggatacctagcgtcataaattccgcgaattacgtgtatttcctggggcttgaaaaagtactgacacttgaccatcccgatgcggtcaagctgttcacacggcagttgctcgagctccatcagggccagggcctggacatatattggcgggacaattacacatgtcctactgaagaggagtataaggcaatggtgttgcagaagacgggtggactctttggcctggcagttggcctgatgcagctgttctccgactataaagaggacctcaaacctctcctgaataccctgggtttgttctttcagattagggatgattacgccaacttgcactccaaagagtacagtgaaaataagtccttctgcgaggacttgacagaaggtaaattctcattcccgaccatccacgctatctggtccaggccagagagcacacaagttcagaacatcctgagacagaggacagagaacattgacatcaagaagtactgcgttcattatctggaagatgtcggcagttttgaatatacccggaacactcttaaggaacttgaagctaaggcttacaaacagatcgacgctaggggcgggaaccctgagctggtagctctggtgaagcaccttagcaaaatgttcaaggaggagaatgaatag

SEQ ID NO: 31211 - DNA, 903 bp, Artificial Sequence
  derived and/or modified sequence
atggaaaagacacaagagacggtgcaaagaatcctgctagaaccatacaagtatctgcttcagctgcctgggaagcaggttaggacaaaattaagccaggctttcaaccattggttaaaggtccctgaagacaaattgcagattatcattgaagtgactgagatgcttcacaacgcaagtctgcttatcgacgacatcgaggataacagtaagctccgaagaggcttcccagtggcccactcaatttatgggattccctcggttatcaattctgccaactatgtatattttctcggtctggaaaaagttctcaccctagatcacccggatgctgtcaagttgtttacacgtcagttactggagctacaccagggacagggtctggacatatattggagagataactatacatgtccaacagaagaagagtataaggcaatggtgctgcaaaagaccggggggctgtttgggctcgcggttggccttatgcagctgttcagcgattataaagaggatctcaagccacttctcaacacgcttggactgttttttcagatccgggacgattatgctaatctgcactccaaggagtactcggagaacaaatcattttgtgaggaccttaccgaaggcaaattttcctttcctactatccacgccatctggtcgagacccgaatcaacacaagtgcagaatatcctgcgtcagcggacagaaaacattgatattaagaagtattgtgtgcactacctcgaggacgttggctctttcgagtacacccggaacactttaaaagagctggaagctaaggcttacaagcagatagatgctaggggcggaaatcctgagctagtcgctctagtcaagcatttatcaaaaatgtttaaggaagaaaacgagtag

SEQ ID NO: 31212 - DNA, 729 bp, Artificial Sequence
  derived and/or modified sequence
atggagaagacccaggagaccgtacaacgcatccttttagagccttacaagtatttactgcaacttccaggaaagcaggtccgtacaaagttaagccaggcgttcaatcactggcttaaagttccagaggacaaactgcagattataatcgaggttacagaaatgttgcacaacgcttctctgctgatcgacgacatcgaggacaatagcaagctgagacgcggcttccccgtggcccacagcatctatggtataccttccgtaattaacagtgcaaattacgtatatttcctagggttggaaaaagtcctgacgctagaccatccagacgcagtgaaactgttcactagacagctgttagagctgcaccaggggcagggcctggatatctattggcgggacaactacacctgtccaacagaggaggagtacaaagctatggtgctgcagaaaacaggcggcctctttgggctcgctgttggcctgatgcagctgttcagcgattacaaagaggacctgaagcccctcttaaacactctggggttgttcttccaaatcagggatgattatgcgaatctccacagcaaagagtactccgagaacaaatccttctgcgaagacctgaccgagggcaagttcagtttcccaaccatccatgctatatggagccgtccagaatccactcaagtgcaaaatattctcaggcaaaggacagaaaacatcgactag

SEQ ID NO: 31213 - DNA, 903 bp, Artificial Sequence
  derived and/or modified sequence
atggagaagacgcaggaaacagttcagcgtattctgctggagccctacaagtatctactccaactgcctgggaagcaggtgcggacaaagctcagtcaggcatttaatcattggcttaaggtgcctgaagacaaattgcagatcattattgaagtcactgagatgctacataacgcctctctgcttatcgatgatattgaggataacagtaaactccgaagaggtttcccggtggcccactccatctatgggattccatctgtgataaactcggctaactacgtgtattttctggggctcgagaaggttttgacattagatcatccggatgctgtaaagctttttacacggcagcttctcgaactacatcagggacagggcctcgatatctactggcgagacaattatacgtgccctaccgaggaagagtataaggccatggttttgcaaaaaactggtgggttgtttggcctggccgtaggactgatgcagctgttttccgattacaaggaagaccttaagcccctgctcaacaccctggggctatttttccagatccgcgacgactatgcaaacttacatagcaaggagtattccgaaaataagtccttttgcgaagacctcaccgaggggaaattctccttccccacaatacacgcaatatggagccggccagagtccacgcaggtgcaaaatatccttcgtcagagaaccgagaatatcgatatcaaaaaatactgtgtccactacttggaagatgtgggcagctttgaatacacaaggaacaccctcaaagaactagaggccaaggcctataaacaaatcgatgcccgcgggggaaaccccgagctggtagcattggtgaaacacctctctaaaatgtttaaagaagagaacgaatag

SEQ ID NO: 31214 - DNA, 903 bp, Artificial Sequence
  derived and/or modified sequence
atggagaagacgcaggagaccgtccagcgtatcttgctggagccgtataaatatcttcttcagttgccagggaaacaggtccggaccaaattaagccaggcttttaaccattggctgaaagtgcctgaagacaagttacagatcattattgaagtaaccgagatgctccataacgcctctctgcttatcgacgatattgaagacaactcaaagttgagacgcggatttcccgtcgcacacagcatctatggcattccgtccgttataaactccgccaactatgtgtacttcctgggtcttgagaaagtccttactcttgaccacccagacgccgtgaagctgttcaccaggcaactcctggagctgcatcagggccagggcctggacatctactggagagataattatacttgtcctactgaagaggagtacaaagcgatggttttgcagaagaccggagggctatttggcctggccgtcggtcttatgcaactgttctccgattataaagaagatctcaaacccctactgaataccctcggcctattctttcaaattcgggacgattacgctaacttgcactccaaagaatatagtgagaataagtccttttgcgaagacttgaccgaagggaaattctctttccccactatccacgccatttggtcacgacccgaatccacacaggtgcagaatatcctgcgccagaggacagaaaatatcgacatcaaaaaatattgcgtccattacttggaggacgtggggagttttgagtacactagaaatactttaaaggagctcgaggcgaaggcctataaacagattgacgcccgcggaggcaatccagaattggtcgccttggtgaagcacttgagcaagatgtttaaggaagagaatgagtag

SEQ ID NO: 31215 - DNA, 693 bp, Artificial Sequence
  derived and/or modified sequence
atggagaaaacccaagagaccgttcagcgcatcctcctggaaccttataagtatttgcttcagctaccaggtaagcaggtgcgtacaaagctctcacaggccttcaaccactggttgaaggtaccggaagacaagcttcaaattatcatagaggtgaccgagatgctacacaatgcctccttgttaattgacgacatcgaggacaatagcaaactgcggagaggctttcctgtggcacactccatctacgggatcccatccgtcattaactctgcaaattacgtgtactttctgggactggagaaagtcctaacactggaccacccggatgcagtgaagctctttacccgccagttgctcgaacttcaccagggacaggggcttgatatctactggcgtgataactacacttgtcccaccgaggaagaatacaaagccatggttttgcagaagaccggcggactttttgggttggctgtgggcctgatgcagctgtttagcgactataaagaagacctaaagcctctcctgaataccctgggtctgttctttcagattcgagacgactatgcgaatctgcactccaaggaatattctgaaaataagtctttttgtgaagatcttactgaaggaaaattctctttccctaccatccacgccatttggagtaggcccgagagtacccaggtctag

SEQ ID NO: 31216 - DNA, 2895 bp, Artificial Sequence
  derived and/or modified sequence
agtgtgaccgggatggcgcattttcttgcaccaactaatgcggtgtcgctggcggctgaggagggcggagagttctgtggtgaaatagtgggaaggattcatgtaggcatcgggaagagcctaagtccacattataaaataggaagttgatgcggggtacagttactcccggaccggcggcgtgaaagtcgtgatatcatcgttgaactattagctttgaagtttaaatccaatggagaagactcaagaaacagtccaaagaattcttctagaaccctataaatacttacttcagttaccaggtaaacaagtgagaaccaaactttcacaggcatttaatcattggctgaaagttccagaggacaagctacagattattattgaagtgacagaaatgttgcataatgccagtttactcatcgatgatattgaagacaactcaaaactccgacgtggctttccagtggcccacagcatctatggaatcccatctgtcatcaattctgccaattacgtgtatttccttggcttggagaaagtcttaacccttgatcacccagatgcagtgaagctttttacccgccagcttttggaactccatcagggacaaggcctagatatttactggagggataattacacttgtcccactgaagaagaatataaagctatggtgctgcagaaaacaggtggactgtttggattagcagtaggtctcatgcagttgttctctgattacaaagaagatttaaaaccgctacttaatacacttgggctctttttccaaattagggatgattatgctaatctacactccaaagaatatagtgaaaacaaaagtttttgtgaagatctgacagagggaaagttctcatttcctactattcatgctatttggtcaaggcctgaaagcacccaggtgcagaatatcttgcgccagagaacagaaaacatagatataaaaaaatactgtgtacattatcttgaggatgtaggttcttttgaatacactcgtaatacccttaaagagcttgaagctaaagcctataaacagattgatgcacgtggtgggaaccctgagctagtagccttagtaaaacacttaagtaagatgttcaaagaagaaaatgaataatgttaagccattcttgattggacctcatagcttattttagttaatcttttttttgtcttttagccttaccaccttttaaaaaatttgttattctccagaaacagtaaataggtgagtaggggtggtgcaagtgaattcgttttcatttagaagcccctctgtacagataatcaaaattcaaagttgaaagaatcaaaagcagccacagttatgtaggtctgatttgaatgtcataattgcagtgacaggacattgccaccaactctatcctactaccatcaatgttgtgtttattccgtcaataaaaaagacttgcttccaggaatttttatccatacactttctaactgtactatctgggcagttccaagccagtttctattagctagctggaccaaagaccacaaatctctttttttcctaaacgctgctgtaaggaatatctcacttttccccccggaaacaccctcactgaagtcttctatgaaaaggctgataatgggctgggcgcggtggctcacgcctgtaatcccagcactttgggaggccgaggcgggcagatcacgaggtcaggagatcgagaccatcctgacacggtgaaaccctgtctctactaaaaatacaaaaaattagctgggcgtggtggtgggcgcctgtagtcccagctactcgggaggctgaggcaggagaatggtgtgaacccaggaggcggagcttgcagtgagccgagatagtgcctctgcactccagcctgggtgacagagcgagactccgtctcaaaaaaaagggctgataatgataaacagtgagcactccggtcctttttcttaggttttccttttttccttcctctccaccccacaagttttgctttttaaccaaggtgtctctgcttgatgaaattcacatgctagtctaaatctttttttctcccttgtaacatttatgtgccccaaactggttagtatatgggtacagcattccctttccaattgggaagcggaaaaagagagtatgggatattttagaagggagcctttgaaccttattatatttccccatcattgatagtgacaatcttaaaagggttgttttcttaccttaagtacaaaagcatggaaaaatgcgcttttccttcccgcccacatcaccaccccgacttgaagacagtaggtgcttgaatggaaagtgagtaggcatctttaatcgccctgattaaaggaaagtgttagcctgagagggcctgactgaaaagtaaccaaaggcttaatatcaaacactaattagctttttagtgccttaaccctgacctggttaccagttttctgtagtttctacacccaagccactgaagtcatctgtggcccaagaggtaggacaaaaaaaaaaaaaaaaaaagctgatttcaatatttgatttgttgacatcccaaaatgaaagttttatgtttcccttagaaacatgttttgcttggttctatagtatgttacttaggatctatttaccatatatttgtatgagaaatcctcacccaagcattcaacctaaatctttgaaaagttgggtgctgtctttagtaacttttaaaatagtttaaatctcccattttaatagtgataaggaaacctgttaaaatcatggctattgatgttatagtatggaaagttgaactttatgaacccatacttttaaaaagcatttttaaaaatctaacactgactatagaaacaaattaaaatgtctacctttaagtataaaaa

SEQ ID NO: 31217 - DNA, 2740 bp, Artificial Sequence
  derived and/or modified sequence
cgcgcaaatcctcgtccgcgagaactgcaaggcccgcaatgccctgcgcctgcgtggaccgattagctttgaagtttaaatccaatggagaagactcaagaaacagtccaaagaattcttctagaaccctataaatacttacttcagttaccaggtaaacaagtgagaaccaaactttcacaggcatttaatcattggctgaaagttccagaggacaagctacagattattattgaagtgacagaaatgttgcataatgccagtttactcatcgatgatattgaagacaactcaaaactccgacgtggctttccagtggcccacagcatctatggaatcccatctgtcatcaattctgccaattacgtgtatttccttggcttggagaaagtcttaacccttgatcacccagatgcagtgaagctttttacccgccagcttttggaactccatcagggacaaggcctagatatttactggagggataattacacttgtcccactgaagaagaatataaagctatggtgctgcagaaaacaggtggactgtttggattagcagtaggtctcatgcagttgttctctgattacaaagaagatttaaaaccgctacttaatacacttgggctctttttccaaattagggatgattatgctaatctacactccaaagaatatagtgaaaacaaaagtttttgtgaagatctgacagagggaaagttctcatttcctactattcatgctatttggtcaaggcctgaaagcacccaggtgcagaatatcttgcgccagagaacagaaaacatagatataaaaaaatactgtgtacattatcttgaggatgtaggttcttttgaatacactcgtaatacccttaaagagcttgaagctaaagcctataaacagattgatgcacgtggtgggaaccctgagctagtagccttagtaaaacacttaagtaagatgttcaaagaagaaaatgaataatgttaagccattcttgattggacctcatagcttattttagttaatcttttttttgtcttttagccttaccaccttttaaaaaatttgttattctccagaaacagtaaataggtgagtaggggtggtgcaagtgaattcgttttcatttagaagcccctctgtacagataatcaaaattcaaagttgaaagaatcaaaagcagccacagttatgtaggtctgatttgaatgtcataattgcagtgacaggacattgccaccaactctatcctactaccatcaatgttgtgtttattccgtcaataaaaaagacttgcttccaggaatttttatccatacactttctaactgtactatctgggcagttccaagccagtttctattagctagctggaccaaagaccacaaatctctttttttcctaaacgctgctgtaaggaatatctcacttttccccccggaaacaccctcactgaagtcttctatgaaaaggctgataatgggctgggcgcggtggctcacgcctgtaatcccagcactttgggaggccgaggcgggcagatcacgaggtcaggagatcgagaccatcctgacacggtgaaaccctgtctctactaaaaatacaaaaaattagctgggcgtggtggtgggcgcctgtagtcccagctactcgggaggctgaggcaggagaatggtgtgaacccaggaggcggagcttgcagtgagccgagatagtgcctctgcactccagcctgggtgacagagcgagactccgtctcaaaaaaaagggctgataatgataaacagtgagcactccggtcctttttcttaggttttccttttttccttcctctccaccccacaagttttgctttttaaccaaggtgtctctgcttgatgaaattcacatgctagtctaaatctttttttctcccttgtaacatttatgtgccccaaactggttagtatatgggtacagcattccctttccaattgggaagcggaaaaagagagtatgggatattttagaagggagcctttgaaccttattatatttccccatcattgatagtgacaatcttaaaagggttgttttcttaccttaagtacaaaagcatggaaaaatgcgcttttccttcccgcccacatcaccaccccgacttgaagacagtaggtgcttgaatggaaagtgagtaggcatctttaatcgccctgattaaaggaaagtgttagcctgagagggcctgactgaaaagtaaccaaaggcttaatatcaaacactaattagctttttagtgccttaaccctgacctggttaccagttttctgtagtttctacacccaagccactgaagtcatctgtggcccaagaggtaggacaaaaaaaaaaaaaaaaaaagctgatttcaatatttgatttgttgacatcccaaaatgaaagttttatgtttcccttagaaacatgttttgcttggttctatagtatgttacttaggatctatttaccatatatttgtatgagaaatcctcacccaagcattcaacctaaatctttgaaaagttgggtgctgtctttagtaacttttaaaatagtttaaatctcccattttaatagtgataaggaaacctgttaaaatcatggctattgatgttatagtatggaaagttgaactttatgaacccatacttttaaaaagcatttttaaaaatctaacactgactatagaaacaaattaaaatgtctacctttaagt

SEQ ID NO: 31218 - DNA, 850 bp, Artificial Sequence
  derived and/or modified sequence
aaggctttctgggaaataaagtccatactctggggccaacgcgcaaatcctcgtccgcgagaactgcaaggcccgcaatgccctgcgcctgcgtggaccgattagctttgaagtttaaatccaatggagaagactcaagaaacagtccaaagaattcttctagaaccctataaatacttacttcagttaccaggtaaacaagtgagaaccaaactttcacaggcatttaatcattggctgaaagttccagaggacaagctacagattattattgaagtgacagaaatgttgcataatgccagtttactcatcgatgatattgaagacaactcaaaactccgacgtggctttccagtggcccacagcatctatggaatcccatctgtcatcaattctgccaattacgtgtatttccttggcttggagaaagtcttaacccttgatcacccagatgcagtgaagctttttacccgccagcttttggaactccatcagggacaaggcctagatatttactggagggataattacacttgtcccactgaagaagaatataaagctatggtgctgcagaaaacaggtggactgtttggattagcagtaggtctcatgcagttgttctctgattacaaagaagatttaaaaccgctacttaatacacttgggctctttttccaaattagggatgattatgctaatctacactccaaagaatatagtgaaaacaaaagtttttgtgaagatctgacagagggaaagttctcatttcctactattcatgctatttggtcaaggcctgaaagcacccaggtgcagaatatcttgcgccagagaacagaaaacatagata

SEQ ID NO: 31219 - DNA, 2703 bp, Artificial Sequence
  derived and/or modified sequence
ccggactctgtgctagcactgtatacgtttgcagttctctgcccagccgctgtggaaaatcggcctcgaagtgattgaaattccctgtttatatcaggcggcttctttcagatccatcgtctttctcccggagtatgaatggaaggattcagtatgcgcttcacatttgtatgtctctggccattctcaaaccaggcccttccctttgaaaagtcttttgcatgggatgttcacttcttagacgcaaggttgtgtgccctggtttcatcgtctaacgcgttagaaggcgctttcatttcttcatgggtgttgagcgccgaccactggggtggcctctgccttcgtagacctgcgcctggtgagacggacagatgctgaacaaaacgatgtgaaattaccgcagtggcagtgccccagaggagagttccacggtgataggagaatgagggaatttggcttctttagggagggaaaggaagggtttctgagcaagtgaggatcgagctgagagctgaagggctagcaggagttaactaaggaaagagaaaaggaaaagacattccagacaaaaagactaacttgtcagaaagccctgtggcggaagggagcttttccaatatgaagaactgagcctggagagatgggatgagggggagtgtcgaaccttttaggctttgtaaaggagttttggttttctcctaatagcaatgggatatcttccaaggaatctcaatcaaaagggagagatggctccgattggaatgtcatccctggctgaagagtagaggaagcgaaaaaaagaagagttaaagaggcaaatgcagggaacccgacgaggaggctattgccgtagtagttcacatggtgaaaagaatggagcgtttgtattaatgattatggattcactctttgaacaaatttctggcagctttttagttttgaaagtgagaagtttcagactctcactgaggtattctgtagttttttcactctaaaaggaaactagtagagttcatgtaacacacactaatgcctctttacatttaactttagtatgtgatagctgaaatttccagctgtgataaattgggaaatcctttgatttaaaagaaaaacaaaggcgggtgagggtgagagtatatgccacggtgtgtagaatcctttagactcttaagaagacacaaggcggctgggcgtggtggctcacgcttgtaatcccagcactttgggaggccgaggcgggcggatcacgaggtcaggagatcgagaccatcctggctaacacggtgaaagcccgtctctactaaaaatacaaaaaaattagccgggcaaggtggcgggcgcctgtagtcccagctactcgggaggctgaggcaggagaatggcgtgaacccgggaggcggagtttgcagtgagacgagatcacgccactgcactccagcctgggcgacagagtgagacgctgtttcagaagaaagacacaaggcaactttgaagtttaaatccaatggagaagactcaagaaacagtccaaagaattcttctagaaccctataaatacttacttcagttaccaggtaaacaagtgagaaccaaactttcacaggcatttaatcattggctgaaagttccagaggacaagctacagattattattgaagtgacagaaatgttgcataatgccagtttactcatcgatgatattgaagacaactcaaaactccgacgtggctttccagtggcccacagcatctatggaatcccatctgtcatcaattctgccaattacgtgtatttccttggcttggagaaagtcttaacccttgatcacccagatgcagtgaagctttttacccgccagcttttggaactccatcagggacaaggcctagatatttactggagggataattacacttgtcccactgaagaagaatataaagctatggtgctgcagaaaacaggtggactgtttggattagcagtaggtctcatgcagttgttctctgattacaaagaagatttaaaaccgctacttaatacacttgggctctttttccaaattagggatgattatgctaatctacactccaaagaatatagtgaaaacaaaagtttttgtgaagatctgacagagggaaagttctcatttcctactattcatgctatttggtcaaggcctgaaagcacccaggtgcagaatatcttgcgccagagaacagaaaacatagatataaaaaaatactgtgtacattatcttgaggatgtaggttcttttgaatacactcgtaatacccttaaagagcttgaagctaaagcctataaacagattgatgcacgtggtgggaaccctgagctagtagccttagtaaaacacttaagtaagatgttcaaagaagaaaatgaataatgttaagccattcttgattggacctcatagcttattttagttaatcttttttttgtcttttagccttaccaccttttaaaaaatttgttattctccagaaacagtaaataggtgagtaggggtggtgcaagtgaattcgttttcatttagaagcccctctgtacagataatcaaaattcaaagttgaaagaatcaaaagcagccacagttatgtaggtctgatttgaatgtcataattgcagtgacaggacattgccaccaactctatcctactaccatcaatgttgtgttta

SEQ ID NO: 31220 - DNA, 1396 bp, Artificial Sequence
  derived and/or modified sequence
aggccggccgggggccaccgaggggccaggagggcctgtgggccgcgggcaggaccggcccgccacagagcccctgcccacgtcccgttccgggctcagacccgacaagtgggagcgagatcaacatctggccccgccgcggggacaacattagctttgaagtttaaatccaatggagaagactcaagaaacagtccaaagaattcttctagaaccctataaatacttacttcagttaccaggtaaacaagtgagaaccaaactttcacaggcatttaatcattggctgaaagttccagaggacaagctacagattattattgaagtgacagaaatgttgcataatgccagtttactcatcgatgatattgaagacaactcaaaactccgacgtggctttccagtggcccacagcatctatggaatcccatctgtcatcaattctgccaattacgtgtatttccttggcttggagaaagtcttaacccttgatcacccagatgcagtgaagctttttacccgccagcttttggaactccatcagggacaaggcctagatatttactggagggataattacacttgtcccactgaagaagaatataaagctatggtgctgcagaaaacaggtggactgtttggattagcagtaggtctcatgcagttgttctctgattacaaagaagatttaaaaccgctacttaatacacttgggctctttttccaaattagggatgattatgctaatctacactccaaagaatatagtgaaaacaaaagtttttgtgaagatctgacagagggaaagttctcatttcctactattcatgctatttggtcaaggcctgaaagcacccaggtgcagaatatcttgcgccagagaacagaaaacatagatataaaaaaatactgtgtacattatcttgaggatgtaggttcttttgaatacactcgtaatacccttaaagagcttgaagctaaagcctataaacagattgatgcacgtggtgggaaccctgagctagtagccttagtaaaacacttaagtaagatgttcaaagaagaaaatgaataatgttaagccattcttgattggacctcatagcttattttagttaatcttttttttgtcttttagccttaccaccttttaaaaaatttgttattctccagaaacagtaaataggtgagtaggggtggtgcaagtgaattcgttttcatttagaagcccctctgtacagataatcaaaattcaaagttgaaagaatcaaaagcagccacagttatgtaggtctgatttgaatgtcataattgcagtgacaggacattgccaccaactctatcctactaccatcaatgttgtgtttattccgtcaataaaaaagacttgcttcca

SEQ ID NO: 31221 - DNA, 868 bp, Artificial Sequence
  derived and/or modified sequence
tagcactgtatacgtttgcagttctctgcccagccgctgtggaaaatcggcctcgaagtgattgaaattccctgtttatatcaggcggcttctttcagatccatcgtctttctcccggagtatgaatggaaggattcagtatgcgcttcacatttattagctttgaagtttaaatccaatggagaagactcaagaaacagtccaaagaattcttctagaaccctataaatacttacttcagttaccaggtaaacaagtgagaaccaaactttcacaggcatttaatcattggctgaaagttccagaggacaagctacagattattattgaagtgacagaaatgttgcataatgccagtttactcatcgatgatattgaagacaactcaaaactccgacgtggctttccagtggcccacagcatctatggaatcccatctgtcatcaattctgccaattacgtgtatttccttggcttggagaaagtcttaacccttgatcacccagatgcagtgaagctttttacccgccagcttttggaactccatcagggacaaggcctagatatttactggagggataattacacttgtcccactgaagaagaatataaagctatggtgctgcagaaaacaggtggactgtttggattagcagtaggtctcatgcagttgttctctgattacaaagaagatttaaaaccgctacttaatacacttgggctctttttccaaattagggatgattatgctaatctacactccaaagaatatagtgaaaacaaaagtttttgtgaagatctgacagagggaaagttctcatttcctactattcatgctatttggtcaaggcctgaaagcacccaggtg

SEQ ID NO: 31222 - DNA, 903 bp, Artificial Sequence
  derived and/or modified sequence
atggagaagacccaggagaccgtgcagaggatcctgctggagccctacaagtacctgctgcagctgcccgggaagcaggtgaggaccaagctgagccaggccttcaaccactggctgaaggtgcctgaggacaagctgcagatcatcatcgaggtgacagagatgctgcacaatgccagcctgctgattgatgacatcgaggacaacagcaagctgcggcggggcttccctgtggcccacagcatctacggcatccccagcgtcatcaacagcgccaactacgtgtacttcctgggcctggagaaggtgctgaccctggaccacccagatgctgtgaagctgttcacccggcagctgctggagctgcaccagggccagggcctggacatctactggagggacaactacacctgccccacagaggaggagtacaaggccatggtgctgcagaagacaggaggcctgtttggcctggccgtgggcctgatgcagctgttcagtgactacaaggaggacctgaagcccctgctgaacaccctgggcctcttcttccagatcagagatgattatgccaacctgcacagcaaggagtacagcgagaacaagagcttctgtgaggacctgacagagggcaagttctccttccccaccatccacgccatctggagcaggcctgagagcacccaggtgcagaacatcctgcggcagaggacagaaaatattgacatcaagaagtactgtgtgcactacctggaggatgtgggcagctttgagtacaccaggaacaccctgaaggagctggaggccaaggcctacaagcagattgatgcccggggcggcaaccctgagctggtggccctggtgaagcacctgagcaagatgttcaaggaggagaatgaatag

SEQ ID NO: 31223 - DNA, 729 bp, Artificial Sequence
  derived and/or modified sequence
atggagaagacccaggagaccgtgcagaggatcctgctggagccctacaagtacctgctgcagctgcccgggaagcaggtgaggaccaagctgagccaggccttcaaccactggctgaaggtgcctgaggacaagctgcagatcatcatcgaggtgacagagatgctgcacaatgccagcctgctgattgatgacatcgaggacaacagcaagctgcggcggggcttccctgtggcccacagcatctacggcatccccagcgtcatcaacagcgccaactacgtgtacttcctgggcctggagaaggtgctgaccctggaccacccagatgctgtgaagctgttcacccggcagctgctggagctgcaccagggccagggcctggacatctactggagggacaactacacctgccccacagaggaggagtacaaggccatggtgctgcagaagacaggaggcctgtttggcctggccgtgggcctgatgcagctgttcagtgactacaaggaggacctgaagcccctgctgaacaccctgggcctcttcttccagatcagagatgattatgccaacctgcacagcaaggagtacagcgagaacaagagcttctgtgaggacctgacagagggcaagttctccttccccaccatccacgccatctggagcaggcctgagagcacccaggtgcagaacatcctgcggcagaggacagaaaatattgattag

SEQ ID NO: 31224 - DNA, 693 bp, Artificial Sequence
  derived and/or modified sequence
atggagaagacccaggagaccgtgcagaggatcctgctggagccctacaagtacctgctgcagctgcccgggaagcaggtgaggaccaagctgagccaggccttcaaccactggctgaaggtgcctgaggacaagctgcagatcatcatcgaggtgacagagatgctgcacaatgccagcctgctgattgatgacatcgaggacaacagcaagctgcggcggggcttccctgtggcccacagcatctacggcatccccagcgtcatcaacagcgccaactacgtgtacttcctgggcctggagaaggtgctgaccctggaccacccagatgctgtgaagctgttcacccggcagctgctggagctgcaccagggccagggcctggacatctactggagggacaactacacctgccccacagaggaggagtacaaggccatggtgctgcagaagacaggaggcctgtttggcctggccgtgggcctgatgcagctgttcagtgactacaaggaggacctgaagcccctgctgaacaccctgggcctcttcttccagatcagagatgattatgccaacctgcacagcaaggagtacagcgagaacaagagcttctgtgaggacctgacagagggcaagttctccttccccaccatccacgccatctggagcaggcctgagagcacccaggtgtag

SEQ ID NO: 31225 - DNA, 903 bp, Artificial Sequence
  derived and/or modified sequence
atggagaagacccaggagaccgtgcagcggatcctgctggagccctataagtatctgctgcagctgcctgggaaacaggtgagaaccaagctatcccaagcatttaatcactggttaaaagtaccagaagacaagctgcagattatcattgaggttactgagatgttgcacaacgcctcccttttgattgacgatattgaagataactcgaagctgaggcggggctttcccgtggcccactcaatctatggaattccgtccgtaatcaactctgcaaactatgtgtatttcctcgggctggagaaggttctcaccctggatcaccccgacgcggtgaagcttttcacacgacaattgttggagctacaccaaggccaggggctggatatctactggcgggacaactacacatgccccaccgaagaagagtacaaggcgatggtactccagaagaccggaggtctttttgggctagctgttggactcatgcagctcttctccgactacaaggaagatctgaaaccgctgcttaacacgctgggtctatttttccagatccgcgatgattacgccaatcttcacagcaaggagtattccgaaaataagtccttctgtgaggacctcactgaaggcaagtttagcttccccactattcacgcgatctggagcaggcctgaatctacacaggtccagaacatccttcgccagcgtacagaaaacatagacatcaaaaaatattgtgtccattatttggaagatgttggctcctttgagtacaccagaaacacccttaaagaactggaggcaaaggcatataaacagattgacgcacgaggcggtaacccagaattagtcgccctcgtgaaacatctgagcaagatgtttaaggaggagaacgagtag

SEQ ID NO: 31226 - DNA, 903 bp, Artificial Sequence
  derived and/or modified sequence
atggagaagacccaggagaccgtgcagcggatcctgctggagccctataagtacctgttacaacttcccggaaagcaagtgcgtacgaaactgtcacaggcgtttaaccactggctgaaggtgcccgaggataagctgcagattattatagaggtaactgagatgctccataacgcgagtttgctcatcgacgacatcgaagacaatagcaagctgagacgaggtttccctgtcgcccactctatatacggcatcccttccgttatcaattccgcaaactatgtctattttcttggattggaaaaggtcttaacactcgaccaccccgacgcagtgaaactgtttactcgccagctccttgaacttcaccaggggcagggcctggacatctactggagagacaattatacctgccctaccgaggaagaatacaaggccatggtgctacagaagacaggaggactattcggcctcgccgtgggcctaatgcagcttttctccgattataaagaggacctgaagcctctgctcaataccctcggcctcttcttccagatccgcgacgactacgccaatctgcacagcaaagaatactcagaaaacaaaagtttctgtgaggacctgactgagggcaaattcagtttcccgaccatacacgcaatctggagccgacccgaatccacccaagtccagaacatactccgtcagcgcaccgaaaacatcgatatcaagaagtattgcgtgcactatctggaagatgtgggcagcttcgagtacacccgcaacaccttgaaagagcttgaagctaaagcgtacaagcagatcgacgctcgcggcggcaaccccgaactggttgccctggtgaagcacctcagtaagatgttcaaggaagaaaatgaatag

SEQ ID NO: 31227 - DNA, 729 bp, Artificial Sequence
  derived and/or modified sequence
atggagaagacccaggagaccgtgcagcggatcctgctggagccctacaagtacttgcttcagttgcctggaaagcaggtcagaacaaagctttcccaggcttttaatcactggcttaaggtacctgaagacaagcttcagatcatcatcgaggtaactgagatgctgcacaatgcctcacttctgattgatgatatcgaggacaacagcaagctccgccgtggctttcccgtggctcattccatttacggcatcccatctgtgatcaatagcgctaattatgtctacttcttaggcctggagaaggtcctcacactggaccatccagatgctgttaagctgttcactcggcagctgctcgagcttcatcaaggtcagggcctcgatatctactggcgggacaactacacgtgtccaacagaggaagagtacaaggcaatggttcttcagaagaccggaggtttgtttgggctggcagttggtctcatgcagctgttttctgattataaggaggacctgaaaccactactgaatacattaggcctgttctttcagatccgggatgattacgcaaacctccactcaaaagagtatagtgagaacaaaagcttctgcgaggacctgacggaagggaagttcagttttccaactattcatgcgatctggtcaaggcccgaaagcacccaggttcagaacatcctaagacagcgaactgagaatatcgactag

SEQ ID NO: 31228 - DNA, 903 bp, Artificial Sequence
  derived and/or modified sequence
atggagaagacccaggagaccgtgcagcggatcctgctggagccctataaatatctgttgcagctgccaggaaagcaagtacggacaaaactgagtcaagcctttaaccattggctcaaggtgcccgaggataagctgcagattattatcgaagtgactgagatgctacacaacgcaagcctcttgatcgacgacatcgaagataacagtaaactgaggcgaggcttccccgttgcccactcaatctatggcatccccagcgtgattaactcagccaattatgtgtactttcttggattagaaaaagtgctgacattggaccatcctgacgcggtgaagctgttcacacgacaattactcgaactccatcagggccagggactggatatctattggcgcgataattacacatgtcccaccgaggaggaatataaagcaatggtgctgcagaaaacaggcgggctgttcgggctggccgtggggctgatgcagctgttttcagattataaggaggacttaaagccgttgttgaacacattgggtctcttttttcagattagggatgactacgctaacctgcattcaaaggaatatagcgagaataaatcattttgcgaagatctcaccgagggaaaattctccttcccgactattcacgccatctggtcaaggccagagagtactcaggtccagaacatcctccgacaacggactgagaacattgacataaagaaatattgcgtgcactatctcgaagacgtgggaagcttcgagtatacaagaaacactctgaaagaactggaggccaaggcgtacaagcagatcgatgcaagaggcggcaaccccgagctggttgctttggtcaagcacttgtccaaaatgtttaaagaggaaaatgaatag

SEQ ID NO: 31229 - DNA, 903 bp, Artificial Sequence
  derived and/or modified sequence
atggagaagacccaggagaccgtgcagcggatcctgctggagccctacaagtacttattacaactcccgggcaagcaggtgcggaccaagttgtcacaggccttcaatcactggctgaaagtcccagaggataagctgcaaatcatcattgaggttaccgagatgttacataatgccagcctgctgatcgacgacatcgaagacaactcaaaactacgtagaggattccctgtagcccattctatttacggaattcccagtgttattaatagcgctaattatgtgtactttctcggcctcgaaaaggtgctgacgctcgatcatccggacgcggtcaaattattcacccgccagctcctggaattgcatcaggggcagggtttggacatttactggcgcgacaactatacgtgcccaacagaggaggagtataaggcgatggtactgcaaaagactggggggttgttcggactggccgtgggtctcatgcagctctttagcgactataaagaggatctgaagccattgcttaatacactcggcctctttttccagattcgggatgattatgccaacctgcattcaaaggagtacagcgaaaacaaaagtttctgtgaagacttgactgaagggaaatttagcttcccgaccatccacgcgatctggtctcgacccgagagtacccaagtgcagaacatactgcggcagcggactgaaaacatagatatcaagaagtactgcgttcattatctggaggacgttggctccttcgaatacacccggaatactttgaaggaactggaggcgaaggcttacaagcaaattgacgctaggggaggcaaccccgagctggtggctctggtgaaacacctctcaaagatgttcaaagaggagaatgagtag

SEQ ID NO: 31230 - DNA, 693 bp, Artificial Sequence
  derived and/or modified sequence
atggagaagacccaggagaccgtgcagcggatcctgctggagccctataagtacctgttgcagctcccgggtaaacaggtgagaactaagctgagccaggccttcaatcattggctgaaggtgcctgaggacaagctccaaattatcatcgaagtgactgagatgttacataacgcgagcctcctgattgacgatattgaggacaacagtaagttgcggagaggatttccggtagctcatagtatctacggcatcccgtcagttataaactccgccaattacgtctacttcttgggactagagaaggtgctgaccctcgaccacccagatgccgtgaaactgttcacaaggcagctgcttgagctgcatcagggccaggggctggatatatattggagggacaattatacctgcccaacagaggaagagtataaggcaatggtacttcagaaaactggtggcctcttcggtctggcagtcggactgatgcagctatttagtgattataaagaggacctgaaacctctgctcaacacattgggcctgtttttccagattcgcgatgattatgcaaacctgcactcaaaagaatactccgaaaacaagagcttctgtgaggatctgacggaaggcaagtttagtttccccacaatacacgcaatttggagtcgccctgaatccacacaggtgtag

SEQ ID NO: 31231 - DNA, 903 bp, Artificial Sequence
  derived and/or modified sequence
atggagaagacccaggagacagtgcagcggatcctccttgagccttacaaatatttactgcagttgcccggaaagcaggtgcgtaccaagttgagtcaagcttttaatcactggctgaaggtgcctgaagacaagcttcaaattattatcgaggtcacagaaatgctgcacaatgccagtcttttgatagacgatatcgaggataactctaagctgcgcaggggctttccggtcgcacacagcatatatggtataccaagtgtcatcaattctgccaattacgtgtatttcttgggactggagaaggtgttaaccctcgaccatcccgatgcagtcaagctctttacccgccaactgctagagctgcatcaaggacaaggcctcgatatttactggcgagataattatacttgtcctaccgaggaagagtacaaagcaatggttctccagaaaaccggaggtttatttggcctagcagtgggactcatgcaactgttttctgactataaagaggacctcaaaccactcctgaacacactgggtttattcttccagatcagagatgactacgccaacctgcatagcaaggaatattctgagaataagtcattctgcgaagatctgacggaggggaagttttctttcccaaccatccacgcaatttggtctagaccagaatcgacccaggtgcagaatattctgcggcagagaactgagaatattgacatcaagaagtattgcgtgcattatctcgaggacgtaggcagctttgagtatacacgtaacacattaaaagagctcgaggctaaagcatataagcagattgatgccaggggcggaaatcctgagctggtggctctggtaaagcacctttctaagatgtttaaagaagagaacgaatag

SEQ ID NO: 31232 - DNA, 903 bp, Artificial Sequence
  derived and/or modified sequence
atggaaaagacacaggagactgtgcagcggattctactggagccctacaaataccttctccagttgccaggcaagcaggtgagaacaaagctctcccaggcctttaatcattggcttaaggtcccggaggacaagctgcagatcattatcgaggttaccgaaatgttacataatgcttctttgctgatcgatgatattgaggataattccaagctcaggcgaggcttcccagttgcgcactctatctatggcataccctccgtgattaatagcgctaactatgtctacttccttggtctcgagaaggtcctgactcttgatcaccctgatgcagtgaaattgtttaccagacagctattagagcttcatcagggtcagggcctcgatatctattggcgcgataattacacatgtccaactgaggaggagtataaggcgatggtgctgcagaagacaggaggattgtttggcctcgccgtggggttgatgcagttgttctcagactacaaggaagatctcaagccgctgttaaatacactgggcctatttttccaaattcgggacgattatgctaatctgcactctaaggagtactccgaaaacaagtctttttgcgaagacctaacggaaggcaagttctcgttccctacaatccacgcaatctggagccggcctgagtcaacccaggtgcagaacatcctccgccagagaacagaaaacatcgatattaagaagtactgcgttcactatctggaagatgttggtagtttcgaatacacaagaaatacacttaaggagttagaggccaaggcttataaacagattgatgctcggggaggaaaccctgaactggtggctctcgtgaaacatctgagtaaaatgttcaaagaggaaaacgagtag

SEQ ID NO: 31233 - DNA, 729 bp, Artificial Sequence
  derived and/or modified sequence
atggagaaaacacaagagaccgtccagcgaattctgctggagccgtacaaatatctgttgcagctacccggaaaacaggtgaggaccaaattgtcccaagcatttaaccactggctcaaagtccctgaggacaagctgcagatcatcatagaggtaacagaaatgctccacaatgcgagccttcttatagacgatatcgaagataacagtaagctgcgtcggggatttcccgtggctcactcgatttatggaattccatcagtgataaactccgcgaattacgtgtacttcctggggttggagaaggttctgaccctggaccatcctgacgccgtcaagctcttcacgagacaactgttagagttgcaccaagggcagggcttagacatctactggcgcgataactacacttgtcctaccgaggaagaatacaaagccatggtgctgcaaaagaccggtggattgtttggcctggccgtggggctgatgcagctcttttcagactacaaggaagatctaaagcctctcctgaacacccttggcttattctttcagatccgcgacgattatgcgaatttacactcaaaggaatattccgaaaataagtctttttgtgaagacctgaccgaaggcaagtttagctttccaactattcatgcaatttggtccaggcctgaatcaacgcaggttcaaaatatactgaggcagcgaaccgaaaatatcgattag

SEQ ID NO: 31234 - DNA, 903 bp, Artificial Sequence
  derived and/or modified sequence
atggaaaaaacccaggaaacagtgcagcggattttgttagagccctataagtatctcttacaacttccgggaaagcaggttcggactaagttgagccaagctttcaaccactggttgaaggttcctgaggataagcttcagatcattatagaggttactgaaatgctacataacgctagcctgcttatcgacgacattgaagacaattctaaactgcgcagggggttcccagtggcacactctatatacggcattccctcagtcataaattccgcaaactacgtgtatttcctcggactggaaaaggttctgactctcgaccacccagacgccgtgaagctgtttacacgccagctactggagctccaccagggccaaggcctggatatatactggagggataattatacttgccccactgaggaagaatacaaggccatggtgctccagaaaactggcggtctgttcgggctggccgtgggtctgatgcagctattctccgattacaaggaagacttgaagccgctgcttaacacactgggcctctttttccagatccgggatgactacgccaacctgcactcgaaagagtatagtgagaataaaagtttctgcgaagatctgactgaaggcaagttttcctttccaaccattcacgctatctggtcccgccctgaatctacacaggttcaaaatatcctccgccagcgcactgagaacattgacattaaaaaatactgtgtgcactatttggaagacgttggatctttcgaatatacacgtaataccttaaaggaattagaagccaaagcttacaaacagattgacgctcgcggagggaatccagagctggtggcactagtgaaacatttaagcaaaatgttcaaggaggagaacgagtag

SEQ ID NO: 31235 - DNA, 903 bp, Artificial Sequence
  derived and/or modified sequence
atggaaaagactcaggagacggttcagcgcattctgctggaaccatataaatacctcttacagttgcccggtaagcaagtgaggaccaaactgagtcaggcatttaaccactggctgaaggtgcctgaagacaaactgcagatcataatagaagtgacagagatgttacacaatgcctccctgctgattgacgatattgaggacaacagtaagctcagacggggattccccgtcgcccactcaatctatggcattcccagcgtaatcaacagcgctaactatgtgtatttcctagggctcgaaaaggtcctaacgttggaccacccggatgcagtcaagctgtttaccaggcaactgctggaactgcaccaggggcagggcctggatatttattggcgcgacaattatacatgcccgacagaggaggagtataaagctatggtcctccagaagactggtggcctctttgggttggctgtcgggctcatgcagctcttctcagactataaagaggacctgaagccgctcttgaatacactgggactgttcttccagatacgagatgactacgccaacttgcactcaaaggagtatagtgagaacaaaagcttctgcgaggacctgaccgaagggaaattttcttttccaacgatccacgcaatctggtcacgaccggaatcgacacaggtacagaatatactccgccagcgcacagaaaacattgatataaagaaatactgtgtccactaccttgaagatgtgggctcgttcgagtatacaaggaatacacttaaggaactggaagcaaaggcctataaacaaatcgacgccaggggcggaaacccagaattagttgccctggtcaagcacctgagcaaaatgtttaaggaggaaaacgaatag

SEQ ID NO: 31236 - DNA, 693 bp, Artificial Sequence
  derived and/or modified sequence
atggaaaagactcaggagactgtgcagagaatcttgttagagccgtacaaatatcttcttcagctgccgggtaaacaggttcgaactaagttgtctcaggcttttaatcattggctgaaggtacccgaggataagctccagatcataatcgaggtcaccgagatgctgcataacgcctcattactcatagacgacatagaggataattctaagttgcgcagaggcttcccggtggctcattccatctacggtatcccgagcgtaatcaactccgctaattatgtgtacttccttggtcttgaaaaagttttgaccctcgaccatccagacgcggttaagttattcacgcgtcaacttctagaactgcaccaaggccaggggcttgacatttattggcgggataattatacctgcccgactgaggaagaatacaaagccatggttttgcagaagaccggaggcctttttggcctcgctgttgggttaatgcagctgttttcagactacaaggaagatcttaaacccttactcaatactctgggactgttcttccagatcagagatgattacgcaaacctccattcaaaggagtattccgagaataagtcattctgtgaagatcttaccgaaggtaaatttagttttccaacaattcacgcaatctggtctcgcccagaatcaacccaggtgtag

SEQ ID NO: 31237 - DNA, 903 bp, Artificial Sequence
  derived and/or modified sequence
atggagaagacccaggagaccgtgcagagaatcctgctggagccctacaagtacctgctgcagctgcccggcaagcaggtgagaaccaagctgagccaggccttcaaccactggctgaaggtgcccgaggacaagctgcagatcatcatcgaggtgaccgagatgctgcacaacgccagcctgctgatcgacgacatcgaggacaacagcaagctgagaagaggcttccccgtggcccacagcatctacggcatccccagcgtgatcaacagcgccaactacgtgtacttcctgggcctggagaaggtgctgaccctggaccaccccgacgccgtgaagctgttcaccagacagctgctggagctgcaccagggccagggcctggacatctactggagagacaactacacctgccccaccgaggaggagtacaaggccatggtgctgcagaagaccggcggcctgttcggcctggccgtgggcctgatgcagctgttcagcgactacaaggaggacctgaagcccctgctgaacaccctgggcctgttcttccagatcagagacgactacgccaacctgcacagcaaggagtacagcgagaacaagagcttctgcgaggacctgaccgagggcaagttcagcttccccaccatccacgccatctggagcagacccgagagcacccaggtgcagaacatcctgagacagagaaccgagaacatcgacatcaagaagtactgcgtgcactacctggaggacgtgggcagcttcgagtacaccagaaacaccctgaaggagctggaggccaaggcctacaagcagatcgacgccagaggcggcaaccccgagctggtggccctggtgaagcacctgagcaagatgttcaaggaggagaacgagtag

SEQ ID NO: 31238 - DNA, 729 bp, Artificial Sequence
  derived and/or modified sequence
atggagaagacccaggagaccgtgcagagaatcctgctggagccctacaagtacctgctgcagctgcccggcaagcaggtgagaaccaagctgagccaggccttcaaccactggctgaaggtgcccgaggacaagctgcagatcatcatcgaggtgaccgagatgctgcacaacgccagcctgctgatcgacgacatcgaggacaacagcaagctgagaagaggcttccccgtggcccacagcatctacggcatccccagcgtgatcaacagcgccaactacgtgtacttcctgggcctggagaaggtgctgaccctggaccaccccgacgccgtgaagctgttcaccagacagctgctggagctgcaccagggccagggcctggacatctactggagagacaactacacctgccccaccgaggaggagtacaaggccatggtgctgcagaagaccggcggcctgttcggcctggccgtgggcctgatgcagctgttcagcgactacaaggaggacctgaagcccctgctgaacaccctgggcctgttcttccagatcagagacgactacgccaacctgcacagcaaggagtacagcgagaacaagagcttctgcgaggacctgaccgagggcaagttcagcttccccaccatccacgccatctggagcagacccgagagcacccaggtgcagaacatcctgagacagagaaccgagaacatcgactag

SEQ ID NO: 31239 - DNA, 693 bp, Artificial Sequence
  derived and/or modified sequence
atggagaagacccaggagaccgtgcagagaatcctgctggagccctacaagtacctgctgcagctgcccggcaagcaggtgagaaccaagctgagccaggccttcaaccactggctgaaggtgcccgaggacaagctgcagatcatcatcgaggtgaccgagatgctgcacaacgccagcctgctgatcgacgacatcgaggacaacagcaagctgagaagaggcttccccgtggcccacagcatctacggcatccccagcgtgatcaacagcgccaactacgtgtacttcctgggcctggagaaggtgctgaccctggaccaccccgacgccgtgaagctgttcaccagacagctgctggagctgcaccagggccagggcctggacatctactggagagacaactacacctgccccaccgaggaggagtacaaggccatggtgctgcagaagaccggcggcctgttcggcctggccgtgggcctgatgcagctgttcagcgactacaaggaggacctgaagcccctgctgaacaccctgggcctgttcttccagatcagagacgactacgccaacctgcacagcaaggagtacagcgagaacaagagcttctgcgaggacctgaccgagggcaagttcagcttccccaccatccacgccatctggagcagacccgagagcacccaggtgtag

SEQ ID NO: 31240 - protein, 345 aa, Artificial Sequence
  derived and/or modified sequence
MARPQRTPARSPDSIVEVKSKFDAEFRRFALPRASVSGFQEFSRLLRAVHQIPGLDVLLGYTDAHGDLLPLTNDDSLHRALASGPPPLRLLVQKREADSSGLAFASNSLQRRKKGLLLRPVAPLRTRPPLLISLPQDFRQVSSVIDVDLLPETHRRVRLHKHGSDRPLGFYIRDGMSVRVAPQGLERVPGIFISRLVRGGLAESTGLLAVSDEILEVNGIEVAGKTLDQVTDMMVANSHNLIVTVKPANQRNNVVRGASGRLTGPPSAGPGPAEPDSDDDSSDLVIENRQPPSSNGLSQGPPCWDLHPGCRHPGTRSSLPSLDDQEQASSGWGSRIRGDGSGFSL

SEQ ID NO: 31241 - DNA, 1038 bp, Artificial Sequence
  derived and/or modified sequence
atggccagaccccagagaacccccgccagaagccccgacagcatcgtggaggtgaagagcaagttcgacgccgagttcagaagattcgccctgcccagagccagcgtgagcggcttccaggagttcagcagactgctgagagccgtgcaccagatccccggcctggacgtgctgctgggctacaccgacgcccacggcgacctgctgcccctgaccaacgacgacagcctgcacagagccctggccagcggccccccccccctgagactgctggtgcagaagagagaggccgacagcagcggcctggccttcgccagcaacagcctgcagagaagaaagaagggcctgctgctgagacccgtggcccccctgagaaccagaccccccctgctgatcagcctgccccaggacttcagacaggtgagcagcgtgatcgacgtggacctgctgcccgagacccacagaagagtgagactgcacaagcacggcagcgacagacccctgggcttctacatcagagacggcatgagcgtgagagtggccccccagggcctggagagagtgcccggcatcttcatcagcagactggtgagaggcggcctggccgagagcaccggcctgctggccgtgagcgacgagatcctggaggtgaacggcatcgaggtggccggcaagaccctggaccaggtgaccgacatgatggtggccaacagccacaacctgatcgtgaccgtgaagcccgccaaccagagaaacaacgtggtgagaggcgccagcggcagactgaccggcccccccagcgccggccccggccccgccgagcccgacagcgacgacgacagcagcgacctggtgatcgagaacagacagccccccagcagcaacggcctgagccagggccccccctgctgggacctgcaccccggctgcagacaccccggcaccagaagcagcctgcccagcctggacgaccaggagcaggccagcagcggctggggcagcagaatcagaggcgacggcagcggcttcagcctgtag

SEQ ID NO: 31242 - DNA, 1038 bp, Artificial Sequence
  derived and/or modified sequence
atggcccgcccccaaaggacacctgcacgctccccagactctatagtcgaggtgaagagtaaatttgacgccgaatttaggagattcgccctgcccagggcaagtgtaagtggattccaggagttcagcaggttgttgcgggcagtccaccagatacccggattggacgtgctgctcggctatactgatgctcacggagatctgctcccactgactaacgatgatagcctacaccgggctttagcatctggtccccctcccctccgcctcctggtccagaaaagagaggctgactcgtcagggttggcgtttgctagtaacagtctgcaacgtcgtaaaaaaggactcctgcttaggcccgtggccccactacgcactaggcccccactcctgatcagtctcccccaggacttcaggcaggtttcaagtgtgatagacgtggatttgctgcccgagactcaccgcagggttagactccacaagcacggatccgaccggcccctcggcttctacattcgggacggtatgagtgtacgcgtggccccgcagggtcttgaacgggtccccggtatcttcatcagccggctggtcaggggggggctggccgaatcaactggcctactggccgtgtctgacgagattttagaggtgaatgggatcgaagtagccggcaagacattggaccaggtgacggatatgatggtcgccaactcccataacttaattgtcacagttaaacctgcaaatcagcggaataatgtagtcaggggggcctccgggcgactaaccgggcctccctccgctggccccggtccagcagaacctgattcagacgacgattcatctgacctggtgattgaaaatagacagcccccctctagcaatgggctctcccaaggtcctccatgttgggacttgcatcccggctgtcgtcacccaggaacccggtccagccttcccagccttgacgatcaggaacaggcttccagtggctggggaagtcggatccggggggacggaagcggcttctcgctttag

SEQ ID NO: 31243 - DNA, 1038 bp, Artificial Sequence
  derived and/or modified sequence
atggcccggccccagaggaccccagcccggagcccagacagcatcgtggaggtgaagagcaagtttgatgctgagttcagaagatttgccctgccccgggcctctgtgtctggcttccaggagttcagccggctgctgcgggctgtgcaccagatccctggcctggatgtgctgctgggctacacagatgcccatggagacctgctgcccctgaccaatgatgacagcctgcaccgggccctggccagcggccccccacccctgcggctgctggtgcagaagcgggaggccgacagcagcggcctggcctttgccagcaacagcctgcagaggaggaagaagggcctgctgctgcggcctgtggcccccctgcggacccggccccccctgctgatcagcctgccccaggacttccggcaggtgtcctctgtgattgatgtggacctgctgcctgagacccacagaagagtgcggctgcacaagcacggcagtgaccggcccctgggcttctacatcagagatggcatgtctgtgcgggtggccccccagggcctggagcgggtgcccggcatcttcatcagccggctggtgcggggcggcctggccgagagcacaggcctgctggccgtgtctgatgagatcctggaggtgaatggcatcgaggtggccggcaagaccctggaccaggtgacagacatgatggtggccaacagccacaacctgattgtgacagtgaagccagccaaccagagaaataatgtggtgcggggggccagcggccgcctgactggacctccttctgctggccctggccctgctgagccagacagtgatgatgacagcagtgacctggtgattgaaaatcggcagccccccagcagcaatggcctgagccagggccccccctgctgggacctgcaccctggctgccgccaccctggcaccaggagcagcctgcccagcctggatgaccaggagcaggccagcagcggctggggcagccgcatcagaggagatggcagcggcttcagcctgtag

SEQ ID NO: 31244 - DNA, 1038 bp, Artificial Sequence
  derived and/or modified sequence
atggcccggccccagcggacccccgcccggagccccgacagcatcgtcgaggtaaagtctaagtttgatgctgaatttcgacgatttgctttgcccagagcttccgtctctgggttccaggaattttcacggttactaagggctgtgcatcagatccccggactggacgtgctccttggctacactgatgcccacggcgatcttctgcccctcacaaatgacgatagcttgcaccgagcactagccagcgggccacctccgctcagactcctcgttcaaaaacgggaggccgattcatccgggcttgcctttgcctcgaactctctgcagcgacggaaaaaaggccttttgttaaggccggtcgcgccgcttcggacaaggccacccctgctcatatctctccctcaggatttccgtcaggtcagtagcgtgatcgacgttgacctgcttccagagacacacaggcgggtcaggctccacaagcacggctctgatcgccccctcggtttttacatcagggacgggatgtctgtgagagttgcgccacaaggactcgagagagtaccaggaattttcattagccgactggttcggggtggactggcagagtctaccggacttttggccgtcagtgatgagattctagaggtgaacggaatcgaagtcgccggaaagaccttggatcaggtgaccgacatgatggtggccaattcgcacaatttgatcgtcacagtcaagccagcgaaccagcggaacaatgttgtgagaggggctagtggccgccttaccggccctccctcggccggacccggccctgccgagcctgattccgacgacgattctagtgatctcgttatcgaaaaccggcagccaccaagtagcaatgggctttcgcaaggccccccctgctgggatcttcaccctgggtgcaggcaccctggaacgcgtagttcgctaccgagcctggacgatcaagaacaggcgagttctgggtggggttctagaatccggggggacggctccggtttttctctgtag

SEQ ID NO: 31245 - DNA, 1259 bp, Artificial Sequence
  derived and/or modified sequence
gggcggggcggcgcgggcgggccggccgggctgtgcacctgcgcctcggcgggccgcctggggcaccgtccccggcccgcccggccccgccatggcccggccgcagaggactccggcgcgcagtcccgatagcatcgtcgaggtgaagagcaaatttgacgccgagttccgacgcttcgcgctgcctcgcgcttcggtgagcggcttccaggagttctcgcggttgctgcgggcggtgcaccagatcccgggcctggacgtgctacttggctatacggatgctcatggcgacctgctgcccctcaccaacgacgacagcctgcaccgggccctggccagcgggcccccgccactgcgcctactggtgcagaagcgggaagctgactccagcggcctggcttttgcctccaactctctgcagcggcgcaagaaagggctcttgctgcggccagtggcacccctgcgcacccggccacccttgctaatcagcctgccccaagatttccgccaggtttcctcagtcatagacgtggacctactgcctgagacccaccgacgggtgcggctgcacaagcatggttcagaccgccccctgggcttctacatccgagatggcatgagcgtgcgtgtggctccccagggcctggagcgggttccaggaatcttcatctcccgcctggtacgtgggggtctggctgagagtacagggctgctggcggtcagtgatgagatcctcgaggtcaatggcattgaagtagccgggaagaccttggaccaagtgacggacatgatggttgccaacagccataacctcattgtcactgtcaagcccgccaaccagcgcaataacgtggtgcgaggggcatctgggcgtttgacaggtcctccctctgcagggcctgggcctgctgagcctgatagtgacgatgacagcagtgacctggtcattgagaaccgccagcctcccagttccaatgggctgtctcaggggcccccgtgctgggacctgcaccctggctgccgacatcctggtacccgcagctctctgccctccctggatgaccaggagcaggccagttctggctgggggagtcgcattcgaggagatggtagtggcttcagcctctgacagtcaggatgaagccccatgccactccacactgctgggacatggcagggacttcacagtgggggtttttagctggctcacagggctccctcagcctggggaacattaaaggttttctacaaatacagtc

SEQ ID NO: 31246 - DNA, 1038 bp, Artificial Sequence
  derived and/or modified sequence
atggcccgaccccagcgcacccctgcgcgtagtccggattccatagtcgaggttaaaagcaagtttgatgcagaattccgacgtttcgctctacccagggctagcgtgtccggcttccaggagtttagccgtttgctgcgtgcagtacatcagattcctgggctggatgtcctcctgggctacacagatgctcacggggatcttctccccctgacgaatgatgactcccttcacagagcactcgcttcggggcctcctcccctcagactgctcgtccagaaacgtgaagccgacagtagcggcctcgcattcgcctcaaactctctccaacggagaaagaagggcttactgctgcgtccagtcgcacctctaagaaccagaccaccgcttctaatttcgctgccgcaggatttccggcaggtgagttccgttattgacgtcgatctgctgcccgaaactcaccgccgagtgcggctgcataaacatggctctgatcggcctctaggcttctacattcgtgatggcatgtcagtgcgggtggcgccacagggtctggagcgtgtcccagggattttcatatcccggttagtcagaggtggactagcagaatccaccggcctgcttgccgtgagtgatgagattctcgaggtgaacgggatcgaagtagctggcaagacactggaccaggtgacggacatgatggttgctaattcccataatctgatcgttactgttaagccggctaatcagagaaacaacgtcgtgcggggagccagtggacggcttacggggccacccagcgccggacccggacccgcagagcctgactccgacgacgatagctctgatctggtgatcgagaatagacagcctccttcatccaacggattgtcccagggccctccttgttgggatcttcaccccggttgtcggcaccctggcactagatctagtctgcccagcctcgatgatcaagagcaagcctctagcggatggggaagccgcatccgtggggatgggtccggtttcagcttgtag

SEQ ID NO: 31247 - DNA, 126 bp, Artificial Sequence
  derived and/or modified sequence
gacctgggctggcacttcagcaactgcgacgaggacaccttctacagccccgtgcagaacaccgagggcgacctgctgttcttcgaccacaacctgaagaccgacagaggccacgtggagagatag

SEQ ID NO: 31248 - protein, 872 aa, Artificial Sequence
  derived and/or modified sequence
MQDAENVAVPEAAEERAEPGQQQPAAEPPPAEGLLRPAGPGAPEAAGTEASSEEVGIAEAGPESEVRTEPAAEAEAASGPSESPSPPAAEELPGSHAEPPVPAQGEAPGEQARDERSDSRAQAVSEDAGGNEGRAAEAEPRALENGDADEPSFSDPEDFVDDVSEEELLGDVLKDRPQEADGIDSVIVVDNVPQVGPDRLEKLKNVIHKIFSKFGKITNDFYPEEDGKTKGYIFLEYASPAHAVDAVKNADGYKLDKQHTFRVNLFTDFDKYMTISDEWDIPEKQPFKDLGNLRYWLEEAECRDQYSVIFESGDRTSIFWNDVKDPVSIEERARWTETYVRWSPKGTYLATFHQRGIALWGGEKFKQIQRFSHQGVQLIDFSPCERYLVTFSPLMDTQDDPQAIIIWDILTGHKKRGFHCESSAHWPIFKWSHDGKFFARMTLDTLSIYETPSMGLLDKKSLKISGIKDFSWSPGGNIIAFWVPEDKDIPARVTLMQLPTRQEIRVRNLFNVVDCKLHWQKNGDYLCVKVDRTPKGTQGVVTNFEIFRMREKQVPVDVVEMKETIIAFAWEPNGSKFAVLHGEAPRISVSFYHVKNNGKIELIKMFDKQQANTIFWSPQGQFVVLAGLRSMNGALAFVDTSDCTVMNIAEHYMASDVEWDPTGRYVVTSVSWWSHKVDNAYWLWTFQGRLLQKNNKDRFCQLLWRPRPPTLLSQEQIKQIKKDLKKYSKIFEQKDRLSQSKASKELVERRRTMMEDFRKYRKMAQELYMEQKNERLELRGGVDTDELDSNVDDWEEETIEFFVTEEIIPGIRSDLEHCAQPCVLWSRGRPAGSRVTPASSLCSLALDCDCAWILPLRHIFVPFSPWCLQWGI

SEQ ID NO: 31249 - protein, 814 aa, Artificial Sequence
  derived and/or modified sequence
MQDAENVAVPEAAEERAEPGQQQPAAEPPPAEGLLRPAGPGAPEAAGTEASSEEVGIAEAGPESEVRTEPAAEAEAASGPSESPSPPAAEELPGSHAEPPVPAQGEAPGEQARDERSDSRAQAVSEDAGGNEGRAAEAEPRALENGDADEPSFSDPEDFVDDVSEEELLGDVLKDRPQEADGIDSVIVVDNVPQVGPDRLEKLKNVIHKIFSKFGKITNDFYPEEDGKTKGYIFLEYASPAHAVDAVKNADGYKLDKQHTFRVNLFTDFDKYMTISDEWDIPEKQPFKDLGNLRYWLEEAECRDQYSVIFESGDRTSIFWNDVKDPVSIEERARWTETYVRWSPKGTYLATFHQRGIALWGGEKFKQIQRFSHQGVQLIDFSPCERYLVTFSPLMDTQDDPQAIIIWDILTGHKKRGFHCESSAHWPIFKWSHDGKFFARMTLDTLSIYETPSMGLLDKKSLKISGIKDFSWSPGGNIIAFWVPEDKDIPARVTLMQLPTRQEIRVRNLFNVVDCKLHWQKNGDYLCVKVDRTPKGTQGVVTNFEIFRMREKQVPVDVVEMKETIIAFAWEPNGSKFAVLHGEAPRISVSFYHVKNNGKIELIKMFDKQQANTIFWSPQGQFVVLAGLRSMNGALAFVDTSDCTVMNIAEHYMASDVEWDPTGRYVVTSVSWWSHKVDNAYWLWTFQGRLLQKNNKDRFCQLLWRPRPPTLLSQEQIKQIKKDLKKYSKIFEQKDRLSQSKASKELVERRRTMMEDFRKYRKMAQELYMEQKNERLELRGGVDTDELDSNVDDWEEETIEFFVTEEIIPLGNQE

SEQ ID NO: 31250 - protein, 738 aa, Artificial Sequence
  derived and/or modified sequence
MQDAENVAVPEAAEERAGSHAEPPVPAQGEAPGEQARDERSDSRAQAVSEDAGGNEGRAAEAEPRALENGDADEPSFSDPEDFVDDVSEEELLGDVLKDRPQEADGIDSVIVVDNVPQVGPDRLEKLKNVIHKIFSKFGKITNDFYPEEDGKTKGYIFLEYASPAHAVDAVKNADGYKLDKQHTFRVNLFTDFDKYMTISDEWDIPEKQPFKDLGNLRYWLEEAECRDQYSVIFESGDRTSIFWNDVKDPVSIEERARWTETYVRWSPKGTYLATFHQRGIALWGGEKFKQIQRFSHQGVQLIDFSPCERYLVTFSPLMDTQDDPQAIIIWDILTGHKKRGFHCESSAHWPIFKWSHDGKFFARMTLDTLSIYETPSMGLLDKKSLKISGIKDFSWSPGGNIIAFWVPEDKDIPARVTLMQLPTRQEIRVRNLFNVVDCKLHWQKNGDYLCVKVDRTPKGTQGVVTNFEIFRMREKQVPVDVVEMKETIIAFAWEPNGSKFAVLHGEAPRISVSFYHVKNNGKIELIKMFDKQQANTIFWSPQGQFVVLAGLRSMNGALAFVDTSDCTVMNIAEHYMASDVEWDPTGRYVVTSVSWWSHKVDNAYWLWTFQGRLLQKNNKDRFCQLLWRPRPPTLLSQEQIKQIKKDLKKYSKIFEQKDRLSQSKASKELVERRRTMMEDFRKYRKMAQELYMEQKNERLELRGGVDTDELDSNVDDWEEETIEFFVTEEIIPLGNQE

SEQ ID NO: 31251 - DNA, 3000 bp, Artificial Sequence
  derived and/or modified sequence
tagccgtcgcggcgcgcggtgcggcctgggagagtcggaagcgcggcggccgcggagccctgcgagtaggcagcgttgggcccatgcaggacgcggagaacgtggcggtgcccgaggcggccgaggagcgcgccgagcccggccagcagcagccggccgccgagccgccgccagccgaggggctgctgcggcccgcggggcccggcgctccggaggccgcggggaccgaggcctccagtgaggaggtggggatcgcggaggccgggccggagtccgaggtgaggaccgagccggcggccgaggcagaggcggcctccggcccgtccgagtcgccctcgccgccggccgccgaggagctgcccgggtcgcatgctgagccccctgtcccggcacagggcgaggccccaggagagcaggctcgggacgagcgctccgacagccgggcccaggcggtgtccgaggacgcgggaggaaacgagggcagagcggccgaggccgaaccccgggcgctggagaacggcgacgcggacgagccctccttcagcgaccccgaggacttcgtggacgacgtgagcgaggaagaattactgggagatgtactcaaagatcggccccaggaagcagatggaatcgattcggtgattgtagtggacaatgtccctcaggtgggacccgaccgacttgagaaactcaaaaatgtcatccacaagatcttttccaagtttgggaaaatcacaaatgatttttatcctgaagaggatgggaagacaaaagggtatattttcctggagtacgcgtcccctgcccacgctgtggatgctgtgaagaacgccgacggctacaagcttgacaagcagcacacattccgggtcaacctctttacggattttgacaagtatatgacgatcagtgacgagtgggatattccagagaaacagcctttcaaagacctggggaacttacgttactggcttgaagaggcagaatgcagagatcagtacagtgtgatttttgagagtggagaccgcacttccatattctggaatgacgtaaaagaccctgtctcaattgaagaaagagcgagatggacagagacgtatgtgcgttggtctcctaagggcacctacctggctacctttcatcaaagaggcattgctctatgggggggagagaaattcaagcaaattcagagattcagccaccaaggggttcagcttattgacttctcaccttgtgaaaggtacctggtgacctttagccccctgatggacacgcaggatgaccctcaggccataatcatctgggacatccttacggggcacaagaagaggggttttcactgtgagagctcagcccattggcctatttttaagtggagccatgatggcaaattctttgccagaatgaccctggatacgcttagcatctatgaaactccttctatgggtcttttggacaagaagagtttgaagatctctgggataaaagacttttcttggtctcctggtggtaacataatcgccttctgggtgcctgaagacaaagatattccagccagggtaaccctgatgcagctccctaccaggcaagagatccgagtgaggaacctgttcaatgtggtggactgcaagctccattggcagaagaacggagactacttgtgtgtgaaagtagataggactccgaaaggcacccagggtgttgtcacaaattttgaaattttccgaatgagggagaaacaggtacctgtggatgtggtcgagatgaaagaaaccatcatagcctttgcctgggaaccaaatggaagtaagtttgctgtgctgcacggagaggctccgcggatatctgtgtctttctaccacgtcaaaaacaacgggaagattgaactcatcaagatgttcgacaagcagcaggcgaacaccatcttctggagcccccaaggacagttcgtggtgttggcgggcctgaggagtatgaacggtgccttagcgtttgtggacacttcggactgcacggtcatgaacatcgcagagcactacatggcttccgacgtcgaatgggatcctactgggcgctacgtcgtcacctctgtgtcctggtggagccataaggtggacaacgcgtactggctgtggactttccagggacgcctcctgcagaagaacaacaaggaccgcttctgccagctgctgtggcggccccggcctcccacactcctgagccaggaacagatcaagcaaattaaaaaggatctgaagaaatactctaagatctttgaacagaaggatcgtttgagtcagtccaaagcctcaaaggaattggtggagagaaggcgcaccatgatggaagatttccggaagtaccggaaaatggcccaggagctctatatggagcagaaaaacgagcgcctggagttgcgaggaggggtggacactgacgagctggacagcaacgtggacgactgggaagaggagaccattgagttcttcgtcactgaagaaatcattcccggaatcaggagtgacctggagcactgtgcgcagccgtgtgtgctgtggagccgaggccgtcctgcaggaagccgcgtgactcccgcctcctccctgtgctctctggctctggactgtgactgcgcctggattctgccattgcgacacatttttgtgcctttcagcccctggtgtctgcagtgggggatttaaggcacccgcttccacttctttcttgtttggagttttctgttggaaccgccggcgttggctccgaagacttagcgacgccactggcggcaccttctcctgcgcccagtgatgtttccacggtgcctgtacacagccgagcagcatttccgttgaaggacttgcatccccattgcgggcagtgctggacgtgtcccggagacccaccgggagggcgccgccatgccttgtacccccaccgtgcaggttgtggccggttttctccgcaggttgaacatggaaataaaagcaaacttgtatg

SEQ ID NO: 31252 - DNA, 3055 bp, Artificial Sequence
  derived and/or modified sequence
gggagagtcggaagcgcggcggccgcggagccctgcgagtaggcagcgttgggcccatgcaggacgcggagaacgtggcggtgcccgaggcggccgaggagcgcgccgagcccggccagcagcagccggccgccgagccgccgccagccgaggggctgctgcggcccgcggggcccggcgctccggaggccgcggggaccgaggcctccagtgaggaggtggggatcgcggaggccgggccggagtccgaggtgaggaccgagccggcggccgaggcagaggcggcctccggcccgtccgagtcgccctcgccgccggccgccgaggagctgcccgggtcgcatgctgagccccctgtcccggcacagggcgaggccccaggagagcaggctcgggacgagcgctccgacagccgggcccaggcggtgtccgaggacgcgggaggaaacgagggcagagcggccgaggccgaaccccgggcgctggagaacggcgacgcggacgagccctccttcagcgaccccgaggacttcgtggacgacgtgagcgaggaagaattactgggagatgtactcaaagatcggccccaggaagcagatggaatcgattcggtgattgtagtggacaatgtccctcaggtgggacccgaccgacttgagaaactcaaaaatgtcatccacaagatcttttccaagtttgggaaaatcacaaatgatttttatcctgaagaggatgggaagacaaaagggtatattttcctggagtacgcgtcccctgcccacgctgtggatgctgtgaagaacgccgacggctacaagcttgacaagcagcacacattccgggtcaacctctttacggattttgacaagtatatgacgatcagtgacgagtgggatattccagagaaacagcctttcaaagacctggggaacttacgttactggcttgaagaggcagaatgcagagatcagtacagtgtgatttttgagagtggagaccgcacttccatattctggaatgacgtaaaagaccctgtctcaattgaagaaagagcgagatggacagagacgtatgtgcgttggtctcctaagggcacctacctggctacctttcatcaaagaggcattgctctatgggggggagagaaattcaagcaaattcagagattcagccaccaaggggttcagcttattgacttctcaccttgtgaaaggtacctggtgacctttagccccctgatggacacgcaggatgaccctcaggccataatcatctgggacatccttacggggcacaagaagaggggttttcactgtgagagctcagcccattggcctatttttaagtggagccatgatggcaaattctttgccagaatgaccctggatacgcttagcatctatgaaactccttctatgggtcttttggacaagaagagtttgaagatctctgggataaaagacttttcttggtctcctggtggtaacataatcgccttctgggtgcctgaagacaaagatattccagccagggtaaccctgatgcagctccctaccaggcaagagatccgagtgaggaacctgttcaatgtggtggactgcaagctccattggcagaagaacggagactacttgtgtgtgaaagtagataggactccgaaaggcacccagggtgttgtcacaaattttgaaattttccgaatgagggagaaacaggtacctgtggatgtggtcgagatgaaagaaaccatcatagcctttgcctgggaaccaaatggaagtaagtttgctgtgctgcacggagaggctccgcggatatctgtgtctttctaccacgtcaaaaacaacgggaagattgaactcatcaagatgttcgacaagcagcaggcgaacaccatcttctggagcccccaaggacagttcgtggtgttggcgggcctgaggagtatgaacggtgccttagcgtttgtggacacttcggactgcacggtcatgaacatcgcagagcactacatggcttccgacgtcgaatgggatcctactgggcgctacgtcgtcacctctgtgtcctggtggagccataaggtggacaacgcgtactggctgtggactttccagggacgcctcctgcagaagaacaacaaggaccgcttctgccagctgctgtggcggccccggcctcccacactcctgagccaggaacagatcaagcaaattaaaaaggatctgaagaaatactctaagatctttgaacagaaggatcgtttgagtcagtccaaagcctcaaaggaattggtggagagaaggcgcaccatgatggaagatttccggaagtaccggaaaatggcccaggagctctatatggagcagaaaaacgagcgcctggagttgcgaggaggggtggacactgacgagctggacagcaacgtggacgactgggaagaggagaccattgagttcttcgtcactgaagaaatcattcccctcgggaatcaggagtgacctggagcactgtggggacggactccgcctgctgttcccgcgctgagctacaggactcccgagtgtgagccgcggttcctctgttgcagcgcagccgtgtgtgctgtggagccgaggccgtcctgcaggaagccgcgtgactcccgcctcctccctgtgctctctggctctggactgtgactgcgcctggattctgccattgcgacacatttttgtgcctttcagcccctggtgtctgcagtgggggatttaaggcacccgcttccacttctttcttgtttggagttttctgttggaaccgccggcgttggctccgaagacttagcgacgccactggcggcaccttctcctgcgcccagtgatgtttccacggtgcctgtacacagccgagcagcatttccgttgaaggacttgcatccccattgcgggcagtgctggacgtgtcccggagacccaccgggagggcgccgccatgccttgtacccccaccgtgcaggttgtggccggttttctccgcaggttgaacatggaaataaaagcaaacttgtatgaaa

SEQ ID NO: 31253 - DNA, 2966 bp, Artificial Sequence
  derived and/or modified sequence
cggcggccgcggagccctgcgagtaggcagcgttgggcccatgcaggacgcggagaacgtggcggtgcccgaggcggccgaggagcgcgccgagcccggccagcagcagccggccgccgagccgccgccagccgaggggctgctgcggcccgcggggcccggcgctccggaggccgcggggaccgaggcctccagtgaggaggtggggatcgcggaggccgggccggagtccgaggtgaggaccgagccggcggccgaggcagaggcggcctccggcccgtccgagtcgccctcgccgccggccgccgaggagctgcccgggtcgcatgctgagccccctgtcccggcacagggcgaggccccaggagagcaggctcgggacgagcgctccgacagccgggcccaggcggtgtccgaggacgcgggaggaaacgagggcagagcggccgaggccgaaccccgggcgctggagaacggcgacgcggacgagccctccttcagcgaccccgaggacttcgtggacgacgtgagcgaggaagaattactgggagatgtactcaaagatcggccccaggaagcagatggaatcgattcggtgattgtagtggacaatgtccctcaggtgggacccgaccgacttgagaaactcaaaaatgtcatccacaagatcttttccaagtttgggaaaatcacaaatgatttttatcctgaagaggatgggaagacaaaagggtatattttcctggagtacgcgtcccctgcccacgctgtggatgctgtgaagaacgccgacggctacaagcttgacaagcagcacacattccgggtcaacctctttacggattttgacaagtatatgacgatcagtgacgagtgggatattccagagaaacagcctttcaaagacctggggaacttacgttactggcttgaagaggcagaatgcagagatcagtacagtgtgatttttgagagtggagaccgcacttccatattctggaatgacgtaaaagaccctgtctcaattgaagaaagagcgagatggacagagacgtatgtgcgttggtctcctaagggcacctacctggctacctttcatcaaagaggcattgctctatgggggggagagaaattcaagcaaattcagagattcagccaccaaggggttcagcttattgacttctcaccttgtgaaaggtacctggtgacctttagccccctgatggacacgcaggatgaccctcaggccataatcatctgggacatccttacggggcacaagaagaggggttttcactgtgagagctcagcccattggcctatttttaagtggagccatgatggcaaattctttgccagaatgaccctggatacgcttagcatctatgaaactccttctatgggtcttttggacaagaagagtttgaagatctctgggataaaagacttttcttggtctcctggtggtaacataatcgccttctgggtgcctgaagacaaagatattccagccagggtaaccctgatgcagctccctaccaggcaagagatccgagtgaggaacctgttcaatgtggtggactgcaagctccattggcagaagaacggagactacttgtgtgtgaaagtagataggactccgaaaggcacccagggtgttgtcacaaattttgaaattttccgaatgagggagaaacaggtacctgtggatgtggtcgagatgaaagaaaccatcatagcctttgcctgggaaccaaatggaagtaagtttgctgtgctgcacggagaggctccgcggatatctgtgtctttctaccacgtcaaaaacaacgggaagattgaactcatcaagatgttcgacaagcagcaggcgaacaccatcttctggagcccccaaggacagttcgtggtgttggcgggcctgaggagtatgaacggtgccttagcgtttgtggacacttcggactgcacggtcatgaacatcgcagagcactacatggcttccgacgtcgaatgggatcctactgggcgctacgtcgtcacctctgtgtcctggtggagccataaggtggacaacgcgtactggctgtggactttccagggacgcctcctgcagaagaacaacaaggaccgcttctgccagctgctgtggcggccccggcctcccacactcctgagccaggaacagatcaagcaaattaaaaaggatctgaagaaatactctaagatctttgaacagaaggatcgtttgagtcagtccaaagcctcaaaggaattggtggagagaaggcgcaccatgatggaagatttccggaagtaccggaaaatggcccaggagctctatatggagcagaaaaacgagcgcctggagttgcgaggaggggtggacactgacgagctggacagcaacgtggacgactgggaagaggagaccattgagttcttcgtcactgaagaaatcattcccctcgggaatcaggagtgacctggagcactgtgcgcagccgtgtgtgctgtggagccgaggccgtcctgcaggaagccgcgtgactcccgcctcctccctgtgctctctggctctggactgtgactgcgcctggattctgccattgcgacacatttttgtgcctttcagcccctggtgtctgcagtgggggatttaaggcacccgcttccacttctttcttgtttggagttttctgttggaaccgccggcgttggctccgaagacttagcgacgccactggcggcaccttctcctgcgcccagtgatgtttccacggtgcctgtacacagccgagcagcatttccgttgaaggacttgcatccccattgcgggcagtgctggacgtgtcccggagacccaccgggagggcgccgccatgccttgtacccccaccgtgcaggttgtggccggttttctccgcaggttgaacatggaaataaaagcaaacttgtatgaaaaa

SEQ ID NO: 31254 - DNA, 2693 bp, Artificial Sequence
  derived and/or modified sequence
atgcaggacgcggagaacgtggcggtgcccgaggcggccgaggagcgcgccgggtcgcatgctgagccccctgtcccggcacagggcgaggccccaggagagcaggctcgggacgagcgctccgacagccgggcccaggcggtgtccgaggacgcgggaggaaacgagggcagagcggccgaggccgaaccccgggcgctggagaacggcgacgcggacgagccctccttcagcgaccccgaggacttcgtggacgacgtgagcgaggaagaattactgggagatgtactcaaagatcggccccaggaagcagatggaatcgattcggtgattgtagtggacaatgtccctcaggtgggacccgaccgacttgagaaactcaaaaatgtcatccacaagatcttttccaagtttgggaaaatcacaaatgatttttatcctgaagaggatgggaagacaaaagggtatattttcctggagtacgcgtcccctgcccacgctgtggatgctgtgaagaacgccgacggctacaagcttgacaagcagcacacattccgggtcaacctctttacggattttgacaagtatatgacgatcagtgacgagtgggatattccagagaaacagcctttcaaagacctggggaacttacgttactggcttgaagaggcagaatgcagagatcagtacagtgtgatttttgagagtggagaccgcacttccatattctggaatgacgtaaaagaccctgtctcaattgaagaaagagcgagatggacagagacgtatgtgcgttggtctcctaagggcacctacctggctacctttcatcaaagaggcattgctctatgggggggagagaaattcaagcaaattcagagattcagccaccaaggggttcagcttattgacttctcaccttgtgaaaggtacctggtgacctttagccccctgatggacacgcaggatgaccctcaggccataatcatctgggacatccttacggggcacaagaagaggggttttcactgtgagagctcagcccattggcctatttttaagtggagccatgatggcaaattctttgccagaatgaccctggatacgcttagcatctatgaaactccttctatgggtcttttggacaagaagagtttgaagatctctgggataaaagacttttcttggtctcctggtggtaacataatcgccttctgggtgcctgaagacaaagatattccagccagggtaaccctgatgcagctccctaccaggcaagagatccgagtgaggaacctgttcaatgtggtggactgcaagctccattggcagaagaacggagactacttgtgtgtgaaagtagataggactccgaaaggcacccagggtgttgtcacaaattttgaaattttccgaatgagggagaaacaggtacctgtggatgtggtcgagatgaaagaaaccatcatagcctttgcctgggaaccaaatggaagtaagtttgctgtgctgcacggagaggctccgcggatatctgtgtctttctaccacgtcaaaaacaacgggaagattgaactcatcaagatgttcgacaagcagcaggcgaacaccatcttctggagcccccaaggacagttcgtggtgttggcgggcctgaggagtatgaacggtgccttagcgtttgtggacacttcggactgcacggtcatgaacatcgcagagcactacatggcttccgacgtcgaatgggatcctactgggcgctacgtcgtcacctctgtgtcctggtggagccataaggtggacaacgcgtactggctgtggactttccagggacgcctcctgcagaagaacaacaaggaccgcttctgccagctgctgtggcggccccggcctcccacactcctgagccaggaacagatcaagcaaattaaaaaggatctgaagaaatactctaagatctttgaacagaaggatcgtttgagtcagtccaaagcctcaaaggaattggtggagagaaggcgcaccatgatggaagatttccggaagtaccggaaaatggcccaggagctctatatggagcagaaaaacgagcgcctggagttgcgaggaggggtggacactgacgagctggacagcaacgtggacgactgggaagaggagaccattgagttcttcgtcactgaagaaatcattcccctcgggaatcaggagtgacctggagcactgtgcgcagccgtgtgtgctgtggagccgaggccgtcctgcaggaagccgcgtgactcccgcctcctccctgtgctctctggctctggactgtgactgcgcctggattctgccattgcgacacatttttgtgcctttcagcccctggtgtctgcagtgggggatttaaggcacccgcttccacttctttcttgtttggagttttctgttggaaccgccggcgttggctccgaagacttagcgacgccactggcggcaccttctcctgcgcccagtgatgtttccacggtgcctgtacacagccgagcagcatttccgttgaaggacttgcatccccattgcgggcagtgctggacgtgtcccggagacccaccgggagggcgccgccatgccttgtacccccaccgtgcaggttgtggccggttttctccgcaggttgaacatggaaataaaagcaaacttgtatg

SEQ ID NO: 31255 - DNA, 2619 bp, Artificial Sequence
  derived and/or modified sequence
atgcaggacgcagaaaacgtcgctgtccctgaggcagcggaagagcgcgccgaacccggtcagcaacagccggcagccgagcctccccctgctgaggggctcctgcgcccggctggacccggagcccccgaagccgctgggaccgaagcaagttccgaggaagtcggcattgccgaagccgggcctgaaagtgaagtccgaactgagcccgcggcagaggcagaagccgcaagcggcccttccgaaagcccatcacctcccgcagctgaggagcttcctggatctcatgccgaacctccagtaccggctcaaggtgaggctccaggagagcaggcccgggatgaaagatcagacagtagagctcaagccgttagtgaagatgctgggggcaacgagggccgggcggcggaagcagaacccagggcactagaaaacggcgatgctgacgaacccagttttagtgaccccgaagattttgtggacgatgtcagcgaggaagagttgctgggtgacgtgctgaaggaccgacctcaggaggcagacggaattgacagcgtgattgtggttgacaatgtgccgcaggtcgggcctgatcggttggaaaaactcaagaatgtgattcacaagatctttagcaagttcggcaagattactaatgatttttatcctgaagaggatggaaaaactaagggctatatctttctggagtacgcatcccctgcccacgccgttgacgctgtgaaaaacgcagatggatacaagcttgataagcagcacactttcagagttaatctgttcacggacttcgataaatatatgactattagtgatgagtgggacatccccgagaaacaaccgttcaaagacttgggaaatttgagatactggttggaagaagccgaatgtcgggaccagtacagcgtcattttcgagtcgggtgacagaactagtattttctggaacgatgtaaaagatccagtgtcgattgaggagcgtgcacgttggacagaaacttacgttagatggtcccctaagggaacctacctggctacttttcatcagaggggcattgccctctgggggggtgagaagttcaaacaaatccagcggttctcacaccaaggggtgcagctcatcgacttttcaccctgcgaaaggtatctcgttacattttcacctctgatggacacgcaggatgacccccaagctatcattatctgggacattctgacgggacacaagaagcggggttttcactgcgagagtagcgcccattggccaatctttaagtggtcccacgacgggaagttctttgctaggatgactctggacaccttatcaatctatgaaaccccatccatgggactgctggacaagaagagtctcaagatctcaggaattaaagactttagctggtcaccaggagggaatattatagcgttttgggtccctgaggacaaagatataccagccagggtgacgttgatgcaactccctacaaggcaggagatacgagttcgtaatttgtttaatgtggtagactgcaagctccactggcagaagaatggcgactatctgtgtgtgaaggtcgaccggacacccaaaggcactcagggcgttgtgacaaattttgagatattccggatgcgagaaaagcaagtacctgtagacgtcgtcgaaatgaaggagaccattatcgccttcgcgtgggaacccaatggctctaagtttgccgtgcttcatggagaggctccaaggatctcggttagcttttaccatgtcaaaaataacggaaaaatcgagctcattaaaatgtttgacaagcagcaagccaacacaatcttctggtcgccgcagggtcagtttgtggtcctcgccgggctccgttcaatgaatggtgcacttgccttcgttgacacatctgactgtacggttatgaacatcgcagagcactacatggcgagtgacgtcgaatgggatcccaccggacgttatgtggtgactagcgtgtcctggtggagccataaggtggataacgcttattggctctggaccttccagggcagacttcttcaaaaaaataataaggaccggttctgccagctcctgtggcggccgaggccacctactcttctgagtcaggagcaaattaaacagataaaaaaggacctgaagaagtacagtaaaattttcgagcagaaggatcggctcagccagagcaaagcaagcaaagagttagttgaaaggcgtaggaccatgatggaagactttaggaagtatcgcaagatggctcaggaactctatatggagcagaagaatgaacgactggagctcagaggaggagttgacaccgacgaactggacagcaatgtggatgactgggaagaagaaactatcgaatttttcgttacagaagagatcatcccaggaattaggtctgacctggagcattgcgctcagccgtgtgtcctgtggtccagaggacgaccggctggatcccgcgtgacccccgcctcgtctctgtgttccctcgccctggactgtgactgcgcctggattctacccttacggcacatctttgttcccttctccccgtggtgcctgcagtgggggatatag

SEQ ID NO: 31256 - DNA, 2445 bp, Artificial Sequence
  derived and/or modified sequence
atgcaggacgctgaaaatgtggcagtgcctgaggcagccgaagaacgcgccgagcccggccagcagcagccagcagctgagccgcccccagcggagggattactgaggccagcagggcccggcgctcccgaagctgccggaactgaggcaagcagtgaagaggttggcattgcggaggcgggccctgaatcagaagtgaggacagagcccgccgccgaggccgaggccgccagcgggccatcagaatcacccagccccccagccgctgaagagcttcctgggagccacgccgaaccaccggttccagctcagggggaagcccctggcgagcaggcaagggacgaaagaagcgactcccgagctcaggctgtgagtgaagacgctggtggtaacgaagggcgcgctgccgaggccgaaccacgcgctctggaaaacggggacgccgacgagccatcctttagcgaccccgaggacttcgtggacgacgtgagtgaggaggaactcctgggtgacgttctgaaagacagaccccaagaggctgacgggatcgacagcgttatagtggtggataacgtcccacaggtgggtcctgaccgcctagagaagctgaagaacgtcattcataagatcttctctaaatttgggaagatcacaaatgacttctacccagaggaagatggcaagacaaaaggatacatctttctagaatatgcaagcccggcccacgctgtggatgcagtgaaaaatgccgatgggtacaagctcgacaaacaacacacattcagggtcaacctgttcaccgatttcgataaatacatgacaatctccgatgagtgggacatccccgaaaagcagccctttaaagatctcgggaacttgaggtattggctggaggaggctgaatgtagagatcaatattccgtgatcttcgaaagtggcgatagaacatctattttctggaacgacgtgaaagatccggtgtctatcgaagagcgtgccaggtggaccgagacatacgttcggtggtcaccgaagggcacctacctagctaccttccaccagagaggaatcgccctgtgggggggcgagaaatttaaacagatacagcggttcagtcaccagggtgtccagttgatagacttctccccctgcgaaaggtatctggttacattctcccctctgatggatacccaggatgatcctcaggccattataatctgggacattctcactggacataaaaagagaggttttcactgtgagtcaagtgcccattggcctatcttcaagtggtcacacgacggaaagttttttgctaggatgacactcgacaccctgtctatttacgaaactccttccatgggcttactggacaagaaatctctgaaaatttctggcatcaaggatttttcatggagtccaggtggcaatatcattgccttttgggtgccagaagacaaagatattccagccagagtgactctaatgcagttgcccacaaggcaggagattcgggtgcgcaatttgttcaatgtggtcgattgtaaacttcactggcaaaagaacggagactatttgtgcgtgaaggtcgaccggacacccaaaggaacgcaaggcgtggtaacaaacttcgaaatcttccggatgagagaaaaacaggtgcccgtggatgtagttgagatgaaagaaaccattatcgctttcgcttgggaacctaatggaagcaaatttgctgtgctgcatggcgaggctccacggatctctgtctcgttctaccatgtgaagaataacgggaagatcgagctcataaagatgttcgacaagcagcaggccaacaccatattttggtcaccccagggccagttcgtggtgttggcaggattaaggtcgatgaacggtgcattggcattcgtggatacatctgactgtaccgtcatgaatattgcggagcactacatggcatctgacgttgagtgggatccaaccggtaggtatgtggtgacaagtgtttcctggtggtcacacaaagtcgataatgcttactggctgtggactttccaaggacgtcttctccaaaaaaacaataaagaccggttttgccaactgctctggcgccctagacctcctactcttctaagccaggaacagattaaacaaatcaagaaagaccttaagaagtatagtaagatttttgagcaaaaagacaggctgagccagtctaaagcctcaaaggagctcgttgaaagaagaagaacaatgatggaggattttaggaaatatcggaagatggctcaggaactgtacatggagcaaaaaaatgaacggctggaacttcgcggaggagtcgatacagatgagctggacagcaatgttgacgattgggaggaggagaccattgaattctttgtgacagaggaaattattccacttggcaaccaggaatag

SEQ ID NO: 31257 - DNA, 2445 bp, Artificial Sequence
  derived and/or modified sequence
atgcaggatgccgagaatgtcgccgtgccggaagccgccgaagagcgggccgagcctgggcagcaacagcctgcagctgagcccccccctgcagagggccttctccgacccgccggccccggggccccggaggcagctggaaccgaggcaagcagcgaggaggtcggcatagcagaggccgggcctgaatccgaagtgagaacggagcccgcagcagaagctgaagctgcctccggaccttccgagagtccctcccctcctgccgctgaggagctacccggctcgcatgcagagccaccagttcctgcacagggcgaggccccgggcgaacaagccagagatgagcgcagtgattcccgagcccaagccgtatctgaagacgccggggggaacgaaggaagggccgccgaagcggaaccgagagctctggagaacggggatgccgatgagccctctttctcagatccggaggattttgtggatgatgtgtcagaggaggaattattaggcgatgttttgaaggatcgaccacaggaggccgatggcattgacagcgtgatcgtggttgacaatgtgccacaggtgggccctgacaggctggaaaagttaaagaacgtgatccacaaaatcttctcaaagtttgggaagattacaaacgacttttaccctgaagaagatgggaagacgaaggggtacattttcctcgagtacgcatccccagcacacgccgttgacgccgtgaagaatgcagatggctacaagttggataagcagcacacgtttcgcgtaaacctctttacagattttgacaaatacatgactataagcgacgagtgggacataccagaaaagcagccttttaaggaccttggcaatctcaggtattggttggaggaggcagagtgtcgcgatcagtactccgttattttcgaatctggcgatcgaacttctattttttggaacgatgtgaaagatccagtctcaattgaagaacgcgctagatggaccgagacatacgtgcgttggtcccctaagggcacctatttggccacgttccaccagcgggggatcgctctgtggggaggggaaaaatttaagcaaattcagcgcttctcccatcagggcgttcagctgattgacttttctccctgcgaaaggtacctcgtgacattctctcccctgatggacacacaagacgacccacaggccatcataatctgggacatacttaccgggcataaaaagagaggcttccattgcgagtcatcagctcattggcccattttcaaatggtcacacgatggcaagttcttcgcgagaatgacccttgacacactaagcatctacgagacaccatccatgggattacttgataagaagtccttaaagataagcggcattaaggacttcagctggtctcctggtggaaacataatcgctttttgggttccggaggacaaagacatccctgcgagggtgacattgatgcagcttccgacccgccaggaaatccgtgttaggaatctatttaatgtcgttgattgtaagctgcactggcagaagaatggggactatctgtgcgtgaaagtggaccgaacacccaagggaacccaaggagtcgttacgaactttgaaatctttaggatgcgagagaaacaggtccccgtggacgtcgttgagatgaaagagaccatcattgccttcgcctgggagcctaacggtagcaagttcgcagtattgcacggtgaggccccgaggatctccgttagtttttatcacgtgaagaacaatggcaagatcgaactaatcaaaatgttcgacaagcaacaagccaataccatcttttggtctccacagggccaattcgtggtcctcgccgggcttagaagtatgaacggagcactcgcattcgtggatacgtctgattgtactgttatgaacatcgccgagcactatatggcctccgacgtcgaatgggatcctacaggccgctatgtggtgacatcagtgagctggtggtcccataaggtcgacaacgcatactggctctggacctttcagggccgcttgctacagaaaaacaacaaggaccgtttctgtcaactcctttggaggccacggccgcccactctgttatcccaagagcagatcaaacagatcaagaaggaccttaagaagtacagtaaaatctttgagcaaaaggatagactgtcacagtctaaagcctcaaaagaacttgttgagaggcgccgtacaatgatggaggactttagaaaataccgcaaaatggcccaggaactctacatggagcaaaaaaacgaacggctcgagctgcgggggggcgttgacacagacgaacttgactctaatgtcgatgactgggaggaagaaaccattgaattttttgtgacggaggagatcatacctttaggcaatcaggaatag

SEQ ID NO: 31258 - DNA, 2217 bp, Artificial Sequence
  derived and/or modified sequence
atgcaagatgcagaaaatgtggcggtgcccgaagccgctgaggagagggcagggtctcacgccgaaccgcccgttccagcacagggggaagccccaggagaacaggcaagagatgaacgttccgatagccgcgcgcaggcagttagcgaggatgctggcggcaacgagggaagggctgccgaggcagagcccagagctctggagaacggagatgccgacgagccctccttcagcgatcctgaggacttcgtagatgatgtcagtgaggaggagctgctgggcgacgtgctgaaggaccggccacaggaagctgacggaatagacagcgtgattgtagtggacaacgtccctcaggtaggcccagaccgtctggaaaaactgaaaaacgtgatccataaaatcttcagcaagttcggcaagatcacaaacgacttctatcctgaagaggatgggaagaccaagggttacatatttctggagtacgcatcccctgcccacgcagtcgacgctgtgaagaatgccgacgggtacaaattagataaacaacacacattcagggtcaatctcttcacagacttcgataaatacatgactatcagcgacgagtgggatattcctgagaagcagccattcaaggacttaggtaatctaagatactggctggaagaggcagaatgccgagaccagtattcagtgatctttgagtccggcgaccgcacatccattttctggaatgacgtcaaggatccggtgtctatcgaagagcgagccaggtggacagagacctatgtgcggtggtctccaaagggtacgtacctggccacctttcatcagcgtggcatagccttgtggggaggagagaagttcaaacagattcaacgcttctcacatcagggagtccaactaatcgatttcagcccgtgcgaacgatacctggtgacattctcaccactcatggacacccaagatgatccacaggcaatcataatttgggacatcctcacaggtcataagaagcgcggtttccattgcgaatcctcagcccattggcccatattcaaatggagtcatgatgggaagttcttcgctcggatgacactggacacattgagtatttatgaaacgccttccatgggactgcttgacaagaaatctctcaagatttcaggcattaaggatttctcctggagcccgggggggaacatcatcgccttctgggtaccagaggacaaagatatcccagccagggtcactttgatgcagttgccaacacggcaagaaattcgtgtgaggaacttattcaacgtggtggactgcaagctgcactggcagaagaacggcgattacctgtgcgtcaaggtggacaggacccccaagggaacccagggggtggtgactaactttgagatttttaggatgcgggagaagcaggttccagtggacgtggtcgagatgaaggagaccattattgctttcgcatgggagcccaatgggtctaagttcgccgtcctccacggagaagcccctagaatctccgttagcttttaccacgtcaagaataacggcaaaatagagttgattaagatgtttgacaaacagcaggctaatactattttctggtcaccacaaggccagtttgtggtgctcgcaggcctgaggtctatgaatggagcccttgcctttgttgacacttcagattgcacagtcatgaacatcgccgagcattacatggcaagcgatgtggagtgggaccctacaggaaggtacgttgtgaccagcgtaagctggtggtcacacaaggtggacaacgcctactggctttggacattccagggccgtctgctgcaaaaaaacaataaggatcgtttctgccaactgttgtggaggccccgtcctcctacccttctgtcccaggaacagataaaacagataaagaaagaccttaagaagtacagcaaaatctttgaacagaaagacagattatctcaatccaaggcaagcaaggagctggtggagcgccgaaggactatgatggaggactttcggaaatatagaaagatggcccaagagttgtacatggagcagaaaaatgagagactggaactaagagggggcgttgatacggatgagttagactcaaacgttgacgattgggaggaggaaaccatagaattctttgttacagaggagatcattccactggggaatcaggaatag

SEQ ID NO: 31259 - DNA, 2619 bp, Artificial Sequence
  derived and/or modified sequence
atgcaggatgctgaaaatgtggccgtgcctgaggccgctgaggagagagctgagcccggccagcagcagcctgctgctgagcccccacctgctgagggcctgctgcggcctgctggccctggggcccctgaggccgccggcacagaggccagcagcgaggaggtgggcattgctgaggccggccctgagagcgaggtgaggacagagcctgctgctgaggccgaggccgccagcggccccagcgagagccccagccccccagctgctgaggagctgcccggcagccatgctgagccccctgtgcctgcccagggcgaggcccctggagagcaggccagagatgagaggagtgacagccgggcccaggccgtgtctgaagatgctggaggaaatgaaggccgggctgctgaggccgagccccgggccctggagaatggagatgctgatgagcccagcttcagtgaccctgaagattttgtggatgatgtgtctgaggaggagctgctgggagatgtgctgaaggaccggccccaggaggctgatggcattgattctgtgattgtggtggacaacgtgccccaggtgggccctgaccggctggagaagctgaagaatgtcatccacaagatcttcagcaagtttgggaagatcaccaatgacttctacccagaagaagatggcaagaccaagggctacatcttcctggagtatgccagccctgcccatgctgtggatgctgtgaagaatgctgatggctacaagctggacaagcagcacaccttccgggtgaacctcttcacagactttgacaagtacatgaccatcagtgatgagtgggacatccctgagaagcagcccttcaaggacctgggcaacctgcgctactggctggaggaggctgaatgtcgggaccagtacagcgtcatctttgagagcggggacaggaccagcatcttctggaatgatgtgaaggaccctgtgtccattgaggagcgggcccgctggacagagacctacgtgcgctggagccccaagggcacctacctggccaccttccaccagaggggcatcgccctgtggggcggggagaagttcaagcagatccagcgcttcagccaccagggcgtgcagctgattgacttcagcccctgtgagcgctacctggtgaccttcagccccctgatggacacccaggatgacccccaggccatcatcatctgggacatcctgaccggccacaagaagaggggcttccactgtgagagcagcgcccactggcccatcttcaagtggagccatgatggcaagttctttgccaggatgaccctggacaccctgagcatctatgagacccccagcatgggcctgctggacaagaagagcctgaagatcagcggcatcaaggacttctcctggagccctgggggcaacatcatcgccttctgggtgcctgaggacaaggacatcccagcccgggtgaccctgatgcagctgcccacccggcaggagatccgggtgaggaacctcttcaacgtggtggactgcaagctgcactggcagaagaatggagactacctgtgtgtgaaggtggacaggacccccaagggcacccagggcgtggtgaccaactttgagatcttcaggatgagggagaagcaggtgcctgtggatgtggtggagatgaaggagaccatcatcgcctttgcctgggagcccaacggcagcaagtttgctgtgctgcatggagaggccccccgcatctctgtgtccttctaccacgtgaagaacaacgggaagattgagctgatcaagatgtttgacaagcagcaggccaacaccatcttctggagcccccagggccagtttgtggtgctggccggcctgcgctccatgaatggagccctggcctttgtggacaccagtgactgcaccgtgatgaacattgctgagcactacatggccagtgatgtggagtgggaccccaccggccgctacgtggtgacctctgtgtcctggtggagccacaaggtggacaatgcctactggctgtggaccttccagggccgcctgctgcagaagaacaacaaggaccgcttctgccagctgctgtggaggccccggccccccaccctgctgagccaggagcagatcaagcagatcaagaaggacctgaagaagtacagcaagatctttgagcagaaggaccggctgagccagagcaaggccagcaaggagctggtggagaggaggaggaccatgatggaggacttcaggaagtacaggaagatggcccaggagctgtacatggagcagaagaatgaaaggctggagctgcggggcggcgtggacacagatgagctggacagcaatgtggatgactgggaggaggagaccatcgagttctttgtgacagaggagatcatccctggcatccgcagtgacctggagcactgtgcccagccctgtgtgctgtggagccggggccggcctgctggcagccgggtgaccccagccagcagcctgtgcagcctggccctggactgtgactgtgcctggatcctgcccctgcggcacatctttgtgcccttcagcccctggtgcctgcagtggggcatctag

SEQ ID NO: 31260 - DNA, 2445 bp, Artificial Sequence
  derived and/or modified sequence
atgcaggatgctgaaaatgtggccgtgcctgaggccgctgaggagagagctgagcccggccagcagcagcctgctgctgagcccccacctgctgagggcctgctgcggcctgctggccctggggcccctgaggccgccggcacagaggccagcagcgaggaggtgggcattgctgaggccggccctgagagcgaggtgaggacagagcctgctgctgaggccgaggccgccagcggccccagcgagagccccagccccccagctgctgaggagctgcccggcagccatgctgagccccctgtgcctgcccagggcgaggcccctggagagcaggccagagatgagaggagtgacagccgggcccaggccgtgtctgaagatgctggaggaaatgaaggccgggctgctgaggccgagccccgggccctggagaatggagatgctgatgagcccagcttcagtgaccctgaagattttgtggatgatgtgtctgaggaggagctgctgggagatgtgctgaaggaccggccccaggaggctgatggcattgattctgtgattgtggtggacaacgtgccccaggtgggccctgaccggctggagaagctgaagaatgtcatccacaagatcttcagcaagtttgggaagatcaccaatgacttctacccagaagaagatggcaagaccaagggctacatcttcctggagtatgccagccctgcccatgctgtggatgctgtgaagaatgctgatggctacaagctggacaagcagcacaccttccgggtgaacctcttcacagactttgacaagtacatgaccatcagtgatgagtgggacatccctgagaagcagcccttcaaggacctgggcaacctgcgctactggctggaggaggctgaatgtcgggaccagtacagcgtcatctttgagagcggggacaggaccagcatcttctggaatgatgtgaaggaccctgtgtccattgaggagcgggcccgctggacagagacctacgtgcgctggagccccaagggcacctacctggccaccttccaccagaggggcatcgccctgtggggcggggagaagttcaagcagatccagcgcttcagccaccagggcgtgcagctgattgacttcagcccctgtgagcgctacctggtgaccttcagccccctgatggacacccaggatgacccccaggccatcatcatctgggacatcctgaccggccacaagaagaggggcttccactgtgagagcagcgcccactggcccatcttcaagtggagccatgatggcaagttctttgccaggatgaccctggacaccctgagcatctatgagacccccagcatgggcctgctggacaagaagagcctgaagatcagcggcatcaaggacttctcctggagccctgggggcaacatcatcgccttctgggtgcctgaggacaaggacatcccagcccgggtgaccctgatgcagctgcccacccggcaggagatccgggtgaggaacctcttcaacgtggtggactgcaagctgcactggcagaagaatggagactacctgtgtgtgaaggtggacaggacccccaagggcacccagggcgtggtgaccaactttgagatcttcaggatgagggagaagcaggtgcctgtggatgtggtggagatgaaggagaccatcatcgcctttgcctgggagcccaacggcagcaagtttgctgtgctgcatggagaggccccccgcatctctgtgtccttctaccacgtgaagaacaacgggaagattgagctgatcaagatgtttgacaagcagcaggccaacaccatcttctggagcccccagggccagtttgtggtgctggccggcctgcgctccatgaatggagccctggcctttgtggacaccagtgactgcaccgtgatgaacattgctgagcactacatggccagtgatgtggagtgggaccccaccggccgctacgtggtgacctctgtgtcctggtggagccacaaggtggacaatgcctactggctgtggaccttccagggccgcctgctgcagaagaacaacaaggaccgcttctgccagctgctgtggaggccccggccccccaccctgctgagccaggagcagatcaagcagatcaagaaggacctgaagaagtacagcaagatctttgagcagaaggaccggctgagccagagcaaggccagcaaggagctggtggagaggaggaggaccatgatggaggacttcaggaagtacaggaagatggcccaggagctgtacatggagcagaagaatgaaaggctggagctgcggggcggcgtggacacagatgagctggacagcaatgtggatgactgggaggaggagaccatcgagttctttgtgacagaggagatcatccccctgggcaaccaggagtag

SEQ ID NO: 31261 - DNA, 2217 bp, Artificial Sequence
  derived and/or modified sequence
atgcaggatgctgaaaatgtggccgtgcctgaggccgctgaggagagagctggcagccatgctgagccccctgtgcctgcccagggcgaggcccctggagagcaggccagagatgagaggagtgacagccgggcccaggccgtgtctgaagatgctggaggaaatgaaggccgggctgctgaggccgagccccgggccctggagaatggagatgctgatgagcccagcttcagtgaccctgaagattttgtggatgatgtgtctgaggaggagctgctgggagatgtgctgaaggaccggccccaggaggctgatggcattgattctgtgattgtggtggacaacgtgccccaggtgggccctgaccggctggagaagctgaagaatgtcatccacaagatcttcagcaagtttgggaagatcaccaatgacttctacccagaagaagatggcaagaccaagggctacatcttcctggagtatgccagccctgcccatgctgtggatgctgtgaagaatgctgatggctacaagctggacaagcagcacaccttccgggtgaacctcttcacagactttgacaagtacatgaccatcagtgatgagtgggacatccctgagaagcagcccttcaaggacctgggcaacctgcgctactggctggaggaggctgaatgtcgggaccagtacagcgtcatctttgagagcggggacaggaccagcatcttctggaatgatgtgaaggaccctgtgtccattgaggagcgggcccgctggacagagacctacgtgcgctggagccccaagggcacctacctggccaccttccaccagaggggcatcgccctgtggggcggggagaagttcaagcagatccagcgcttcagccaccagggcgtgcagctgattgacttcagcccctgtgagcgctacctggtgaccttcagccccctgatggacacccaggatgacccccaggccatcatcatctgggacatcctgaccggccacaagaagaggggcttccactgtgagagcagcgcccactggcccatcttcaagtggagccatgatggcaagttctttgccaggatgaccctggacaccctgagcatctatgagacccccagcatgggcctgctggacaagaagagcctgaagatcagcggcatcaaggacttctcctggagccctgggggcaacatcatcgccttctgggtgcctgaggacaaggacatcccagcccgggtgaccctgatgcagctgcccacccggcaggagatccgggtgaggaacctcttcaacgtggtggactgcaagctgcactggcagaagaatggagactacctgtgtgtgaaggtggacaggacccccaagggcacccagggcgtggtgaccaactttgagatcttcaggatgagggagaagcaggtgcctgtggatgtggtggagatgaaggagaccatcatcgcctttgcctgggagcccaacggcagcaagtttgctgtgctgcatggagaggccccccgcatctctgtgtccttctaccacgtgaagaacaacgggaagattgagctgatcaagatgtttgacaagcagcaggccaacaccatcttctggagcccccagggccagtttgtggtgctggccggcctgcgctccatgaatggagccctggcctttgtggacaccagtgactgcaccgtgatgaacattgctgagcactacatggccagtgatgtggagtgggaccccaccggccgctacgtggtgacctctgtgtcctggtggagccacaaggtggacaatgcctactggctgtggaccttccagggccgcctgctgcagaagaacaacaaggaccgcttctgccagctgctgtggaggccccggccccccaccctgctgagccaggagcagatcaagcagatcaagaaggacctgaagaagtacagcaagatctttgagcagaaggaccggctgagccagagcaaggccagcaaggagctggtggagaggaggaggaccatgatggaggacttcaggaagtacaggaagatggcccaggagctgtacatggagcagaagaatgaaaggctggagctgcggggcggcgtggacacagatgagctggacagcaatgtggatgactgggaggaggagaccatcgagttctttgtgacagaggagatcatccccctgggcaaccaggagtag

SEQ ID NO: 31262 - DNA, 2619 bp, Artificial Sequence
  derived and/or modified sequence
atgcaggacgccgagaacgtggccgtgcccgaggccgccgaggagcgggctgagcccggccagcagcagccagcggccgaaccacccccagcagaagggttgctcaggcccgctggccccggcgcgccagaagcagcagggaccgaagcttcaagtgaagaggtgggaatcgctgaggccgggccagaatctgaagttcgaactgaacctgcagctgaagctgaggccgctagtggcccttctgaatcaccttcgcccccagcagcggaagagctgcccggaagtcatgccgagcccccagtcccagctcaaggggaggctccaggtgagcaagccagagacgaacgttctgattcccgagctcaagctgtgtcagaagacgccggcggcaatgagggccgggctgccgaagccgagccacgcgctctggaaaacggggacgcagacgagcccagctttagcgatcctgaagatttcgtagacgacgtctccgaagaggagttgttaggtgacgtccttaaggaccggccacaggaggccgatggcatcgactcagtaatagtggtcgataatgtccctcaagtcggacctgaccggctggagaagctcaagaacgtgattcacaagattttctcgaagttcggaaagattacaaatgatttttaccctgaggaagatggcaagacaaaggggtatatttttctggagtatgcctcacctgcccatgctgtagacgctgtaaagaacgccgacggctacaagcttgataaacagcacacctttcgggtcaatctgtttactgatttcgacaagtacatgaccatcagcgacgaatgggatatacctgaaaagcaaccttttaaggatcttggcaacctgcggtactggttggaggaggccgagtgccgagaccaatatagcgtgatatttgagagcggcgataggacaagcattttctggaacgatgtgaaggaccccgtgtccattgaggaacgggcccgttggactgagacatacgtgcgctggtcccccaagggaacatatctagccacgtttcaccagagggggatcgccctatggggaggggagaaattcaagcagatccagcggttctcacaccaaggcgtgcagttgattgattttagtccatgcgaacggtatcttgtaaccttttcaccactgatggacacccaggacgaccctcaggccataattatctgggatattctaactggtcacaagaagaggggtttccactgcgaatcgagtgctcactggcccatcttcaaatggtcgcacgatggcaaattttttgcacgcatgaccctggacaccctcagcatttacgagaccccaagcatggggctgctggataagaagagcctcaagatcagcggaataaaggacttcagctggtcacccgggggcaatataattgccttttgggtccccgaggacaaggatatccctgcaagggtaactctgatgcagctccctactcgacaagaaatacgtgtgagaaacctatttaacgtcgtggactgtaagctgcattggcagaagaacggtgattacctctgcgttaaggtggatagaacacctaaaggaacccagggcgtagtgacaaactttgaaatcttcaggatgagagagaaacaagtgcctgtcgacgtggtggaaatgaaagaaaccatcattgccttcgcttgggagcccaacgggtcaaaattcgccgttttgcacggggaggcgccacgaatttcagtaagcttctatcatgtgaagaataatggtaaaattgaacttatcaaaatgttcgacaaacagcaggccaacacaattttctggagtcctcaaggccaattcgtggtactggctggcctacggtctatgaacggcgcgcttgcatttgtcgacacgagcgattgcacagtcatgaacattgccgaacactacatggctagcgacgtggagtgggatccaacagggcgttacgtggtgacaagcgtgtcctggtggagtcataaagtcgataatgcttattggctatggactttccaaggcagattactccagaaaaataacaaggaccggttctgccagctgttgtggcgccctcgccctcctacgctgctctcacaggagcagatcaagcagatcaagaaggacctgaaaaagtattctaaaatcttcgagcaaaaagatcgtctgagtcagagtaaggcctctaaagagttggtcgagaggcgaagaactatgatggaagattttaggaaatatcgtaaaatggcacaggagctgtacatggaacaaaagaacgaacgcttggagctgcgaggtggcgtggacacagatgagctcgattctaacgtagacgactgggaggaggagacaattgagttcttcgtcacagaggagatcattcctggaatcagaagtgatcttgaacactgtgcacagccatgcgttctctggagtcggggacgaccagctgggagccgcgttacccctgcctcatccctctgctctctagccctagactgtgactgcgcttggatcttgcctctacggcacatcttcgttcctttctccccttggtgcttgcagtggggaatctag

SEQ ID NO: 31263 - DNA, 2445 bp, Artificial Sequence
  derived and/or modified sequence
atgcaggacgccgagaacgtggccgtgcccgaggccgccgaggagcgagccgagcccggacagcagcagccagctgctgagcctccgcccgcggagggactgctccgacccgccggccctggggcccctgaagcagcgggtaccgaggcttcttccgaggaagtgggaatcgccgaggctggaccggagtctgaagtgcgaacggaacccgctgccgaggcagaagccgctagtgggccctctgagtcacctagcccacccgccgcagaagagctgcccggatcacacgcagaaccaccggtcccagcccagggggaggctccaggggagcaggcacgcgacgaacgctcagatagtcgagctcaggctgttagtgaggacgcgggtggcaatgaaggaagagccgccgaggctgagccccgcgcattagaaaacggtgatgctgacgaaccttcctttagcgatcctgaggatttcgtggacgacgtcagtgaagaagagttgctgggcgatgtcctgaaggaccgccctcaggaggctgacggcatagactccgtcatcgtggttgacaatgttccacaagtgggacccgaccgcctggaaaagcttaagaatgtgatccacaagatcttctcaaagttcggaaagattactaacgatttttatccggaggaggacggtaaaacaaagggatatatatttcttgaatatgcttcgcccgcccacgctgtggacgccgtaaagaacgctgacgggtacaaattagacaagcagcacactttcagagtcaatctcttcacagatttcgacaaatatatgaccatatccgacgaatgggatatcccagagaagcaaccgttcaaggacctgggaaatctgaggtattggctggaggaggccgagtgtcgtgaccagtactccgttatattcgagtcaggggaccgcacctctatcttctggaacgatgtgaaagaccctgtgtccatagaagagcgagcaaggtggactgagacatatgttcgctggtctcccaaagggacttacctcgccactttccatcaaagaggaatagcactttggggcggggagaagtttaaacagattcaacggttctcacaccaaggcgtgcaacttattgacttcagcccatgtgagcgctatctggtgacattcagccctcttatggacacacaggacgacccacaggcgataatcatttgggacatcctgaccggccacaaaaaacgcggattccactgcgaatcttcagcacattggccaattttcaagtggtcgcatgacggcaagttcttcgcgcgaatgactctggacacattgagcatctatgagacgcccagtatgggcctccttgacaaaaaaagtcttaaaatcagcggcataaaagatttttcttggagtcctggtggaaacattattgctttctgggtccctgaggacaaggacatcccagctcgcgtgacactgatgcaactaccgactaggcaagaaatacgtgtccgaaatctgttcaacgttgtagactgcaagctgcattggcagaagaatggagactatctgtgtgtgaaggtggacagaacacccaaggggactcagggagtggtcactaacttcgagatcttcagaatgagagagaagcaggttcctgtggacgtcgttgagatgaaggagaccattatcgctttcgcctgggaaccaaacggcagcaaattcgcagtcctgcacggcgaggcgcctcgaatcagcgtctctttctatcatgtgaagaataacggcaagatcgagcttatcaaaatgtttgataagcagcaagccaatacaatcttctggtccccacagggacagtttgtcgttctagctggtctgcgaagcatgaatggagccctggcattcgtggatacaagcgattgcaccgtcatgaatattgcagaacactacatggccagcgatgtggaatgggacccgaccggtcgatatgtggtaacgtccgtaagctggtggagtcacaaagttgataacgcgtactggctgtggacctttcaggggcgtctcctccagaaaaacaacaaggatcgcttctgtcagcttctctggcgccctaggccgccaacgctccttagccaagaacagattaagcagattaaaaaggatctgaaaaaatatagcaaaatcttcgaacaaaaggataggttaagccagtcgaaggccagcaaggaactggtggagaggcgcaggacgatgatggaggacttccgcaagtacaggaagatggcacaggaactttatatggagcagaagaatgaaaggctcgagctccgaggtggagtagacaccgacgaactggacagcaatgtggatgactgggaggaggagacaatagaattctttgtgaccgaggaaatcattcccctgggcaaccaggagtag

SEQ ID NO: 31264 - DNA, 2445 bp, Artificial Sequence
  derived and/or modified sequence
atgcaggacgccgagaacgtggccgtgcccgaggccgccgaggagagggcagaacccggacagcagcagcccgccgccgagcccccacccgccgaaggtctgctaagacctgccgggcctggagccccagaggcagctgggactgaagcatccagcgaagaggtgggcattgccgaagccgggcctgagtccgaggtgcgaactgagccagcagccgaagcagaagcagcttctggccctagcgagagcccttctcctccagccgctgaggagctccccgggtctcacgcggaaccacctgtgcctgcacagggggaggctccgggagagcaggcccgcgacgagcggagcgattccagggcccaagccgtgtccgaggatgccggagggaacgaagggagagccgccgaagcagaaccgcgcgctctcgagaatggcgacgctgacgaacctagtttctctgaccccgaagatttcgtggacgatgtgagcgaagaggagctcctcggggatgttcttaaggacaggccccaggaggccgatggaatcgactccgtcatcgttgttgacaacgtgccacaggtcggacccgacagactggagaagctgaagaatgtcatccacaaaatctttagtaaattcggcaagattaccaatgatttttaccctgaggaggacggcaagactaaggggtatatttttttagagtatgcctcgccagctcatgcagttgatgccgtgaagaacgctgatggatacaagctagacaagcagcacacctttcgggtcaacctgttcaccgactttgacaaatacatgacgatctcagacgagtgggatatcccagaaaagcagccctttaaggacctggggaacctccggtattggctggaggaggcggagtgcagggaccagtacagcgtgatatttgagtctggcgatcggacctccatcttctggaacgacgtgaaggaccctgtgagcattgaggaaagagctcgttggaccgaaacatatgttcgttggtcccccaagggaacttacttggctaccttccatcagagaggcatcgcactgtggggaggcgaaaagtttaagcagattcagcgattttcccaccagggcgtacagcttatagatttcagtccatgtgagcgatatctggtcaccttcagcccgcttatggatactcaggatgacccccaggccataattatctgggacatcttgaccggccataaaaaacggggctttcactgcgagtcaagcgcgcactggcctatatttaaatggagtcatgacgggaagttttttgcacggatgactttagatacgctgagcatctacgagacgccatcgatggggctgctggataaaaaaagcctgaagattagtgggataaaggacttcagctggtcccctggaggcaatattattgccttctgggtgcctgaagataaggacatcccagctagagtaacccttatgcaactgccaacaaggcaggaaatcagagtcagaaacctgttcaacgttgtggactgtaagttgcattggcagaaaaacggagactacctctgcgtgaaagtcgatcggaccccaaaaggtacacagggtgtggtcaccaattttgagatctttagaatgagggagaaacaggtcccagtcgacgtggtagagatgaaggaaacgatcatcgccttcgcctgggagcccaacgggagcaagtttgcagtactgcatggagaggcaccccgaatctccgtttctttttaccatgtgaagaacaatggcaaaattgagctcatcaaaatgtttgataagcagcaagctaacaccattttttggagcccacagggccagttcgtcgtgcttgcaggccttagaagcatgaatggcgcccttgcttttgttgatactagcgactgcactgtcatgaatatcgccgagcactatatggcttccgatgtggagtgggatcccaccggccggtatgtggttacgtctgtcagctggtggtcccataaggtggacaatgcatactggctgtggaccttccagggtagattgctgcagaagaacaataaggaccgtttctgtcagttgctctggaggcctcgtccccccactttgctgtcccaagagcagatcaaacagatcaaaaaagacttaaagaagtactctaaaatctttgaacaaaaggatcgactttcccagtcaaaagcctctaaagaactcgtcgagcggcgaaggaccatgatggaggactttcggaagtatcgaaagatggctcaggaactctatatggaacagaaaaatgagcgtctggagcttcgaggcggtgttgataccgacgaacttgactcgaacgtggatgattgggaggaagagacgatcgaatttttcgtcacagaggaaatcatccccctgggaaaccaggagtag

SEQ ID NO: 31265 - DNA, 2217 bp, Artificial Sequence
  derived and/or modified sequence
atgcaggacgccgagaacgtggccgtgcccgaggccgccgaggagagagcaggtagtcatgccgaaccacccgttccggcgcagggagaggccccaggagaacaggcgagggatgaacggtctgatagtcgtgcccaggcagtgtctgaggacgccggtgggaatgagggcagggctgccgaagcggagccacgcgccctagagaacggcgacgccgacgagccaagcttctcagacccggaggattttgtagatgacgtttctgaggaggagttgctcggcgacgtcctgaaagacaggccccaggaggccgatggcatcgacagtgttattgttgtagacaacgtgccccaggtgggcccagatcggctcgagaaactcaaaaacgtgattcataagattttcagtaagttcggaaagattacaaatgacttttacccagaggaagacgggaaaacaaaaggctacatcttcctggagtacgcctccccggcccatgcagtcgacgcagtgaagaatgccgatggttacaagctcgacaaacagcatactttccgggtcaatctatttaccgatttcgacaagtatatgactataagcgacgagtgggatattccagaaaagcaaccctttaaggacctggggaatctgcggtattggttggaggaggcagagtgtcgagatcaatactccgtaatctttgagagcggagatcgaacgtcaatcttttggaacgacgtgaaagaccctgtttcaatcgaggaaagagcccgctggacagaaacgtatgttcggtggtctcccaaaggtacctatctcgcaacttttcaccagcgaggcatcgcactatggggaggcgagaagttcaagcagatacagaggttttctcatcaaggggtccagttaatagacttttccccttgcgagcgctacctcgttaccttcagccccttgatggatacacaggatgacccccaggccattataatctgggatatcctgaccggacataaaaaaagaggcttccactgtgagagcagtgcccattggcctatctttaagtggtcacatgatggtaagttctttgctcgaatgactctggacaccctcagtatctatgaaaccccctccatgggcctcctcgataaaaaaagcctgaagatctcaggaatcaaggattttagttggtccccagggggcaatatcatagcgttctgggtccctgaagacaaagacatcccagccagggtgacactcatgcagctgcctactcggcaggaaatcagggttcgaaatttgttcaacgttgtagactgtaaactgcattggcagaaaaatggggactatctgtgtgttaaggtggaccggacgccgaaaggtacgcagggcgttgtaacaaacttcgagatatttcggatgcgcgaaaagcaagtccccgtggacgtcgttgagatgaaagaaactatcattgcatttgcctgggagccaaatgggtcaaaattcgcagtgttgcacggggaggccccacgcatatccgtgagcttctaccacgtgaaaaacaacgggaagattgagctgattaagatgtttgacaagcaacaggccaataccattttctggtctcctcagggacaattcgtcgtcttagccggtctgagatctatgaatggtgccctggccttcgttgacacgtccgattgcaccgtcatgaatatagctgaacactatatggcgagcgatgtcgaatgggaccccactggccggtatgtggtgaccagtgtctcttggtggtcccataaggtcgataacgcctactggctgtggacattccagggacgactgctgcagaagaacaacaaggatcgcttctgtcagctgctctggagaccacgacccccgaccctgcttagccaggaacagataaagcagatcaaaaaggacctcaaaaaatactctaagatttttgagcagaaggaccggctgtcccagagcaaagcgagtaaagagctggtggagaggcggagaacaatgatggaagatttccgaaagtaccgaaaaatggctcaggagttgtacatggaacagaagaatgagcgcctggagctgcgaggtggagtggacaccgatgaactggattcaaacgttgacgactgggaggaggagacgatcgagttcttcgtgaccgaagagattattcctctcggcaatcaagaatag

SEQ ID NO: 31266 - DNA, 2619 bp, Artificial Sequence
  derived and/or modified sequence
atgcaggacgcagagaatgttgccgtccccgaagccgcagaggaacgtgccgagcctgggcagcagcaaccagccgcagaaccccctccagcagagggattgctacggccagctgggccaggcgctcccgaagcagccggtaccgaggcgagttctgaggaggtaggtatcgctgaggcaggacctgagagtgaagtgcgaaccgagccggctgctgaagcagaagccgcttccggtccatcagaatccccaagtcccccagccgctgaggagctgcctggttcacacgccgagccacctgtccccgctcagggagaggctccaggcgaacaggccagagacgagcggtcagacagcagggcgcaggctgtctcagaagatgctggtggcaatgaaggcagagcagcagaggcagaaccaagagccctggagaatggagacgcagacgaaccttccttcagtgaccccgaagatttcgtggatgacgtcagcgaagaggagttgctcggggacgtgctcaaagataggccacaggaggctgatggcattgactcagtgattgtggttgataacgtgcctcaggtggggccagacaggctggagaaactgaaaaacgtgatccacaaaattttttctaagttcggaaagataaccaacgatttctatccggaggaagatgggaaaacaaaggggtacatcttcctggaatatgcgagtccagctcacgcggtcgacgccgttaagaatgccgacgggtacaaactggataaacagcatacgtttagggtaaatctctttacggacttcgacaagtatatgaccataagcgacgaatgggatatccccgaaaaacagccattcaaagatctgggaaatctgcggtactggctggaggaagccgagtgtagagaccaatactccgtgattttcgagtctggcgatcggactagcatcttttggaacgatgtgaaggatcccgtgagcatcgaggaaagggcaagatggaccgagacctacgtcagatggtcacccaaggggacatatctcgctacttttcatcagcggggaatcgcactatggggaggcgagaaatttaagcaaatccagcgattcagtcaccagggtgtgcagctgatcgatttctctccctgtgaaagatacctggtgacgtttagtccccttatggatactcaggacgaccctcaagctataatcatctgggatattctaacggggcataagaagcggggattccactgcgaaagttccgcccactggcccattttcaagtggtcccatgatggcaagttctttgcccgaatgacattggataccctttccatctacgagacaccttccatgggcctgcttgacaagaaatcccttaagatctccggcatcaaagatttttcatggagtcctggagggaatatcattgcattctgggtccctgaggacaaagacatccctgccagagtcaccctgatgcaattacccacaagacaagagatccgggtgcggaacctgtttaacgttgtcgactgcaagcttcattggcaaaagaatggggactacctgtgtgtgaaagtcgacagaaccccgaaggggactcaaggcgtggtgaccaacttcgagatcttcagaatgcgggagaagcaggtgcctgtagacgtggtggagatgaaggagacaattattgctttcgcttgggaaccaaacggcagcaaatttgcagttctccacggggaggccccacggatcagtgtgtccttctatcatgtgaaaaacaatggcaaaatagaactaattaaaatgtttgacaaacagcaggccaacaccattttctggagcccacaaggacagttcgtggtcctcgcaggtctgagatccatgaatggcgctcttgcctttgtagataccagcgattgtacagttatgaatatcgccgaacactacatggctagtgatgtagagtgggaccccacgggtcgctacgtcgtaacaagcgtctcttggtggtctcacaaagttgacaacgcatattggttgtggacttttcagggaaggttgctgcagaagaacaacaaggatcggttttgtcaattgctctggcggcctaggccccctactctgctgtcacaagaacagataaaacagatcaaaaaggacctgaagaagtactcaaagatcttcgagcagaaagatcgcctctctcagtccaaggcatcaaaagaactggtcgaaagacggaggaccatgatggaagatttcaggaagtacaggaaaatggctcaagaactttacatggaacagaaaaatgagagactggaactgcgcggaggggtggatactgatgagctggacagcaatgtcgacgattgggaagaagaaacaatcgagttctttgtcacggaagaaattatcccaggaatacggtccgacctggaacattgcgcccagccctgcgtgctttggagtagaggacggcctgcagggtctcgggtcacacctgcatccagcctgtgctccctggccctagattgcgattgcgcttggatcctcccactgaggcacatctttgtcccattcagtccgtggtgtctgcagtggggcatttag

SEQ ID NO: 31267 - DNA, 2445 bp, Artificial Sequence
  derived and/or modified sequence
atgcaggatgccgagaacgtggctgtacccgaggcagcggaagagagagctgagcctggtcagcagcagcccgcagcagagccccctcctgccgaaggcctcctgagaccagcaggtcccggtgcccctgaagccgcaggaactgaagcaagttctgaagaagtggggatcgcggaggccggtcccgagagcgaagtcagaactgaacccgcagctgaagctgaggccgcatctgggccttcagagagcccctcccctccggctgcagaggaactccctgggtcacacgcagagcctccggttcccgctcagggagaagcccctggggaacaggcacgagatgagaggtcagatagtagggcgcaagccgtgtctgaagatgcagggggtaacgaagggagagccgcagaggccgaacctcgtgcattagaaaacggagatgccgatgaacctagtttcagtgatcctgaggacttcgtggatgatgtgagcgaggaagagttactcggggatgtgttaaaggaccggcctcaagaagcagacggaattgactctgtcattgtcgtagacaatgtcccacaggtcgggccagatagactcgaaaaactcaaaaacgtcatccataagattttctcaaaatttggtaagattacaaatgatttttatcccgaagaggacgggaaaacaaagggatacatctttcttgaatacgcttcgccggctcatgctgtggatgctgtgaagaacgcagatggttacaagttagataagcaacacacattcagggttaaccttttcacggactttgacaaatatatgaccatctccgatgaatgggatataccagaaaaacaaccctttaaggacctaggcaacttgagatactggctcgaagaggctgagtgtcgggaccagtacagcgtgatcttcgagagtggtgaccggacaagcatcttctggaacgatgtgaaagacccggtgtcaattgaagagagggccaggtggacagagacttatgtgcggtggagcccaaagggaacctaccttgcaacattccatcagcgcggaatcgccctgtggggtggcgaaaagttcaagcagatacagaggttttcgcaccagggagttcagcttatcgacttttcaccatgtgagaggtatctggtcacattcagcccattgatggacacccaggacgacccccaagcgatcatcatatgggacattcttaccgggcacaagaaaagagggttccactgtgagtcgagtgcccattggcccattttcaagtggtcccatgacggcaagttttttgcccgtatgactctagataccctgtcaatttacgagacaccatctatggggttattagacaagaaaagtttgaagatctccggaattaaagattttagctggagtccaggcggaaatatcattgccttttgggtgcctgaagataaagatatccctgcccgagtgaccctgatgcaacttcctactcggcaggaaattagagttcgcaatctgtttaatgttgtggattgtaaactccattggcagaaaaacggtgattacctgtgtgtcaaggtggaccgcaccccgaagggtactcagggcgtggttacgaacttcgagatttttcgaatgagggaaaagcaagtgcctgtggacgtggttgagatgaaagagactattattgcgtttgcatgggaaccgaatggttccaagtttgcagtcctccacggagaagccccacggatctctgtttctttttatcatgtgaagaacaacgggaaaatcgagctgataaaaatgtttgacaaacaacaagcgaataccattttctggtctcctcagggtcagttcgtggtgctggcgggactgcgcagcatgaatggagctttggccttcgtcgacacatcggactgtacagtgatgaatatagcagaacattatatggcctcagacgtcgagtgggatccaaccggcagatacgtcgtaacatcagtctcttggtggtctcacaaggtagataacgcatattggctgtggacatttcaaggaaggctcctgcagaagaataataaggaccgattttgccagctcctgtggaggcctaggccccctactctcctgtctcaagagcagatcaagcagatcaagaaggatcttaaaaaatattccaagatatttgagcagaaggaccgccttagtcaaagtaaagcctctaaggagcttgtggaaagaagaagaactatgatggaggactttcggaaatacagaaagatggctcaggagctgtacatggagcagaaaaatgagcggctcgaacttcggggaggcgtggacacggacgagctggactctaatgtggatgattgggaggaggagactattgagttctttgtcaccgaggagattattcccttaggcaaccaagagtag

SEQ ID NO: 31268 - DNA, 2445 bp, Artificial Sequence
  derived and/or modified sequence
atgcaggatgccgaaaacgtggcagtgcccgaggctgcagaggaacgggcagagcccggacagcagcagcccgcagctgagcctcccccagcagagggactcttgcggcctgcaggacccggagcccctgaagctgctgggactgaggcctcaagtgaagaggtagggatcgcagaggcaggacccgagagcgaggtgcggaccgagcccgcagccgaagccgaggccgcttcaggcccatcagagagtccttcacccccagcagccgaggagctgcccggatcccacgctgagccgccagtgccagcacagggcgaagccccaggagagcaagcaagagacgagcgttctgactcccgcgctcaagctgtctccgaggatgccggtggcaacgagggtagggcggctgaggcagagccacgcgctctagaaaacggagacgccgacgagccaagcttttctgacccagaggacttcgtggatgatgtatcggaagaagaattgctgggcgacgtactgaaggaccgaccccaggaggcagacggcatcgacagtgtgatagttgttgataacgtcccacaggtggggccagacaggctggagaaactcaaaaatgtgattcacaagatctttagcaaattcgggaagattacaaacgatttctaccccgaagaggacggaaagaccaaagggtatatttttctggaatatgcctccccagctcatgccgtagatgcagtcaagaacgctgacggatataagctggacaagcaacacacttttcgcgtaaatctgttcactgatttcgacaaatacatgacgattagcgatgaatgggacatcccagagaagcagccctttaaagacctgggaaacctgcgatactggctagaggaggcagagtgccgtgatcagtactccgtcatcttcgaaagcggtgataggacaagcatcttctggaatgacgtcaaggaccctgtttcaattgaggagcgcgctagatggaccgagacttatgtaagatggagccccaaagggacctatcttgctacctttcaccagagaggcatcgcactctggggcggtgaaaagttcaagcaaattcagcggttcagtcaccagggggtgcagttaatagacttcagcccttgtgagcgctacctggtcacatttagccctctgatggacacccaggatgaccctcaggcaatcatcatctgggacatattaaccgggcataagaagaggggctttcattgtgaatcttccgcccactggcctatcttcaaatggagccatgatggcaagttcttcgccaggatgaccctagataccttatccatttacgagacaccatcaatgggtctgctggacaaaaaatccctgaagatatcaggcattaaagatttctcctggtccccagggggaaatatcatagccttttgggtgccagaagacaaagatataccagccagagtgacgctaatgcagctgccaacaagacaggagatccgagtgcggaatctgttcaacgttgtggactgcaaactgcattggcagaagaacggagattacctgtgcgtgaaggtagatagaacgcctaagggcacacagggggttgtgaccaactttgagatatttaggatgagggaaaagcaggtgcccgttgacgttgtggagatgaaagaaacaatcatcgccttcgcgtgggagcccaatgggtcaaagttcgccgtcctacatggcgaagctccccgtatatcagtatccttttaccacgtaaaaaacaatggcaagatagagttaattaaaatgtttgacaagcagcaggccaataccattttttggtcacctcagggccagttcgtggtgctggctggcctgcgtagtatgaatggagcactggcattcgtggacacctccgattgcacagtgatgaatatagctgagcattatatggcaagcgatgttgagtgggaccctaccggaagatacgtggtgacaagtgtgtcctggtggtctcataaagtagacaacgcctactggttatggactttccagggtagacttctccagaaaaacaacaaggatcgcttttgtcaactcttatggaggccccgacctcctaccctgttgtcacaggagcagattaagcagatcaaaaaagatctgaagaagtacagcaagatttttgagcagaaggataggctgtcccagagtaaagcctctaaagaattggttgagcggaggcgtacaatgatggaagacttccgcaagtacagaaaaatggcacaggagctttatatggaacagaaaaatgaacgtctcgagttgcgcggtggagtggacactgacgagttggactccaacgtggacgactgggaggaggaaactatcgaatttttcgtgaccgaagagatcatccccctggggaatcaggagtag

SEQ ID NO: 31269 - DNA, 2217 bp, Artificial Sequence
  derived and/or modified sequence
atgcaggatgccgagaatgtggctgtgcccgaggccgcagaggaacgtgcagggagccacgccgaacccccagtgccagcgcagggcgaggcccctggagagcaggcacgcgatgagaggtctgattctcgggcacaggctgtgagcgaggacgcaggaggcaatgagggccgagcagccgaagccgagcctagagcactggaaaacggagacgccgatgaaccgtcattcagtgacccggaggacttcgtggacgatgtttcagaagaggagctgctgggcgatgtgctgaaagacaggccacaggaggcagatgggatcgactccgttattgtcgtggacaacgtcccacaggtgggaccagataggcttgaaaaattaaaaaatgtcattcacaagattttttctaagttcggcaagattaccaatgatttctatccagaggaggacgggaagacgaagggatatatcttcctggagtacgctagcccagctcatgccgtagatgccgttaagaacgctgacggttacaagttggacaagcagcacaccttcagggtgaatctgtttaccgacttcgacaaatacatgaccatctccgatgagtgggatatccccgagaagcagccttttaaggacctcgggaatctgaggtattggctggaagaagcagaatgcagagatcagtacagtgtgatttttgaatccggcgacaggacctcaatcttctggaacgatgtaaaggatccggttagtatagaggagcgggctcgctggaccgaaacatatgtgagatggagcccaaaggggacctacctcgcaacattccaccagcgcggaattgctttatggggcggagagaagttcaaacagattcaaaggttcagccaccagggtgttcagctgatcgacttttctccctgtgaaagatacctggtgaccttctccccactcatggatactcaggatgacccgcaggctattattatatgggatattctgacaggccacaaaaaacgcggatttcactgtgaatcctcagctcactggcctatctttaaatggtcacacgatggcaaattcttcgctcggatgaccctggacactctttctatatacgagaccccctccatgggcctcctagataagaaatccctgaaaatcagtggcattaaggacttcagctggagtccaggcggtaacattatcgctttctgggtccctgaggacaaagacatcccagccagagtaaccttgatgcagctgccaacaagacaggaaatcagagtccggaacctgttcaatgtggtcgattgcaaattacactggcagaagaatggcgattatttgtgcgtcaaggttgatcgaaccccaaagggtacacaaggtgttgttacaaattttgaaatttttaggatgagggagaagcaggtgccagtggacgtggtagagatgaaagagactattatagcgtttgcttgggagcccaatgggagtaaatttgctgttctgcatggagaggctcctagaatcagcgtctcattttatcacgtgaagaacaatgggaaaattgagctcatcaaaatgttcgacaagcagcaagccaacaccatcttctggagtccccagggtcaatttgtggtgctggcaggtcttagaagtatgaatggggcactggcatttgtagacacctcggactgtactgtcatgaatattgcagaacactatatggccagcgatgtggagtgggaccctaccggcagatatgtggtaacgagtgttagttggtggtctcacaaagttgacaatgcctattggctgtggacatttcaaggcaggttactgcaaaagaataacaaggaccgcttttgtcaactgctgtggcggccaaggcctcccacacttctgagccaagagcagatcaagcagatcaaaaaggacctcaaaaagtactcaaagatctttgaacagaaagaccgactgagccagagcaaggctagcaaagaactggttgagcgaagacggaccatgatggaggatttcagaaagtatcgtaaaatggcccaggagctgtacatggagcaaaagaatgaacgcttagagctccgtggcggagtggacacagatgagctcgactcgaatgtcgatgactgggaggaggaaacaatcgaattctttgtcaccgaagaaattatacccctgggaaaccaggagtag

SEQ ID NO: 31270 - DNA, 2619 bp, Artificial Sequence
  derived and/or modified sequence
atgcaggacgccgagaacgtggccgtgcccgaggccgccgaggagagagccgagcccggccagcagcagcccgccgccgagcccccccccgccgagggcctgctgagacccgccggccccggcgcccccgaggccgccggcaccgaggccagcagcgaggaggtgggcatcgccgaggccggccccgagagcgaggtgagaaccgagcccgccgccgaggccgaggccgccagcggccccagcgagagccccagcccccccgccgccgaggagctgcccggcagccacgccgagccccccgtgcccgcccagggcgaggcccccggcgagcaggccagagacgagagaagcgacagcagagcccaggccgtgagcgaggacgccggcggcaacgagggcagagccgccgaggccgagcccagagccctggagaacggcgacgccgacgagcccagcttcagcgaccccgaggacttcgtggacgacgtgagcgaggaggagctgctgggcgacgtgctgaaggacagaccccaggaggccgacggcatcgacagcgtgatcgtggtggacaacgtgccccaggtgggccccgacagactggagaagctgaagaacgtgatccacaagatcttcagcaagttcggcaagatcaccaacgacttctaccccgaggaggacggcaagaccaagggctacatcttcctggagtacgccagccccgcccacgccgtggacgccgtgaagaacgccgacggctacaagctggacaagcagcacaccttcagagtgaacctgttcaccgacttcgacaagtacatgaccatcagcgacgagtgggacatccccgagaagcagcccttcaaggacctgggcaacctgagatactggctggaggaggccgagtgcagagaccagtacagcgtgatcttcgagagcggcgacagaaccagcatcttctggaacgacgtgaaggaccccgtgagcatcgaggagagagccagatggaccgagacctacgtgagatggagccccaagggcacctacctggccaccttccaccagagaggcatcgccctgtggggcggcgagaagttcaagcagatccagagattcagccaccagggcgtgcagctgatcgacttcagcccctgcgagagatacctggtgaccttcagccccctgatggacacccaggacgacccccaggccatcatcatctgggacatcctgaccggccacaagaagagaggcttccactgcgagagcagcgcccactggcccatcttcaagtggagccacgacggcaagttcttcgccagaatgaccctggacaccctgagcatctacgagacccccagcatgggcctgctggacaagaagagcctgaagatcagcggcatcaaggacttcagctggagccccggcggcaacatcatcgccttctgggtgcccgaggacaaggacatccccgccagagtgaccctgatgcagctgcccaccagacaggagatcagagtgagaaacctgttcaacgtggtggactgcaagctgcactggcagaagaacggcgactacctgtgcgtgaaggtggacagaacccccaagggcacccagggcgtggtgaccaacttcgagatcttcagaatgagagagaagcaggtgcccgtggacgtggtggagatgaaggagaccatcatcgccttcgcctgggagcccaacggcagcaagttcgccgtgctgcacggcgaggcccccagaatcagcgtgagcttctaccacgtgaagaacaacggcaagatcgagctgatcaagatgttcgacaagcagcaggccaacaccatcttctggagcccccagggccagttcgtggtgctggccggcctgagaagcatgaacggcgccctggccttcgtggacaccagcgactgcaccgtgatgaacatcgccgagcactacatggccagcgacgtggagtgggaccccaccggcagatacgtggtgaccagcgtgagctggtggagccacaaggtggacaacgcctactggctgtggaccttccagggcagactgctgcagaagaacaacaaggacagattctgccagctgctgtggagacccagaccccccaccctgctgagccaggagcagatcaagcagatcaagaaggacctgaagaagtacagcaagatcttcgagcagaaggacagactgagccagagcaaggccagcaaggagctggtggagagaagaagaaccatgatggaggacttcagaaagtacagaaagatggcccaggagctgtacatggagcagaagaacgagagactggagctgagaggcggcgtggacaccgacgagctggacagcaacgtggacgactgggaggaggagaccatcgagttcttcgtgaccgaggagatcatccccggcatcagaagcgacctggagcactgcgcccagccctgcgtgctgtggagcagaggcagacccgccggcagcagagtgacccccgccagcagcctgtgcagcctggccctggactgcgactgcgcctggatcctgcccctgagacacatcttcgtgcccttcagcccctggtgcctgcagtggggcatctag

SEQ ID NO: 31271 - DNA, 2445 bp, Artificial Sequence
  derived and/or modified sequence
atgcaggacgccgagaacgtggccgtgcccgaggccgccgaggagagagccgagcccggccagcagcagcccgccgccgagcccccccccgccgagggcctgctgagacccgccggccccggcgcccccgaggccgccggcaccgaggccagcagcgaggaggtgggcatcgccgaggccggccccgagagcgaggtgagaaccgagcccgccgccgaggccgaggccgccagcggccccagcgagagccccagcccccccgccgccgaggagctgcccggcagccacgccgagccccccgtgcccgcccagggcgaggcccccggcgagcaggccagagacgagagaagcgacagcagagcccaggccgtgagcgaggacgccggcggcaacgagggcagagccgccgaggccgagcccagagccctggagaacggcgacgccgacgagcccagcttcagcgaccccgaggacttcgtggacgacgtgagcgaggaggagctgctgggcgacgtgctgaaggacagaccccaggaggccgacggcatcgacagcgtgatcgtggtggacaacgtgccccaggtgggccccgacagactggagaagctgaagaacgtgatccacaagatcttcagcaagttcggcaagatcaccaacgacttctaccccgaggaggacggcaagaccaagggctacatcttcctggagtacgccagccccgcccacgccgtggacgccgtgaagaacgccgacggctacaagctggacaagcagcacaccttcagagtgaacctgttcaccgacttcgacaagtacatgaccatcagcgacgagtgggacatccccgagaagcagcccttcaaggacctgggcaacctgagatactggctggaggaggccgagtgcagagaccagtacagcgtgatcttcgagagcggcgacagaaccagcatcttctggaacgacgtgaaggaccccgtgagcatcgaggagagagccagatggaccgagacctacgtgagatggagccccaagggcacctacctggccaccttccaccagagaggcatcgccctgtggggcggcgagaagttcaagcagatccagagattcagccaccagggcgtgcagctgatcgacttcagcccctgcgagagatacctggtgaccttcagccccctgatggacacccaggacgacccccaggccatcatcatctgggacatcctgaccggccacaagaagagaggcttccactgcgagagcagcgcccactggcccatcttcaagtggagccacgacggcaagttcttcgccagaatgaccctggacaccctgagcatctacgagacccccagcatgggcctgctggacaagaagagcctgaagatcagcggcatcaaggacttcagctggagccccggcggcaacatcatcgccttctgggtgcccgaggacaaggacatccccgccagagtgaccctgatgcagctgcccaccagacaggagatcagagtgagaaacctgttcaacgtggtggactgcaagctgcactggcagaagaacggcgactacctgtgcgtgaaggtggacagaacccccaagggcacccagggcgtggtgaccaacttcgagatcttcagaatgagagagaagcaggtgcccgtggacgtggtggagatgaaggagaccatcatcgccttcgcctgggagcccaacggcagcaagttcgccgtgctgcacggcgaggcccccagaatcagcgtgagcttctaccacgtgaagaacaacggcaagatcgagctgatcaagatgttcgacaagcagcaggccaacaccatcttctggagcccccagggccagttcgtggtgctggccggcctgagaagcatgaacggcgccctggccttcgtggacaccagcgactgcaccgtgatgaacatcgccgagcactacatggccagcgacgtggagtgggaccccaccggcagatacgtggtgaccagcgtgagctggtggagccacaaggtggacaacgcctactggctgtggaccttccagggcagactgctgcagaagaacaacaaggacagattctgccagctgctgtggagacccagaccccccaccctgctgagccaggagcagatcaagcagatcaagaaggacctgaagaagtacagcaagatcttcgagcagaaggacagactgagccagagcaaggccagcaaggagctggtggagagaagaagaaccatgatggaggacttcagaaagtacagaaagatggcccaggagctgtacatggagcagaagaacgagagactggagctgagaggcggcgtggacaccgacgagctggacagcaacgtggacgactgggaggaggagaccatcgagttcttcgtgaccgaggagatcatccccctgggcaaccaggagtag

SEQ ID NO: 31272 - DNA, 2217 bp, Artificial Sequence
  derived and/or modified sequence
atgcaggacgccgagaacgtggccgtgcccgaggccgccgaggagagagccggcagccacgccgagccccccgtgcccgcccagggcgaggcccccggcgagcaggccagagacgagagaagcgacagcagagcccaggccgtgagcgaggacgccggcggcaacgagggcagagccgccgaggccgagcccagagccctggagaacggcgacgccgacgagcccagcttcagcgaccccgaggacttcgtggacgacgtgagcgaggaggagctgctgggcgacgtgctgaaggacagaccccaggaggccgacggcatcgacagcgtgatcgtggtggacaacgtgccccaggtgggccccgacagactggagaagctgaagaacgtgatccacaagatcttcagcaagttcggcaagatcaccaacgacttctaccccgaggaggacggcaagaccaagggctacatcttcctggagtacgccagccccgcccacgccgtggacgccgtgaagaacgccgacggctacaagctggacaagcagcacaccttcagagtgaacctgttcaccgacttcgacaagtacatgaccatcagcgacgagtgggacatccccgagaagcagcccttcaaggacctgggcaacctgagatactggctggaggaggccgagtgcagagaccagtacagcgtgatcttcgagagcggcgacagaaccagcatcttctggaacgacgtgaaggaccccgtgagcatcgaggagagagccagatggaccgagacctacgtgagatggagccccaagggcacctacctggccaccttccaccagagaggcatcgccctgtggggcggcgagaagttcaagcagatccagagattcagccaccagggcgtgcagctgatcgacttcagcccctgcgagagatacctggtgaccttcagccccctgatggacacccaggacgacccccaggccatcatcatctgggacatcctgaccggccacaagaagagaggcttccactgcgagagcagcgcccactggcccatcttcaagtggagccacgacggcaagttcttcgccagaatgaccctggacaccctgagcatctacgagacccccagcatgggcctgctggacaagaagagcctgaagatcagcggcatcaaggacttcagctggagccccggcggcaacatcatcgccttctgggtgcccgaggacaaggacatccccgccagagtgaccctgatgcagctgcccaccagacaggagatcagagtgagaaacctgttcaacgtggtggactgcaagctgcactggcagaagaacggcgactacctgtgcgtgaaggtggacagaacccccaagggcacccagggcgtggtgaccaacttcgagatcttcagaatgagagagaagcaggtgcccgtggacgtggtggagatgaaggagaccatcatcgccttcgcctgggagcccaacggcagcaagttcgccgtgctgcacggcgaggcccccagaatcagcgtgagcttctaccacgtgaagaacaacggcaagatcgagctgatcaagatgttcgacaagcagcaggccaacaccatcttctggagcccccagggccagttcgtggtgctggccggcctgagaagcatgaacggcgccctggccttcgtggacaccagcgactgcaccgtgatgaacatcgccgagcactacatggccagcgacgtggagtgggaccccaccggcagatacgtggtgaccagcgtgagctggtggagccacaaggtggacaacgcctactggctgtggaccttccagggcagactgctgcagaagaacaacaaggacagattctgccagctgctgtggagacccagaccccccaccctgctgagccaggagcagatcaagcagatcaagaaggacctgaagaagtacagcaagatcttcgagcagaaggacagactgagccagagcaaggccagcaaggagctggtggagagaagaagaaccatgatggaggacttcagaaagtacagaaagatggcccaggagctgtacatggagcagaagaacgagagactggagctgagaggcggcgtggacaccgacgagctggacagcaacgtggacgactgggaggaggagaccatcgagttcttcgtgaccgaggagatcatccccctgggcaaccaggagtag

SEQ ID NO: 31273 - protein, 125 aa, Artificial Sequence
  derived and/or modified sequence
MLSARDRRDRHPEEGVVAELQGFAVDKAFLTSHKGILLETELALTLIIFICFTASISAYMAAALLEFFITLAFLFLYATQYYQRFDRINWPCLVFGIILVSIFAYDAFKIYRTEMAPGASQGDQQ

SEQ ID NO: 31274 - DNA, 378 bp, Artificial Sequence
  derived and/or modified sequence
atgctgtctgcaagggatcggcgagacagacaccccgaggagggggtcgtggccgagttacaaggttttgccgttgataaggcatttctgacttcccataaagggattcttttggagactgaactggcattgaccttgatcattttcatctgctttacagcatccatctccgcttacatggcagccgcactcctggaattctttattaccctagctttcttgttcctgtacgcaacccagtactatcagaggttcgatcgcattaattggccctgcctcgtttttggcatcattttggttagcatcttcgcttacgatgctttcaagatctatagaaccgagatggcccccggagcaagccaaggagatcaacagtag

SEQ ID NO: 31275 - DNA, 378 bp, Artificial Sequence
  derived and/or modified sequence
atgctgagcgcccgggacagaagagacagacaccctgaggagggcgtggtggccgagctgcagggctttgctgtggacaaggccttcctgaccagccacaagggcatcctgctggagacagagctggccctgaccctcatcatcttcatctgcttcaccgccagcatcagcgcctacatggccgccgccctgctggagttcttcatcaccctggccttcctgttcctgtatgccacccagtactaccagagatttgaccgcatcaactggccctgcctggtgtttggcatcatcctggtgtccatctttgcctatgatgccttcaagatctacagaacagagatggcccctggggccagccagggcgaccagcagtag

SEQ ID NO: 31276 - DNA, 378 bp, Artificial Sequence
  derived and/or modified sequence
atgctgagcgcccgggaccggcgggaccggcaccccgaggagggcgtcgtagccgagctgcagggtttcgctgttgacaaggccttcctcacttctcataaggggatcctgttagagacagagctggcactgacccttatcatctttatatgttttactgcgtctatctctgcttacatggcagctgccctgctggagtttttcattactttggccttcctattcctctatgcaacccagtattatcagcgctttgacagaattaattggccctgcctcgtgtttgggatcattttggtcagcatttttgcctacgatgctttcaaaatttaccggaccgaaatggcacccggtgcatctcagggggatcaacagtag

SEQ ID NO: 31277 - DNA, 378 bp, Artificial Sequence
  derived and/or modified sequence
atgttaagcgcacgggatagaagagaccggcatcctgaagagggcgttgtcgccgagttacaggggtttgcggtagacaaggccttcttaacgtcccataagggcattctgctcgagaccgagcttgcactgacattaattatcttcatctgttttaccgcctccatatccgcctacatggccgctgccttgctggaattttttattaccttagctttcttgtttttatacgccactcaatactaccagaggttcgatcggattaactggccctgcctggtgttcggcatcattctcgtctctatttttgcctatgacgcctttaagatttacaggacagaaatggctcccggagctagccagggggaccagcagtag

SEQ ID NO: 31278 - DNA, 1106 bp, Artificial Sequence
  derived and/or modified sequence
gttagagaagggggacacaaatgtcttcaggcttaggtccctgggggctcccagtcctgcccctgttcctctactcacatcccagctcctcccagtttcttttcggacctcctcctctccccttccttctctattccaggctgggttgggctctaagcaaggggagggattagagcctccttcctctctgcccctccccatgggtctctagggggctggtgcaggcagcagcagaggcactctgggcagctgggtgagggcccatctgggcaaggcccccagcgcctgccttctctcccggggccctgtgggcaagcctcctgcttcactttcaggtttctcgaagtgccttcttgctcctgtctgtttccccatcctgccagatttctgtttctcttgctgggcttttggcagtagggggctgtgttggtgggccctacgaagatgctcagtgctcgagatcgccgggaccggcaccctgaggagggggtagttgcagagctccagggcttcgcggtggacaaggccttcctcacctcccacaagggcatcctgctggaaaccgagctggccctgaccctcatcatcttcatctgcttcacggcctccatctctgcctacatggccgcggcgctactggagttcttcatcacacttgccttcctcttcctctatgccacccagtactaccagcgcttcgaccgaattaactggccctgtctggtttttggcatcatcctggtttccatctttgcctatgatgccttcaagatctaccggactgagatggcacccggggccagccagggggaccagcagtgactctggggctacctggctcctaggcccagccagccagagaggacagtggagcccagacacgtctccttgggattcactagcccccagcccgccaaaccccaccccagccctacacagcagtctggcctgagacgtcactggggacttatctgtggagcctggtgctccaggatgtggcttctcatgaagctctggccagaggaggggaacttattgggggagggggggtggaggggaggaatctggacctctaagtcattcccaaattaaaatattcaaattct

SEQ ID NO: 31279 - DNA, 378 bp, Artificial Sequence
  derived and/or modified sequence
atgctgagcgccagagacagaagagacagacaccccgaggagggcgtggtggccgagctgcagggcttcgccgtggacaaggccttcctgaccagccacaagggcatcctgctggagaccgagctggccctgaccctgatcatcttcatctgcttcaccgccagcatcagcgcctacatggccgccgccctgctggagttcttcatcaccctggccttcctgttcctgtacgccacccagtactaccagagattcgacagaatcaactggccctgcctggtgttcggcatcatcctggtgagcatcttcgcctacgacgccttcaagatctacagaaccgagatggcccccggcgccagccagggcgaccagcagtag

SEQ ID NO: 31280 - DNA, 501 bp, Artificial Sequence
  derived and/or modified sequence
atgagcagacccagaaagagactggccggcaccagcggcagcgacaagggcctgagcggcaagagaaccaagaccgagaacagcggcgaggccctggccaaggtggaggacagcaacccccagaagaccagcgccaccaagaactgcctgaagaacctgagcagccactggctgatgaagagcgagcccgagagcagactggagaagggcgtggacgtgaagttcagcatcgaggacctgaaggcccagcccaagcagaccacctgctgggacggcgtgagaaactaccaggccagaaacttcctgagagccatgaagctgggcgaggaggccttcttctaccacagcaactgcaaggagcccggcatcgccggcctgatgaagatcgtgaaggaggcctaccccgaccacacccagttcgagaagaacaacccccactacgaccccagcagcaaggaggacaaccccaagtggagcatgaagagcctgatcctgttctag

SEQ ID NO: 31281 - DNA, 501 bp, Artificial Sequence
  derived and/or modified sequence
atgtcacggccgcgcaagagactcgccgggacgtccggatctgacaaaggactttccgggaagcgcaccaagacagaaaattctggggaagccctggccaaagtggaggattctaatcctcagaagaccagtgcaacaaagaattgtctgaaaaacttgtctagccattggctcatgaagagcgaacctgagagtcgcctcgaaaagggcgttgacgtaaagtttagtatcgaggatctgaaagctcagcccaaacagactacttgctgggacggggtgagaaactatcaggcgaggaactttttacgagccatgaagttgggcgaggaggcctttttttaccattccaattgcaaagaacccggtattgccgggcttatgaagatagtgaaagaagcatatcctgaccatacacagttcgaaaagaacaatccacattacgacccatcttcgaaggaggataatccgaaatggagcatgaagagcctcatactcttttag

SEQ ID NO: 31282 - DNA, 501 bp, Artificial Sequence
  derived and/or modified sequence
atgagccggcccaggaagaggctggccggcaccagcggcagtgacaagggcctgagcggcaagaggaccaagacagagaacagcggggaggccctggccaaggtggaggacagcaacccccagaagaccagcgccaccaagaactgcctgaagaacctgagcagccactggctgatgaagtctgagcctgagagccggctggagaagggcgtggatgtgaagttcagcattgaggacctgaaggcccagcccaagcagaccacctgctgggatggagtgaggaactaccaggccaggaacttcctgcgggccatgaagctgggggaggaggccttcttctaccacagcaactgcaaggagcccggcattgctggcctgatgaagatcgtgaaggaggcctacccagaccacacccagtttgagaagaacaacccccactatgaccccagcagcaaagaagacaaccccaagtggagcatgaagagcctcatcctcttctag

SEQ ID NO: 31283 - DNA, 501 bp, Artificial Sequence
  derived and/or modified sequence
atgagccggccccggaagcggctggccggcaccagcggcagcgacaaggggctgtctggcaaaagaacaaaaacggaaaactctggtgaagcgctagcaaaggtggaggactctaacccccaaaagacgtccgcaaccaaaaattgtctaaagaacctgagtagccattggttgatgaagtcagaacccgaatcccgattagagaaaggggtggatgttaaattttcaatcgaagatcttaaagcccagcccaagcagaccacttgctgggatggtgtgaggaattatcaggcccgtaattttctgagggcaatgaagctgggcgaagaagcttttttctaccattccaactgcaaagaaccgggaatcgccgggttgatgaaaatcgtgaaggaggcctatccagatcacacacagtttgaaaagaataacccacactatgaccctagtagcaaagaagacaaccccaagtggtctatgaagagccttatcctgttttag

SEQ ID NO: 31284 - DNA, 501 bp, Artificial Sequence
  derived and/or modified sequence
atgtctcggccacgtaaaagattggccggtacttcagggtccgataagggtttatctggcaaacggaccaaaacggagaactccggggaggcgctggcaaaagtggaagactccaatccccagaagactagcgccacaaagaattgcctcaaaaatctatctagtcattggctgatgaagtccgagccagagagcagactcgagaaaggcgtcgacgttaagttctccattgaggatctcaaagctcaacccaagcaaaccacctgctgggacggggttcggaattatcaggcccgaaactttctgcgcgcaatgaagctcggggaagaggcctttttctaccatagtaactgcaaggagcctggaatagcagggctgatgaaaatcgttaaggaagcgtacccggaccatacgcaatttgaaaaaaataatccacattacgacccttcaagcaaggaggacaatcccaagtggagtatgaagtctctcatattgttttag

SEQ ID NO: 31285 - DNA, 678 bp, Artificial Sequence
  derived and/or modified sequence
atgagcagacccagaaagagactggccggcaccagcggcagcgacaagggcctgagcggcaagagaaccaagaccgagaacagcggcgaggccctggccaaggtggaggacagcaacccccagaagaccagcgccaccaagaactgcctgaagaacctgagcagccactggctgatgaagagcgagcccgagagcagactggagaagggcgtggacgtgaagttcagcatcgaggacctgaaggcccagcccaagcagaccacctgctgggacggcgtgagaaactaccaggccagaaacttcctgagagccatgaagctgggcgaggaggccttcttctaccacagcaactgcaaggagcccggcatcgccggcctgatgaagatcgtgaaggaggcctaccccgaccacacccagttcgagaagaacaacccccactacgaccccagcagcaaggaggacaaccccaagtggagcatggtggacgtgcagttcgtgagaatgatgaagagattcatccccctggccgagctgaagagctaccaccaggcccacaaggccaccggcggccccctgaagaacatggtgctgttcaccagacagagactgagcatccagcccctgacccaggaggagttcgacttcgtgctgagcctggaggagaaggagcccagctag

SEQ ID NO: 31286 - DNA, 678 bp, Artificial Sequence
  derived and/or modified sequence
atgagtcgacctagaaagagactcgctggtacttctggaagcgacaagggactgtcagggaagcgcacgaaaaccgagaactccggggaggctctagctaaggtggaagatagtaacccgcagaagacatccgctacaaaaaattgtctgaaaaacctgtcgagtcactggttaatgaagagcgaaccagagtctcggctggagaagggggtagacgtgaagtttagcatcgaggacttaaaggcacaaccaaagcagactacttgctgggacggtgtgcggaactaccaggcacgcaattttctgagggcaatgaagctgggagaggaagctttcttctatcactcaaattgcaaggagcccgggatcgcaggcctgatgaagattgtgaaggaagcgtacccagaccatacacaatttgaaaaaaacaaccctcattacgatccctcatctaaagaggacaatccaaagtggagcatggtcgatgtccagtttgtacgtatgatgaagcggtttataccgctggcagagctcaaatcctatcaccaggcacacaaggcaacgggcggacctctgaagaatatggtcctgttcacaaggcagcgccttagtatccaaccactgactcaggaggagtttgacttcgtcctttcactggaagagaaggagcctagttag

SEQ ID NO: 31287 - DNA, 678 bp, Artificial Sequence
  derived and/or modified sequence
atgagccggcctagaaagagactggcgggcactagcggctccgacaaaggtctgtcagggaaacgcacaaagacggaaaattctggtgaggcattggccaaggtcgaggacagcaatccgcagaagacatccgccacaaaaaactgtctgaagaatttgagttctcattggcttatgaagtctgaacctgagtctagactggagaagggcgttgacgttaaatttagcatcgaagacctgaaggcccagcccaagcagacaacttgttgggacggtgtccgcaactatcaggcacgcaactttctgagggcaatgaaactcggggaagaggctttcttctatcacagcaactgcaaagagcctggaatcgcaggcctcatgaagattgtcaaggaggcttatcctgaccacacccaattcgaaaaaaataatccgcattacgatccttcaagcaaggaggacaatccgaagtggtctatggtcgacgtgcagtttgttagaatgatgaaaaggtttatccccctggccgagcttaaatcttatcatcaagcacacaaggccaccggcggccccctcaaaaacatggttctgttcacacgacagagactgtctattcagcccctgacacaggaggaattcgattttgtgctgtcccttgaagagaaagaaccttcttag

SEQ ID NO: 31288 - DNA, 678 bp, Artificial Sequence
  derived and/or modified sequence
atgagcagaccacgaaaaagactcgcaggtacttctgggtccgacaaaggattgtcaggaaagcggactaagacagagaactctggagaagctttagccaaggtggaggactcaaacccccagaaaacatccgccacgaaaaattgtctgaaaaacctgtcctctcattggctgatgaagagcgaaccagaatcccggctcgagaaaggagttgatgtgaagtttagcatcgaagacctcaaggcgcagccaaaacagaccacgtgttgggatggggtccgcaattatcaggcccggaacttcctgagagcaatgaagctcggagaggaggcatttttttatcactcaaattgtaaggagccagggattgccggtttaatgaagatcgtgaaagaggcatatcctgaccacacccagttcgaaaaaaacaatccacattacgatccatctagtaaggaagataatcccaaatggtctatggtggacgttcaatttgtccgcatgatgaagcgatttattccattagcagagctgaaaagttaccatcaggcccataaggctacgggcgggcctttgaagaacatggttctgtttaccaggcagaggctcagcatccagccactgacccaggaggaatttgatttcgtactatcacttgaggagaaggaaccttcatag

SEQ ID NO: 31289 - DNA, 678 bp, Artificial Sequence
  derived and/or modified sequence
atgagccggcccaggaagaggctggccggcaccagcggcagtgacaagggcctgagcggcaagaggaccaagacagagaacagcggggaggccctggccaaggtggaggacagcaacccccagaagaccagcgccaccaagaactgcctgaagaacctgagcagccactggctgatgaagtctgagcctgagagccggctggagaagggcgtggatgtgaagttcagcattgaggacctgaaggcccagcccaagcagaccacctgctgggatggagtgaggaactaccaggccaggaacttcctgcgggccatgaagctgggggaggaggccttcttctaccacagcaactgcaaggagcccggcattgctggcctgatgaagatcgtgaaggaggcctacccagaccacacccagtttgagaagaacaacccccactatgaccccagcagcaaagaagacaaccccaagtggagcatggtggatgtgcagtttgtgaggatgatgaagcgcttcatccccctggccgagctgaagagctaccaccaggcccacaaggccaccggcggccccctgaagaacatggtgctcttcacccggcagaggctgagcatccagcccctgacccaggaggagtttgattttgtgctgagcctggaggagaaggagcccagctag

SEQ ID NO: 31290 - DNA, 678 bp, Artificial Sequence
  derived and/or modified sequence
atgagccggccccggaagcggctggccggcaccagcggcagcgacaaagggctaagtggcaaacggaccaaaacggagaattcgggggaggctcttgctaaagtggaggactcaaaccctcagaagacctcagccacgaaaaattgcctgaagaatctcagcagccattggcttatgaaatccgagcctgaaagcaggctggaaaaaggggtggacgtcaagtttagtattgaggacctgaaggcccaacccaagcaaaccacatgctgggatggagtcagaaattaccaggctaggaactttctacgcgcaatgaagctcggggaggaggctttcttttaccattctaattgcaaagaacctggcatcgcaggactgatgaagattgttaaagaggcttatccggaccatacccagttcgagaagaataatccacactatgacccatcctccaaggaagacaacccaaaatggagtatggtggacgtgcaatttgtaaggatgatgaaaaggttcatcccactcgccgaattaaaatcctaccaccaggcacacaaagccacaggcggccccctcaaaaatatggtattgttcacccgtcagagactgagtatacagcctcttacccaggaggaattcgactttgtcctgtcactcgaagaaaaagaaccatcctag

SEQ ID NO: 31291 - DNA, 678 bp, Artificial Sequence
  derived and/or modified sequence
atgagccggccccggaagcggctggccggcaccagcggcagcgacaaaggcctgtctgggaaaaggactaagaccgagaactcgggggaggcactggcgaaagttgaggactccaatcctcaaaaaacctcggccactaaaaactgccttaaaaacctgagcagccactggctgatgaagtccgagcctgagagtcgacttgagaaaggggtggacgttaaatttagcatcgaggatctgaaggctcagcctaagcagaccacttgttgggacggagtgcggaactatcaggctaggaattttctccgggccatgaaactgggtgaggaggcttttttttaccatagtaattgtaaagaacccggcattgcaggactcatgaagattgtcaaggaggcttaccctgaccacactcagtttgagaagaacaaccctcactacgaccctagcagcaaggaggataacccgaagtggtccatggtagacgtgcagtttgttcggatgatgaaaagatttatacccttagccgagttgaaatcatatcaccaggcccataaggcgacaggaggtccactaaaaaacatggtgctctttacccggcagagactgagcatccagccgctgactcaggaggagttcgacttcgtactctccctggaagaaaaagagccctcctag

SEQ ID NO: 31292 - DNA, 678 bp, Artificial Sequence
  derived and/or modified sequence
atgagccggccccggaagcggctggccggcaccagcggcagcgacaagggactttctggaaaacgaactaaaactgagaacagcggcgaggcgttggccaaggtggaggatagcaaccctcagaagaccagcgcgaccaaaaattgtctgaagaacctgtcatctcactggctgatgaaatcagaacccgagagcagattggaaaagggcgttgatgtaaaattttctatcgaagacctgaaggctcagccgaagcagactacctgctgggacggtgtgagaaactaccaggccagaaatttcctaagagcaatgaagttaggcgaggaagcattcttttaccatagcaattgcaaggagccaggcatcgccggcttgatgaaaatcgttaaggaggcttaccctgaccatactcaattcgagaagaacaacccccattacgatccaagcagtaaggaggataaccccaagtggtctatggtggatgttcagtttgtgagaatgatgaagaggtttataccactcgcggagctgaagtcataccaccaggcccacaaagcgacaggcggtcccctgaagaacatggttctctttacacgtcagagactctccattcagccactgacccaagaggaattcgactttgtgttgtccctcgaggagaaagagcctagttag

SEQ ID NO: 31293 - DNA, 678 bp, Artificial Sequence
  derived and/or modified sequence
atgtccagaccccgaaagaggctagccggaaccagcggctcagacaaaggtctgagtggcaagcgcaccaaaacagaaaattctggagaggctctggccaaggtggaggattctaacccacaaaagacctccgctacaaagaattgtctgaaaaatctcagcagccattggctcatgaagtctgaacccgagtccagactggagaaaggggtggacgtgaaattttccatcgaggatctgaaggcacagcccaaacagaccacgtgctgggacggcgtccgcaactaccaggcaaggaattttctaagggccatgaaacttggcgaggaagctttcttctaccacagcaattgcaaggaacctgggatcgcaggtttaatgaaaatagtgaaagaagcctatcctgatcacacacagtttgagaagaacaatcctcactacgaccctagcagcaaggaagataatccaaagtggtccatggtcgatgtccagtttgttagaatgatgaaaaggttcattcctctagctgagctgaaatcataccaccaggcacacaaggctacaggcggtcccttaaaaaatatggtgctgttcactcggcagaggctgtccattcagccactaacccaggaggaattcgattttgtgctatccctggaggagaaggaaccatcttag

SEQ ID NO: 31294 - DNA, 678 bp, Artificial Sequence
  derived and/or modified sequence
atgtcccggcctcggaagaggctggctgggacgagcggtagtgacaagggactgtccggaaagaggactaaaacagaaaacagcggcgaggcactggctaaagttgaagactctaacccgcagaaaacttcagccactaaaaactgtctcaagaacctgagttctcactggcttatgaaaagcgaaccggagtccagacttgagaaaggtgtggacgtcaaattcagcattgaggacctgaaggcccagcccaaacagaccacctgctgggacggggttcgcaattatcaagcacggaacttcctcagagccatgaagctgggcgaagaggcctttttttaccatagcaattgtaaggaaccagggatcgccggacttatgaagatcgtcaaagaagcgtatccagaccatacacagttcgaaaaaaacaatccccattatgaccccagcagtaaagaggacaaccccaagtggtccatggtggacgtacagttcgtgcgcatgatgaagaggtttatccctctggctgagttgaaaagctaccaccaggcacataaagcaaccggcggtcctctcaaaaacatggtgctgttcacgagacaaagactatctattcagcccttaacccaagaagagttcgactttgtactgagcctagaagagaaggaacccagctag

SEQ ID NO: 31295 - DNA, 678 bp, Artificial Sequence
  derived and/or modified sequence
atgtccagaccacggaaacggttggccggaaccagcggtagcgacaaaggattgtcgggaaagcgcacaaaaaccgagaactccggcgaagcactagctaaggtggaagacagtaatccacagaaaacctccgccactaaaaattgtctgaagaatctcagcagccactggctaatgaaaagcgaacccgagtcacgactggaaaagggagttgacgttaaattctctattgaagatctgaaggcacagcccaagcagacaacatgctgggatggcgtgcggaattatcaggcaaggaatttcctgcgggcaatgaagctaggtgaggaagcctttttctaccattctaattgtaaagaaccagggattgctggcctgatgaaaatcgtaaaagaggcataccccgatcacactcagtttgagaagaacaacccccattacgatccctcttcgaaagaagacaaccccaagtggtctatggtcgacgtgcagtttgtcaggatgatgaagagatttatccctctggctgagctgaagtcataccatcaggctcataaagcgaccggcggtcctcttaaaaacatggtcctcttcacacgtcagcgccttagcattcaacctcttactcaagaggagtttgacttcgtactatctctggaggagaaggaaccatcttag

SEQ ID NO: 31296 - protein, 736 aa, Artificial Sequence
  derived and/or modified sequence
MNVALQELGAGSNVGFQKGTRQLLGSRTQLELVLAGASLLLAALLLGCLVALGVQYHRDPSHSTCLTEACIRVAGKILESLDRGVSPCEDFYQFSCGGWIRRNPLPDGRSRWNTFNSLWDQNQAILKHLLENTTFNSSSEAEQKTQRFYLSCLQVERIEELGAQPLRDLIEKIGGWNITGPWDQDNFMEVLKAVAGTYRATPFFTVYISADSKSSNSNVIQVDQSGLFLPSRDYYLNRTANEKVLTAYLDYMEELGMLLGGRPTSTREQMQQVLELEIQLANITVPQDQRRDEEKIYHKMSISELQALAPSMDWLEFLSFLLSPLELSDSEPVVVYGMDYLQQVSELINRTEPSILNNYLIWNLVQKTTSSLDRRFESAQEKLLETLYGTKKSCVPRWQTCISNTDDALGFALGSLFVKATFDRQSKEIAEGMISEIRTAFEEALGQLVWMDEKTRQAAKEKADAIYDMIGFPDFILEPKELDDVYDGYEISEDSFFQNMLNLYNFSAKVMADQLRKPPSRDQWSMTPQTVNAYYLPTKNEIVFPAGILQAPFYARNHPKALNFGGIGVVMGHELTHAFDDQGREYDKEGNLRPWWQNESLAAFRNHTACMEEQYNQYQVNGERLNGRQTLGENIADNGGLKAAYNAYKAWLRKHGEEQQLPAVGLTNHQLFFVGFAQVWCSVRTPESSHEGLVTDPHSPARFRVLGTLSNSRDFLRHFGCPVGSPMNPGQLCEVW

SEQ ID NO: 31297 - DNA, 2211 bp, Artificial Sequence
  derived and/or modified sequence
atgaacgtggccctgcaggagctgggcgccggcagcaacgtgggcttccagaagggcaccagacagctgctgggcagcagaacccagctggagctggtgctggccggcgccagcctgctgctggccgccctgctgctgggctgcctggtggccctgggcgtgcagtaccacagagaccccagccacagcacctgcctgaccgaggcctgcatcagagtggccggcaagatcctggagagcctggacagaggcgtgagcccctgcgaggacttctaccagttcagctgcggcggctggatcagaagaaaccccctgcccgacggcagaagcagatggaacaccttcaacagcctgtgggaccagaaccaggccatcctgaagcacctgctggagaacaccaccttcaacagcagcagcgaggccgagcagaagacccagagattctacctgagctgcctgcaggtggagagaatcgaggagctgggcgcccagcccctgagagacctgatcgagaagatcggcggctggaacatcaccggcccctgggaccaggacaacttcatggaggtgctgaaggccgtggccggcacctacagagccacccccttcttcaccgtgtacatcagcgccgacagcaagagcagcaacagcaacgtgatccaggtggaccagagcggcctgttcctgcccagcagagactactacctgaacagaaccgccaacgagaaggtgctgaccgcctacctggactacatggaggagctgggcatgctgctgggcggcagacccaccagcaccagagagcagatgcagcaggtgctggagctggagatccagctggccaacatcaccgtgccccaggaccagagaagagacgaggagaagatctaccacaagatgagcatcagcgagctgcaggccctggcccccagcatggactggctggagttcctgagcttcctgctgagccccctggagctgagcgacagcgagcccgtggtggtgtacggcatggactacctgcagcaggtgagcgagctgatcaacagaaccgagcccagcatcctgaacaactacctgatctggaacctggtgcagaagaccaccagcagcctggacagaagattcgagagcgcccaggagaagctgctggagaccctgtacggcaccaagaagagctgcgtgcccagatggcagacctgcatcagcaacaccgacgacgccctgggcttcgccctgggcagcctgttcgtgaaggccaccttcgacagacagagcaaggagatcgccgagggcatgatcagcgagatcagaaccgccttcgaggaggccctgggccagctggtgtggatggacgagaagaccagacaggccgccaaggagaaggccgacgccatctacgacatgatcggcttccccgacttcatcctggagcccaaggagctggacgacgtgtacgacggctacgagatcagcgaggacagcttcttccagaacatgctgaacctgtacaacttcagcgccaaggtgatggccgaccagctgagaaagccccccagcagagaccagtggagcatgaccccccagaccgtgaacgcctactacctgcccaccaagaacgagatcgtgttccccgccggcatcctgcaggcccccttctacgccagaaaccaccccaaggccctgaacttcggcggcatcggcgtggtgatgggccacgagctgacccacgccttcgacgaccagggcagagagtacgacaaggagggcaacctgagaccctggtggcagaacgagagcctggccgccttcagaaaccacaccgcctgcatggaggagcagtacaaccagtaccaggtgaacggcgagagactgaacggcagacagaccctgggcgagaacatcgccgacaacggcggcctgaaggccgcctacaacgcctacaaggcctggctgagaaagcacggcgaggagcagcagctgcccgccgtgggcctgaccaaccaccagctgttcttcgtgggcttcgcccaggtgtggtgcagcgtgagaacccccgagagcagccacgagggcctggtgaccgacccccacagccccgccagattcagagtgctgggcaccctgagcaacagcagagacttcctgagacacttcggctgccccgtgggcagccccatgaaccccggccagctgtgcgaggtgtggtag

SEQ ID NO: 31298 - DNA, 3147 bp, Artificial Sequence
  derived and/or modified sequence
ggggggcggccgcggccgagcgggggtgctgcgcggcggccgtgatggctggtgacggcggggccgggcaggggaccggggccgcggcccgggagcgggccagctgccgggagccctgaatcaccgcctggcccgactccaccatgaacgtcgcgctgcaggagctgggagctggcagcaacgtgggattccagaaggggacaagacagctgttaggctcacgcacgcagctggagctggtcttagcaggtgcctctctactgctggctgcactgcttctgggctgccttgtggccctaggggtccagtaccacagagacccatcccacagcacctgccttacagaggcctgcattcgagtggctggaaaaatcctggagtccctggaccgaggggtgagcccctgtgaggacttttaccagttctcctgtgggggctggattcggaggaaccccctgcccgatgggcgttctcgctggaacaccttcaacagcctctgggaccaaaaccaggccatactgaagcacctgcttgaaaacaccaccttcaactccagcagtgaagctgagcagaagacacagcgcttctacctatcttgcctacaggtggagcgcattgaggagctgggagcccagccactgagagacctcattgagaagattggtggttggaacattacggggccctgggaccaggacaactttatggaggtgttgaaggcagtagcagggacctacagggccaccccattcttcaccgtctacatcagtgccgactctaagagttccaacagcaatgttatccaggtggaccagtctgggctctttctgccctctcgggattactacttaaacagaactgccaatgagaaagtgctcactgcctatctggattacatggaggaactggggatgctgctgggtgggcggcccacctccacgagggagcagatgcagcaggtgctggagttggagatacagctggccaacatcacagtgccccaggaccagcggcgcgacgaggagaagatctaccacaagatgagcatttcggagctgcaggctctggcgccctccatggactggcttgagttcctgtctttcttgctgtcaccattggagttgagtgactctgagcctgtggtggtgtatgggatggattatttgcagcaggtgtcagagctcatcaaccgcacggaaccaagcatcctgaacaattacctgatctggaacctggtgcaaaagacaacctcaagcctggaccgacgctttgagtctgcacaagagaagctgctggagaccctctatggcactaagaagtcctgtgtgccgaggtggcagacctgcatctccaacacggatgacgcccttggctttgctttggggtccctcttcgtgaaggccacgtttgaccggcaaagcaaagaaattgcagaggggatgatcagcgaaatccggaccgcatttgaggaggccctgggacagctggtttggatggatgagaagacccgccaggcagccaaggagaaagcagatgccatctatgatatgattggtttcccagactttatcctggagcccaaagagctggatgatgtttatgacgggtacgaaatttctgaagattctttcttccaaaacatgttgaatttgtacaacttctctgccaaggttatggctgaccagctccgcaagcctcccagccgagaccagtggagcatgaccccccagacagtgaatgcctactaccttccaactaagaatgagatcgtcttccccgctggcatcctgcaggcccccttctatgcccgcaaccaccccaaggccctgaacttcggtggcatcggtgtggtcatgggccatgagttgacgcatgcctttgatgaccaagggcgcgagtatgacaaagaagggaacctgcggccctggtggcagaatgagtccctggcagccttccggaaccacacggcctgcatggaggaacagtacaatcaataccaggtcaatggggagaggctcaacggccgccagacgctgggggagaacattgctgacaacggggggctgaaggctgcctacaatgcttacaaagcatggctgagaaagcatggggaggagcagcaactgccagccgtggggctcaccaaccaccagctcttcttcgtgggatttgcccaggtgtggtgctcggtccgcacaccagagagctctcacgaggggctggtgaccgacccccacagccctgcccgcttccgcgtgctgggcactctctccaactcccgtgacttcctgcggcacttcggctgccctgtcggctcccccatgaacccagggcagctgtgtgaggtgtggtagacctggatcaggggagaaatggccagctgtcaccagacctggggcagctctcctgacaaagctgtttgctcttgggttgggaggaagcaaatgcaagctgggctgggtctagtccctcccccccacaggtgacatgagtacagaccctcctcaatcaccacattgtgcctctgctttgggggtgcccctgcctccagcagagcccccaccattcactgtgacatctttccgtgtcaccctgcctggaagaggtctgggtggggaggccagttcccataggaaggagtctgcctcttctgtccccaggctcactcagcctggcggccatggggcctgccgtgcctgccccactgtgacccacaggcctgggtggtgtacctcctggacttctccccaggctcactcagtgcgcacttaggggtggactcagctctgtctggctcaccctcacgggctacccccacctcaccctgtgctccttgtgccactgctcccagtgctgctgctgaccttcactgacagctcctagtggaagcccaagggcctctgaaagcctcctgctgcccactgtttccctgggctgagaggggaagtgcatatgtgtagcgggtactggttcctgtgtcttagggcacaagccttagcaaatgattgattctccctggacaaagcaggaaagcagatagagcagggaaaaggaagaacagagtttatttttacagaaaagagggtgggagggtgtggtcttggcccttataggaccctgtgccaataaacagacatgcatccgtca

SEQ ID NO: 31299 - DNA, 2211 bp, Artificial Sequence
  derived and/or modified sequence
atgaacgtggcactgcaagagctgggggcaggctccaacgtaggattccagaaaggtactagacaacttctaggatctagaacacagctcgagttggtgctggcaggagctagcttgctgttggcggcactcttactggggtgtctggtcgctttgggcgttcagtatcacagagatcccagccactcaacctgtttaacagaggcatgtattagggtggctggcaaaattctggaaagtctggaccggggggtgagtccctgcgaagacttctaccaattctcatgcgggggatggatacggagaaatccactgcccgatggtcgcagtaggtggaatacatttaactcactgtgggaccaaaatcaggccatcctgaaacatctgcttgagaacaccaccttcaattcttccagcgaagctgagcaaaagacccagcggttttatctgagctgccttcaggttgagaggatcgaagaattgggggcgcagcccctgagagacctgatagagaagattggaggatggaatatcactgggccttgggaccaggacaacttcatggaagtgctgaaggccgtggcaggcacatatcgggccaccccattttttacagtctacatctcagctgactctaagtctagtaactcaaacgttatacaggtggaccaatccggactttttctaccatctagggactattacctgaaccggactgctaatgaaaaagtgctgactgcctacctcgactacatggaggagctgggaatgctgttgggtggtagaccaaccagtactagggagcaaatgcaacaggtcctcgaactcgagattcagttggctaacataactgtaccccaggaccaaagaagagacgaggagaagatctaccataaaatgagtatctccgagctgcaagccttggccccaagtatggattggctagagtttctctccttcctgctgtcccctctagagttatctgactctgaacccgtggtggtttatgggatggattatcttcaacaggtgtccgaacttattaaccgtacagaaccttcaattctgaataactatctcatctggaacctcgtccagaaaacaaccagcagcctggatcggcgcttcgaaagtgcacaggagaagttgttggagaccctgtatgggacgaagaagtcctgtgtcccccggtggcagacttgcatatccaacaccgatgacgccctgggcttcgcgctcggcagcttattcgtgaaagcaacctttgatagacagtcgaaggaaatcgcagagggcatgatttccgagatccgcaccgcctttgaggaagctctagggcagcttgtctggatggacgagaagactaggcaagcggcaaaggagaaggctgacgcgatatatgacatgattggttttccagatttcatcctggagccaaaagagctggacgacgtgtacgatggttacgagattagcgaagatagtttcttccaaaatatgctgaacctttataacttcagcgctaaggtcatggccgatcagctgcgcaaaccacccagtagagaccagtggtctatgacccctcagacagtcaatgcttattacttaccgaccaagaacgagattgtgttccccgctgggatccttcaggcccccttctacgccaggaaccatccaaaggctttaaacttcgggggcattggcgttgtgatggggcacgagcttacacacgcattcgatgatcagggtagggagtatgacaaggagggaaacctacggccatggtggcagaacgaatccctggccgcttttcggaatcacactgcatgcatggaagaacagtacaaccagtaccaagttaacggtgaaaggcttaatggtcgtcagacacttggagaaaatattgccgataatggaggcctgaaggctgcatataacgcttacaaggcctggctcaggaaacatggcgaagagcagcagctgccagcagtaggcctaacaaatcatcagctgttctttgtggggttcgcacaggtgtggtgcagcgtgaggactcccgagagctcacacgagggcctggtgactgacccacactctccagccaggtttcgcgtgctgggcaccctgtcaaattcaagagactttttaagacatttcggctgccccgtggggtccccaatgaatccaggccagctatgcgaagtgtggtag

SEQ ID NO: 31300 - DNA, 2211 bp, Artificial Sequence
  derived and/or modified sequence
atgaatgtggccctgcaggagctgggcgccggcagcaatgtgggcttccagaagggcacccggcagctgctgggcagcaggacccagctggagctggtgctggccggggccagcctgctgctggccgccctgctgctgggctgcctggtggccctgggcgtgcagtaccaccgggaccccagccacagcacctgcctgacagaggcctgcatccgggtggccggcaagatcctggagagcctggaccggggcgtgagcccctgtgaggacttctaccagttcagctgtggcggctggatcagaagaaaccccctgcctgatggccgcagccgctggaacaccttcaacagcctgtgggaccagaaccaggccatcctgaagcacctgctggagaacaccaccttcaacagcagcagcgaggccgagcagaagacccagcgcttctacctgagctgcctgcaggtggagcgcatcgaggagctgggcgcccagcccctgcgggacctgattgagaagattggaggctggaacatcaccggcccctgggaccaggacaacttcatggaggtgctgaaggctgtggccggcacctaccgggccacccccttcttcaccgtgtacatctctgctgacagcaagagcagcaacagcaatgtcatccaggtggaccagagcggcctcttcctgcccagccgggactactacctgaacagaacagccaatgagaaggtgctgacagcctacctggactacatggaggagctgggcatgctgctgggcggccggcccaccagcacccgggagcagatgcagcaggtgctggagctggagatccagctggccaacatcaccgtgccccaggaccagaggagagatgaggagaagatctaccacaagatgagcatcagcgagctgcaggccctggcccccagcatggactggctggagttcctgtccttcctgctgagccccctggagctgagtgacagcgagcctgtggtggtgtatggcatggactacctgcagcaggtgtctgagctgatcaacagaacagagcccagcatcctgaacaactacctgatctggaacctggtgcagaagaccaccagcagcctggacagaagatttgagagcgcccaggagaagctgctggagaccctgtatggcaccaagaagagctgtgtgccccgctggcagacctgcatcagcaacacagatgatgccctgggctttgccctgggcagcctgtttgtgaaggccacctttgaccggcagagcaaggagattgctgagggcatgatcagcgagatcagaacagcctttgaggaggccctgggccagctggtgtggatggatgagaagacccggcaggccgccaaggagaaggcagatgccatctatgacatgattggcttcccagacttcatcctggagcccaaggagctggatgatgtgtatgatggctatgagatcagtgaagattccttcttccagaacatgctgaacctgtacaacttcagcgccaaggtgatggctgaccagctgaggaagccacccagccgggaccagtggagcatgaccccccagacagtgaatgcctactacctgcccaccaagaatgagatcgtgtttcctgctggcatcctgcaggcccccttctacgccaggaaccaccccaaggccctgaactttggaggcattggagtggtgatgggccacgagctgacccacgcctttgatgaccagggccgggagtatgacaaggagggcaacctgcggccctggtggcagaatgaaagcctggccgccttcaggaaccacacagcctgcatggaggagcagtacaaccagtaccaggtgaatggagagcggctgaatggccggcagaccctgggagaaaatattgctgacaatggaggcctgaaggccgcctacaatgcctacaaggcctggctgaggaagcatggagaggagcagcagctgcctgctgtgggcctgaccaaccaccagctgttctttgtgggctttgcccaggtgtggtgcagcgtgaggaccccagagagcagccatgagggcctggtgacagacccccacagccctgcccgcttccgggtgctgggcaccctgagcaacagccgggacttcctgcggcacttcggctgccctgtgggcagccccatgaaccctggccagctgtgtgaggtgtggtag

SEQ ID NO: 31301 - DNA, 2211 bp, Artificial Sequence
  derived and/or modified sequence
atgaacgtggccctgcaggagctgggcgccggcagcaacgtgggcttccaaaaaggaaccaggcagttgctgggcagtagaactcagctcgagcttgtgcttgcaggggcttccctgctccttgcagctcttctattaggatgtcttgtggccctgggcgtccagtaccaccgagacccatctcatagcacatgtctaacagaggcttgcataagagttgccggtaaaatccttgaatctctggatcgcggagtgtccccctgcgaggatttttatcagttcagctgcgggggatggatccgcagaaatccgctgcccgacggtcgatctcgatggaacactttcaacagcttatgggatcagaaccaggccattttgaagcacctcctggagaataccaccttcaactccagttccgaggccgaacaaaagactcagagattttacttgagttgcttgcaggttgagagaattgaagagttgggcgcacagccactaagagatctcatagagaagattggcggatggaacatcacagggccatgggaccaggacaactttatggaagtcctcaaggctgtcgctgggacctaccgagcgaccccattcttcaccgtatacatcagcgccgacagtaagtcttctaattccaacgtgattcaagtggaccaaagtggtcttttcttaccctccagggattattacctgaatcgcaccgctaacgagaaagttcttacagcttatctagactatatggaggaactcggcatgttgctgggcgggcgcccaaccagcacgcgagaacaaatgcagcaggtcctcgaactcgagatccagctggccaatatcactgtgccacaggatcaacgccgcgacgaggaaaagatttatcataagatgtctatctctgagctgcaggctctggccccgtctatggactggctcgaatttctgtcattcttactctcccctctggagcttagcgacagtgagcccgtcgttgtctacggaatggattatttgcaacaggtgtcagaactgattaaccggacagaaccctccatccttaataattacttaatctggaatttggtgcaaaagactaccagctcactggatagaagattcgaaagcgctcaggaaaaattgctggagacactgtatggcactaagaagtcttgcgtacctagatggcagacgtgcatttcaaatacggatgacgcgctgggtttcgcgctgggctcgctctttgtgaaggctaccttcgatcgacagtccaaagagattgcagagggcatgattagcgagatcagaaccgctttcgaggaggccttaggacagctggtctggatggacgaaaagacccgccaggccgctaaggaaaaggccgatgcgatctatgacatgattggctttccagacttcattctggaaccaaaggagctggacgacgtatatgacggctacgagatatccgaggattcttttttccaaaatatgctaaacctgtataatttctctgctaaagtgatggcagaccaactgcgcaagccgccctctagagaccagtggtcgatgaccccccagacggtcaatgcatactacctccctaccaagaatgagatcgttttccctgctggtatcctccaggccccgttttatgcaagaaaccaccccaaagcgctgaattttggtggtatcggggttgtcatgggtcatgagctcactcatgcgttcgacgaccagggcagagagtacgataaggagggaaatctgaggccttggtggcagaatgagtctctggctgcctttagaaaccacacagcgtgtatggaggaacagtacaaccaataccaggtcaatggcgagcgcttgaatgggcgccagacactgggagaaaacattgccgataatggaggactcaaagcggcctacaacgcatacaaagcatggctgaggaagcacggcgaggagcaacagcttcccgctgtgggcctaactaaccaccagctgtttttcgtaggcttcgcccaggtgtggtgtagcgtccgaacccctgagagcagtcacgagggattagtcacggacccccattccccggctaggttcagagttctaggaacgttaagcaatagcagggattttctcagacatttcgggtgtccggtcggctcacctatgaatcctggccagctgtgtgaggtttggtag

SEQ ID NO: 31302 - DNA, 2211 bp, Artificial Sequence
  derived and/or modified sequence
atgaatgtcgcgctccaggaactgggcgcaggaagcaatgtggggttccagaagggaacacggcagcttctcggctcacgtacacaacttgaactcgtcttagctggcgctagtttgctactggcagctcttctgctgggttgccttgtggctctaggtgtccaataccaccgagatcccagtcattccacatgcttaactgaggcctgcattcgagtcgccggaaagattctggagagcctcgacagaggagtatccccatgtgaggacttctaccagttctcctgcgggggttggattagacggaatcctctgcccgacggtcggagcagatggaataccttcaatagtctgtgggaccagaatcaggccatccttaaacacctgctggaaaacacgacatttaactcttcctccgaggctgagcagaagactcagaggttttacctaagctgtctacaggttgaaaggattgaggaactgggcgctcagccgctcagggaccttatagagaaaattgggggatggaatatcaccggcccatgggatcaggacaattttatggaggtgctcaaagctgtggccggaacatatcgcgcaaccccattcttcacagtatatatctccgcagactccaaatcatcaaattcaaatgtgatccaggtagaccaatcaggattgtttctgccttcacgagattactacctaaaccggaccgctaacgagaaagtcctgacagcttatctcgactatatggaagaactaggcatgctgcttggaggcaggcctacaagtacccgggagcaaatgcagcaggtgctggaacttgaaatccagttagctaacatcacggtgcctcaggatcagcggagggacgaggagaaaatctaccataagatgtcgatcagtgaactgcaagctttagctccctccatggattggctcgaatttctgagctttctcctctcccctctggagctgtccgacagcgagccagtggtcgtgtatggcatggattacttgcagcaggtgagtgagcttattaatcgcactgagcctagtattttgaacaactatctaatctggaacctggtgcagaagaccacatcatctctggatcgaaggtttgaaagtgcccaggaaaagctactcgagacgttatacgggaccaagaagagttgcgtgcctcgatggcagacttgcatttcaaacaccgacgatgctttaggattcgcccttggctccctcttcgtgaaggcgacttttgaccggcagtctaaggaaatcgccgagggaatgatctccgagatcaggacagcattcgaggaagccttgggtcagcttgtttggatggatgaaaaaacaaggcaggccgcaaaagaaaaagcggacgcgatctacgatatgataggcttccccgatttcatcctggaacccaaggaactggatgatgtctatgatgggtatgaaattagcgaggattctttcttccagaacatgttaaatttatataactttagcgcaaaggtgatggcggaccagcttcggaaaccgccttcgagggatcagtggtcgatgacaccacagactgtaaatgcatattatctccctacaaagaacgagattgtgttcccggctggcatcctgcaggcgccattctatgcaagaaaccaccctaaggctctgaactttggtgggatcggggttgttatgggccatgaactgactcatgctttcgatgaccaaggtcgggaatacgataaagagggcaacctccgcccttggtggcagaatgaaagcctcgcggctttccggaaccacactgcctgtatggaggagcaatataaccaatatcaggttaacggggagcgccttaatgggcgacagaccctcggcgagaacatagcagacaatggcggacttaaggcagcgtataatgcttataaggcctggctgcgcaagcatggcgaagagcagcagctccctgcggtggggctcaccaatcatcagctgttttttgtggggttcgcacaagtgtggtgttctgtgagaacaccagagtcttctcacgagggattggttactgacccccactctcctgccagattcagagttctgggcaccttgagcaattctcgggatttcttgcggcatttcggatgtcctgtaggatcccccatgaatccaggacagctttgtgaggtttggtag

SEQ ID NO: 31303 - protein, 211 aa, Artificial Sequence
  derived and/or modified sequence
MWASLSLDHPSAKENQALRLIEMREENGNVPKTEQAGSLKPLRDTGKSNLKEKKANSKLKQIEKEYTQKLAKSSQIIAELQTTISSLKEENSQQQLAAERRLQDVRQKFEDEKKQLIRDNDQAIKVLQDELENRSNQVRCAEKKLQHKELESQEQITYIRQEYETKLKGLMPASLRQELEDTISSLKSQVNFLQKRASILQEELTTYQGRR

SEQ ID NO: 31304 - DNA, 636 bp, Artificial Sequence
  derived and/or modified sequence
atgtgggcttctcttagtctcgaccatccaagcgcaaaagaaaatcaggcccttaggttgattgaaatgagagaggaaaacggtaatgtcccaaaaacagagcaggccggatcccttaaacctctgagagacactggaaagagtaatttgaaagagaaaaaggcaaatagcaagctcaagcagatagagaaggagtatactcagaagctcgcaaagagctcacagattatcgccgagcttcagactacaattagcagtcttaaggaagagaattcacaacagcagctggctgcggagaggcgtctgcaggatgtccgacagaagttcgaagacgagaaaaagcagctgataagggacaacgaccaggccataaaggtgctgcaggatgaacttgagaaccgcagcaatcaggtcagatgcgctgagaaaaaactgcagcacaaagagctggaatcacaggaacagatcacatacatccggcaggagtatgagacaaaactgaaaggactgatgccagccagtttgcgccaggaattagaagacactatttcctctctaaaatcacaggtgaattttttgcagaagagagctagcatcctgcaggaagagcttacaacttatcaaggcaggcggtag

SEQ ID NO: 31305 - DNA, 636 bp, Artificial Sequence
  derived and/or modified sequence
atgtgggccagcctgagcctggaccaccccagcgccaaggagaaccaggccctgcggctgattgagatgagggaggagaatggaaatgtgcccaagacagagcaggccggcagcctgaagcccctgcgggacaccgggaagagcaacctgaaggagaagaaggccaacagcaagctgaagcagatcgagaaggagtacacccagaagctggccaagagcagccagatcatcgccgagctgcagaccaccatcagcagcctgaaggaggagaacagccagcagcagctggccgctgagcggcggctgcaggatgtgcggcagaagtttgaagatgagaagaagcagctgatccgggacaatgaccaggccatcaaggtgctgcaggatgagctggagaacagaagcaaccaggtgcgctgtgccgagaagaagctgcagcacaaggagctggagagccaggagcagatcacctacatccggcaggagtatgagaccaagctgaagggcctgatgcctgccagcctgcggcaggagctggaggacaccatcagcagcctgaagagccaggtgaacttcctgcagaagagggccagcatcctgcaggaggagctgaccacctaccagggcagaagatag

SEQ ID NO: 31306 - DNA, 636 bp, Artificial Sequence
  derived and/or modified sequence
atgtgggccagcctgagcctggaccaccccagcgccaaggagaaccaagctctccgactcatcgagatgcgtgaggaaaacggcaacgttcctaaaacagagcaggcaggaagcctgaagccgctgcgcgataccggaaagtctaacttaaaggaaaaaaaggccaacagcaaactcaagcaaatcgagaaggagtatacccagaagcttgctaaatcctcccagattattgccgagctccagacaacaattagtagccttaaagaagaaaattcgcaacaacagctggccgctgagcggagacttcaagacgtgagacagaagttcgaggacgaaaagaagcagcttattcgggataacgatcaggccattaaggtcctccaagacgagcttgagaaccggtcaaaccaagttcggtgtgctgagaaaaaactgcagcataaggaactagagagccaggagcagataacctatatccggcaggagtacgagacaaagctcaaaggacttatgccggcctctctgaggcaagagctcgaggatactatctcatcattgaaaagccaagtgaattttctgcagaagcgcgccagtatcctgcaggaagaactgacaacgtatcagggcaggaggtag

SEQ ID NO: 31307 - DNA, 636 bp, Artificial Sequence
  derived and/or modified sequence
atgtgggcaagcctaagccttgatcaccccagtgccaaagagaatcaggctcttagactcatagagatgcgtgaggagaacggtaacgtgccgaagactgagcaagccggaagtttgaagccactacgcgataccggcaagtcaaatctgaaggagaagaaggcaaacagtaaattaaaacaaattgagaaggagtacacacagaagctggccaagagcagccagataattgccgagctgcaaactacaatttcctccttgaaggaggagaatagtcagcagcagttggccgctgaacgacgtctgcaggacgtgagacaaaaatttgaagacgaaaagaaacaactcattcgcgacaatgaccaagccataaaggttctccaggatgagctggagaacaggtcgaaccaggtcagatgtgcggaaaagaaactgcaacacaaggagctggaaagccaggaacagattacctacattcgtcaggaatacgaaaccaaactaaaaggtttaatgccagccagtctgcggcaagagttagaggacactatctcaagtcttaagtcacaggtaaactttctccagaagcgggcttctattctacaggaggagctgaccacttatcaggggagaaggtag

SEQ ID NO: 31308 - DNA, 1310 bp, Artificial Sequence
  derived and/or modified sequence
attagctgacatcaggaactgagccaggcagtgtggttgtgatgtcactatctcacctcacccccacctaagagattgtggtggggaatctcagacactctaaccctctgggcccaagtcacctttctatcaggggagggaggctgtgctctcactggcttcttgttagaagttctgcctgccctacagcctgcactgagggctctcatcactgcttctgagatcttaatgggggtcaacgaagatgtgggcttctctgagtttagaccatccatctgccaaggaaaaccaagccctgagactgatagagatgagagaagagaatggtaatgtccccaagacagagcaggcaggaagtttgaagcctctgagggatacaggaaaatctaacctcaaagagaagaaggccaacagcaagctgaagcagattgagaaggaatacactcagaagcttgccaaatcttcacagatcatagcagaacttcagacaaccatttcctctctgaaagaagagaacagccagcagcagcttgctgcagaaaggcggctccaggatgttagacaaaagtttgaagatgagaagaagcagctgattagagataatgaccaagcaatcaaggttttacaagatgaattagaaaaccgttctaatcaggtgcgatgtgcagagaaaaaattacaacacaaagaattggagtcacaggaacagataacttacatacgacaagaatatgaaacaaaattgaaaggattgatgccagcatccctaagacaagaacttgaagacaccatttcctccctaaaatcacaggttaattttctgcaaaagagagcttccatccttcaggaagaactgactacatatcaaggcagaaggtaactgcacgagagaatgcaacggatgcaatttccaggctgtgctgtggacttcttccagcaggtttgaagatttggatattgtaaactgtgagatcagtggcattttttaaatccttaaatgtaattaagatcataaaaacatgcatcattcatacactagtggggtggttttatttgtgtctgcctaagttatttttttaacattcctttatttccgattttcatgtttgtgtgcatttgagtatgtgctgagaactgcttatattgggcaaagtgatttcctatgatatgccttgttaatccttttgcatagaattttaccagttgcgtacgatcaaaatcacgtttgtagtatcatatcaaaaattctaacctgtttacattgttttcatgttcatgttcctatgttattaaaatattattttgtactt

SEQ ID NO: 31309 - DNA, 636 bp, Artificial Sequence
  derived and/or modified sequence
atgtgggccagcctgagcctggaccaccccagcgccaaggagaaccaggccctgagactgatcgagatgagagaggagaacggcaacgtgcccaagaccgagcaggccggcagcctgaagcccctgagagacaccggcaagagcaacctgaaggagaagaaggccaacagcaagctgaagcagatcgagaaggagtacacccagaagctggccaagagcagccagatcatcgccgagctgcagaccaccatcagcagcctgaaggaggagaacagccagcagcagctggccgccgagagaagactgcaggacgtgagacagaagttcgaggacgagaagaagcagctgatcagagacaacgaccaggccatcaaggtgctgcaggacgagctggagaacagaagcaaccaggtgagatgcgccgagaagaagctgcagcacaaggagctggagagccaggagcagatcacctacatcagacaggagtacgagaccaagctgaagggcctgatgcccgccagcctgagacaggagctggaggacaccatcagcagcctgaagagccaggtgaacttcctgcagaagagagccagcatcctgcaggaggagctgaccacctaccagggcagaagatag

SEQ ID NO: 31310 - protein, 101 aa, Artificial Sequence
  derived and/or modified sequence
MDQYVSTAPPRFPIAQLGTFKQDSAGMGRIFKGNLLQKKALTTFENEHHIRFFTLLVLFHVMVLLRNHSRIQGVSEDWKRANSIFRNFLRLKSSRNTAEAE

SEQ ID NO: 31311 - DNA, 1369 bp, Artificial Sequence
  derived and/or modified sequence
gcaccagctctgtgtcctcagagtcgctgtcatcaaggagacctctcactggtcaccgccgcagcccccacatggaccagtatgtgtccacagctcctccccgattccctatagcacagctgggaacatttaaacaagactctgcaggaatgggacggatattcaaggggaatttgctgcagaagaaagcacttaccacatttgaaaatgaacaccatattcgtttcttcacattgttggttcttttccatgtgatggtgttgctgaggaatcatagcaggatacaaggggtttctgaagactggaaaagggccaacagcatatttcgaaactttctacgtttgaagtcatccaggaacacagcagaagcagaataaatgacactacgtttctctctcatggccttcataccatggatttcccctgctcaagatgaaaagaaattaagaggaaatcagattgcttagagatagcagattattgctcactttttaaaaggagctccacagagagaatgaagaacgtgtaactttttgcaatgataatgtctgctttgttcttgaggggcactcttcctttttctgttcaggaatattccggaggagagctgcagatgccacccaaccctgcgaaatctgccctgcgtgtcgaaacagatccagcagtgcaaagaacttcttcattaggacatcaagcctgtagtcatattttcaattgctgctgtaactttttccttgcaagtgctttcacttatttcgggaccacctaaggctctgtgtggtatacagcaacacagtttgagatatttctgtgatgttctgtatatcatatagttgctaacaacctgtcaaagtcatcctgacaccaaactgagaagctgatggtttgggtaacatattagaggagatgaaaaaaccgacagtcctcattactgtaataaaaccagcagagacacactgagaatcaattactgattgtgacctaatgaactaaccctcagtcaagtagaaaactgcaccaagcctcttacattatcaaatgatttaggatggagcactgtctgaagacgggcaacaagtcgaggcagatgagttttcttatattgtggctgacttaattaccttgttcctgagtgcagagatcaaattgagcaacttaaggtgctaaagctctgtgccagctggaaatgaaaaggaaataattaacaccaacaagagctacgtctaaggttgtggcacctcctgacagaagcaaggagactcaaagttaaggcggctgcaaagtccttgacgaggtgagccctgctctatccgcctggctggattcgtccaggttgcctgtggcagctgtgcactgaagagtccggctg

SEQ ID NO: 31312 - DNA, 1834 bp, Artificial Sequence
  derived and/or modified sequence
aatacccagatcttcaaggttggcaaagaagagaaaagctccttgggaacttagttaccaggtcttatagcaccagctctgtgtcctcagagtcgctgtcatcaaggagacctctcactggtcaccgccgcagcccccacatggaccagtatgtgtccacagctcctccccgattccctatagcacagctgggaacatttaaacaagactctgcaggaatgggacggatattcaaggggaatttgctgcagaagaaagcacttaccacatttgaaaatgaacaccatattcgtttcttcacattgttggttcttttccatgtgatggtgttgctgaggaatcatagcaggatacaaggggtttctgaagactggaaaagggccaacagcatatttcgaaactttctacgtttgaagtcatccaggaacacagcagaagcagaataaatgacactacgtttctctctcatggccttcataccatggatttcccctgctcaagatgaaaagaaattaagaggaaatcagattgcttagagatagcagattattgctcactttttaaaaggagctccacagagagaatgaagaacgtgtaactttttgcaatgataatgtctgctttgttcttgaggggcactcttcctttttctgttcaggaatattccggaggagagctgcagatgccacccaaccctgcgaaatctgccctgcgtgtcgaaacagatccagcagtgcaaagaacttcttcattaggacatcaagcctgtagtcatattttcaattgctgctgtaactttttccttgcaagtgctttcacttatttcgggaccacctaaggctctgtgtggtatacagcaacacagtttgagatatttctgtgatgttctgtatatcatatagttgctaacaacctgtcaaagtcatcctgacaccaaactgagaagctgatggtttgggtaacatattagaggagatgaaaaaaccgacagtcctcattactgtaataaaaccagcagagacacactgagaatcaattactgattgtgacctaatgaactaaccctcagtcaagtagaaaactgcaccaagcctcttacattatcaaatgatttaggatggagcactgtctgaagacgggcaacaagtcgaggcagatgagttttcttatattgtggctgacttaattaccttgttcctgagtgcagagatcaaattgagcaacttaaggtgctaaagctctgtgccagctggaaatgaaaaggaaataattaacaccaacaagagctacgtctaaggttgtggcacctcctgacagaagcaaggagactcaaagttaaggcggctgcaaagtccttgacgaggtgagccctgctctatccgcctggctggattcgtccaggttgcctgtggcagctgtgcactgaagagtccggctggggagccagggattcagaactcacagtgcagcctgacgaccaaagggcaaatccacctgaggacctgagtgcagatggctgggctccccggaacaaagtggaggaatgacagaggtgtaactcttacaccacagcctccatctgtgtgtcgcagagaaaaatactataatggagactattcttacacacatacacacacacacacacacacagagttcttgtcaccgatggaacagtctgtctttgtctttcatctcccacattcatgtccagatcccattgcgctgcatcacacgtgaacccagtgaggtcaacaatgaatggatggtgttcacaaagaaaccagcttatggaaggggacctgttacaattctttgaattaagttcttggaagcc

SEQ ID NO: 31313 - DNA, 306 bp, Artificial Sequence
  derived and/or modified sequence
atggaccagtacgtgagcaccgccccccccagattccccatcgcccagctgggcaccttcaagcaggacagcgccggcatgggcagaatcttcaagggcaacctgctgcagaagaaggccctgaccaccttcgagaacgagcaccacatcagattcttcaccctgctggtgctgttccacgtgatggtgctgctgagaaaccacagcagaatccagggcgtgagcgaggactggaagagagccaacagcatcttcagaaacttcctgagactgaagagcagcagaaacaccgccgaggccgagtag

SEQ ID NO: 31314 - DNA, 306 bp, Artificial Sequence
  derived and/or modified sequence
atggatcagtatgtcagtacagcccctccgcggtttccaatcgcacagttgggcacttttaagcaggacagcgccggaatgggtagaatttttaagggtaacctacttcagaaaaaagcactgactacctttgagaatgagcatcacatccggttcttcacattactggtactttttcacgtgatggtgctgttgcgaaatcactcccgcattcaaggggtctctgaagactggaagcgcgctaactccatttttcggaacttcctgcgtcttaaatcttctcgcaatacagccgaagccgagtag

SEQ ID NO: 31315 - DNA, 306 bp, Artificial Sequence
  derived and/or modified sequence
atggaccagtacgtctccactgcaccccctaggttcccaattgcacagttagggacatttaaacaggacagcgccggaatgggcagaatctttaagggcaatctgctacagaagaaagccctcaccaccttcgagaacgagcaccatatcagattcttcaccctgctcgtcctgttccacgttatggtgctcctcaggaatcattcacgaatccagggcgtgagcgaagactggaagcgtgcaaatagtatattcaggaattttctgcgcctcaagtctagccgaaacacggctgaggccgagtag

SEQ ID NO: 31316 - DNA, 306 bp, Artificial Sequence
  derived and/or modified sequence
atggaccagtatgtgtccacagccccaccccgcttccccatcgcccagctgggcaccttcaagcaggacagcgctggcatgggccgcatcttcaagggcaacctgctgcagaagaaggccctgaccacctttgaaaatgagcaccacatccgcttcttcaccctgctggtgctcttccacgtgatggtgctgctgaggaaccacagccgcatccagggcgtgtctgaggactggaagagggccaacagcatcttcaggaacttcctgcggctgaagagcagcaggaacacagctgaggccgagtag

SEQ ID NO: 31317 - DNA, 306 bp, Artificial Sequence
  derived and/or modified sequence
atggaccagtacgtgagcaccgcccccccccggttccccatcgcccaacttggcacgtttaagcaggactcagctggcatgggtagaatattcaagggaaatctactccagaaaaaagcgctgaccacgtttgagaatgagcaccacatccgattcttcacccttctggtgctttttcacgttatggttctcctcaggaatcattctaggatacagggtgttagtgaagattggaaacgcgctaactcaatctttaggaactttctccgactgaagagttcacgaaatactgctgaggcagaatag

SEQ ID NO: 31318 - DNA, 306 bp, Artificial Sequence
  derived and/or modified sequence
atggaccagtacgtgagcaccgcccccccccggttccccatcgcccaactgggaactttcaagcaggacagcgccggaatgggaaggattttcaagggaaatctgttacagaaaaaagcactgacgactttcgagaatgaacaccatattcgttttttcacattactggtgctgttccatgtaatggtgctgttgaggaatcattcgcggatacagggggtgtccgaagactggaaacgggctaattcaatctttagaaacttcctgagattgaagtcaagtagaaataccgccgaggccgagtag

SEQ ID NO: 31319 - DNA, 306 bp, Artificial Sequence
  derived and/or modified sequence
atggatcagtatgtctcgaccgcaccccctcgattccccattgctcagctggggacttttaagcaggatagcgctgggatgggacggatattcaagggcaacctgctgcagaaaaaggcccttaccacatttgaaaatgagcatcacatccggttctttactcttcttgttttatttcacgtgatggtgctgctaagaaatcatagccgaattcagggcgtgagcgaggactggaagagagccaacagcatcttcaggaactttctgaggctcaagtcctcacggaacacagcagaggccgagtag

SEQ ID NO: 31320 - DNA, 306 bp, Artificial Sequence
  derived and/or modified sequence
atggatcagtacgtgtccactgccccaccgagattccccattgctcaactggggaccttcaaacaggactcggcagggatggggaggatctttaagggcaacctattgcagaaaaaggcactgacaactttcgaaaatgaacaccatatccgcttcttcactctccttgtcctgttccacgtgatggttcttctgcgtaatcacagcagaattcagggggtgtctgaggactggaaacgagcaaactcaatatttcgtaatttccttaggctgaagtccagccgtaatacagccgaggccgagtag

SEQ ID NO: 31321 - protein, 459 aa, Artificial Sequence
  derived and/or modified sequence
MPLYSVTVKWGKEKFEGVELNTDEPPMVFKAQLFALTGVQPARQKVMVKGGTLKDDDWGNIKIKNMELPCGLTNLGNTCYMNATVQCIRSVPELKDALKRYAGALRASGEMASAQYITAALRDLFDSMDKTSSSIPPIILLQFLHMAFPQFAEKGEQGQYLQQDANECWIQMMRVLQQKLEAIEDDSVKETDSSSASAATPSKKKSLIDQFFGVEFETTMKCTESEEEEVTKGKENQLQLSCFINQEVKYLFTGLKLRLQEEITKQSPTLQRNALYIKSSKISRLPAYLTIQMVRFFYKEKESVNAKVLKDVKFPLMLDMYELCTPELQEKMVSFRSKFKDLEDKKVNQQPNTSDKKSSPQKEVKYEPFSFADDIGSNNCGYYDLQAVLTHQGRSSSSGHYVSWVKRKQDEWIKFDDDKVSIVTPEDILRLSGGGDWHIAYVLLYGPRRVEIMEEESEQ

SEQ ID NO: 31322 - DNA, 1380 bp, Artificial Sequence
  derived and/or modified sequence
atgcccctgtacagcgtgaccgtgaagtggggcaaggagaagttcgagggcgtggagctgaacaccgacgagccccccatggtgttcaaggcccagctgttcgccctgaccggcgtgcagcccgccagacagaaggtgatggtgaagggcggcaccctgaaggacgacgactggggcaacatcaagatcaagaacatggagctgccctgcggcctgaccaacctgggcaacacctgctacatgaacgccaccgtgcagtgcatcagaagcgtgcccgagctgaaggacgccctgaagagatacgccggcgccctgagagccagcggcgagatggccagcgcccagtacatcaccgccgccctgagagacctgttcgacagcatggacaagaccagcagcagcatcccccccatcatcctgctgcagttcctgcacatggccttcccccagttcgccgagaagggcgagcagggccagtacctgcagcaggacgccaacgagtgctggatccagatgatgagagtgctgcagcagaagctggaggccatcgaggacgacagcgtgaaggagaccgacagcagcagcgccagcgccgccacccccagcaagaagaagagcctgatcgaccagttcttcggcgtggagttcgagaccaccatgaagtgcaccgagagcgaggaggaggaggtgaccaagggcaaggagaaccagctgcagctgagctgcttcatcaaccaggaggtgaagtacctgttcaccggcctgaagctgagactgcaggaggagatcaccaagcagagccccaccctgcagagaaacgccctgtacatcaagagcagcaagatcagcagactgcccgcctacctgaccatccagatggtgagattcttctacaaggagaaggagagcgtgaacgccaaggtgctgaaggacgtgaagttccccctgatgctggacatgtacgagctgtgcacccccgagctgcaggagaagatggtgagcttcagaagcaagttcaaggacctggaggacaagaaggtgaaccagcagcccaacaccagcgacaagaagagcagcccccagaaggaggtgaagtacgagcccttcagcttcgccgacgacatcggcagcaacaactgcggctactacgacctgcaggccgtgctgacccaccagggcagaagcagcagcagcggccactacgtgagctgggtgaagagaaagcaggacgagtggatcaagttcgacgacgacaaggtgagcatcgtgacccccgaggacatcctgagactgagcggcggcggcgactggcacatcgcctacgtgctgctgtacggccccagaagagtggagatcatggaggaggagagcgagcagtag

SEQ ID NO: 31323 - DNA, 1380 bp, Artificial Sequence
  derived and/or modified sequence
atgccgttgtactcagtaaccgtgaagtggggcaaagagaagttcgaaggggtggaactcaatacagatgaaccaccaatggttttcaaggcacaactgttcgcattaacaggggtgcaacctgccaggcagaaggtgatggtaaagggaggcaccctgaaggatgacgattggggaaacattaaaataaaaaacatggaactgccatgcggtcttactaatttaggcaacacctgttacatgaatgcaacagttcagtgcattcgaagcgtgccagaactgaaggacgcgttgaaacgctacgcaggcgctctgagagcctctggcgagatggcgtccgctcagtacatcaccgccgcattacgagacctctttgactccatggacaagacatcgtcctctatcccaccaatcatcttgctccagtttctccatatggcctttccacagttcgccgaaaagggagagcagggccagtatttacagcaggatgccaatgaatgctggattcagatgatgcgcgtgttacagcagaaattggaggcaatagaggacgattcagttaaagagactgactcctccagtgcctctgctgccaccccctcaaagaaaaaatctctcattgaccaattttttggggtcgagttcgagactaccatgaaatgtacagaaagtgaagaggaagaagtcaccaaaggaaaagagaaccagctccaactctcttgctttataaaccaggaggtgaagtacctgttcaccggtctcaagcttcggctccaggaggaaattaccaagcaatccccaacacttcagcggaatgccctctatataaaatcctctaaaatcagccgactgcctgcttacctgaccattcagatggtgcgttttttctataaggaaaaagaatccgtgaacgccaaagtactcaaagacgtgaaatttcctctgatgctggatatgtatgaactgtgtacacctgaactccaggagaaaatggtctctttccgctctaagttcaaggatctggaagataaaaaagtaaaccagcagcccaacactagcgataagaaatcctctcctcaaaaggaagtaaaatatgagcctttcagcttcgcagatgacatcggatcgaacaactgcggctattacgatctccaagcagtacttacacatcaaggacgttcatcaagctccgggcactacgtctcgtgggtgaaacgcaagcaggacgagtggatcaagtttgacgatgataaggtgagcattgtcacccccgaagatatactgagactctccggcgggggagattggcatattgcttatgtcctgctctatggcccccgacgcgtggaaataatggaggaggaatctgagcagtag

SEQ ID NO: 31324 - DNA, 1380 bp, Artificial Sequence
  derived and/or modified sequence
atgccgctttattcagtaaccgttaagtggggcaaagagaagttcgagggggtcgagctcaataccgacgagcctcccatggtctttaaggctcagctttttgcactgaccggcgtccagcccgcaaggcaaaaagtaatggtcaagggcggaaccctgaaggacgacgattggggcaatatcaagatcaagaatatggagctgccctgcggcttaaccaatttggggaatacttgctatatgaacgctacagtgcaatgtatccgctctgtaccagaactgaaggatgctctgaagagatacgctggggcattgcgggccagtggcgaaatggcttccgcccaatacattacggcagcgcttcgcgacctgttcgattctatggataagacctcttcatctattccacctataattctcctacagttcctacacatggcttttccgcagttcgccgaaaagggtgagcagggacagtacctacagcaggacgcaaatgaatgctggatccagatgatgcgggtcttgcaacaaaagctggaggctattgaagacgactccgttaaggagacagattcaagctctgcaagtgccgctacaccttccaaaaagaaaagcctgattgatcagttctttggggtggagttcgaaaccactatgaaatgcacagagagcgaggaagaagaagtgaccaaaggcaaggagaatcagctgcagctctcttgctttatcaaccaggaagttaaatatctcttcacaggattaaagctcaggctgcaagaggagatcacgaagcaaagtcccaccttgcaacggaacgctctttatattaaaagcagcaaaataagtaggctgccagcttatttaactatccagatggttcggtttttttataaggaaaaggaatccgtgaatgccaaggtacttaaggatgtgaagttccccctcatgctggacatgtacgaattatgcacgccggaactgcaggagaaaatggtgtctttccgttcaaaatttaaagatctcgaggataaaaaagtgaatcaacagcccaatacatcggacaagaaatccagcccacaaaaagaggtgaaatatgaaccctttagctttgctgacgacatagggtcaaataattgcgggtactatgatttacaggctgtgcttactcatcagggacgctcaagttcttccggacactacgtgagctgggtaaaacggaagcaggacgagtggatcaaatttgacgatgataaggtgagtatcgtgacacccgaggacattctgcggctgagtggaggaggtgactggcacatcgcctatgtcctactctacggtccccgaagggtcgagataatggaggaggagagcgagcagtag

SEQ ID NO: 31325 - DNA, 1380 bp, Artificial Sequence
  derived and/or modified sequence
atgcccctgtacagcgtgacagtgaagtggggcaaggagaagtttgaaggagtggagctgaacacagatgagccccccatggtgttcaaggcccagctgtttgccctgactggagtgcagcctgcccggcagaaggtgatggtgaagggcggcaccctgaaggatgatgactggggcaacatcaagatcaagaacatggagctgccctgtggcctgaccaacctgggcaacacctgctacatgaatgccaccgtgcagtgcatccgctctgtgcctgagctgaaggatgccctgaagagatatgctggggccctgcgggccagcggggagatggccagcgcccagtacatcacagctgccctgcgggacctgtttgacagcatggacaagaccagcagcagcatcccccccatcatcctgctgcagttcctgcacatggccttcccccagtttgctgagaagggggagcagggccagtacctgcagcaggatgccaatgaatgctggatccagatgatgagggtgctgcagcagaagctggaggccattgaagatgattctgtgaaggagacagacagcagcagcgccagcgctgccacccccagcaagaagaagagcctgattgaccagttcttcggcgtggagtttgagaccaccatgaagtgcacagaaagtgaggaggaggaggtgaccaagggcaaggagaaccagctgcagctgagctgcttcatcaaccaggaggtgaagtacctgttcaccggcctgaagctgcggctgcaggaggagatcaccaagcagagccccaccctgcagagaaatgccctgtacatcaagagcagcaagatcagccggctgcctgcctacctgaccatccagatggtgcgcttcttctacaaggagaaggagagcgtgaatgccaaggtgctgaaggatgtgaagttccccctgatgctggacatgtatgagctgtgcaccccagagctgcaggagaagatggtgtccttccgcagcaagttcaaggacctggaggacaagaaggtgaaccagcagcccaacaccagtgacaagaagagcagcccccagaaggaggtgaagtatgagcccttctcctttgctgatgacatcggcagcaacaactgtggctactatgacctgcaggccgtgctgacccaccagggccgcagcagcagcagcggccactacgtgtcctgggtgaagaggaagcaggatgagtggatcaagtttgatgatgacaaggtgtccatcgtgaccccagaggacatcctgcggctgagcggcggcggggactggcacatcgcctacgtgctgctgtatggcccccggcgggtggagatcatggaggaggagagcgagcagtag

SEQ ID NO: 31326 - DNA, 1380 bp, Artificial Sequence
  derived and/or modified sequence
atgcccctgtacagcgtgaccgtgaagtggggcaaggagaagttcgaaggtgtggaattgaatactgatgagcctcccatggtttttaaggcacaactgtttgccctgacaggagtccagccggcccgtcagaaagtgatggtgaagggcggcaccctgaaagacgatgattggggcaatatcaaaataaagaacatggagctcccatgcggactcaccaacctcggtaatacatgctatatgaatgccacggttcaatgcatacggtcggtgccagagctgaaggatgcactgaaacgttatgctggagcacttcgggcaagcggcgagatggcttctgcccagtatatcaccgccgctcttagagatttatttgatagcatggacaagaccagctctagcattccccccataatactcctgcagttcctccatatggccttccctcagttcgcagagaaaggggagcagggccaatacctgcagcaagatgctaatgagtgttggattcagatgatgcgtgtgttacagcagaaactcgaggctattgaagatgatagcgtgaaggaaactgatagctccagcgcctctgctgccactcccagcaaaaagaagtcacttatagaccagttttttggggtggagttcgagactaccatgaagtgtactgaaagtgaggaagaggaagtcacaaaaggcaaggagaatcagttacagttgtcttgcttcataaaccaggaagttaagtatctgtttacgggtttgaagttgcgcctccaggaggagatcactaaacagtctcctaccttgcagaggaacgcactttatattaaaagcagtaaaatctctcgattgccagcatatctcactattcaaatggtgcggtttttctacaaggaaaaggaaagcgtgaacgctaaggtgctgaaagacgtaaagttcccgttgatgcttgatatgtatgaactctgcactcccgagttgcaggaaaagatggtgagctttcgatcaaagttcaaggacctggaggataagaaggtgaatcagcagcccaacaccagcgacaagaaatcttctccccagaaagaggtgaagtacgaaccattctcattcgcagatgacatcggttctaataactgcgggtactacgatctccaggcagtcctaacccatcaagggcgttcttcgtcatcaggtcactatgtgagctgggttaaaagaaagcaggatgagtggatcaagttcgatgacgacaaggtgagtatcgttacacccgaggacattttacgcctgtcagggggcggtgattggcacattgcatatgttctgctctatggccctcggcgggtggagattatggaagaagagtctgagcagtag

SEQ ID NO: 31327 - DNA, 1380 bp, Artificial Sequence
  derived and/or modified sequence
atgcccctgtacagcgtgaccgtgaagtggggcaaggagaagttcgagggggtggagctgaacaccgacgaacctcccatggtgttcaaggcacagctgtttgcactgaccggggtgcagcccgccaggcagaaggtgatggtgaaggggggtacactaaaggacgacgactggggcaacattaaaattaaaaacatggaacttccttgcggtctcacaaacttgggtaatacctgctacatgaatgctactgtccagtgcataaggagcgtgccagaacttaaggatgctctgaagcgttatgcaggcgccttgcgggctagtggagaaatggcgtcggcccaatacataactgctgctctgcgggatctgttcgatagcatggacaagacctcttctagtatccccccaattatccttctccagtttttgcatatggccttcccacagttcgcggaaaaaggcgaacagggacagtatctgcagcaggacgccaacgaatgctggatccagatgatgcgcgtgcttcaacaaaagttggaggcgatcgaggatgactcggttaaagagactgattcctcatccgcaagcgcggcaacgcctagcaagaaaaagtcattgattgatcaattttttggggtggagttcgaaaccaccatgaaatgcaccgagagcgaggaagaggaggtcactaaggggaaagaaaaccaactgcagctgagctgtttcatcaatcaggaggtgaagtacctgttcacaggcctgaagctccgcctgcaggaagaaatcacaaagcagtccccaactttacagagaaacgccctctatatcaagtcatcaaaaatttcgagactgcccgcatatctgacgatacaaatggtgagattcttttataaggaaaaggagagcgtcaacgccaaggtgttaaaagacgtcaaattccccctgatgctggacatgtatgagctgtgtacccccgagctgcaagaaaagatggtctcctttcgcagcaagttcaaggatttagaagataagaaggtcaatcagcagccaaacaccagcgataaaaagtccagccctcagaaggaggtaaaatatgaaccattctctttcgcagacgatatcggctcaaacaattgcggatactatgatttgcaggcggtgcttacgcatcaggggcgaagcagcagctccggtcattacgttagctgggtgaaaagaaaacaggacgagtggatcaagtttgacgatgataaggtgtctattgtgacccccgaggatatattacggctgagtggaggaggcgattggcacatcgcctatgtgttgttatatggaccgcggagggtcgaaataatggaggaggagtctgagcagtag

SEQ ID NO: 31328 - DNA, 1380 bp, Artificial Sequence
  derived and/or modified sequence
atgcccctctattcggtgactgtgaagtgggggaaagagaagtttgagggagtggaactaaacacagatgagcccccaatggtcttcaaggctcagttgtttgcactaaccggagtccagcctgccaggcagaaagtaatggtcaagggaggcactttgaaggatgatgactgggggaatattaagattaagaacatggagctgccttgcggattgactaatctcggtaacacctgttacatgaacgcaactgtacaatgtattcggtcagtgcccgaactgaaggatgcgctgaagcggtatgcgggagcgctgcgggcttctggcgaaatggcctctgcccagtacattaccgcggctctcagagatttgttcgactccatggacaagacaagtagtagtatccctccgatcatccttcttcagtttctccatatggctttcccacagttcgccgaaaagggtgagcagggacagtacctgcaacaggatgccaatgagtgttggattcagatgatgcgcgtgctgcaacagaagttggaagccatagaagatgattccgtaaaggagacagattcctccagcgcttctgccgctaccccctccaaaaaaaaatcgcttatagatcagttttttggtgttgaatttgagaccacaatgaagtgtactgaatctgaggaggaagaggttacaaaaggcaaggagaaccagctgcagctgagctgtttcataaatcaggaagtcaagtacctgttcactggactgaagctgcgcctccaggaagagataacaaagcagagtcccacactgcagcggaatgccctatacatcaagtcttccaaaattagtagactcccggcttatctcaccatccagatggtgcgattcttttataaggaaaaggagtcagtgaacgctaaggtactgaaggatgtgaagtttcccctaatgctggatatgtatgagctgtgcacgcccgaacttcaagagaaaatggtttcttttcgcagtaaattcaaggacctggaagataaaaaggtgaatcagcagccgaacacttccgataagaagagttcgccacaaaaagaggtcaaatatgaacccttctccttcgccgatgacattggatcaaataattgtggctattatgatctccaagctgttcttacgcaccagggccgatcttctagtagcgggcactatgtgtcatgggtgaaaaggaagcaagacgagtggattaagttcgatgatgataaggtgtccattgttacaccagaggacattttaagactcagcggcggtggtgactggcacatcgcttatgtgttgttgtatggccctcgccgagttgagataatggaagaggagagcgaacagtag

SEQ ID NO: 31329 - DNA, 1380 bp, Artificial Sequence
  derived and/or modified sequence
atgcctctttatagcgtgacggttaagtgggggaaggagaagttcgagggggtggagcttaatactgacgagccccctatggtgtttaaggcccagctgtttgccctgactggcgtccagcctgcccgtcaaaaagtaatggtgaaaggagggactctcaaggacgatgactgggggaacataaagattaaaaatatggagctaccctgtggcttaacaaacttgggaaatacctgttatatgaacgcaacagtccagtgtattcgctcagtgcctgagcttaaggacgccttgaaaagatacgccggtgcgctcagagcctccggcgagatggcatccgcacagtatatcacggctgccctgcgggacttatttgactcgatggataagacttctagttctatccctcctattatactactgcaattcctgcacatggccttcccccagtttgccgagaaaggagaacaaggacagtacctgcagcaggacgccaacgagtgctggatccaaatgatgcgcgtgctgcagcagaaactagaggctatagaggatgacagcgtgaaggaaaccgattcctctagcgcttcagctgctacccccagcaagaaaaaatcgctgatcgaccagtttttcggtgttgagttcgagacaacaatgaagtgtactgaatctgaggaagaggaagtgacaaagggcaaagaaaaccagcttcagctctcctgcttcattaatcaggaggtcaagtacctgttcaccggcctgaagctgcgcctgcaggaagagattaccaaacagagccccacactgcaacgcaacgccctgtatatcaaaagttctaagattagtaggctccctgcttatctaacgattcagatggtgagattcttctacaaagagaaggagtccgtaaacgctaaggtgctgaaggatgttaagttccctttgatgctcgatatgtatgagctttgcacgccagagctccaggagaagatggtcagttttcgctcaaagttcaaggacctggaggataagaaagtcaaccagcagcccaacaccagcgacaagaaaagctcccctcagaaggaggtcaaatatgagcccttttcgtttgccgatgatatcggctcaaacaactgcgggtactacgatctgcaggccgtgctcactcaccaggggaggagctcatctagcggacattacgtctcttgggtgaaaaggaagcaagacgagtggataaaattcgacgatgacaaggtgagcattgtgacccccgaggatatcctgagactctcaggcggaggggattggcatatagcgtatgtcttattgtatgggcctcggagggtggagattatggaggaagaatctgaacaatag

SEQ ID NO: 31330 - DNA, 4051 bp, Artificial Sequence
  derived and/or modified sequence
gtctcctcgctgcagtcgctccggagctgcacgggtgttttgcgtgttgctgcgtcatcgccagtggccggtttgaatgagactcgtcgcaccgaagccgccgccaccaccgcgcctccgcctcggccgccgccgcagctgctcctggtccccgtccctttgccgccctcgtcaggcccagctctcctgcgccgccgcctcccgccgcgccccgccatgccgctctactccgttactgtaaaatggggaaaggagaaatttgaaggtgtagaattgaatacagatgaacctccaatggtattcaaggctcagctgtttgcgttgactggagtccagcctgccagacagaaagttatggtgaaaggaggaacgctaaaggatgatgattggggaaacatcaaaataaaaaatatggagttaccatgtggattgacaaaccttggtaacacttgttacatgaatgccacagttcagtgtattcgttctgtgcctgaactcaaagatgcccttaaaaggtatgcaggtgccttgagagcttcaggggaaatggcttcagcgcagtatattactgcagcccttagagatttgtttgattccatggataaaacttcttccagtattccacctattattctactgcagtttttgcacatggctttcccacagtttgccgagaaaggtgaacaaggacagtatcttcaacaggatgctaatgaatgttggatacaaatgatgcgagtattgcaacagaaattggaagcaatagaggatgattctgttaaagagacagactcctcatctgcatcggcagcgacaccttctaaaaagaaaagtttaatcgatcagttcttcggtgttgagtttgaaactaccatgaaatgtacagaatctgaagaagaagaagtcaccaaaggaaaggaaaatcaacttcagcttagctgttttatcaatcaggaagtcaagtatctttttacaggacttaaattgcgacttcaggaagaaatcaccaaacagtctccaacgttgcaaagaaatgccttgtatatcaaatcttccaagatcagccggctgcctgcttacttgaccattcagatggttcgatttttttataaagagaaggaatctgtgaatgccaaagttcttaaggatgttaaatttcctcttatgttggatatgtatgaactgtgtacaccagaacttcaagagaaaatggtgtcttttcgatccaaattcaaggatctagaagataaaaaagtgaatcagcagccaaatacaagtgacaaaaagagtagtccccagaaagaagttaagtatgaacccttttcttttgctgatgatattggctccaataattgtggatactatgacttacaagcagtactaacacaccagggaaggtctagttcttcaggtcattatgtatcatgggtgaaaaggaaacaagatgaatggattaagtttgatgatgacaaagtcagcatcgtaacaccagaagatatcttacggctttctggtggtggagactggcatatcgcttacgttctactctatgggcctcgcagagttgaaataatggaagaggaaagtgaacagtaatcttcattttagtatttatgcttagatgtgaaaataaatgttatttgttgatcatttctataatccagagctttagaggaagacacataggtgggtttatgtttcacctcatttggaacaaaagaggacagaagcagaccactctgtgcaccaacctaaaaaattacagagaagagaaaattatctttggattgtgctgccctatataaaggtggcagaaagacatttttaaaaagcttattatttcttgcattattttaaaaagttcagagttgaaatgcctttcaaccatttccttctgtggtcatttttcttgctgcctttttcacccaagattcagcagtcagatgtttactgcacacctattacctattatttgctgttcttgcatggttcaaaccaccattctgtagccacccatcctttgccttatctaacaaacatttttccaggaaggtggaaaaggaagtgttgctctcattgtgtgactcagtgctgctgtccatcccatggaaacatgggcacaatcaagtatttgtccagcctattgcaggcttttcctgactttaaaataaattgtgatcaataatagtacctttgattatacatttattattgtgtctctctctgatgtactgtggattgtacatttaactttggaatggctttgtaataatcagtcttaagaaaatgttgacaagctctggttgcttatttttagaaaatgaggacatttaataataataaaaaaaaagggattaatagcttttgacctcaagtcttttgtcttctgagtgttggagcttggctgaagacatgtttaatactgtacaatttctgaagatggttattaacactgtgctgttaagcatccatttaaaaatatttgttatcttctttgcctgcctgtattttaaaaagaaatacaaagttgtaaaagtaatggatttctttggatgctgaatgcagtgatgttatcagtcagattctttccttggctcagttgtgtttgtatttcctttcttaattccccaaatcttggctgggcacggtggctcacgcctgtaatcccagcactttgggaggctgaggcaggtggttcactggaggttgagttcgagaccagcctggccacatggtgaaaccctgtctctactaaagatataaaaattagctggatgtggtggtgcacacctgtgatcccagctacttgggaggctgaggtgggagaattgcttgaacctggaaggcagaagttgcagtgagctgagatcacaccactgcactccagcctgggtgacagagagactctgtctcaaaaaaaaaaagaaaaaattcccaaatcttaatgtctgtttcagaattttagtgattttaaagtgatagtagaaaataccaagcatatgaggtatttcaatatgataggcttcttacattttaatagttactcatctttgttccaggacccttgactgatgctagggaaaggataaagcatagaataccagccagtttggctctgattttgagttatttataataaagtttggggattatcataacatctcatatctttgtgtatgttgttttaatgctcggcagagcacaacactgatgataactattaaaaatagaaaataacagccattttactttcaaatctgatgtgatgcaatctgtgaacactaggaggggataaaataagcattgcagggaaacttatttgtaaatagcttcctcacctaaactttgacttggcaatcaatactttctactttgtggaggggattaagaatagaatgggcaggatgagaccatgaaaattataatgattcatgtatatttgtatgatgcttgtaactttgcaaagtcttttttattcattgtctcatttggtcagaacaattttattgaggacatgaatttaacaattagaatttagattttctgactgtagctactaaatgttgtagctactagaccaggtgagctaggtttagagcaaagtatataagccttgtatggactatattagaattttaaaaattgtaattaattccttatcatcattataaaaagcttgatttttttatttgatctaaaaaagcattattccaaagaattttttcaagtagaaatgggagttagttataccagtgttgtttttaactaataaggctattttagaattcagccttgcctgtaaggtctttgagaagggagaggagtaggccaaaaaaaaaaaagtcttgattcctgaatgtgccttatatgctgtgccactcacaccgaggccatcatctcaacattagagttgtgctagattactgcttgactgactagctaggttaggcctaagagtgtttaccgaataatctgcactcactcagtagcccttcttcaggattaaaaacgatgatgacctcatcttagagccctaaagggaaatgcttat

SEQ ID NO: 31331 - DNA, 1803 bp, Artificial Sequence
  derived and/or modified sequence
ccctcacttgctccctccttccttcccgccacccctccaccgccttccccctcctccctcctctcgccacctctaggccccgccccggtcctgccgcccagtctcctcgctgcagtcgctccggagctgcacgggtgttttgcgtgttgctgcgtcatcgccagtggccggtttgaatgagactcgtcgcaccgaagccgccgccaccaccgcgcctccgcctcggccgccgccgcagctgctcctggtccccgtccctttgccgccctcgtcaggcccagctctcctgcgccgccgcctcccgccgcgccccgccatgccgctctactccgttactgtaaaatggggaaaggagaaatttgaaggtgtagaattgaatacagatgaacctccaatggtattcaaggctcagctgtttgcgttgactggagtccagcctgccagacagaaagttatggtgaaaggaggaacgctaaaggatgatgattggggaaacatcaaaataaaaaatatggagttaccatgtggattgacaaaccttggtaacacttgttacatgaatgccacagttcagtgtattcgttctgtgcctgaactcaaagatgcccttaaaaggtatgcaggtgccttgagagcttcaggggaaatggcttcagcgcagtatattactgcagcccttagagatttgtttgattccatggataaaacttcttccagtattccacctattattctactgcagtttttgcacatggctttcccacagtttgccgagaaaggtgaacaaggacagtatcttcaacaggatgctaatgaatgttggatacaaatgatgcgagtattgcaacagaaattggaagcaatagaggatgattctgttaaagagacagactcctcatctgcatcggcagcgacaccttctaaaaagaaaagtttaatcgatcagttcttcggtgttgagtttgaaactaccatgaaatgtacagaatctgaagaagaagaagtcaccaaaggaaaggaaaatcaacttcagcttagctgttttatcaatcaggaagtcaagtatctttttacaggacttaaattgcgacttcaggaagaaatcaccaaacagtctccaacgttgcaaagaaatgccttgtatatcaaatcttccaagatcagccggctgcctgcttacttgaccattcagatggttcgatttttttataaagagaaggaatctgtgaatgccaaagttcttaaggatgttaaatttcctcttatgttggatatgtatgaactgtgtacaccagaacttcaagagaaaatggtgtcttttcgatccaaattcaaggatctagaagataaaaaagtgaatcagcagccaaatacaagtgacaaaaagagtagtccccagaaagaagttaagtatgaacccttttcttttgctgatgatattggctccaataattgtggatactatgacttacaagcagtactaacacaccagggaaggtctagttcttcaggtcattatgtatcatgggtgaaaaggaaacaagatgaatggattaagtttgatgatgacaaagtcagcatcgtaacaccagaagatatcttacggctttctggtggtggagactggcatatcgcttacgttctactctatgggcctcgcagagttgaaataatggaagaggaaagtgaacagtaatcttcattttagtatttatgcttagatgtgaaaataaatgttatttgttgatcatttctataatccagagctttagaggaagacacataggtgggtttatgtttcac

SEQ ID NO: 31332 - protein, 2649 aa, Artificial Sequence
  derived and/or modified sequence
MAVWEAEQLGGLQRGDLLTPPAPDGDGRTAPLGQPPGAQLYCPACLVTCHSQEAFENHCASSEHAQMVAFDQALPWEHRSPPPGLSKFELCPKPDLCEYGDACTKAHSAQELQEWVRRTQAVELRGQAAWQDGLVPYQERLLAEYQRSSSEVLVLAETLDGVRVTCNQPLMYQAQERKTQYSWTFAVHSEEPLLHVALLKQEPGADFSLVAPGLPPGRLYARGERFRVPSSTADFQVGVRVQAASFGTFEQWVVFDFGRRPVLLQKLGLQLGQGRRPGPCRNLALGHPEEMERWHTGNRHVVPGVERTAEQTALMAKYKGPALALEFNRSSVASGPISPTNYRQRMHQFLYEEEAAQQQLVAKLTLRGQVFLKTALQTPALNMLFAPPGALYAEVPVPSSLMPDTDQGFLLGRAVSTALVAPVPAPDNTVFEVRLERRASSEQALWLLLPARCCLALGLQPEARLVLEVQFQIDPMTFRLWHQAVDTLPEEQLVVPDLPTCALPRPWSVPPLRRGNRKQELAVALIAGWGPGDGRRVPPLLIYGPFGTGKTYTLAMASLEVIRRPETKVLICTHTNSAADIYIREYFHSHVSGGHPEATPLRVMYTDRPLSQTDPVTLQYCCLTDDRQAFRPPTRAELARHRVVVTTTSQARELRVPVGFFSHILIDEAAQMLECEALTPLAYASHGTRLVLAGDHMQVTPRLFSVARARAAEHTLLHRLFLCYQQETHEVARQSRLVFHENYRCTDAIVSFISRHFYVAKGNPIHARGKVPPHPRHYPLMFCHVAGSPDRDMSMASWLNLAEIAQVVEKVQEAYNTWPSCWGGREQRCICVVSHGAQVSALRQELRRRDLGQVSVGSFEILPGRQFRVVVLSTVHTCQSLLSPGALAPEFFTDARVLNTVLTRAQSQLVVVGDAVALCSFGACGKLWESFIRECVERHSVCPEGLSMEQVEQGVAQRRRWPPRGTQAGAAGNWEAAPEPVGDLAEEQAAVVTAMVKAEPGDEALSPASRDITATTAQTEAAAAPAGDAVKEDVVPGACAAGAAAAAGVESTEAEDAEADFWPWDGELNADDAILRELLDESQKVMVTVGEDGLLDTVARPESLQQARLYENLPPAALRKLLHAEPERYRHCSFVPETFERASAIPLDDASSGPIQVRGRLDCGMAFAGDEVLVQLLSGDKAPEGRLRGRVLGVLKRKRHELAFVCRMDTWDPRIMVPINGSVTKIFVAELKDPSQVPIYSLRKGRLQRVGLERLTAEARHSRLFWVQIVLWRQGFYYPLGIVREVLPEASTWEQGLRILGLEYSLRVPPSDQATITKVLQKYHTELGRVAGRREDCRAFLTFTVDPQGACNLDDALSVRDLGPRCEVAVHITDVASFVPRDGVLDVEARRQGAAFYAPGREPVPMLPASLCQDVLSLLPGRDRLAISLFLTMEKASGQLKSLRFAPSVVQSDRQLSYEEAEEVIRQHPGAGRELPARLDSVDACVVAACYFSRLLRRHRLRSDCFYEQPDEDGTLGFRAAHIMVKEYMIQFNRLVAEFLVGSECTRTVTPLRWQPAPRSQQLKALCEKHGDRVPLSLHLGHHLHGGGGSPPDTRLHLLASLWKQVQFAARTQDYEQMVDLVTTDDMHPFLAPAGRDLRKALERSAFGRCARGHQQQGGHYSLQVDWYTWATSPIRRYLDVVLQRQILLALGHGGSAYSARDIDGLCQAFSLQHALAQSYQRRARSLHLAVQLKAQPLDKLGFVVDVEAGSRCFRLLFPSNRETLPDPCPVPYGSLQLAEHPHALAGRPGLRLLWRRRVYSAQGSSPPLPLPGTVPDPHTLAVETALWKQLLELVELQRWPEAAALIQEKGEASQRRELVQVQRSHCGHFLEVARELGSGDTLQVQLGTSLQHGFLVPSPQLWTVAPGFSLCLEHVERPGDCFSGRVYRAPRDRYRDVDEYACVWEPFCALESATGAVAENDSVTLQHLSVSWEASRTPQGQLQGAFRLEAAFLEENCADINFSCCYLCIRLEGLPAPTASPRPGPSSLGPGLNVDPGTYTWVAHGQTQDWDQERRADRQEAPRRVHLFVHHMGMEKVPEEVLRPGTLFTVELLPKQLPDLRKEEAVRGLEEASPLVTSIALGRPVPQPLCRVIPSRFLERQTYNIPGGRHKLNPSQNVAVREALEKPFTVIQGPPGTGKTIVGLHIVFWFHKSNQEQVQPGGPPRGEKRLGGPCILYCGPSNKSVDVLAGLLLRRMELKPLRVYSEQAEASEFPVPRVGSRKLLRKSPREGRPNQSLRSITLHHRIRQAPNPYSSEIKAFDTRLQRGELFSREDLVWYKKVLWEARKFELDRHEVILCTCSCAASASLKILDVRQILVDEAGMATEPETLIPLVQFPQAEKVVLLGDHKQLRPVVKNERLQNLGLDRSLFERYHEDAHMLDTQYRMHEGICAFPSVAFYKSKLKTWQGLRRPPSVLGHAGKESCPVIFGHVQGHERSLLVSTDEGNENSKANLEEVAEVVRITKQLTLGRTVEPQDIAVLTPYNAQASEISKALRREGIAGVAVSSITKSQGSEWRYVLVSTVRTCAKSDLDQRPTKSWLKKFLGFVVDPNQVNVAVTRAQEGLCLIGDHLLLRCCPLWRSLLDFCEAQQTLVPAGQVRVCRRPTMPS

SEQ ID NO: 31333 - DNA, 7950 bp, Artificial Sequence
  derived and/or modified sequence
atggccgtgtgggaagctgagcaactagggggcctgcagcgtggcgatttgctaacccctcccgcccctgatggggacggaagaaccgctccccttggccagccccccggcgcccaactgtactgtcccgcttgcctcgttacctgtcacagccaggaagctttcgaaaatcactgcgcctcctccgagcacgcccaaatggttgcattcgatcaggcgttgccgtgggaacacaggtctcctccacctgggctatccaaattcgagctctgccctaaacctgacctgtgtgaatatggagatgcctgtacaaaggcccacagcgcacaggagctccaagaatgggtgcgcagaacacaggctgtggagctccgtgggcaggccgcctggcaggacggccttgtgccttatcaagaacgtttactggccgaataccaacgatcctcatctgaagttctggtcctggcagagaccctggatggcgttcgcgttacctgcaaccagcctctgatgtaccaggcacaggagaggaagactcagtattcctggactttcgcggtgcattctgaggagcccctccttcatgtcgcgctgttgaaacaggaacctggcgcagactttagcctagtggccccaggtctgccacctgggcgactttatgctcgaggcgagagattcagggtcccgtcttccacagccgactttcaggtaggagtgcgggtacaggcagcatcctttgggactttcgaacagtgggttgttttcgacttcggccgacggccagttctgctgcagaagctgggtttgcagctcgggcaaggaaggaggcccggcccatgtaggaatctggctctaggccaccccgaggaaatggagaggtggcacacaggcaacagacatgtggtacccggcgttgagcgcacggcggagcagacagctctcatggccaagtacaagggtcccgctcttgctctcgagtttaacaggtcatcagtggcctctgggccaatcagcccaacaaactacaggcagcggatgcatcagtttctgtatgaggaggaagctgcccaacagcagctggttgctaaactgacgctccgcggacaggtattcctgaagaccgctctgcagactcccgcgctcaatatgctgttcgccccacccggcgccctttatgccgaagttccagttccctcttccctgatgccagacactgatcagggcttcctgctgggcagggcggtgtctacagccctcgtcgcacctgtgcctgctccggataacacggtgtttgaggtccgtttggagcggcgcgcttcttctgagcaagctctctggctgctcctgcctgcccggtgctgtttggcgttaggtctgcagccagaagctcgcctggtgttagaggtacagttccagattgatcccatgaccttccgcctgtggcaccaggcagtagataccctcccagaggaacagctggtagtccccgacctgcctacctgcgccctcccgcgcccctggagcgtgccgccattgcgtagaggcaatcgcaagcaggaacttgctgtcgcccttattgcagggtggggtccaggtgatggtagaagagtgccccccttgttgatttatgggccttttgggacgggtaagacgtacacccttgctatggcatccctcgaagttattcgacggcccgagactaaggtgttgatctgtacgcataccaattccgccgccgacatttacattagagagtactttcactcccacgtgagtgggggtcatccggaagccaccccactgcgggtgatgtacacggatcgaccactttcccaaacagatcccgttaccctacagtactgctgtcttactgatgatcggcaggcatttcgaccccctactagggcagaattagcgcgccacagggttgtggtgaccaccacctcccaggctcgcgagctgagggtgcccgtgggcttttttagccacattcttattgacgaggccgcccaaatgttggaatgcgaagcgctgaccccattggcgtatgcttcccacgggaccaggctggtcttggccggagatcacatgcaggtcacgcctagactgttctctgtcgcacgggcccgagctgcagaacacactctgctgcaccgccttttcctgtgctaccagcaagagacacatgaggttgcacgccaatctcggttagtgtttcatgaaaattaccgctgtacggatgctattgtgagcttcatctcccgacatttctacgtggcgaaggggaatcctatccatgcaagaggcaaggtgcccccacatccccgccattaccccctgatgttctgtcatgtggcaggctcacctgaccgcgatatgtcaatggctagttggcttaacctggccgagattgcccaggtggtagaaaaagtccaggaggcctataacacttggcctagttgttgggggggacgagaacagagatgcatctgtgtggtgtcacatggtgcacaggtgtcagctttgcggcaggaactgagaagacgcgatttaggacaggtatctgtcggcagtttcgagatcctgccaggtaggcaatttcgtgtagtggtgttgtcaactgttcacacctgccaatctcttctcagcccaggggccctggcaccggaattcttcaccgacgcccgcgtgcttaatactgttttgacacgcgcacagagccagctagtcgtagtgggcgacgctgtggctctgtgctcatttggcgcctgcggtaaactctgggagagtttcatccgcgaatgtgtggaaagacattctgtatgcccggaaggtctcagtatggagcaggtagagcagggcgtggctcagaggcgaaggtggccaccccgcggcacacaggctggagcggcaggaaattgggaggcggccccggagcccgtcggcgacctagccgaggagcaggccgctgtggtgactgccatggttaaggccgagccaggagatgaagcactgtccccagcatctcgcgacatcacggccactactgcacagactgaagccgctgccgctcccgctggcgatgccgtgaaggaggatgtggtcccaggtgcatgcgccgccggggcagcagccgctgcaggggtggaatcaaccgaggctgaggatgcagaggccgacttttggccgtgggacggggaactgaacgccgacgacgccatccttagagaactgctcgacgagtcacagaaggtgatggttaccgtgggagaagacggactgctggatactgtggcccgaccagaaagcctgcagcaggcacggctctatgaaaatctgcccccggcagccctgcgcaagctgctacacgcagagcccgagaggtaccgacactgtagcttcgtgcctgagacctttgaacgagctagcgcaatacccctcgatgacgcatcttccggcccaatccaggttagagggcgcttagattgcggaatggctttcgccggcgatgaggtgctggtccaattattgtccggcgacaaggcccccgaaggccgcctgcgggggagggtgctgggagtgctaaaaagaaagagacacgagctcgctttcgtgtgtaggatggatacgtgggacccccggataatggtcccaatcaacgggagtgtgaccaaaatctttgtggccgagctgaaggatccaagtcaagtgccaatatacagcctccgcaaaggcagactgcagagagtaggcctggaacgcctgacagccgaagcccggcacagcaggctgttctgggtgcagatagtgctctggagacaaggattctattacccactgggaattgtccgggaagtgctcccagaggcctcaacatgggagcagggactgcgaatacttgggttggagtattcattacgggttcccccatcggatcaggccacaattaccaaggtccttcagaaataccatacagaactaggccgcgtggccgggagaagggaagattgcagagccttccttacttttacagtggatccgcaaggtgcttgcaatctggatgatgcactttcagtgagagacctgggtcctcgttgcgaagtggccgttcatatcactgacgttgcaagctttgtacctcgtgatggcgtgctggacgtggaggcccgtcgtcagggcgccgcattttacgctcccggaagggagccagtgcctatgctccctgcaagtctgtgtcaggatgtgctgagccttctcccaggtcgggatcggcttgctatctcccttttccttactatggagaaggcctcaggacagctcaaatctttgcgtttcgccccaagcgtcgtccagtccgatcgccaactgtcttatgaggaggctgaagaagtgatccggcaacaccctggggctggcagggaactcccggcacgactcgacagcgtcgatgcatgcgtcgtcgccgcttgttacttctccagactgctgcgccggcatcggctgcggagcgattgtttttatgagcagcctgacgaagacgggaccctgggttttagagccgcccacattatggtgaaggaatacatgattcaatttaaccgcttagtggcggaattccttgtgggaagtgagtgtacacgcactgtcacaccccttcgctggcagccagccccacgctcccagcagcttaaagcgctgtgtgaaaaacacggtgacagagtaccacttagcctccacctaggtcaccatctgcatggcggaggaggttccccaccagacacgaggcttcacctgttggcttctttgtggaagcaagtccagttcgcagccaggacccaagactacgagcagatggtcgacctggttacaacggacgatatgcacccattcttagctcccgcgggccgcgatctccgcaaagcactcgaaagatcagcctttggtcgatgtgctcgcggccatcagcaacagggaggccactattcactccaggtggactggtatacctgggcgacatccccgatacgacgatacctcgacgtagtgctgcagcgacagatattgctggctctcggccatgggggatccgcctactccgcaagagacattgacggactttgccaggcttttagtctgcagcacgctctggctcagtcttatcagcggagggcaagatccctgcatctggccgtgcaactgaaggcccagccgctggataagctgggattcgttgtggatgtggaggccgggtctaggtgcttccgtttgctctttccttcaaatagggagaccttgccagatccgtgtccagtgccttatggaagtctgcagctggccgaacatcctcatgccctcgccggaagaccggggctcaggctactgtggaggagaagagtgtactcagcgcaggggtccagccctcctctgccccttcccggtactgttcccgaccctcataccctggcggtggaaactgccctgtggaagcaacttctggagctggtggagctgcaaaggtggcctgaggccgccgctcttatccaagagaaaggcgaggcatcccagaggcgcgagctggtgcaggtccagcgatcgcattgtggacattttcttgaggtggcccgggagctggggagcggagacaccctccaagtgcagctgggaacctctttgcagcacggctttctggttccatcaccccaactttggactgttgcccccggcttcagcctgtgtctggagcatgtggaacgtccgggagattgcttctcaggaagagtgtacagagcgcctagggaccggtacagagatgtcgatgagtatgcatgcgtctgggaaccattttgtgctcttgaatccgcaacaggggctgtcgctgagaacgactcagtgactctccagcatctctccgtcagttgggaggcctcaaggacccctcaaggacagctgcagggggcatttcgcctggaggccgccttccttgaggagaactgtgcggatatcaatttctcgtgttgttacctatgcattcgtcttgaaggactcccggcacccacagcaagcccgcgccccggaccttcttccctaggccctggcctcaacgtggatcccggcacttatacatgggtagctcacggtcagacacaagactgggaccaagagagaagagcggatcgacaggaggcacccaggagagttcacttgtttgtgcaccacatgggcatggagaaagtacccgaggaggttctccggcctgggactctgtttacagtggaattgttgccaaagcagttacctgacctgagaaaggaagaagccgtgcggggcttagaggaggcttcccccctggttacctccatcgctttaggacgacccgtcccccagccgttgtgccgggtcattcccagccgcttcctcgaacgccagacatataatatcccagggggacggcacaagctgaacccatctcaaaatgtggccgtgagagaggcactggagaagccatttactgtaatccaggggcctcccgggaccggaaagacaatagtgggactgcatatcgtcttctggttccataagagcaatcaggagcaagttcagcctggcggcccccccaggggcgagaaacgtctgggcggaccctgcatcctatattgcggcccgagcaataagagtgttgacgtcctcgccggactgctgctgcgccgaatggaactgaaacccttacgtgtttactccgaacaggctgaagccagcgagttccccgtcccgcgagttggcagccgcaaactgctcaggaagagcccgcgcgagggaaggcccaatcaatctttgcgcagtatcactctgcatcacagaattcgccaagcaccaaacccttactcatctgaaatcaaagcgtttgacactaggctgcagcgcggtgaactattttcccgcgaagacctcgtatggtacaaaaaggtattgtgggaagcccggaaattcgaactcgatcgccatgaggtaatcctttgtacgtgctcttgtgcagcctctgctagcctgaaaatcctcgacgtgaggcaaatcctggtcgacgaagctggcatggccaccgaaccggaaacgctcattcctctggtccagttccctcaggccgagaaagtagtgctactaggagatcacaagcagctcaggcccgtggtgaagaacgaaaggctgcagaaccttggactcgaccgctccctgttcgagcggtaccacgaggacgcccatatgttagacacccagtacagaatgcacgaaggcatctgcgcattcccatcagtggcgttctacaaaagtaagctgaagacttggcagggtttaagacgcccaccatcggtgctgggtcacgccggaaaggagagctgccctgtcatcttcgggcatgtccagggccatgagcgatccctgctcgtaagtaccgacgagggaaacgagaatagcaaggcgaatctggaggaggtggccgaggttgttagaattaccaagcagttaacactgggccgtactgtggagccgcaggatatagccgtcctcactccttacaatgcacaggcctcagaaattagcaaggcccttcgcagagaaggtatcgcaggggtcgctgtgagctccatcaccaagtcccagggaagtgaatggcggtacgttttagttagtactgtgcggacatgtgccaaaagtgatttggaccagcgccccaccaagtcttggctgaaaaaattcctcggcttcgtggtggatcctaaccaggtcaacgtggctgtgacccgtgctcaggagggcctttgcctaatcggggatcatctgctcctcagatgctgcccgttatggaggtccctgctcgatttctgcgaagcccaacaaacattagtccctgctggccaggtcagagtctgtcgccggccaaccatgcctagttag

SEQ ID NO: 31334 - DNA, 7827 bp, Artificial Sequence
  derived and/or modified sequence
gtttttcgtttttatagaaacacagatctttgtcctaaccacaaggttcccctttggtttatgtggtttcctctggttcctgccaccaccacctccccaggccggggccttcccatccctgcccagtggggagtgggaggaagagcctgggacagtggccatacgtcccgggctgatttctggattgggggttctggggaccagggaggtgcaggtgtctgcagtgtcagaggagccgctgggctcgcccaggtgttgcctgaagccctccgtggcctcttgccccttggactcctgacaggagggacaccagtgtttgctgctcacctctgacagccagacaagggctgtgctcaggggcagctcggctgggcacacagtaggtgctttagcggacagcactgaggcccccagcaagaagcccatgagctcctccccctcccgcagtgccgccgacatctacatccgggagtatttccacagccacgtcagcggcggccaccccgaggccactcctctccgtgtgatgtacacggaccggccgctgagccagacggacccagtcacgctgcagtactgttgcctgaccgacgaccgccaggctttccgcccgcccacacgggcagagctggcgcggcaccgcgtggtggtcaccaccacctcccaggcccgtgagctcagggtgccggtcggcttcttctcccacattctcatcgatgaggcggcccagatgctggagtgcgaggccctcaccccgctggcctatgcctcgcacggcacccgcctcgtgctggcgggcgaccacatgcaggtcacaccccggctgttcagtgtggccagggcccgggcggccgagcacacgctgctgcaccgcctcttcctgtgctaccagcaggagactcacgaggtggcgcggcagagccgcctggtcttccacgagaactaccgctgcacggacgccattgtcagcttcatctcgcggcacttctacgtggccaagggcaaccccatccacgccaggggcaaggttccgccccacccccggcactacccgctcatgttctgccacgtggcgggcagcccagaccgggacatgtccatggcgtcctggctgaatctggctgagattgcgcaggtcgtcgagaaggtgcaggaggcctacaacacctggcccagctgctggggcggccgcgagcagaggtgcatctgtgtcgtttcccacggtgcccaggtcagtgcactgaggcaggagctgaggaggcgggacctaggccaggtgtctgtcggcagttttgagatcctgccagggcggcagttccgggtcgtggtgctcagcactgtgcacacctgccagagcctgctcagccctggggcactggcccctgagttcttcaccgacgcccgcgtgctcaacaccgtcctgacccgcgcccagtcccagctggtggtagtgggggacgccgtggccctctgctccttcggggcctgcggcaagctctgggagagcttcatccgtgagtgcgtggagcggcacagtgtctgccccgagggcctgtccatggagcaggtcgagcagggtgtggcgcagagacggcgctggcctccccgaggcacacaggctggggcagcggggaactgggaggctgccccagagccagtaggggacctggccgaggagcaggcggctgtggtgacggccatggtgaaggcagagccgggagatgaggctctgagcccagcatcccgtgacatcacggcaaccacagcgcagacggaggctgcggcagcaccagcaggagacgcagtgaaggaagacgtggtgcccggggcctgtgcggcaggagcggctgctgcagcgggcgtggagtccacggaggctgaggatgcagaggctgacttctggccgtgggacggggagctcaacgctgacgacgccatcctacgggagcttctggacgagagccagaaggtgatggtgaccgtcggggaggacgggctgctggacactgtcgccaggcccgagtccctgcagcaggcccggctgtacgagaacctgcccccggctgcgctacggaagctgctgcacgcggagcccgagcggtaccgccactgctctttcgtgccagagaccttcgagcgggcgtcagccatcccgctggacgatgcctcctcgggccccatccaggtcaggggccgcctggactgtgggatggccttcgccggggatgaggtgctggtgcagctcctttcgggagacaaggcgcccgaggggcggcttcggggccgcgtgctgggcgtgctgaagaggaagaggcacgagctggcgtttgtgtgccgcatggacacgtgggacccgcgcatcatggtccccatcaatggctccgtgaccaagatcttcgtggccgagctgaaggacccatcgcaggtccccatctacagcctccggaagggccggctgcagcgtgtggggcttgagaggctcaccgccgaggcccggcacagccggctcttctgggtccaaattgtcctgtggcggcaaggcttctactacccgctgggcatcgtccgggaggtgctgcctgaggccagcacctgggagcagggcctccgcatcctcggcctggagtacagcttgagggtgcccccgtcggaccaggccaccatcaccaaggtgctgcagaaataccacacggagcttggccgggttgccggccgccgagaggactgccgcgccttcttgaccttcactgtggacccccagggcgcctgcaacctcgatgatgccctcagtgtccgagacctgggtcccaggtgcgaggtggctgtgcacatcactgatgtggccagcttcgtgcccagggacggggtgctggacgtggaggcgcgaaggcagggcgctgcgttctatgcccccggcagggagccagtgcccatgctgccggccagcctctgccaggacgtcctcagcctcctgcctggccgggaccgcctggccatctccctgttcctcaccatggagaaggccagtggccagctgaagagcctgcgctttgcaccctccgtggtccagtctgaccgccagctgtcctacgaggaggcggaggaggtgatcaggcagcacccgggtgccggccgtgagctgccggcccgcctggactccgtggacgcctgcgtcgtggccgcgtgctacttctctcggctgctgcgccggcaccgcctgcggtccgactgcttctatgagcagccggacgaggacggcaccctgggcttccgcgcggcccacatcatggtgaaggagtacatgattcagtttaataggctcgtggctgagttcctggtgggcagcgagtgcacgcggacggtcacgcctctgcggtggcagccagcaccccgcagccagcagctcaaggccctgtgtgagaagcatggggaccgggtgcccctgtcactgcacctcggccaccacctgcacggcggcgggggcagtccccccgacacgcggctgcacctcctggcctccctctggaagcaggtccagtttgctgcccgcacccaggactacgaacagatggtggacttggtcaccacggacgacatgcacccattcctggctcctgcaggccgcgacctccgcaaggccctggagcgctcggcgttcggccgctgcgcccggggccaccagcagcagggcggccactactcgctgcaggtggactggtacacgtgggccacctcgcccatccgcaggtacctggacgtggtgttgcagcggcagatcctgctggcgctgggccatgggggctctgcctactctgccagggacatcgatgggctctgccaggccttcagcctccagcacgcacttgcccagagctatcagcggcgggcgcgcagcctgcacctggccgtgcagctcaaggcccagcctctggacaagctgggcttcgtggtggacgtggaggcgggctcccgctgcttccggctgctcttccccagcaaccgggagacgctgcctgacccctgccccgtcccctacggctccctgcagctggccgagcacccccacgccctggcaggccggccgggcctgcggctcctgtggcggcgccgtgtctactcagcgcagggatccagcccgcccctgccactgcctggcactgtgccggacccacacaccctggccgtggagacggccctgtggaagcagctgctggagctggtggagctgcagcgctggccggaggcggctgctctcatccaggagaagggcgaggcgtcccagcggcgggagctggtgcaggtgcagcggagccactgtggccatttcctggaggtggcccgggagctgggcagtggggacaccctgcaggtgcagctcggcaccagcctgcagcacggcttcctggtaccgagccctcagctctggacggtggcaccgggcttcagcctctgcctggagcacgtggagcggcccggagactgcttctcaggccgtgtgtaccgggccccgagggaccggtaccgcgacgtggatgagtacgcctgcgtgtgggaaccattctgcgccctggagtcggccaccggcgcggttgccgagaatgactccgtcacacttcagcacctgagtgtctcctgggaggcgtcacggacgccgcaggggcagctgcagggcgccttccgcctggaggccgccttcctcgaggagaactgtgccgacatcaacttcagctgctgctacctctgcatccggctcgaggggctgccggctcccacggccagcccacgccctgggcccagcagcctcggccctggcctgaatgttgaccccggcacgtatacctgggtggcccacgggcagacgcaggactgggaccaggagcgccgggcagaccggcaggaggctcccagacgggtgcacctcttcgtccaccacatgggcatggagaaggttccggaagaggtgctgaggccgggcaccctgttcaccgttgagctgctgcccaagcagcttcctgatctccgcaaggaggaagccgtgcgtggactagaggaggcgtccccgctggtcaccagcatcgcactgggccggcctgtcccgcagcccctctgcagagtgatccccagcaggttcctggagcggcagacctacaacatccccggaggccgccacaagctgaaccccagccagaacgtggcggtcagggaggctctggagaagcctttcacggtcattcagggcccaccaggtacagggaagacgatcgtgggcctccacatcgtattctggtttcataaatcaaaccaggagcaggtgcagcccggaggccccccccgtggggagaagcggctggggggtccctgcatcttgtactgcggcccctccaacaagtcggtggatgtcctggcaggactgctcctgagaaggatggagctgaagcccctccgtgtgtacagtgagcaggctgaggccagcgagttcccagtgccgcgtgtgggcagcaggaagctgctcaggaagagcccccgggaggggaggccgaaccagagcctcaggagcatcaccctgcaccaccggatccggcaggcccccaacccttactcgtcggaaatcaaggcctttgacacccggctgcagagaggggagctcttctccagggaggacctggtctggtacaagaaggtcttgtgggaggctcggaagttcgagctggaccggcatgaggtcatcctctgcacctgctcctgtgcagcctctgccagcctcaaaatcctggacgtgaggcagatccttgttgacgaggcaggcatggccacggaacctgaaaccctcatccccctggtgcagttcccacaggccgagaaggtggttcttctcggagaccacaagcagctgcggcctgtggtcaagaatgagcggctgcaaaacctgggtctggaccggtctctgttcgagcggtaccacgaggacgcacatatgctggacactcagtaccgcatgcatgagggcatctgtgccttcccctctgtggcgttctacaagagcaagctgaagacgtggcagggcctgaggaggccgcccagtgtcctgggccacgctggcaaggagagctgccctgtcatctttggccacgtgcagggccacgagcggagcctgctggtgtccacggacgaagggaatgagaactccaaggccaacctggaggaggtggctgaggtggtccgtatcaccaagcagctgaccctggggaggaccgtagagccccaggacatcgccgtcctcacgccctacaacgcgcaggcctctgagatcagcaaggcccttcggcgagagggcatcgccggggtggccgtgtcctccatcaccaagagccaggggagcgagtggcgctatgtgctggtgagcaccgtccgcacctgtgccaagagcgacctggaccagcggcccaccaagagctggctcaagaagtttctgggcttcgttgtggaccccaaccaagtgaatgtggctgtcacgcgggcccaggaggggctctgcctgatcggagaccacctccttctgcgctgctgccccctctggcgtagcctcctggacttctgcgaggctcagcagaccctcgtgcctgccggccaggtgcgcgtctgcaggaggccaactatgccttcctgaagagccctctccacctgcaaggtgccaggactgggagggaaagtccagggcccccccaccctccccaccaccctccgccatcagcctgcctgggccagcctgcctcctggcctcaggatctccctggggcaggaagtgggtggacttggaggaggaacggcaagggccggtccccacactcttgctcctcctgggcatctggggacaggaacacctctcagggtggccaagaggggcttccttgggaccagtgcaaggaagttctgctgtccctgggaagtctcagaaccaggaaggaaaccctgtggaggctgccctttgacctttggacgccacctgtaatcactctggatggtgtctgtggagttcaggtttattttctatttaaatgaactaaaagccagcatcctgccgggcgtggtggctcacgcccataatccagcactttgggaagccgaggcgggcagatcacctgaggtcaggagttcgagaccatcctggccaacatggtgaaaccccgtctccactaaaaatacaaaattagctgggcgtggtggcgggcgcctgtaatcccagctacttgggaggctgaggcaggagaatcgcttgactccaggaggcgcaggctgcagtgagctctgatggtaccactgcactccagcctgggtgacagagcgagaccctgtcttaaaaaaaaaaacaaaacaaaaccagcatctgttactggaacagagacctcagcccaagctcaggacaaggaggcctccctgggagagggggcctttctcccaccatcaccgcctgtgtccttcaggggctgctggagggcagcccaaagccaggggcccaccccgccccaccccaccccaccccaccctctgaaatgtgaaaagcctgcactcttcctgtgggctgcgcagtgggctcgggggttggggggtgccggggcgatgcttccaccctggactgagtgttcggggcagcctgctcggctgtatgtttctcgcacgctcacccgcttcagtgcggctctgtccctgctgccgcctccagtcctgagggaggggcttgccccaccttctacattccaatttttatatctttgaattatgtgattagatattaatttaatgataaaaccactctgaaagctcttctca

SEQ ID NO: 31335 - DNA, 8064 bp, Artificial Sequence
  derived and/or modified sequence
gtttgtggggcgtgggcagccgtgctggcgtggggagtcccgctgccagtttgcacacagcgccgtggagatggctgtgtgggaggccgagcagctgggtggcctccagcggggggacctgctcacaccccctgcccctgatggcgacgggcgcacggccccccttggccagccccctggggcccagctgtactgcccggcctgcttggtcacctgccactctcaggaggccttcgagaaccactgcgcatcctcggagcacgcacagatggtggccttcgaccaggccctgccctgggagcaccgttccccacccccgggactctccaagttcgagctctgcccaaagcctgacctctgtgagtatggggacgcctgcaccaaggcacactcagcacaggagctgcaggagtgggtccggcgcacgcaggctgtggagctgcgggggcaggcggcctggcaggacgggctggtgccctaccaggagcggctgctggccgagtaccagcgcagcagcagtgaggtccttgtgctggcagagacccttgatggagtgcgtgtcacctgcaaccagcccctgatgtaccaggcccaggagaggaagacccagtacagctggacgtttgccgtccactctgaggagcccctgctacacgtggccctgctgaagcaggagccaggagccgacttctctctggtggctcccggcctcccgccaggccggctctacgcacggggtgagcgcttccgtgtgcccagctccactgccgacttccaggtgggagtgcgtgtgcaggctgcctcgttcggcacctttgagcaatgggtggtcttcgactttggccgccggccggtgctgctacaaaagctggggctgcagctgggccaggggcgtcgcccaggaccctgcaggaatctggcgctcggccaccctgaggagatggagcgctggcacactggcaaccgccacgtggtgcctggcgtggagcggacggccgagcagacggccctgatggccaagtacaagggccctgccctggccctggagttcaaccgcagcagcgtggcctcgggccccatctcaccaaccaactatcggcagaggatgcaccagtttctctatgaggaggaggcggctcagcagcagctggtggccaagctgaccctgcggggccaggtgttcctgaagacggcattgcagacgccagcgctgaacatgctcttcgcgcctccgggagcactgtacgcagaggtccccgtcccctcctccctgatgccagacacagaccagggcttcctgctgggccgggcggtcagcacagccctggtggcccctgtacctgcacccgacaatacggtgttcgaggtgcggctggagaggcgggccagctcagagcaggcgctgtggctgctgcttccggcccgctgctgcttggccctggggctgcagcctgaggcccgcctggtcctggaggtgcagttccagattgacccgatgaccttccgcctctggcaccaggcagtggacacactgcctgaggagcagctggtggtgcccgacttgcccacctgcgccctgcccagaccttggtctgtcccacccttgcggcgtggcaaccgcaagcaggagctggccgtggcgctcatcgcgggctggggccctggggatgggaggcgtgtccccccgctactcatctatggcccctttggcaccggcaagacctacacgctggccatggcctccctggaggtcatccggaggcctgaaaccaaggtgctcatctgcacacacaccaacagtgccgccgacatctacatccgggagtatttccacagccacgtcagcggcggccaccccgaggccactcctctccgtgtgatgtacacggaccggccgctgagccagacggacccagtcacgctgcagtactgttgcctgaccgacgaccgccaggctttccgcccgcccacacgggcagagctggcgcggcaccgcgtggtggtcaccaccacctcccaggcccgtgagctcagggtgccggtcggcttcttctcccacattctcatcgatgaggcggcccagatgctggagtgcgaggccctcaccccgctggcctatgcctcgcacggcacccgcctcgtgctggcgggcgaccacatgcaggtcacaccccggctgttcagtgtggccagggcccgggcggccgagcacacgctgctgcaccgcctcttcctgtgctaccagcaggagactcacgaggtggcgcggcagagccgcctggtcttccacgagaactaccgctgcacggacgccattgtcagcttcatctcgcggcacttctacgtggccaagggcaaccccatccacgccaggggcaaggttccgccccacccccggcactacccgctcatgttctgccacgtggcgggcagcccagaccgggacatgtccatggcgtcctggctgaatctggctgagattgcgcaggtcgtcgagaaggtgcaggaggcctacaacacctggcccagctgctggggcggccgcgagcagaggtgcatctgtgtcgtttcccacggtgcccaggtcagtgcactgaggcaggagctgaggaggcgggacctaggccaggtgtctgtcggcagttttgagatcctgccagggcggcagttccgggtcgtggtgctcagcactgtgcacacctgccagagcctgctcagccctggggcactggcccctgagttcttcaccgacgcccgcgtgctcaacaccgtcctgacccgcgcccagtcccagctggtggtagtgggggacgccgtggccctctgctccttcggggcctgcggcaagctctgggagagcttcatccgtgagtgcgtggagcggcacagtgtctgccccgagggcctgtccatggagcaggtcgagcagggtgtggcgcagagacggcgctggcctccccgaggcacacaggctggggcagcggggaactgggaggctgccccagagccagtaggggacctggccgaggagcaggcggctgtggtgacggccatggtgaaggcagagccgggagatgaggctctgagcccagcatcccgtgacatcacggcaaccacagcgcagacggaggctgcggcagcaccagcaggagacgcagtgaaggaagacgtggtgcccggggcctgtgcggcaggagcggctgctgcagcgggcgtggagtccacggaggctgaggatgcagaggctgacttctggccgtgggacggggagctcaacgctgacgacgccatcctacgggagcttctggacgagagccagaaggtgatggtgaccgtcggggaggacgggctgctggacactgtcgccaggcccgagtccctgcagcaggcccggctgtacgagaacctgcccccggctgcgctacggaagctgctgcacgcggagcccgagcggtaccgccactgctctttcgtgccagagaccttcgagcgggcgtcagccatcccgctggacgatgcctcctcgggccccatccaggtcaggggccgcctggactgtgggatggccttcgccggggatgaggtgctggtgcagctcctttcgggagacaaggcgcccgaggggcggcttcggggccgcgtgctgggcgtgctgaagaggaagaggcacgagctggcgtttgtgtgccgcatggacacgtgggacccgcgcatcatggtccccatcaatggctccgtgaccaagatcttcgtggccgagctgaaggacccatcgcaggtccccatctacagcctccggaagggccggctgcagcgtgtggggcttgagaggctcaccgccgaggcccggcacagccggctcttctgggtccaaattgtcctgtggcggcaaggcttctactacccgctgggcatcgtccgggaggtgctgcctgaggccagcacctgggagcagggcctccgcatcctcggcctggagtacagcttgagggtgcccccgtcggaccaggccaccatcaccaaggtgctgcagaaataccacacggagcttggccgggttgccggccgccgagaggactgccgcgccttcttgaccttcactgtggacccccagggcgcctgcaacctcgatgatgccctcagtgtccgagacctgggtcccaggtgcgaggtggctgtgcacatcactgatgtggccagcttcgtgcccagggacggggtgctggacgtggaggcgcgaaggcagggcgctgcgttctatgcccccggcagggagccagtgcccatgctgccggccagcctctgccaggacgtcctcagcctcctgcctggccgggaccgcctggccatctccctgttcctcaccatggagaaggccagtggccagctgaagagcctgcgctttgcaccctccgtggtccagtctgaccgccagctgtcctacgaggaggcggaggaggtgatcaggcagcacccgggtgccggccgtgagctgccggcccgcctggactccgtggacgcctgcgtcgtggccgcgtgctacttctctcggctgctgcgccggcaccgcctgcggtccgactgcttctatgagcagccggacgaggacggcaccctgggcttccgcgcggcccacatcatggtgaaggagtacatgattcagtttaataggctcgtggctgagttcctggtgggcagcgagtgcacgcggacggtcacgcctctgcggtggcagccagcaccccgcagccagcagctcaaggccctgtgtgagaagcatggggaccgggtgcccctgtcactgcacctcggccaccacctgcacggcggcgggggcagtccccccgacacgcggctgcacctcctggcctccctctggaagcaggtccagtttgctgcccgcacccaggactacgaacagatggtggacttggtcaccacggacgacatgcacccattcctggctcctgcaggccgcgacctccgcaaggccctggagcgctcggcgttcggccgctgcgcccggggccaccagcagcagggcggccactactcgctgcaggtggactggtacacgtgggccacctcgcccatccgcaggtacctggacgtggtgttgcagcggcagatcctgctggcgctgggccatgggggctctgcctactctgccagggacatcgatgggctctgccaggccttcagcctccagcacgcacttgcccagagctatcagcggcgggcgcgcagcctgcacctggccgtgcagctcaaggcccagcctctggacaagctgggcttcgtggtggacgtggaggcgggctcccgctgcttccggctgctcttccccagcaaccgggagacgctgcctgacccctgccccgtcccctacggctccctgcagctggccgagcacccccacgccctggcaggccggccgggcctgcggctcctgtggcggcgccgtgtctactcagcgcagggatccagcccgcccctgccactgcctggcactgtgccggacccacacaccctggccgtggagacggccctgtggaagcagctgctggagctggtggagctgcagcgctggccggaggcggctgctctcatccaggagaagggcgaggcgtcccagcggcgggagctggtgcaggtgcagcggagccactgtggccatttcctggaggtggcccgggagctgggcagtggggacaccctgcaggtgcagctcggcaccagcctgcagcacggcttcctggtaccgagccctcagctctggacggtggcaccgggcttcagcctctgcctggagcacgtggagcggcccggagactgcttctcaggccgtgtgtaccgggccccgagggaccggtaccgcgacgtggatgagtacgcctgcgtgtgggaaccattctgcgccctggagtcggccaccggcgcggttgccgagaatgactccgtcacacttcagcacctgagtgtctcctgggaggcgtcacggacgccgcaggggcagctgcagggcgccttccgcctggaggccgccttcctcgaggagaactgtgccgacatcaacttcagctgctgctacctctgcatccggctcgaggggctgccggctcccacggccagcccacgccctgggcccagcagcctcggccctggcctgaatgttgaccccggcacgtatacctgggtggcccacgggcagacgcaggactgggaccaggagcgccgggcagaccggcaggaggctcccagacgggtgcacctcttcgtccaccacatgggcatggagaaggttccggaagaggtgctgaggccgggcaccctgttcaccgttgagctgctgcccaagcagcttcctgatctccgcaaggaggaagccgtgcgtggactagaggaggcgtccccgctggtcaccagcatcgcactgggccggcctgtcccgcagcccctctgcagagtgatccccagcaggttcctggagcggcagacctacaacatccccggaggccgccacaagctgaaccccagccagaacgtggcggtcagggaggctctggagaagcctttcacggtcattcagggcccaccaggtacagggaagacgatcgtgggcctccacatcgtattctggtttcataaatcaaaccaggagcaggtgcagcccggaggccccccccgtggggagaagcggctggggggtccctgcatcttgtactgcggcccctccaacaagtcggtggatgtcctggcaggactgctcctgagaaggatggagctgaagcccctccgtgtgtacagtgagcaggctgaggccagcgagttcccagtgccgcgtgtgggcagcaggaagctgctcaggaagagcccccgggaggggaggccgaaccagagcctcaggagcatcaccctgcaccaccggatccggcaggcccccaacccttactcgtcggaaatcaaggcctttgacacccggctgcagagaggggagctcttctccagggaggacctggtctggtacaagaaggtcttgtgggaggctcggaagttcgagctggaccggcatgaggtcatcctctgcacctgctcctgtgcagcctctgccagcctcaaaatcctggacgtgaggcagatccttgttgacgaggcaggcatggccacggaacctgaaaccctcatccccctggtgcagttcccacaggccgagaaggtggttcttctcggagaccacaagcagctgcggcctgtggtcaagaatgagcggctgcaaaacctgggtctggaccggtctctgttcgagcggtaccacgaggacgcacatatgctggacactcagtaccgcatgcatgagggcatctgtgccttcccctctgtggcgttctacaagagcaagctgaagacgtggcagggcctgaggaggccgcccagtgtcctgggccacgctggcaaggagagctgccctgtcatctttggccacgtgcagggccacgagcggagcctgctggtgtccacggacgaagggaatgagaactccaaggccaacctggaggaggtggctgaggtggtccgtatcaccaagcagctgaccctggggaggaccgtagagccccaggacatcgccgtcctcacgccctacaacgcgcaggcctctgagatcagcaaggcccttcggcgagagggcatcgccggggtggccgtgtcctccatcaccaagagccaggggagcgagtggcgctatgtgctggtgagcaccgtccgcacctgtgccaagagcgacctggaccagcggcccaccaagagctggctcaagaagtttctgggcttcgttgtggaccccaaccaagtgaatgtggctgtcacgcgggcccaggaggggctctgcctgatcggagaccacctccttctgcgctgctgccccctctggcgtagcctcctggacttctgcgaggctcagcagaccctcgtgcctgccggccaggtgcgcgtctgcaggaggccaactatgccttcctgaagagccctctccacctgcaaggtgccaggactgggagggaaagt

SEQ ID NO: 31336 - DNA, 7950 bp, Artificial Sequence
  derived and/or modified sequence
atggctgtgtgggaggccgagcagctgggcggcctgcagagaggagacctgctgaccccaccagccccagatggagatggccgcacagcccccctgggccagcccccaggggcccagctgtactgcccagcctgcctggtgacctgccacagccaggaggcctttgagaaccactgtgccagcagcgagcacgcccagatggtggcctttgaccaggccctgccctgggagcacaggagccccccacctggcctgagcaagtttgagctgtgccccaagccagacctgtgtgaatatggagatgcctgcaccaaggcccacagcgcccaggagctgcaggagtgggtgcggaggacccaggccgtggagctgcggggccaggccgcctggcaggacggcctggtgccctaccaggagcggctgctggccgagtaccagaggagcagcagcgaggtgctggtgctggccgagaccctggatggagtgcgggtgacctgcaaccagcccctgatgtaccaggcccaggagaggaagacccagtacagctggacctttgctgtgcacagcgaggagcccctgctgcacgtggccctgctgaagcaggagcctggagctgacttcagcctggtggcccctggcctgcccccaggccgcctgtatgcccggggggagcgcttccgggtgcccagcagcacagctgacttccaggtgggcgtgcgggtgcaggccgccagctttggcacctttgagcagtgggtggtgtttgattttggaagaagacctgtgctgctgcagaagctgggcctgcagctgggccagggcagaagacctggcccctgcaggaacctggccctgggccaccctgaggagatggagcgctggcacacaggcaacagacatgtggtgcctggggtggagaggacagctgagcagacagccctgatggccaagtacaagggccctgccctggccctggagttcaacagaagctctgtggccagcggccccatcagccccaccaactaccggcagaggatgcaccagttcctgtatgaggaggaggccgcccagcagcagctggtggccaagctgaccctgcggggccaggtgttcctgaagacagccctgcagaccccagccctgaacatgctgtttgcccctcctggggccctgtatgcagaggtgcctgtgcccagcagcctgatgccagacacagaccagggcttcctgctgggccgggctgtgtccacagccctggtggcccctgtgcctgccccagacaacacagtgtttgaggtgcggctggagcggcgggccagcagcgagcaggccctgtggctgctgctgcctgcccgctgctgcctggccctgggcctgcagcctgaggcccggctggtgctggaggtgcagttccagattgaccccatgaccttccggctgtggcaccaggccgtggacaccctgcctgaggagcagctggtggtgcctgacctgcccacctgtgccctgccccggccctggagcgtgccccccctgcggcggggcaacaggaagcaggagctggccgtggccctgattgctggctggggccctggagatggaagaagagtgccccccctgctgatctacggccccttcggcaccgggaagacctacaccctggccatggccagcctggaggtgatcagaagacctgagaccaaggtgctgatctgcacccacaccaacagcgctgctgacatctacatccgggagtacttccacagccacgtgtctgggggccaccctgaggccacccccctgcgggtgatgtacacagaccggcccctgagccagacagatcctgtgaccctgcagtactgctgcctgacagatgaccggcaggccttccggccccccaccagggctgagctggcccggcaccgggtggtggtgaccaccaccagccaggcccgggagctgcgggtgcctgtgggcttcttcagccacatcctgattgatgaagctgcccagatgctggagtgtgaggccctgacccccctggcctatgccagccacggcacccggctggtgctggccggggaccacatgcaggtgacccccaggctcttctctgtggcccgggcccgggctgctgagcacaccctgctgcacaggctcttcctgtgctaccagcaggagacccatgaggtggcccggcagagccggctggtgttccacgagaactaccgctgcacagatgccatcgtgtccttcatcagccgccacttctacgtggccaagggcaaccccatccacgcccggggcaaggtgcccccccaccccaggcactaccccctgatgttctgccacgtggccggcagcccagaccgggacatgtccatggcctcctggctgaacctggccgagatcgcccaggtggtggagaaggtgcaggaggcctacaacacctggcccagctgctggggcggccgggagcagcgctgcatctgtgtggtgtcccatggagcccaggtgtctgccctgcggcaggagctgcggcggcgggacctgggccaggtgtctgtgggcagctttgagatcctgcccggccggcagttccgggtggtggtgctgagcacagtgcacacctgccagagcctgctgagccctggggccctggcccctgagttcttcacagatgcccgggtgctgaacacagtgctgacccgggcccagagccagctggtggtggtgggagatgctgtggccctgtgcagctttggagcctgtgggaagctgtgggagagcttcatccgggagtgtgtggagcggcacagcgtgtgcccagagggcctgtccatggagcaggtggagcagggcgtggcccagaggcggcgctggccaccccggggcacccaggccggggctgctggcaactgggaggccgcccctgagcctgtgggggacctggccgaggagcaggccgctgtggtgacagccatggtgaaggccgagcctggagatgaggccctgagccctgccagccgggacatcacagccaccacagcccagacagaagctgctgctgccccagctggagatgctgtgaaggaggatgtggtgcctggggcctgtgccgccggggctgctgctgctgctggggtggagagcacagaagcagaagatgctgaggccgacttctggccctgggatggagagctgaatgctgatgatgccatcctgcgggagctgctggatgagagccagaaggtgatggtgacagtgggagaagatggcctgctggacacagtggcccggcctgagagcctgcagcaggcccggctgtatgagaacctgcccccagctgccctgaggaagctgctgcacgccgagcctgagcgctaccgccactgcagctttgtgcctgagacctttgagcgggccagcgccatccccctggatgatgccagcagcggccccatccaggtgcggggccgcctggactgtggcatggcctttgctggagatgaggtgctggtgcagctgctgagcggggacaaggcccctgagggccgcctgcggggccgggtgctgggcgtgctgaagaggaagagacatgagctggcctttgtgtgcaggatggacacctgggacccccgcatcatggtgcccatcaatggatctgtgaccaagatctttgtggccgagctgaaggaccccagccaggtgcccatctacagcctgaggaagggccgcctgcagagggtgggcctggagcggctgacagctgaggcccggcacagccgcctcttctgggtgcagatcgtgctgtggaggcagggcttctactaccccctgggcatcgtgcgggaggtgctgcctgaggccagcacctgggagcagggcctgcgcatcctgggcctggagtacagcctgcgggtgcccccaagtgaccaggccaccatcaccaaggtgctgcagaagtaccacacagagctgggccgggtggccggcagaagagaggactgccgggccttcctgaccttcaccgtggacccccagggcgcctgcaacctggatgatgccctgtctgtgcgggacctgggcccccgctgtgaggtggccgtgcacatcacagatgtggccagctttgtgcccagagatggagtgctggatgtggaggcccggcggcagggcgccgccttctacgcccctggccgggagcctgtgcccatgctgcctgccagcctgtgccaggatgtgctgagcctgctgcccggccgggaccggctggccatcagcctcttcctgaccatggagaaggccagcggccagctgaagagcctgcgctttgcccccagcgtggtgcagagcgaccggcagctgtcctatgaggaggccgaggaggtgatccggcagcaccctggagctggccgggagctgcctgcccggctggacagcgtggatgcctgtgtggtggccgcctgctacttcagccggctgctgcggcggcaccggctgcggagtgactgcttctatgagcagccagatgaagatggcaccctgggcttccgggccgcccacatcatggtgaaggagtacatgatccagttcaaccggctggtggccgagttcctggtgggcagcgagtgcaccaggacagtgacccccctgcgctggcagcctgcccccaggagccagcagctgaaggccctgtgtgagaagcacggggacagagtgcccctgagcctgcacctgggccaccacctgcatggaggcggcggcagccccccagacacccggctgcacctgctggccagcctgtggaagcaggtgcagtttgctgcccggacccaggactatgagcagatggtggacctggtgaccacagatgacatgcaccccttcctggccccagctggccgggacctgaggaaggccctggagaggtctgccttcggccgctgtgcccggggccaccagcagcagggcggccactacagcctgcaggtggactggtacacctgggccaccagccccatccgccgctacctggatgtggtgctgcagaggcagatcctgctggccctgggccatggaggcagcgcctacagcgcccgggacattgatggcctgtgccaggccttcagcctgcagcacgccctggcccagagctaccagaggcgggcccggagcctgcacctggccgtgcagctgaaggcccagcccctggacaagctgggctttgtggtggatgtggaggccggcagccgctgcttccggctgctcttccccagcaaccgggagaccctgcctgacccctgccctgtgccctacggcagcctgcagctggccgagcacccccacgccctggccggccggcccggcctgcggctgctgtggaggagaagagtgtacagcgcccagggcagcagcccccccctgcccctgcccggcaccgtgcctgacccccacaccctggccgtggagacagccctgtggaagcagctgctggagctggtggagctgcagcgctggccagaggccgccgccctgatccaggagaagggggaggccagccagaggcgggagctggtgcaggtgcagaggagccactgcggccacttcctggaggtggcccgggagctgggcagcggggacaccctgcaggtgcagctgggcaccagcctgcagcacggcttcctggtgcccagcccccagctgtggacagtggcccctggcttcagcctgtgcctggagcacgtggagaggcctggggactgcttcagcggccgggtgtaccgggccccccgggaccgctacagagatgtggatgaatatgcctgtgtgtgggagcccttctgtgccctggagagcgccactggagctgtggccgagaatgattctgtgaccctgcagcacctgtctgtgtcctgggaggccagcaggaccccccagggccagctgcagggcgccttccggctggaggccgccttcctggaggagaactgtgccgacatcaacttcagctgctgctacctgtgcatccggctggagggcctgcctgcccccacagccagcccccggcccggccccagcagcctgggccctggcctgaatgtggaccccggcacctacacctgggtggcccacggccagacccaggactgggaccaggagaggagagctgaccggcaggaggccccccggcgggtgcacctgtttgtgcaccacatgggcatggagaaggtgcctgaggaggtgctgcggcccggcaccctcttcaccgtggagctgctgcccaagcagctgcctgacctgaggaaggaggaggccgtgcggggcctggaggaggccagccccctggtgaccagcatcgccctgggccggcctgtgccccagcccctgtgcagggtcatccccagccgcttcctggagcggcagacctacaacatccctgggggccgccacaagctgaaccccagccagaatgtggccgtgcgggaggccctggagaagcccttcaccgtcatccagggccccccaggcaccgggaagaccatcgtgggcctgcacatcgtgttctggttccacaagagcaaccaggagcaggtgcagcccggcggccccccaagaggagagaagaggctgggcggcccctgcatcctgtactgcggccccagcaacaagtctgtggatgtgctggccggcctgctgctgcggaggatggagctgaagcccctgcgggtgtacagcgagcaggccgaggccagcgagttccctgtgccccgggtgggcagcaggaagctgctgaggaagagcccccgggagggccggcccaaccagagcctgcggagcatcaccctgcaccaccgcatccggcaggcccccaacccctacagcagcgagatcaaggcctttgacacccggctgcagagaggagagctgttcagccgggaggacctggtgtggtacaagaaggtgctgtgggaggccaggaagtttgagctggacagacatgaggtgatcctgtgcacctgcagctgtgccgccagcgccagcctgaagatcctggatgtgcggcagatcctggtggatgaggccggcatggccacagagcctgagaccctcatccccctggtgcagttcccccaggccgagaaggtggtgctgctgggggaccacaagcagctgcggcctgtggtgaagaatgaaaggctgcagaacctgggcctggacaggagcctgtttgagcgctaccatgaagatgcccacatgctggacacccagtacaggatgcatgagggcatctgtgccttccccagcgtggccttctacaagagcaagctgaagacctggcagggcctgcggcggcccccatctgtgctgggccacgccggcaaggagagctgccctgtgatctttggacatgtgcagggccacgagaggagcctgctggtgtccacagatgagggcaatgaaaacagcaaggccaacctggaggaggtggccgaggtggtgcgcatcaccaagcagctgaccctgggccgcacagtggagccccaggacattgctgtgctgaccccctacaatgcccaggccagcgagatcagcaaggccctgcggcgggagggcattgctggggtggccgtgagcagcatcaccaagagccagggcagcgagtggaggtatgtgctggtgtccacagtgaggacctgtgccaagagtgacctggaccagaggcccaccaagtcctggctgaagaagttcctgggctttgtggtggaccccaaccaggtgaatgtggccgtgacccgggcccaggagggcctgtgcctgattggagaccacctgctgctgcgctgctgccccctgtggaggagcctgctggacttctgtgaggcccagcagaccctggtgcctgctggccaggtgcgggtgtgcagaagacccaccatgcccagctag

SEQ ID NO: 31337 - DNA, 7950 bp, Artificial Sequence
  derived and/or modified sequence
atggccgtgtgggaggccgagcagctgggcggcctgcagcggggcgatctgctgaccccccccgcaccagatggcgatgggagaactgcccccctggggcagccaccaggcgctcaactgtactgccctgcctgtctcgtcacatgtcatagtcaggaagcttttgaaaaccactgcgcctcttctgagcacgcccagatggtcgccttcgaccaggcgctgccatgggagcaccgtagcccgcctcccgggctgtccaaatttgagctttgccccaaaccagacctatgtgagtatggggacgcgtgcaccaaagcccattccgcccaggagttgcaggaatgggtcaggaggacccaggccgtggagctcaggggccaggcggcttggcaagatggattagtaccttaccaggaacggctacttgctgagtaccagcggagctcaagtgaggtgcttgtactggccgagacactagacggtgtaagggtcacctgtaaccagcctctgatgtatcaagcccaagaaaggaaaacccagtactcttggacatttgcagtgcatagtgaggaaccgttgcttcatgtagctcttctgaaacaggaacccggcgccgacttctctttggtggccccgggactgccaccaggcaggttgtacgctcgcggggagcggttcagagttccctctagcaccgctgacttccaggtcggcgtgagagtgcaagctgcttctttcggcacatttgagcaatgggtggtgttcgactttggcagaaggccagtgctactgcagaaattaggcttgcagctggggcagggccgtcgccccggcccttgtcggaacttagctctgggccacccggaagaaatggagcgctggcatactggcaaccggcatgtagtgcccggggtcgagagaaccgccgaacagacagcgttaatggctaagtacaaaggcccagccctggccctggagttcaaccgttcttctgtggcctccgggccaatctcacccaccaattaccggcagagaatgcaccaattcctttacgaggaggaggcggctcagcagcagctagtggctaagctcaccctcagaggccaggtgttcctgaagaccgctctccaaacccccgcactcaatatgctttttgctccccctggcgccctttacgcggaagtaccagtcccttccagcctgatgcccgacacggatcaaggctttctccttggacgtgctgtcagtactgctctggtcgctcccgtccctgcccctgacaacaccgtcttcgaggtccggctggagcgcagagcaagctccgaacaagcactctggctgctcctcccagcccgctgctgccttgccctggggctgcagcccgaggcccgccttgtgctggaggtgcaattccagattgacccaatgacgttcagactgtggcatcaggcggtagatacgctgccagaagagcagctggtggtgccagacttacccacctgcgctctccctcggccatggagcgtacccccactccgcaggggaaacaggaagcaggagcttgcggtggcgttgatcgctggttgggggcctggggacggaaggcgagtgccgcctttactgatttacggacccttcggtactgggaaaacgtataccctggctatggcctccctggaggtgattagacgccctgagacaaaggttctaatctgtacccacacaaattcagcggctgatatatacatacgggagtactttcatagccatgtttcaggcggtcacccagaagcaaccccactgagggtcatgtacacggaccgtcccctgagccagactgatcccgtgacattgcagtattgttgtctaaccgacgatcgacaggctttcaggccccccacccgagccgaactggcccgccatcgggtagtggtgacgactacctctcaggccagagaactccgtgtacccgtgggattcttttcacatatactgattgacgaggcggctcagatgctagagtgtgaagcgctgacccctctggcctacgctagtcacggcaccaggctggtcctcgccggggaccacatgcaggtcacccctaggctctttagcgtggcaagggcccgggcagccgagcataccttgttgcatcgcctctttctgtgctatcagcaggagactcacgaagttgcacgacagtcacgtctggtgtttcatgaaaactacagatgcaccgacgcaatcgtctcctttatatcaagacacttttatgtggccaaagggaaccccatacacgcccgaggaaaggtgccccctcatcccagacattaccccttgatgttttgtcatgtcgctgggagtcctgaccgggacatgagtatggcatcttggctcaacctcgctgagatcgcccaggttgtcgaaaaggtccaggaagcctataatacctggccaagctgttggggcggtagggaacagaggtgtatttgtgtggtgtcccacggcgcgcaggtgtctgccctgcggcaagagctaagacgccgggatctgggacaggtctccgtaggctcatttgagattctaccaggaaggcagtttcgcgtcgttgtactgtcaaccgtgcacacctgccagtcactgctttctccaggagcgttggcccccgagttctttacagacgctcgcgtgctcaataccgtcttaacccgagcccagagccagcttgttgtcgtcggagatgctgtggccctgtgcagttttggggcttgtggtaaattgtgggaatccttcatccgggagtgcgttgagagacacagcgtttgccccgagggtctctccatggagcaggtcgaacagggggttgcccagcgacggcgctggccgcccaggggcactcaggcaggtgctgcggggaactgggaagctgccccggagcccgttggtgacctggccgaggaacaagcggctgtcgtaactgctatggttaaagcagaacccggcgatgaagcactgtcgccagcctcaagagacattactgctactactgcccagaccgaagcagccgctgctcctgcgggggacgcagttaaggaggacgtcgtccctggtgcgtgtgctgcaggggcagcagcagccgccggggttgagtccaccgaagccgaggatgcagaggcagacttctggccctgggatggcgagttaaatgcagatgacgccatcctgagagaacttctcgatgaaagccaaaaggtaatggtgaccgttggcgaggacggtttgctggataccgtagctcggcctgaatcactgcagcaggcacggctttacgagaatctcccacccgctgcattaagaaaattgctgcatgccgagcctgagcggtaccggcattgctctttcgtccccgaaaccttcgaaagggccagcgcaatccccttggatgacgcttcatcagggcccatacaggtgagaggccggttggactgtggcatggcatttgccggcgacgaagtcttggtacagcttttatccggagataaggctccggagggccgcttgcggggccgggttctgggtgtgctgaagaggaagcggcatgaactggcctttgtatgcaggatggacacctgggacccacggatcatggtgcccattaatgggagtgtgaccaaaattttcgtggccgaattgaaagatccctcacaggtccctatttattctctgagaaagggacgcttgcaaagggtggggctggagcgacttaccgccgaggcaaggcacagtcgcttattctgggtgcagattgtgctctggagacagggtttctactacccattaggaatagtccgcgaagtgctccctgaggcttccacctgggagcaaggcctgcggatcttaggcctcgaatattccttgagagttccgcccagcgatcaggcaacgattacaaaggtgcttcagaagtatcataccgagttgggacgagtggctggaagacgagaagactgccgcgctttcctgacctttactgtggatccacaaggagcttgtaatctcgacgacgccctatcggtacgggatctgggccccagatgcgaggtcgccgttcacatcactgacgtggcctcatttgtgccccgtgacggcgtgctggacgtcgaagcacgtaggcaaggagctgccttttacgcccctggccgcgagcctgtccctatgcttcccgccagcctctgccaagatgtcctttctttactgcccgggagggaccggttggctatctcactgtttctcaccatggagaaggcaagtggacagcttaaaagcctccggttcgccccaagcgtcgtacagtctgatagacagctgtcgtacgaggaggccgaggaggtcattcgccagcaccctggagcaggtagggagctccccgctcgcctcgactctgttgatgcttgtgtcgtggcggcctgctattttagtcgactgcttcgtaggcaccggctccgaagcgactgtttctatgagcagcctgatgaggatgggactctggggtttcgtgccgcacacattatggtcaaggagtacatgatccaattcaacagactggtcgcagagttcctggttggtagtgagtgcacgaggaccgtcacgccattgaggtggcagccagcgcctcgctctcagcagctcaaggcactgtgcgaaaagcacggagacagagtccccctgtctctgcacctgggccaccaccttcatgggggtggcggcagccctcccgatacacgtcttcatctcctcgcttcactgtggaagcaggtgcagtttgccgccaggacccaggactacgagcaaatggtggacttagtaacaaccgatgacatgcatccattccttgcccccgcggggcgcgatctgcggaaggctttagaacggtctgcattcggaaggtgcgccaggggccatcagcaacaaggaggacattactccctccaggtagactggtatacctgggcaacctccccgatcaggcgatatttggacgtcgtgctgcagcgccagatattactggccctgggacacggagggagcgcttatagcgcacgagacatagacggcctgtgccaggcctttagccttcaacacgccctagcgcagtcctaccagcggcgcgcaagatctctgcatctcgcagtgcagctgaaggcccaaccactggacaagttaggatttgtggtggacgtggaggcaggatcacgctgcttccgtcttctctttcccagcaatcgagaaaccctacctgacccttgccccgtcccgtatggctctctgcagctggctgaacatccccatgccctcgccggtaggcccggcctgaggctgctgtggagacggcgcgtgtatagcgcccagggatccagtcctccactccctttgcctggcactgttcccgaccctcacacactcgctgtggaaaccgccctatggaagcaactgcttgagcttgtagagttacaacggtggccggaagccgctgccctcatccaggaaaaaggagaagcctcacagcgaagggaactggtccaggtgcagcggtctcattgtgggcactttctagaggtggcgagggagttggggtctggcgacaccctccaggtgcaattagggactagccttcagcacggcttcctcgtgcccagtccacaactgtggactgtcgcacccgggttttctctgtgccttgaacacgtggaaagacctggagattgcttctctggccgggtctaccgagctcctcgggaccgttaccgcgacgtcgacgagtatgcctgcgtgtgggaacccttctgcgcactggaatcggccacaggcgccgttgccgagaatgactctgtcaccctgcagcatctgtccgttagctgggaggcatccaggaccccacagggccaacttcaaggagcctttcggttggaagcagcctttctcgaggagaattgcgccgacattaatttttcctgctgctatctgtgtataagactggaagggctgccagctcctaccgccagcccaaggcccggtccatcctctctggggcccgggctgaatgtggatcccgggacttatacctgggtcgctcacggacagactcaggactgggaccaagagcgccgtgccgaccggcaggaagcaccacgccgcgttcatctatttgtccatcatatgggtatggaaaaggttccagaagaggtcctccgacctgggactctgtttaccgtggaacttctgcctaagcaactgcccgacctccggaaggaggaggctgtccggggccttgaggaagcttcccccctcgtaacttctatcgcgctgggaaggccggttccccagcctctctgtcgggttattccatctcgattcttggaaagacaaacctacaacataccagggggtaggcataagctcaacccgtctcagaatgttgctgtacgtgaagccctggagaagccctttacagtgatacagggacccccggggactggaaaaaccatcgttggcctacatatcgttttctggttccacaagagcaatcaggagcaagttcaacccgggggacccccgagaggcgaaaagcgcctgggggggccctgcatcctgtactgcggaccaagcaacaagagcgtcgacgtgctggcgggcctgctcctgagaaggatggagctgaagccactcagggtttactccgaacaggccgaggccagcgagtttcccgttccacgggtcggcagtagaaaacttctgaggaaaagcccaagggaaggccggccaaaccaaagcctgagaagcattacattacaccacagaattaggcaggccccaaacccatattcttcagagattaaggcttttgacactcgcctgcagagaggcgagctgtttagcagggaagacctcgtctggtacaagaaggttctgtgggaggcaagaaagtttgagctcgatcggcatgaggtgatactgtgcacatgctcttgtgccgccagcgccagcctcaagatcctggacgtccgccaaatcctggtggacgaggctgggatggccactgagcccgaaacattaatacccctggtccagttcccccaggcagagaaggtggtattgctaggagaccacaaacagcttcggccggtggtgaagaatgagcgactccagaatttggggcttgaccggtctctgtttgagcggtaccacgaggatgcgcacatgctcgatacccaatacagaatgcacgaagggatatgcgccttcccatctgttgctttctacaaatccaaacttaaaacgtggcagggtctccgaaggcctccatccgtcttaggccacgcaggaaaggagtcatgccccgtgatcttcggacatgtgcagggccacgaaaggtctctgttggtgtccaccgatgaaggcaatgagaactccaaggcaaacttagaagaggtggcagaggtggttcggattacgaaacagttgactttaggaagaactgtcgagcctcaggacattgcagtactgacgccctataatgcacaagcatccgaaatatctaaggcactgcgccgagaaggtattgccggcgttgccgtctcatccattaccaaatcccagggatcagaatggcgctatgtgctggtgagtaccgtgcgaacttgtgccaaatcagatctagaccaacgaccaacaaagagctggcttaagaagttcctgggttttgttgtagaccctaaccaagtgaatgtcgccgtcactagagctcaggaaggcctctgcctgattggagatcatctcctccttcgctgctgcccactgtggcggagtctactggatttctgcgaagcacagcagacgctggtgcctgcaggacaggtgcgcgtttgtagaagacctacaatgcctagctag

SEQ ID NO: 31338 - DNA, 7949 bp, Artificial Sequence
  derived and/or modified sequence
atggctgtctgggaggctgagcaactgggcggtctgcagagaggagaccttctgactccacccgcaccagatggcgacggcagaaccgctccattgggtcaacctccaggcgctcagttgtattgtccagcctgcctggtgacttgtcactcacaggaagcattcgaaaaccactgcgcctctagcgagcacgcacagatggtggccttcgatcaggctctcccttgggagcatcgatcgcctcctcccggtttgtcaaaattcgagctctgccccaaacccgatctgtgtgagtatggggatgcatgtacaaaagctcactccgcccaggaactgcaggaatgggtccgacgcactcaggcagtggaactccgcggacaggccgcttggcaggatggccttgtgccatatcaggaacggctgttagcggaataccagcggtcgtcttcagaggtgctcgtgctggccgagaccctggacggtgtaagggtaacctgcaaccagcctctgatgtaccaggcgcaggagaggaagacccagtatagttggacttttgccgtacatagtgaggaaccccttttgcacgtagctctgttaaaacaggaacccggtgctgatttctctctagtagccccagggctccctcctggcagactgtatgccaggggggagagatttcgggttccctcaagcaccgcagatttccaagtcggagtccgggttcaggccgcatctttcggcacctttgagcagtgggtggtgttcgatttcggacgcaggcccgtgctgctgcagaaacttggactgcagcttggccaaggcagaagacccggtccctgtcggaacctggcactcggccacccagaggaaatggaaaggtggcacactggaaacagacatgttgttcctggagtggaaaggacagcggagcagacagcgctcatggccaaatataagggcccagcacttgcgctggagttcaataggtcatcagtcgctagtgggccaatctctccaaccaattatcgtcagaggatgcatcagttcttgtacgaggaagaggccgctcaacaacagctggtcgcaaagctgacactcagaggtcaggtgttcttgaagaccgctctgcaaaccccggcactgaacatgctgtttgccccaccgggagctctctatgctgaagttccggtcccatccagccttatgcctgacacagatcaagggttcttgctaggaagggccgtcagtaccgctctagtggcacctgtaccggctcctgacaataccgtgttcgaggttcggttggagagacgtgcctccagcgagcaggccctttggctcctactccccgctagatgctgtctagcactgggactgcagccagaggcaagacttgtgcttgaagtgcaatttcaaatcgatcccatgacattccgactgtggcaccaagcagttgatacccttccggaagaacagttggtggtacctgacctccccacatgtgctttgcccaggccttggtccgtaccacctcttcgcagaggtaacaggaagcaggaactcgctgtggccctgatcgctgggtgggggcctggagatggccgaagagtgcccccactcttaatatatggtcccttcggcaccggaaaaacgtacaccctggccatggccagtctcgaggttataagacgtccagaaaccaaagtgctaatctgcacccacactaactctgcagccgatatctatattagggaatacttccacagtcacgtgagcggtgggcatcccgaggctacccctttaagagtcatgtacacagaccgtccgctgtcccagactgatcccgtaaccttacaatactgctgtctcaccgacgacagacaggcttttaggccaccaacccgtgccgaactggcacgccatcgcgtggtagtaacgactacaagccaggccagagagctgagagtgcccgtgggctttttttcccacatcctcatcgacgaagcagcccagatgctcgaatgcgaagctctgactccccttgcgtacgcctcccatggcacccgccttgttctagcgggtgaccatatgcaggtgacacccagactcttctctgtggcaagagcacgcgctgcggagcatacactgttacacaggttgttcctgtgctaccagcaggagactcacgaagtggctcgccagagccggctggtatttcacgaaaattatagatgtacagacgccatcgtttcttttatttctagacacttttacgtggccaaagggaaccccatccacgccagagggaaggtcccccctcatccgaggcactatcctctgatgttttgtcatgtggcgggtagccctgacagggacatgagtatggcgtcatggcttaacctagccgagattgcgcaggtcgtcgagaaggtgcaggaagcctataacacttggccatcgtgttgggggggtagagagcagaggtgcatttgtgtcgtaagccacggggctcaggtgagcgctctcaggcaggagctgcgacgcagagatttggggcaggtgagtgtgggcagctttgaaatccttcccggacgccaattcagggtggttgtgctgtccacagtccatacctgtcagagcttactgtccccaggggctcttgcacctgagttctttactgatgcacgggtgctgaacaccgtgctcactagagcccagtcccaactggtggtagtcggggatgctgtggccttatgctccttcggagcctgtggcaagctctgggagagtttcattcgagaatgtgttgagaggcacagcgtgtgtccagagggattgtctatggagcaggtagaacagggcgtggcccagagacggagatggccgccacggggtactcaggcgggtgcagcaggaaactgggaagccgctccggaacccgtgggcgatctggccgaagagcaagcagctgttgtcactgctatggtaaaagcggagcccggagacgaagctttaagcccagccagtcgggatattaccgccacaactgcccaaacagaggcggcagcagcgccagcaggggacgccgtgaaggaagacgtggtgccaggagcttgtgccgcaggcgctgccgctgccgctggcgtggaatctacagaggcagaagatgccgaggcagatttctggccctgggatggtgaactcaatgccgacgacgctattctgcgggagctgctcgacgagtctcagaaagtaatggttaccgtaggtgaggacggtttgctcgacacagtggctcggccagaatctctgcagcaggcccgactctatgagaatcttccacccgctgcccttcggaagctgctgcatgccgaacccgaacggtacagacactgctccttcgtacctgagactttcgagagagcaagcgccatcccacttgatgatgccagttccggtcctatccaggtgcggggacggttggattgcggtatggctttcgctggagatgaagttctcgtccaacttttgagcggcgacaaagctcctgagggtaggctgcggggacgcgttctgggagtgctgaaaagaaaacgccatgagctggcctttgtctgtagaatggatacttgggatccgaggatcatggttcccattaatgggtccgttacaaaaatcttcgttgcagagcttaaagatccaagtcaagtgccaatttactctcttaggaagggacggcttcagcgtgtggggttggaacggctgaccgccgaggccagacattccaggctgttctgggtgcagattgtactttggcgacaagggttttactatcctctggggattgttcgggaggtgctccccgaggccagtacatgggagcaagggctcagaattttaggtctcgagtactctctgcgggtgcctcccagtgaccaagccactatcacaaaggtgcttcaaaaataccacaccgaattgggtagggtcgctggcaggcgggaggattgcagagccttccttacgtttactgtggacccccaaggggcatgcaatttagacgatgcattgagtgtaagggatctagggccacgatgcgaggttgctgtgcacatcacagatgtggcttctttcgtcccgagggacggggtcctggatgtggaggccaggcggcagggagccgctttctacgctcccggtagagagccggtgcctatgctgccagcatctctgtgtcaggacgttctaagtctgctccccggacgggaccggctggcaattagtctattcctgactatggaaaaagcctctggacagctgaaatctttaagattcgccccatcagtcgtccaatcagacagacagctgagctatgaagaggctgaggaggtgatcagacagcaccctggcgctgggagagagttaccagccaggctggactccgttgacgcttgtgtggtggctgcttgctatttttcacggctattgcggagacacagactgcgcagcgattgtttctatgagcagcctgacgaggatggcacccttggattccgcgctgcccatataatggtgaaagaatacatgatacagtttaaccggctggtggccgagtttcttgtcggatcagagtgcacgaggactgtaacaccactgagatggcagcccgctcctcggagccagcagctgaaggctctgtgcgagaagcacggtgacagggtgccgttgtctttacacctcggacatcacctgcatgggggaggtggttcaccacccgacactaggctgcatcttctggccagcctttggaaacaggtacagttcgcggcacgcacccaggattacgagcagatggtcgacctagtcacgacagacgatatgcaccccttcctcgcgccagcagggcgagacctgagaaaggcgctggaaaggagcgctttcggcaggtgcgcacgcggacatcagcagcaaggcggacattattccctgcaggtcgactggtacacttgggccacaagccccatcaggcgatatctagacgtcgtgttgcaaagacagatcctgctcgccttggggcatggcggtagtgcctacagtgccagagatatagatggcctatgtcaggcattctctctgcagcatgcacttgcccaaagctatcagcgcagagccagaagtctgcaccttgccgtccaactcaaagcgcaacccttagataaactgggcttcgtggtggatgtggaggcaggctccaggtgcttcaggttacttttcccttccaaccgagagacgcttcccgacccatgccccgttccatatgggagccttcagctcgccgaacatccccacgccctggccggtagacccggtctaagattgctgtggcgtagacgagtttacagtgcacaaggatcgagtcccccactgcccttaccaggcactgttccagacccacatactctggcagtcgagactgctctgtggaagcagctgctggaattagtggaattacaaagatggcctgaagcggctgcccttatccaggaaaagggcgaggcctcacaacgccgtgaattggtccaggtacagaggtcccactgtggtcactttctggaggtggcaagggaactgggttctggagataccctgcaggtccaactcggaaccagcttacagcacggcttcctggtgccaagtcctcaactgtggaccgtggcaccgggattctctctgtgccttgaacatgtggaacggccaggggattgcttttccggacgcgtgtaccgcgctcctcgcgatcgatatcgggatgtggacgaatacgcctgcgtgtgggagcccttttgtgctctggagtcagctacaggcgctgtggccgagaacgactcagttacactccagcacttatcagtgagctgggaagctagtcggacccctcaggggcaactgcagggggcattcagactggaggcagcctttctggaggagaactgtgccgatattaacttctcctgttgctacctttgtattcggctcgagggtctgcctgccccaacagcttcacccagacctggcccatctagccttggacccggtttgaatgtggatcccggaacttacacgtgggtggcccacggccagactcaggattgggatcaggagcgcagagcagacagacaagaagcaccccgacgggtgcacctctttgtgcaccacatgggaatggaaaaggtgccagaagaggtcctcagaccaggcaccttatttacagttgaactcttgcctaagcagcttcccgacttacggaaagaggaagctgtccgcggactggaggaggcgagtcccttggtgaccagtattgcactgggacgtccagtgccccagcctctgtgtagggtgatacctagtaggtttctagaacgccagacatacaacattcccggtggaaggcataagcttaacccctcacaaaatgtggccgtccgtgaagctttggaaaaaccatttaccgtgattcaggggccaccaggaacgggaaagaccatcgtgggcttacatatagtgttttggtttcacaagtccaaccaagagcaagtccagcccggtggaccaccgagaggcgaaaaacgtctgggcggaccatgtatactgtattgcggcccaagtaataaaagcgtggacgtgttggccggacttctgctccgacgcatggaactcaagccacttagagtttattctgagcaggctgaggcctccgagtttccggtgcccagagtagggagcaggaaacttcttcgtaaatcaccacgagaaggacgccctaaccagtcactgcggagcatcacattacatcaccgaataagacaggctcccaatccttacagtagtgagattaaggcgttcgataccagattgcagagaggtgagctatttagtagggaggatctggtgtggtataagaaagttttatgggaggctcggaaatttgagctggatcgacacgaagttatcctgtgcacatgttcttgtgccgcaagcgccagccttaagatccttgacgtcaggcagatcctggtagacgaggccggaatggcaactgagccagaaacccttatccctctggtgcagtttccacaggcggaaaaggtggtcctgttaggggatcataagcaactgagacctgttgtgaaaaatgagcgcctccagaatctgggattggataggtctttattcgagaggtaccatgaagatgcccatatgctggatactcagtatagaatgcacgaggggatttgtgccttccccagtgttgctttctacaagagcaaacttaagacatggcaaggtttgagacgacctcctagtgtgctggggcatgcaggaaaggagagctgtcctgtgatcttcggtcatgtgcagggccatgaacgaagtcttctggtaagtactgacgaagggaatgagaattccaaagcgaacctggaggaagtggctgaagtcgtgagaatcaccaaacagctgaccctgggacgaacagtagagccgcaggatatagcggtgctgactccttataacgctcaggcctctgagatctctaaggcactaagaagagagggcatcgccggagttgccgtcagttcaattactaaaagccaggggtccgagtggcgctacgtgcttgtcagtactgtccgtacttgtgccaagtccgacctggatcagcgccctaccaagagctggctgaagaaattcctggggttcgtcgtcgaccctaatcaggtcaacgttgctgtgactcgagcccaggagggactgtgcctgatcggtgaccacctgctccttcggtgttgccctctatggcggtcacttcttgatttttgtgaggcacagcagaccttggtgccagctggccaggtcagagtgtgcagacggccaacaatgccctccta

SEQ ID NO: 31339 - DNA, 7950 bp, Artificial Sequence
  derived and/or modified sequence
atggccgtgtgggaggccgagcagctgggcggcctgcagagaggcgacctgctgaccccccccgcccccgacggcgacggcagaaccgcccccctgggccagccccccggcgcccagctgtactgccccgcctgcctggtgacctgccacagccaggaggccttcgagaaccactgcgccagcagcgagcacgcccagatggtggccttcgaccaggccctgccctgggagcacagaagccccccccccggcctgagcaagttcgagctgtgccccaagcccgacctgtgcgagtacggcgacgcctgcaccaaggcccacagcgcccaggagctgcaggagtgggtgagaagaacccaggccgtggagctgagaggccaggccgcctggcaggacggcctggtgccctaccaggagagactgctggccgagtaccagagaagcagcagcgaggtgctggtgctggccgagaccctggacggcgtgagagtgacctgcaaccagcccctgatgtaccaggcccaggagagaaagacccagtacagctggaccttcgccgtgcacagcgaggagcccctgctgcacgtggccctgctgaagcaggagcccggcgccgacttcagcctggtggcccccggcctgccccccggcagactgtacgccagaggcgagagattcagagtgcccagcagcaccgccgacttccaggtgggcgtgagagtgcaggccgccagcttcggcaccttcgagcagtgggtggtgttcgacttcggcagaagacccgtgctgctgcagaagctgggcctgcagctgggccagggcagaagacccggcccctgcagaaacctggccctgggccaccccgaggagatggagagatggcacaccggcaacagacacgtggtgcccggcgtggagagaaccgccgagcagaccgccctgatggccaagtacaagggccccgccctggccctggagttcaacagaagcagcgtggccagcggccccatcagccccaccaactacagacagagaatgcaccagttcctgtacgaggaggaggccgcccagcagcagctggtggccaagctgaccctgagaggccaggtgttcctgaagaccgccctgcagacccccgccctgaacatgctgttcgccccccccggcgccctgtacgccgaggtgcccgtgcccagcagcctgatgcccgacaccgaccagggcttcctgctgggcagagccgtgagcaccgccctggtggcccccgtgcccgcccccgacaacaccgtgttcgaggtgagactggagagaagagccagcagcgagcaggccctgtggctgctgctgcccgccagatgctgcctggccctgggcctgcagcccgaggccagactggtgctggaggtgcagttccagatcgaccccatgaccttcagactgtggcaccaggccgtggacaccctgcccgaggagcagctggtggtgcccgacctgcccacctgcgccctgcccagaccctggagcgtgccccccctgagaagaggcaacagaaagcaggagctggccgtggccctgatcgccggctggggccccggcgacggcagaagagtgccccccctgctgatctacggccccttcggcaccggcaagacctacaccctggccatggccagcctggaggtgatcagaagacccgagaccaaggtgctgatctgcacccacaccaacagcgccgccgacatctacatcagagagtacttccacagccacgtgagcggcggccaccccgaggccacccccctgagagtgatgtacaccgacagacccctgagccagaccgaccccgtgaccctgcagtactgctgcctgaccgacgacagacaggccttcagaccccccaccagagccgagctggccagacacagagtggtggtgaccaccaccagccaggccagagagctgagagtgcccgtgggcttcttcagccacatcctgatcgacgaggccgcccagatgctggagtgcgaggccctgacccccctggcctacgccagccacggcaccagactggtgctggccggcgaccacatgcaggtgacccccagactgttcagcgtggccagagccagagccgccgagcacaccctgctgcacagactgttcctgtgctaccagcaggagacccacgaggtggccagacagagcagactggtgttccacgagaactacagatgcaccgacgccatcgtgagcttcatcagcagacacttctacgtggccaagggcaaccccatccacgccagaggcaaggtgcccccccaccccagacactaccccctgatgttctgccacgtggccggcagccccgacagagacatgagcatggccagctggctgaacctggccgagatcgcccaggtggtggagaaggtgcaggaggcctacaacacctggcccagctgctggggcggcagagagcagagatgcatctgcgtggtgagccacggcgcccaggtgagcgccctgagacaggagctgagaagaagagacctgggccaggtgagcgtgggcagcttcgagatcctgcccggcagacagttcagagtggtggtgctgagcaccgtgcacacctgccagagcctgctgagccccggcgccctggcccccgagttcttcaccgacgccagagtgctgaacaccgtgctgaccagagcccagagccagctggtggtggtgggcgacgccgtggccctgtgcagcttcggcgcctgcggcaagctgtgggagagcttcatcagagagtgcgtggagagacacagcgtgtgccccgagggcctgagcatggagcaggtggagcagggcgtggcccagagaagaagatggccccccagaggcacccaggccggcgccgccggcaactgggaggccgcccccgagcccgtgggcgacctggccgaggagcaggccgccgtggtgaccgccatggtgaaggccgagcccggcgacgaggccctgagccccgccagcagagacatcaccgccaccaccgcccagaccgaggccgccgccgcccccgccggcgacgccgtgaaggaggacgtggtgcccggcgcctgcgccgccggcgccgccgccgccgccggcgtggagagcaccgaggccgaggacgccgaggccgacttctggccctgggacggcgagctgaacgccgacgacgccatcctgagagagctgctggacgagagccagaaggtgatggtgaccgtgggcgaggacggcctgctggacaccgtggccagacccgagagcctgcagcaggccagactgtacgagaacctgccccccgccgccctgagaaagctgctgcacgccgagcccgagagatacagacactgcagcttcgtgcccgagaccttcgagagagccagcgccatccccctggacgacgccagcagcggccccatccaggtgagaggcagactggactgcggcatggccttcgccggcgacgaggtgctggtgcagctgctgagcggcgacaaggcccccgagggcagactgagaggcagagtgctgggcgtgctgaagagaaagagacacgagctggccttcgtgtgcagaatggacacctgggaccccagaatcatggtgcccatcaacggcagcgtgaccaagatcttcgtggccgagctgaaggaccccagccaggtgcccatctacagcctgagaaagggcagactgcagagagtgggcctggagagactgaccgccgaggccagacacagcagactgttctgggtgcagatcgtgctgtggagacagggcttctactaccccctgggcatcgtgagagaggtgctgcccgaggccagcacctgggagcagggcctgagaatcctgggcctggagtacagcctgagagtgccccccagcgaccaggccaccatcaccaaggtgctgcagaagtaccacaccgagctgggcagagtggccggcagaagagaggactgcagagccttcctgaccttcaccgtggacccccagggcgcctgcaacctggacgacgccctgagcgtgagagacctgggccccagatgcgaggtggccgtgcacatcaccgacgtggccagcttcgtgcccagagacggcgtgctggacgtggaggccagaagacagggcgccgccttctacgcccccggcagagagcccgtgcccatgctgcccgccagcctgtgccaggacgtgctgagcctgctgcccggcagagacagactggccatcagcctgttcctgaccatggagaaggccagcggccagctgaagagcctgagattcgcccccagcgtggtgcagagcgacagacagctgagctacgaggaggccgaggaggtgatcagacagcaccccggcgccggcagagagctgcccgccagactggacagcgtggacgcctgcgtggtggccgcctgctacttcagcagactgctgagaagacacagactgagaagcgactgcttctacgagcagcccgacgaggacggcaccctgggcttcagagccgcccacatcatggtgaaggagtacatgatccagttcaacagactggtggccgagttcctggtgggcagcgagtgcaccagaaccgtgacccccctgagatggcagcccgcccccagaagccagcagctgaaggccctgtgcgagaagcacggcgacagagtgcccctgagcctgcacctgggccaccacctgcacggcggcggcggcagcccccccgacaccagactgcacctgctggccagcctgtggaagcaggtgcagttcgccgccagaacccaggactacgagcagatggtggacctggtgaccaccgacgacatgcaccccttcctggcccccgccggcagagacctgagaaaggccctggagagaagcgccttcggcagatgcgccagaggccaccagcagcagggcggccactacagcctgcaggtggactggtacacctgggccaccagccccatcagaagatacctggacgtggtgctgcagagacagatcctgctggccctgggccacggcggcagcgcctacagcgccagagacatcgacggcctgtgccaggccttcagcctgcagcacgccctggcccagagctaccagagaagagccagaagcctgcacctggccgtgcagctgaaggcccagcccctggacaagctgggcttcgtggtggacgtggaggccggcagcagatgcttcagactgctgttccccagcaacagagagaccctgcccgacccctgccccgtgccctacggcagcctgcagctggccgagcacccccacgccctggccggcagacccggcctgagactgctgtggagaagaagagtgtacagcgcccagggcagcagcccccccctgcccctgcccggcaccgtgcccgacccccacaccctggccgtggagaccgccctgtggaagcagctgctggagctggtggagctgcagagatggcccgaggccgccgccctgatccaggagaagggcgaggccagccagagaagagagctggtgcaggtgcagagaagccactgcggccacttcctggaggtggccagagagctgggcagcggcgacaccctgcaggtgcagctgggcaccagcctgcagcacggcttcctggtgcccagcccccagctgtggaccgtggcccccggcttcagcctgtgcctggagcacgtggagagacccggcgactgcttcagcggcagagtgtacagagcccccagagacagatacagagacgtggacgagtacgcctgcgtgtgggagcccttctgcgccctggagagcgccaccggcgccgtggccgagaacgacagcgtgaccctgcagcacctgagcgtgagctgggaggccagcagaaccccccagggccagctgcagggcgccttcagactggaggccgccttcctggaggagaactgcgccgacatcaacttcagctgctgctacctgtgcatcagactggagggcctgcccgcccccaccgccagccccagacccggccccagcagcctgggccccggcctgaacgtggaccccggcacctacacctgggtggcccacggccagacccaggactgggaccaggagagaagagccgacagacaggaggcccccagaagagtgcacctgttcgtgcaccacatgggcatggagaaggtgcccgaggaggtgctgagacccggcaccctgttcaccgtggagctgctgcccaagcagctgcccgacctgagaaaggaggaggccgtgagaggcctggaggaggccagccccctggtgaccagcatcgccctgggcagacccgtgccccagcccctgtgcagagtgatccccagcagattcctggagagacagacctacaacatccccggcggcagacacaagctgaaccccagccagaacgtggccgtgagagaggccctggagaagcccttcaccgtgatccagggcccccccggcaccggcaagaccatcgtgggcctgcacatcgtgttctggttccacaagagcaaccaggagcaggtgcagcccggcggcccccccagaggcgagaagagactgggcggcccctgcatcctgtactgcggccccagcaacaagagcgtggacgtgctggccggcctgctgctgagaagaatggagctgaagcccctgagagtgtacagcgagcaggccgaggccagcgagttccccgtgcccagagtgggcagcagaaagctgctgagaaagagccccagagagggcagacccaaccagagcctgagaagcatcaccctgcaccacagaatcagacaggcccccaacccctacagcagcgagatcaaggccttcgacaccagactgcagagaggcgagctgttcagcagagaggacctggtgtggtacaagaaggtgctgtgggaggccagaaagttcgagctggacagacacgaggtgatcctgtgcacctgcagctgcgccgccagcgccagcctgaagatcctggacgtgagacagatcctggtggacgaggccggcatggccaccgagcccgagaccctgatccccctggtgcagttcccccaggccgagaaggtggtgctgctgggcgaccacaagcagctgagacccgtggtgaagaacgagagactgcagaacctgggcctggacagaagcctgttcgagagataccacgaggacgcccacatgctggacacccagtacagaatgcacgagggcatctgcgccttccccagcgtggccttctacaagagcaagctgaagacctggcagggcctgagaagaccccccagcgtgctgggccacgccggcaaggagagctgccccgtgatcttcggccacgtgcagggccacgagagaagcctgctggtgagcaccgacgagggcaacgagaacagcaaggccaacctggaggaggtggccgaggtggtgagaatcaccaagcagctgaccctgggcagaaccgtggagccccaggacatcgccgtgctgaccccctacaacgcccaggccagcgagatcagcaaggccctgagaagagagggcatcgccggcgtggccgtgagcagcatcaccaagagccagggcagcgagtggagatacgtgctggtgagcaccgtgagaacctgcgccaagagcgacctggaccagagacccaccaagagctggctgaagaagttcctgggcttcgtggtggaccccaaccaggtgaacgtggccgtgaccagagcccaggagggcctgtgcctgatcggcgaccacctgctgctgagatgctgccccctgtggagaagcctgctggacttctgcgaggcccagcagaccctggtgcccgccggccaggtgagagtgtgcagaagacccaccatgcccagctag

SEQ ID NO: 31340 - protein, 1030 aa, Artificial Sequence
  derived and/or modified sequence
MKIPNIGNVMNKFEILGVVGEGAYGVVLKCRHKETHEIVAIKKFKDSEENEEVKETTLRELKMLRTLKQENIVELKEAFRRRGKLYLVFEYVEKNMLELLEEMPNGVPPEKVKSYIYQLIKAIHWCHKNDIVHRDIKPENLLISHNDVLKLCDFGFARNLSEGNNANYTEYVATRWYRSPELLLGAPYGKSVDMWSVGCILGELSDGQPLFPGESEIDQLFTIQKVLGPLPSEQMKLFYSNPRFHGLRFPAVNHPQSLERRYLGILNSVLLDLMKNLLKLDPADRYLTEQCLNHPTFQTQRLLDRSPSRSAKRKPYHVESSTLSNRNQAGKSTALQSHHRSNSKDIQNLSVGLPRADEGLPANESFLNGNLAGASLSPLHTKTYQASSQPGSTSKDLTNNNIPHLLSPKEAKSKTEFDFNIDPKPSEGPGTKYLKSNSRSQQNRHSFMESSQSKAGTLQPNEKQSRHSYIDTIPQSSRSPSYRTKAKSHGALSDSKSVSNLSEARAQIAEPSTSRYFPSSCLDLNSPTSPTPTRHSDTRTLLSPSGRNNRNEGTLDSRRTTTRHSKTMEELKLPEHMDSSHSHSLSAPHESFSYGLGYTSPFSSQQRPHRHSMYVTRDKVRAKGLDGSLSIGQGMAARANSLQLLSPQPGEQLPPEMTVARSSVKETSREGTSSFHTRQKSEGGVYHDPHSDDGTAPKENRHLYNDPVPRRVGSFYRVPSPRPDNSFHENNVSTRVSSLPSESSSGTNHSKRQPAFDPWKSPENISHSEQLKEKEKQGFFRSMKKKKKKSQTVPNSDSPDLLTLQKSIHSASTPSSRPKEWRPEKISDLQTQSQPLKSLRKLLHLSSASNHPASSDPRFQPLTAQQTKNSFSEIRIHPLSQASGGSSNIRQEPAPKGRPALQLPDGGCDGRRQRHHSGPQDRRFMLRTTEQQGEYFCCGDPKKPHTPCVPNRALHRPISSPAPYPVLQVRGTSMCPTLQVRGTDAFSCPTQQSGFSFFVRHVMREALIHRAQVNQAALLTYHENAALTGK

SEQ ID NO: 31341 - DNA, 3093 bp, Artificial Sequence
  derived and/or modified sequence
atgaaaatccccaacatcgggaatgtcatgaacaagtttgagatactcggtgtcgtgggggagggagcttacggtgttgtgctgaaatgccgacacaaggagacccatgagattgtggccatcaagaagttcaaagatagtgaagagaatgaagaagtcaaggagactacactgcgcgagctgaaaatgctaaggacactgaagcaggagaatatcgtggagctcaaagaagccttcagacggagaggaaaactctacctcgtgttcgagtatgtggaaaagaacatgctggagctcctggaagagatgccaaacggcgtccctccggaaaaagtaaagtcttatatataccagctgattaaagctattcattggtgtcacaaaaatgatattgtgcatcgagatattaagcctgagaatctgttgatcagccacaacgatgttctgaagctttgtgattttggctttgccaggaacttgtctgaaggcaacaatgcaaattataccgaatatgtggccacccggtggtacagaagtcccgagttacttctgggcgctccatatggcaaaagcgtggacatgtggagtgtgggatgtattctcggagagctctctgacggacaacctttatttcctggggaaagtgaaattgatcagctgtttacgatccagaaggttctggggccgcttccctcagagcagatgaaattgttttattctaacccaaggttccacggactgagattcccggcggtaaatcaccctcagtccctggagaggcgctatcttggtatcctgaactccgtactgctcgatttaatgaaaaatctactgaagctggaccccgccgatcgttatctgaccgaacaatgtctgaatcatcccacctttcagacacagcggctgctggaccggtcaccatcccgtagtgctaagcgaaaaccatatcatgtcgaaagtagcactctgtcgaataggaatcaggcaggtaagtctacagctctccagtcacatcataggtctaacagcaaagatatccaaaatttgagcgtcggcttgccaagggccgacgagggcttgcccgctaatgagagtttcctaaacggaaatttggccggtgccagtctctccccgctgcatacaaaaacgtaccaggccagttcccagcccggctcaacaagcaaggatttgacaaacaacaacatccctcatctgcttagtcccaaagaggctaagtcaaagactgagttcgattttaatatcgatcctaagcctagtgagggaccagggacgaagtacctaaagtccaactcccgctctcagcagaaccgtcatagttttatggagtcctcacaatctaaggctggtactctgcaacccaacgagaagcaaagtcggcactcatatatagacaccattcctcagtcctctcgctcaccatcttacagaacgaaagctaaatcccacggagctctctccgacagcaaatcggtgtcaaacctgtccgaggcacgggcccagattgcggaaccttcaacgagtaggtacttcccatcaagttgtttagaccttaactccccaacttctccgacccctacccggcacagtgacaccaggactctgttgtcacccagtggccggaacaatcgtaacgaaggtaccctggatagcaggagaaccaccactaggcacagtaagaccatggaagaattaaagttgcccgagcatatggacagtagtcatagtcattcacttagcgcgcctcacgagtctttctcttacggactgggatacacctccccattctcttcacagcagcgcccccaccggcacagtatgtatgtgaccagagataaagtgcgcgcgaagggtctcgacggctctttaagcattggacaggggatggccgcaagagccaactcccttcagcttctcagtccccaacccggcgagcagcttcctccggaaatgaccgtagcgagaagttcggttaaagagacctcgcgggaaggaacatcttcattccatactaggcagaaaagtgaagggggcgtttatcacgatccccactccgacgatggtaccgctcccaaagaaaataggcatctctataatgaccctgtgcctagaagggtggggtctttctaccgagtgccgtcaccacgcccagacaactcttttcacgagaataacgtgtcgacccgggtcagtagtctgccttctgagtcttcgagcggcactaaccactcaaagagacaaccggcctttgatccttggaagagcccggagaatattagtcattctgaacagctgaaggaaaaggagaagcaaggattttttagaagcatgaaaaagaaaaaaaaaaaatctcagactgtgcccaactcagatagccccgatctgctcacattgcagaaatctatccactcagcatcgacacccagcagccggccgaaagaatggcggccagaaaagattagcgacctgcaaactcagagccagcccctcaagtcactgaggaagctgctgcacctgagttccgcttcgaaccatcctgccagctctgacccaaggttccagccactcactgctcaacagaccaagaactccttctccgagatccgtatccatcccttatcccaggcgagcggggggtcctctaacattcgacaggagcccgctcccaaaggccgaccggcccttcaactgcccgatgggggttgtgacggtcgacggcaacggcaccatagcggcccacaggatcgccggtttatgctccgtactaccgagcaacagggcgagtacttctgctgcggtgacccaaaaaagccccataccccttgcgtccccaatcgcgccctccacaggcctatcagcagcccagctccataccccgtcctgcaggtgcggggcacatccatgtgcccgaccctgcaggtcaggggtactgatgctttttcctgtcccacccagcagtctggattttcgttttttgtaagacacgtgatgagggaggccctgattcaccgagcacaggtgaatcaggcggcacttttgacctatcatgagaacgcagcgctgaccggcaaatag

SEQ ID NO: 31342 - DNA, 3093 bp, Artificial Sequence
  derived and/or modified sequence
atgaagattcctaatatcggaaacgttatgaacaaattcgagattctgggcgtggttggggaaggagcctacggagttgtgctcaagtgtcggcacaaagagacccatgagattgtcgcgatcaagaagttcaaggatagtgaagagaacgaggaggtaaaagaaactaccctgcgtgagttaaaaatgctgaggactttaaagcaagagaatattgtagagctgaaagaggcctttaggcggagaggcaaattatatttggtcttcgagtatgtggagaaaaatatgcttgagctgctcgaagaaatgcccaatggcgtgcctcctgagaaagtgaaatcgtacatttatcagctgatcaaggcgatacattggtgtcacaagaacgatatcgttcaccgtgatatcaagccagaaaatctgctgatctcccacaacgatgtgcttaagctttgcgattttgggttcgctcgaaatttgagcgaaggcaataacgcaaattacacggagtacgtggctacgcggtggtatcggtctccagaactgctgctcggtgccccttatggaaagagtgtcgacatgtggagcgtcgggtgtatcctcggtgaactaagcgacggacagccgctattcccaggggaaagcgaaatagaccagctttttactattcagaaagtgctcggaccactaccaagcgagcagatgaagctattctactccaatccccggttccatggactacgcttcccagccgtgaaccatccacaaagcctggagcgccggtacctgggaatactgaatagcgtgttactggatctaatgaagaatttactcaagctcgacccagcagataggtatctgaccgaacagtgcctgaatcatcccactttccagacacagcgactgctcgaccgttcccccagccgaagcgccaagcggaaaccttaccacgtcgagtcttccacactgtctaaccgtaatcaggcaggcaaatctacagcacttcagagccatcaccggtctaattctaaagatatccagaatctctcagtggggctgcctagggcagacgagggcctgcccgccaatgagtcctttttaaacggcaacttagctggtgcctcactcagtccactccataccaagacttatcaggcctcttcccaacctggctcaacgagcaaagacctaaccaataacaacattcctcacctcctgtctcccaaggaggccaaaagtaagacagagtttgattttaatatagaccccaagccctctgagggacctggaaccaagtaccttaaatcgaactctagatcacagcaaaatcgccattcatttatggaatctagtcagagtaaagcgggcaccctgcagccaaacgaaaagcagagccggcattcctacatagacaccatcccccaatcctcccgatcccccagctatcgcacaaaagccaagagtcatggagctctaagcgatagtaagtccgtcagtaacctgtctgaggcccgtgcccagattgcagaaccctccaccagccgatacttcccatctagctgcctggacctgaattctccgacttcccccacaccaacgaggcattccgacaccaggactttgcttagcccctcgggacggaacaatcgtaatgagggaaccctggactcaaggcggacgaccacacgccatagtaaaaccatggaggagctgaaactgcctgaacacatggacagcagtcattcgcactcgctgagcgctccccacgaaagcttttcctacggtcttggctacacttctccctttagtagtcaacagaggcctcaccggcacagcatgtatgtcacaagagataaggtgcgtgcaaaaggattggacggttcgctgagtatcggacaggggatggctgctagggcaaatagtctccagctgctttctcctcagccaggcgaacagctgccgccagaaatgacagtggcgcggtcttctgtaaaggaaacttcacgggagggcacctctagctttcacactaggcagaagtcagaaggaggagtataccacgatccccactctgatgacggtaccgccccgaaggagaaccgtcacctatacaatgatccagtgccccggagagtcggctcattttaccgagtcccatccccccgcccggacaatagctttcatgagaacaatgtgtccacccgagtgagcagcctcccgagtgagtcatcctccggtaccaatcactccaagaggcagccggcgtttgatccatggaagtcgccagaaaacattagccatagcgagcagctgaaagaaaaagaaaaacagggattcttcagatccatgaagaaaaaaaagaagaaatcacagaccgtgcccaatagtgactcacccgacttactaacattgcagaagagcatccactcggccagtactccgtcatctaggccaaaggagtggcgccccgaaaagatctcagacctgcagacacagagtcaaccgcttaagagcctcagaaaattactccacctctctagtgccagtaaccatccggcttcttctgacccgaggtttcagccactcacagcgcagcagactaagaattcattcagtgagattagaatacatccactgtcacaggcctctgggggtagtagcaacattagacaggagccagcacccaaggggcggcccgctctgcagctccccgatggtggatgcgacggtagaaggcagcgtcaccattccggcccccaggaccggcggtttatgttacgcaccacggagcagcaaggggagtatttttgttgcggggatcccaaaaaacctcatacaccgtgcgtacccaaccgcgcgctccaccgtccaatcagcagccctgccccctaccctgtgctccaggtccgcggcacctctatgtgccccaccctgcaggttcgcggtacagatgcgttcagctgtcctactcagcagagcggctttagcttttttgtacgtcatgttatgagagaggccctgatccatcgagctcaggtgaatcaggcagcactgctgacatatcatgaaaacgcagctctaaccggcaagtag

SEQ ID NO: 31343 - DNA, 3093 bp, Artificial Sequence
  derived and/or modified sequence
atgaagatccccaacattggaaatgtgatgaacaagtttgagatcctgggcgtggtgggggagggcgcctacggcgtggtgctgaagtgccgccacaaggagacccatgagatcgtggccatcaagaagttcaaggacagtgaagaaaatgaggaggtgaaggagaccaccctgcgggagctgaagatgctgcggaccctgaagcaggagaacatcgtggagctgaaggaggccttcagaagaagaggcaagctgtacctggtgtttgaatatgtggagaagaacatgctggagctgctggaggagatgcccaatggagtgcccccagagaaggtgaagagctacatctaccagctgatcaaggccatccactggtgccacaagaatgacatcgtgcaccgggacatcaagccagagaacctgctgatcagccacaatgatgtgctgaagctgtgtgactttggatttgccaggaacctgtctgagggcaacaatgccaactacacagaatatgtggccacccgctggtaccgcagccctgagctgctgctgggcgccccctacggcaagtctgtggacatgtggagcgtgggctgcatcctgggggagctgagtgatggccagcccctcttccctggagagagcgagattgaccagctgttcaccatccagaaggtgctgggccccctgcccagcgagcagatgaagctgttctacagcaacccccgcttccacggcctgcgcttccctgctgtgaaccacccccagagcctggagcggcgctacctgggcatcctgaacagcgtgctgctggacctgatgaagaacctgctgaagctggaccctgctgaccgctacctgacagagcagtgcctgaaccaccccaccttccagacccagaggctgctggacaggagccccagccgcagcgccaagaggaagccctaccacgtggagagcagcaccctgagcaacagaaaccaggccggcaagagcacagccctgcagagccaccacaggagcaacagcaaggacatccagaacctgtctgtgggcctgcccagggcagatgagggcctgcctgccaatgaaagcttcctgaatggaaacctggccggggccagcctgagccccctgcacaccaagacctaccaggccagcagccagcccggcagcaccagcaaggacctgaccaacaacaacatcccccacctgctgagccccaaggaggccaagagcaagacagaatttgacttcaacatcgaccccaagcccagcgagggccctggcaccaagtacctgaagagcaacagccgcagccagcagaacagacacagcttcatggagagcagccagagcaaggccggcaccctgcagcccaatgagaagcagagccgccacagctacatcgacaccatcccccagagcagccgcagccccagctaccgcaccaaggccaagagccatggagccctgagtgacagcaagtctgtgagcaacctgtctgaggcccgggcccagattgctgagcccagcaccagccgctacttccccagcagctgcctggacctgaacagccccaccagccccacccccaccaggcacagcgacaccaggaccctgctgagccccagcggcaggaacaacagaaatgaaggcaccctggacagcaggaggaccaccaccaggcacagcaagaccatggaggagctgaagctgcctgagcacatggacagcagccacagccacagcctgagcgcccctcatgagagcttctcctatggcctgggctacaccagccccttcagcagccagcagaggccccaccgccacagcatgtatgtgacccgggacaaggtgcgggccaagggcctggatggcagcctgagcatcggccagggcatggccgcccgggccaacagcctgcagctgctgagcccccagcctggagagcagctgcccccagagatgacagtggcccggagctctgtgaaggagaccagccgggagggcaccagcagcttccacacccggcagaagtctgagggcggcgtgtaccatgacccccacagtgatgatggaacagcccccaaggaaaatagacacctgtacaatgaccctgtgccccggcgggtgggcagcttctacagagtgcccagccccaggccagacaacagcttccatgaaaataatgtgtccaccagggtgagcagcctgcccagcgagagcagcagcggcaccaaccacagcaagaggcagcctgcctttgacccctggaagagccctgagaacatcagccacagcgagcagctgaaggagaaggagaagcagggcttcttccgctccatgaagaagaagaagaagaagagccagacagtgcccaacagcgacagcccagacctgctgaccctgcagaagagcatccacagcgccagcacccccagcagccggcccaaggagtggaggcctgagaagatcagtgacctgcagacccagagccagcccctgaagagcctgaggaagctgctgcacctgagcagcgccagcaaccacccagccagcagtgacccccgcttccagcccctgacagcccagcagaccaagaacagcttcagcgagatccgcatccaccccctgagccaggccagcggcggcagcagcaacatccggcaggagcccgcccccaagggccgcccagccctgcagctgcctgatggcggctgtgatggaagacggcagaggcaccacagcggcccccaggaccggcgcttcatgctgcggaccacagagcagcagggcgagtacttctgctgcggggaccccaagaagccccacaccccctgtgtgcccaacagagccctgcaccggcccatcagcagccctgccccctaccctgtgctgcaggtgcggggcacctccatgtgccccaccctgcaggtgcggggcacagatgccttcagctgccccacccagcagagcggcttctccttctttgtgagacatgtgatgagggaggccctgatccaccgggcccaggtgaaccaggccgccctgctgacctaccatgaaaatgctgccctgaccgggaagtag

SEQ ID NO: 31344 - DNA, 3093 bp, Artificial Sequence
  derived and/or modified sequence
atgaagatccccaacatcggcaacgtgatgaacaagttcgagatcctgggcgtggtgggggagggcgcatatggtgtcgtcctgaagtgcaggcacaaagagacacacgaaatcgtagcgatcaagaagtttaaggattcggaagagaatgaagaagtgaaagaaaccacactgagggagctcaagatgttaagaacgttgaaacaggaaaatattgtggaactcaaggaagcgtttcgcaggagggggaaactatatctggtgttcgaatatgttgaaaaaaacatgctggaactgctggaggagatgccaaatggtgtgccccccgagaaggtgaaaagctacatttaccagctaatcaaggccatccactggtgccacaagaatgacatagtacacagggacataaaaccggagaatcttctgatctcacacaatgatgttctgaagctgtgcgactttggattcgctaggaatttgtctgaggggaacaacgccaattacactgaatacgtggccacgagatggtacagatccccagagctgctgcttggcgccccctacggcaagagtgtagacatgtggtccgtcggctgcatcctgggagagctctcagacggacagccgctgtttccaggagagagcgagattgatcagctttttactatccagaaggtcctgggccccctgccttcggagcagatgaagttgttctattctaatccacggtttcatggccttcggtttcccgcagttaatcacccacaaagcctggaacggcggtatcttgggattctgaactcagtcttgttagacctgatgaagaatcttctaaagctcgaccctgcggacaggtaccttacagagcagtgcttaaatcatcccacattccagacacagaggctgctggatcgctcgccatctcgctccgcgaagaggaagccttatcacgtcgagtccagtacactctcaaacagaaaccaggctggaaaatcaaccgctctgcagagccatcacaggagcaatagcaaagatatccagaacctgagtgtgggcctgccacgtgctgacgagggtctccccgccaacgagtcattcctcaacggtaaccttgctggggcttccctttcacctctgcataccaagacataccaggcttcgtcccagcccggatcaacgtctaaggatctgaccaacaacaacatcccacatttgttatccccaaaggaagccaaatccaaaacggagtttgactttaatatagatcccaaaccctccgaaggccccggaaccaagtatctgaaatctaattctcggtctcaacagaataggcactcctttatggagagctctcagtctaaggcgggtactctacaaccaaacgagaagcaaagtcgacactcttacattgatacaattccgcaatcaagcaggtcaccgtcttacaggaccaaagccaaatcccatggggccctatcagactctaaaagtgtgagcaatcttagcgaggctagagcacaaatcgcagaaccctctacctcccgctactttccttctagctgcctggatctcaattcccccactagcccaactcctaccagacactctgatacgcggactctgctgtctccttccggaaggaacaatcggaatgaaggcaccctggattcgcggaggaccacaacccgccacagcaagaccatggaggaattaaaactgccagagcacatggattccagccattcccattccctgtccgctccacatgaatccttctcttatggactggggtacactagccccttcagtagccagcagagaccccaccgacattccatgtatgtgacccgagacaaggtacgagcaaaagggttggacggctccctgagtatcggacagggaatggcagccagggcaaactcactccagctccttagcccgcagccgggcgagcagctcccaccagagatgacagtagccagatcatcagttaaagagaccagtcgggaaggtacatcctcatttcacactaggcaaaagagtgagggaggggtctaccacgatcctcactcagatgacgggactgcccccaaagagaatcgccacctgtataacgatcccgtccctcgccgtgtcggctcattctatcgcgtcccatcccctcgacccgacaactcctttcacgaaaacaatgtctcaactagggtgtcatccctgccatcagagtcctcctccgggaccaaccatagtaaaagacaacctgctttcgatccctggaaatctcccgaaaatatatctcactccgaacagctgaaggagaaggagaagcaaggattctttaggtccatgaaaaaaaaaaagaagaagagtcagacagttcctaacagcgactcacccgacctcctcacgctgcagaaaagtatccactctgcttctacaccatctagccgaccaaaagagtggcggcctgaaaagatctccgatctgcagactcagtcccagccactcaagtctttgcgcaaactccttcacctttccagcgccagtaatcacccagcttcatcagatccccgcttccaacccctgacagcccagcagactaagaacagtttcagtgagatccggatacaccccctgagccaagcttccggaggtagtagtaacatcaggcaagagccggcacctaagggacgcccggccctccagttacccgacggtggatgtgacggacgcaggcagagacaccactctggaccccaggatcgccggtttatgctgaggacaaccgaacagcagggggaatatttttgttgtggagatccaaaaaaaccacacaccccctgcgtgcctaatagggcacttcaccgtccaatcagttcacctgcgccctatcccgtcctgcaggtgcgcggcacatccatgtgtccaaccttgcaggtccgaggcactgatgccttcagctgcccaacccagcagagcggattctctttcttcgttcggcacgtgatgcgcgaagcgctcatccatagagctcaggtcaaccaggcagccctcctgacctaccacgaaaacgctgctctcaccgggaaatag

SEQ ID NO: 31345 - DNA, 3093 bp, Artificial Sequence
  derived and/or modified sequence
atgaagatccccaacatcggcaacgtgatgaacaagttcgagatcctcggcgtggtgggcgaaggggcgtacggagtagtgcttaagtgcaggcataaggaaacacacgagattgtcgccattaaaaagtttaaggatagcgaagagaatgaagaggtgaaagagactacgctgcgagaactgaagatgcttcggactctgaagcaggagaacattgtcgagctgaaggaggcgttcagaaggcgcggaaaactataccttgtgtttgaatatgtggagaaaaatatgttagaactgttagaagagatgccaaacggggtgcctccagaaaaagtcaagagctatatttaccagctgatcaaagccattcattggtgccacaagaacgacattgtgcatagagatattaaacccgagaacctgctcattagccacaacgatgttttgaaattgtgtgactttggattcgccaggaacctgtcggagggtaataacgctaactataccgaatacgtcgctacaagatggtaccgatccccggaactgttactcggcgcaccgtatggcaagagcgtggatatgtggtcagtgggctgcattctgggggaactgtccgacggacaacctctgtttccaggcgaaagtgagatcgatcagctcttcaccattcaaaaagtgctaggcccgttgcctagtgaacagatgaagttgttttatagtaatccacgattccatggtctgcgatttccagccgttaatcacccacagagcctggaaaggcgctacctgggcattctcaattcagtgttattagacctcatgaagaacctgctgaaactcgatcccgccgaccgctacctgaccgaacagtgtctaaatcacccaacatttcagactcagcgcctgttggatagatccccctctcgatcagcaaagcgcaagccttaccacgtagaatcgtccacactcagcaataggaatcaggccggcaagagcacggcccttcagtcacatcacagatctaactccaaagatatccagaacctctcggtaggactgcctcgagctgatgagggtctgcctgcgaatgagagtttcttgaacggcaatctggctggagcaagtctgagcccgctccacacaaagacctaccaggcaagctcgcaaccaggttctacttctaaggacctgaccaataacaatatcccacacttactaagtcctaaagaggcaaaatccaagactgaatttgactttaatattgaccctaagccctcggaggggccgggcactaaatatctgaaaagtaacagtaggtctcaacagaataggcacagcttcatggaatcatcgcagagcaaggccgggacccttcagccaaacgaaaagcagtctcggcactcatacatcgacaccatcccccagtcttcccggtccccttcgtatcggacgaaggcaaagtcccacggggcattatcagactccaaaagtgtctctaacctctccgaggccagggctcagatagcagagccaagtacgagccggtattttccctcctcgtgcttagatcttaactctcccacatcccccactcccacccgtcattccgacacccgaaccctgctctcgccctcaggccgcaataaccggaatgaaggcactctggatagcaggagaacaacgaccagacacagcaagacaatggaggagttaaaactgccagagcacatggattcaagtcattctcattcccttagcgctccgcatgaaagcttctcatacggattaggttatacatcacctttttcttctcagcagcggccgcaccggcatagcatgtacgtgaccagggacaaggtccgcgcaaaagggctcgacggaagcctcagcatcggtcaaggtatggctgcccgagctaattccctgcagttgttgtccccgcagcccggagagcagcttcctccagaaatgactgtggctaggtcaagcgtgaaagagaccagcagggagggaaccagcagctttcacactcgccaaaagtctgaaggtggagtttaccatgatccccactccgacgacggtaccgctcctaaggagaatcgacatctgtataatgatcctgtcccacgccgtgttggcagcttttaccgtgtaccctcaccccggccagacaatagttttcatgagaacaatgtttccacccgcgtctcctccctgccatccgaatccagttcaggaaccaatcactccaaaagacagccagcttttgacccctggaagtcacccgagaacatatcgcattccgagcagctgaaggaaaaggagaaacaggggttcttcaggtccatgaagaagaaaaagaagaagagccagaccgtacctaatagcgatagtcccgatcttctcacccttcagaaaagtattcactcagcatctaccccttcctctcgtcctaaagagtggcgtcccgagaagatatctgacctgcagactcagtctcagcccctaaaatctcttcgtaaattgctgcacctctcatccgcttcaaatcaccctgcttcaagtgacccacgattccaacccctgaccgcccagcagacaaaaaactctttttccgagattcgcattcacccgctctctcaggcttcaggggggtctagcaatataagacaggaacccgcccccaagggtcgacccgctctccagcttccggatggaggctgcgatgggcgcagacagaggcaccactctggccctcaggacaggagattcatgcttcgcactaccgaacagcagggggaatatttttgttgcggggaccccaagaaacctcatactccatgtgtgccgaaccgagcgctgcaccgaccaatctcttcccccgccccctaccccgtgctgcaggtaagaggaaccagtatgtgtccaacactccaggtgagagggactgatgctttcagctgtccaacacaacagtcgggtttcagcttctttgtcagacacgtcatgagggaagctcttatccatagggctcaggtcaaccaggccgccttactgacctatcacgagaatgcggcgctgaccggcaagtag

SEQ ID NO: 31346 - DNA, 3093 bp, Artificial Sequence
  derived and/or modified sequence
atgaagattccaaatattggcaacgtaatgaataaattcgagattctgggtgtggttggcgaaggggcttacggcgtcgtgttgaagtgtcgtcataaagagactcacgagatcgttgccatcaaaaagttcaaagacagcgaagaaaatgaggaggtcaaagagacaaccctgcgggagttaaaaatgctgaggacgctgaagcaggagaatattgtggagttaaaagaggccttcagaagaaggggaaaactctacctggtgtttgaatatgtcgagaaaaacatgctcgagttactggaggaaatgcccaacggtgtccctcccgagaaagtgaagagttatatttaccagctcatcaaggcgatccactggtgtcataagaacgacattgttcatagggatatcaaacccgagaatctgctcatctcccacaatgacgtgttaaaactttgtgacttcgggtttgctagaaatttgagcgaaggaaataatgctaattacactgagtacgtcgctacacgttggtaccgatcccccgaactactcctgggtgcaccttacggtaagagcgtcgatatgtggtccgttggctgcattttaggggagctcagtgatggacagccgctcttcccaggagagagcgagatcgaccagctcttcaccatccagaaggttttgggccctctgcccagcgagcaaatgaagctgttctacagcaatcccaggtttcatggactccgctttcctgcagtcaaccatccacaatccctggaacggcgttatctggggatcttgaactcggtgctcctcgacttaatgaagaatcttctaaagcttgacccagcagaccggtatttgaccgagcagtgcctcaatcatcccacattccagacccagcgcctcctcgatcgttctccttcacggtctgccaagagaaaaccatatcacgtggagtcgtcaacactcagtaatcgcaatcaagctgggaaaagtacagccctacagagtcatcaccgatctaacagcaaggacatacaaaacctgtcagtgggcctgcctagggccgacgaaggcctcccggctaacgaatctttcttgaacggaaacttggccggagcatctctctcccccctgcacactaaaacatatcaggcctctagccagccgggaagcacctctaaggacctgacaaacaataatatcccgcatctactgtctccgaaggaggcaaaatcaaagacagagttcgattttaatatcgaccctaagccaagcgagggacccggaactaagtatctgaaatccaattctcgcagccaacaaaatcgacatagttttatggagtccagtcagagcaaggcaggtactctgcagccaaacgagaaacagagccggcactcatacatcgataccataccccaatccagtcgcagcccgagttaccggacgaaggctaagtctcatggcgcactgagtgattcaaagtccgtgtctaacctgagtgaagccagagcccaaatcgcggagccatccacttccaggtattttccctcctcttgtctggatttgaactcacccacatcacctacacctacccgtcatagcgacaccaggacactgctaagcccctcaggccgaaataaccgtaatgaaggcaccttagacagtcgacgcaccaccactcgacattccaagacgatggaggaactcaaactcccagagcacatggattcctcccatagtcattcactctccgccccacatgagagcttcagttacggtttgggctatacctctcccttctcatcccagcagagaccccaccggcactccatgtatgtgaccagagataaggtaagagccaaggggctggacggcagcctgagcatcgggcaagggatggccgctagagcaaactctctgcagctcctgagccctcagccgggagagcagttgccacctgaaatgacagtcgccagatcctcggttaaggaaacctcaagagagggcacgtcctccttccacacccgtcagaagtccgagggaggagtctatcacgatccacacagtgacgatggtacggctcctaaggagaaccgtcacctgtacaacgaccctgtcccaagaagggttggcagcttctatcgggtgcctagtcctaggccagacaactccttccacgaaaataacgtaagcactagagttagctctttgccctcagaatctagtagcggtaccaatcatagtaaacgtcagccggctttcgacccatggaagagccctgagaacatctcccattctgagcaacttaaagaaaaggagaagcagggctttttccgttccatgaagaaaaagaagaaaaagtcgcagaccgttccaaacagtgactcaccagacctgctgaccttgcagaagagtattcattctgcttccacccccagctccaggcctaaagagtggagacccgaaaagatctctgatctacaaacgcagtcacaacctctgaagagcctaaggaaattattacacctctcatcagcgagcaatcaccctgctagcagcgatccccgttttcagccactgaccgcacaacagacaaagaattctttcagtgagattcggatccaccccctgtcgcaagctagtggcggttcatccaacattcgccaggaacccgctccaaagggcaggcctgctttgcaattaccagacggtggttgtgacggtagacggcagaggcaccacagcggtccgcaggatcggcgtttcatgctaagaacaactgagcaacagggagagtatttttgttgcggcgatcccaagaaaccccacacaccttgtgtgccaaatcgcgcactccatcgaccaatcagctcccctgcgccataccctgttttgcaagtacgagggaccagtatgtgtcccacactccaagtccggggtaccgatgcattctcttgcccgacccagcaatccgggttttcatttttcgtgaggcacgtgatgcgggaggccttgatccatagagctcaagtgaaccaagccgcacttctgacgtatcatgagaatgcggctctcacaggcaagtag

SEQ ID NO: 31347 - DNA, 3093 bp, Artificial Sequence
  derived and/or modified sequence
atgaaaattccaaatatcggtaacgtgatgaacaagttcgagattcttggagtcgtgggggaaggcgcttacggcgttgtgctcaagtgtagacataaagagacccatgaaatcgtcgccatcaaaaaattcaaagacagcgaggaaaatgaggaggttaaggagaccacactgcgagagttaaaaatgctgcgcactcttaagcaggagaatattgtggagttgaaggaggctttccgacggaggggcaagttgtacctcgtgtttgagtacgtcgagaagaacatgttggaacttttggaagagatgccgaacggagtgccccctgaaaaagtgaagtcatatatctaccagcttattaaggcgatccactggtgccacaagaacgatatcgtgcatcgagacatcaaaccggagaatcttctgatttcacacaacgacgttctgaaattgtgtgatttcggttttgcacggaacctttccgagggcaataacgctaattacactgaatatgtcgccacaaggtggtatcggtcaccagaactgctgctaggggcaccttacggaaagtcagtggacatgtggagcgtgggatgcatcctcggggaactttctgacggccagccactatttccaggtgagtcggagattgaccagctatttacaattcagaaggttctggggcctcttccctctgagcagatgaaattgttctattcgaaccccagattccatggcctccgtttcccagcagtcaatcacccacagagtttggagcgtagatatcttgggatattgaactcggtgctcctcgatttaatgaaaaacctcctgaaactcgaccccgctgataggtacctgacggagcaatgtctaaatcatccaacattccagacgcaacggctgctggatcggtccccatcgagaagcgccaaacgaaaaccctatcacgtggaaagctcaacactgagcaacagaaatcaagcgggaaagtccaccgcattgcagtcacaccatcgctctaattccaaagacatacagaacctgtcggtgggcctgccaagagccgacgagggcctgcctgctaatgagtcattcttgaatggcaacctggccggagcaagcttgtccccattgcacacaaaaacgtatcaggctagctcacaacctggttccacgagcaaagacctaaccaacaacaacatcccgcatctgctaagcccaaaggaagctaaaagcaaaacagagtttgatttcaacatcgatcccaagccgtctgagggcccaggaaccaaatatttgaagtccaattctaggagccagcagaatcgacacagctttatggagtcctcacagtccaaagctggaactctccagcctaacgaaaagcagtcccggcactcttatatagacactattccccagtcaagccggtctccgagctatcgcacgaaagccaagagccacggcgctctgagcgattccaaatcggtgtcaaatctgagcgaggccagagcccagatcgcagagccctctacatctaggtacttcccttccagttgccttgatctgaactcacctacctcacccactccaactaggcactcagatacgcgtacactcctttccccatcaggaagaaacaacagaaacgaagggactctcgactcccggaggaccacaacccgccacagtaagacaatggaggagcttaagttgcccgagcatatggattcatcccactcacacagcctatcagctccacacgaaagcttcagctacgggctgggatacacctctccattcagctcccaacagagaccccatcggcattccatgtacgtgactcgggataaggttagggccaaggggctggacggcagcctctcgataggccagggcatggctgccagagccaacagtcttcagctcttatctccacagccgggagagcagctgccgcctgagatgacggtggccagatccagcgtcaaggagacctctcgcgaagggacgtccagctttcatactaggcagaagagtgaaggcggtgtgtatcacgatccccacagcgacgacggcaccgcacctaaagagaacagacatctctacaatgacccggtccctcgacgggtggggagcttctatcgggtcccctccccacggcctgataacagttttcacgagaataatgtgagtactagggtcagcagcctcccatccgagtcctcctctggcaccaaccattccaaaaggcaacctgccttcgatccgtggaagtcaccggagaacatttcacactccgagcagctcaaagagaaggagaagcaggggttttttaggtctatgaagaaaaagaaaaagaagtctcagaccgtgccaaatagcgactctccggatctcctgaccctccagaagagcatacattctgccagcacaccctcctcaagaccaaaagaatggagacctgagaagatctccgatctccagacccagtcccagcctctaaaaagtctgagaaagctgctgcatctaagctctgcttcgaatcaccccgcatcctcggaccccaggttccaaccattaacagctcagcagacgaaaaattccttctctgaaatccgcatccaccctctcagtcaggcctctgggggtagctcaaatattcgccaggaaccagcccctaagggtaggcctgccttacaattacctgatggaggatgcgacggcagaaggcagagacatcacagcgggccacaagaccggaggtttatgttacggaccactgagcagcagggcgagtatttttgctgtggagacccaaagaagccccacaccccatgtgttcctaacagggcccttcacagacctattagtagccctgccccatacccagttttacaggttcgtggcaccagcatgtgccccacgttgcaggtgagaggcactgatgcttttagctgtcctacccagcagtccggatttagctttttcgtgcgccacgtcatgcgggaagctctgattcaccgcgcacaggtgaatcaggccgcattactgacataccatgaaaatgccgctctgacgggcaagtag

SEQ ID NO: 31348 - DNA, 3459 bp, Artificial Sequence
  derived and/or modified sequence
acctcaggactctttagagctctgagtgagtggggtgggggagttggaggaggaagaccctacaggaagttgagctgtactctccaacaggcgagcacatggtcgtctcctctctcccttcagggagtcatttaatacttcatgattagaacaaatatgtgaaagttcccaccaaccagtgagaatttcttccttcagacggttttggatcttactgcacagctttctgagaagttcttttggtgccatgttttgtggcttgcatcaaaagaggagtttgtcttcatgaagattcctaacattggtaatgtgatgaataaatttgagatccttggggttgtaggtgaaggagcctatggagttgtacttaaatgcagacacaaggaaacacatgaaattgtggcgatcaagaaattcaaggacagtgaagaaaatgaagaagtcaaagaaacgactttacgagagcttaaaatgcttcggactctcaagcaggaaaacattgtggagttgaaggaagcatttcgtcggaggggaaagttgtacttggtgtttgagtatgttgaaaaaaatatgctcgaattgctggaagaaatgccaaatggagttccacctgagaaagtaaaaagctacatctatcagctaatcaaggctattcactggtgccataagaatgatattgtccatcgagatataaaaccagaaaatctcttaatcagccacaatgatgtcctaaaactgtgtgactttggttttgctcgtaatctgtcagaaggcaataatgctaattacacagagtacgttgccaccagatggtatcggtccccagaactcttacttggcgctccctatggaaagtccgtggacatgtggtcggtgggctgtattcttggggagcttagcgatggacagcctttatttcctggagaaagtgaaattgaccaactttttactattcagaaggtgctaggaccacttccatctgagcagatgaagcttttctacagtaatcctcgcttccatgggctccggtttccagctgttaaccatcctcagtccttggaaagaagataccttggaattttgaatagtgttctacttgacctaatgaagaatttactgaagttggacccagctgacagatacttgacagaacagtgtttgaatcaccctacatttcaaacccagagacttctggatcgttctccttcaaggtcagcaaaaagaaaaccttaccatgtggaaagcagcacattgtctaatagaaaccaagccggcaaaagtactgctttgcagtctcaccacagatctaacagcaaggacatccagaacctgagtgtaggcctgccccgggctgacgaaggtctccctgccaatgaaagcttcctaaatggaaaccttgctggagctagtcttagtccactgcacaccaaaacctaccaagcaagcagccagcctgggtctaccagcaaagatctcaccaacaacaacataccacaccttcttagcccaaaagaagccaagtcaaaaacagagtttgattttaatattgacccaaagccttcagaaggcccagggacaaagtacctcaagtcaaacagcagatctcagcagaaccgccactcattcatggaaagctctcaaagcaaagctgggacactgcagcccaatgaaaagcagagtcggcatagctatattgacacaattccccagtcctctaggagtccctcctacaggaccaaggccaaaagccatggggcactgagtgactccaagtctgtgagcaacctttctgaagccagggcccaaattgcggagcccagtaccagtaggtacttcccatctagctgcttagacttgaattctcccaccagcccaacccccaccagacacagtgacacgagaactttgctcagcccttctggaagaaataaccgaaatgagggaacgctggactcacgtcgaaccacaaccagacattctaagacgatggaggaattgaagctgccggagcacatggacagtagccattcccattcactgtctgcacctcacgaatctttttcttatggactgggctacaccagccccttttcttcccagcaacgtcctcataggcattctatgtatgtgacccgtgacaaagtgagagccaagggcttggatggaagcttgagcatagggcaagggatggcagctagagccaacagcctgcaactcttgtcaccccagcctggagaacagctccctccagagatgactgtggcaagatcttcggtcaaagagacctccagagaaggcacctcttccttccatacacgccagaagtctgagggtggagtgtatcatgacccacactctgatgatggcacagcccccaaagaaaatagacacctatacaatgatcctgtgccaaggagagttggtagcttttacagagtgccatctccacgtccagacaattctttccatgaaaataatgtgtcaactagagtttcttctctaccatcagagagcagttctggaaccaaccactcaaaaagacaaccagcattcgatccatggaaaagtcctgaaaatattagtcattcagagcaactcaaggaaaaagagaagcaaggatttttcaggtcaatgaaaaagaaaaagaagaaatctcaaacagtacccaattccgacagccctgatcttctgacgttgcagaaatccattcattctgctagcactccaagcagcagaccaaaggagtggcgccccgagaagatctcagatctgcagacccaaagccagccattaaaatcactgcgcaagttgttacatctctcttcggcctcaaatcacccggcttcctcagatccccgcttccagcccttaacagctcaacaaaccaaaaattccttctcagaaattcggattcaccccctgagccaggcctctggcgggagcagcaacatccggcaggaacccgcaccgaagggcaggccagccctccagctgccagacggtggatgtgatggcagaagacagagacaccattctggaccccaagatagacgcttcatgttaaggacgacagaacaacaaggagaatacttctgctgtggtgacccaaagaagcctcacactccgtgcgtcccaaaccgagcccttcatcgtccaatctccagtcctgctccctatccagtactccaggtccgaggcacttccatgtgcccgacactccaggtccgaggcactgatgctttcagctgcccaacccagcaatccgggttctctttcttcgtgagacacgttatgagggaagccctgattcacagggcccaggtaaaccaagctgcgctcctgacataccatgagaatgcggcactgacgggcaagtgacttctgcaagcctgcggctggtcccaatgccctgaatcacctctctcatggaagaaccaattaacaccaatgaatcaacca

SEQ ID NO: 31349 - DNA, 3453 bp, Artificial Sequence
  derived and/or modified sequence
gagggcggggccggaggtttcgattagttgtctctgccgctggggaaggtaaagcggcgacggcgtcctcaggagctgtggggtcccctgctagaagtgggggactcggcgggggagtcatttaatacttcatgattagaacaaatatgtgaaagttcccaccaaccagtgagaatttcttccttcagacggttttggatcttactgcacagctttctgagaagttcttttggtgccatgttttgtggcttgcatcaaaagaggagtttgtcttcatgaagattcctaacattggtaatgtgatgaataaatttgagatccttggggttgtaggtgaaggagcctatggagttgtacttaaatgcagacacaaggaaacacatgaaattgtggcgatcaagaaattcaaggacagtgaagaaaatgaagaagtcaaagaaacgactttacgagagcttaaaatgcttcggactctcaagcaggaaaacattgtggagttgaaggaagcatttcgtcggaggggaaagttgtacttggtgtttgagtatgttgaaaaaaatatgctcgaattgctggaagaaatgccaaatggagttccacctgagaaagtaaaaagctacatctatcagctaatcaaggctattcactggtgccataagaatgatattgtccatcgagatataaaaccagaaaatctcttaatcagccacaatgatgtcctaaaactgtgtgactttggttttgctcgtaatctgtcagaaggcaataatgctaattacacagagtacgttgccaccagatggtatcggtccccagaactcttacttggcgctccctatggaaagtccgtggacatgtggtcggtgggctgtattcttggggagcttagcgatggacagcctttatttcctggagaaagtgaaattgaccaactttttactattcagaaggtgctaggaccacttccatctgagcagatgaagcttttctacagtaatcctcgcttccatgggctccggtttccagctgttaaccatcctcagtccttggaaagaagataccttggaattttgaatagtgttctacttgacctaatgaagaatttactgaagttggacccagctgacagatacttgacagaacagtgtttgaatcaccctacatttcaaacccagagacttctggatcgttctccttcaaggtcagcaaaaagaaaaccttaccatgtggaaagcagcacattgtctaatagaaaccaagccggcaaaagtactgctttgcagtctcaccacagatctaacagcaaggacatccagaacctgagtgtaggcctgccccgggctgacgaaggtctccctgccaatgaaagcttcctaaatggaaaccttgctggagctagtcttagtccactgcacaccaaaacctaccaagcaagcagccagcctgggtctaccagcaaagatctcaccaacaacaacataccacaccttcttagcccaaaagaagccaagtcaaaaacagagtttgattttaatattgacccaaagccttcagaaggcccagggacaaagtacctcaagtcaaacagcagatctcagcagaaccgccactcattcatggaaagctctcaaagcaaagctgggacactgcagcccaatgaaaagcagagtcggcatagctatattgacacaattccccagtcctctaggagtccctcctacaggaccaaggccaaaagccatggggcactgagtgactccaagtctgtgagcaacctttctgaagccagggcccaaattgcggagcccagtaccagtaggtacttcccatctagctgcttagacttgaattctcccaccagcccaacccccaccagacacagtgacacgagaactttgctcagcccttctggaagaaataaccgaaatgagggaacgctggactcacgtcgaaccacaaccagacattctaagacgatggaggaattgaagctgccggagcacatggacagtagccattcccattcactgtctgcacctcacgaatctttttcttatggactgggctacaccagccccttttcttcccagcaacgtcctcataggcattctatgtatgtgacccgtgacaaagtgagagccaagggcttggatggaagcttgagcatagggcaagggatggcagctagagccaacagcctgcaactcttgtcaccccagcctggagaacagctccctccagagatgactgtggcaagatcttcggtcaaagagacctccagagaaggcacctcttccttccatacacgccagaagtctgagggtggagtgtatcatgacccacactctgatgatggcacagcccccaaagaaaatagacacctatacaatgatcctgtgccaaggagagttggtagcttttacagagtgccatctccacgtccagacaattctttccatgaaaataatgtgtcaactagagtttcttctctaccatcagagagcagttctggaaccaaccactcaaaaagacaaccagcattcgatccatggaaaagtcctgaaaatattagtcattcagagcaactcaaggaaaaagagaagcaaggatttttcaggtcaatgaaaaagaaaaagaagaaatctcaaacagtacccaattccgacagccctgatcttctgacgttgcagaaatccattcattctgctagcactccaagcagcagaccaaaggagtggcgccccgagaagatctcagatctgcagacccaaagccagccattaaaatcactgcgcaagttgttacatctctcttcggcctcaaatcacccggcttcctcagatccccgcttccagcccttaacagctcaacaaaccaaaaattccttctcagaaattcggattcaccccctgagccaggcctctggcgggagcagcaacatccggcaggaacccgcaccgaagggcaggccagccctccagctgccagacggtggatgtgatggcagaagacagagacaccattctggaccccaagatagacgcttcatgttaaggacgacagaacaacaaggagaatacttctgctgtggtgacccaaagaagcctcacactccgtgcgtcccaaaccgagcccttcatcgtccaatctccagtcctgctccctatccagtactccaggtccgaggcacttccatgtgcccgacactccaggtccgaggcactgatgctttcagctgcccaacccagcaatccgggttctctttcttcgtgagacacgttatgagggaagccctgattcacagggcccaggtaaaccaagctgcgctcctgacataccatgagaatgcggcactgacgggcaagtgacttctgcaagcctgcggctggtcccaatgccctgaatcacctctctcatggaagaaccaattaacaccaatgaatcaaccattaa

SEQ ID NO: 31350 - DNA, 3093 bp, Artificial Sequence
  derived and/or modified sequence
atgaagatccccaacatcggcaacgtgatgaacaagttcgagatcctgggcgtggtgggcgagggcgcctacggcgtggtgctgaagtgcagacacaaggagacccacgagatcgtggccatcaagaagttcaaggacagcgaggagaacgaggaggtgaaggagaccaccctgagagagctgaagatgctgagaaccctgaagcaggagaacatcgtggagctgaaggaggccttcagaagaagaggcaagctgtacctggtgttcgagtacgtggagaagaacatgctggagctgctggaggagatgcccaacggcgtgccccccgagaaggtgaagagctacatctaccagctgatcaaggccatccactggtgccacaagaacgacatcgtgcacagagacatcaagcccgagaacctgctgatcagccacaacgacgtgctgaagctgtgcgacttcggcttcgccagaaacctgagcgagggcaacaacgccaactacaccgagtacgtggccaccagatggtacagaagccccgagctgctgctgggcgccccctacggcaagagcgtggacatgtggagcgtgggctgcatcctgggcgagctgagcgacggccagcccctgttccccggcgagagcgagatcgaccagctgttcaccatccagaaggtgctgggccccctgcccagcgagcagatgaagctgttctacagcaaccccagattccacggcctgagattccccgccgtgaaccacccccagagcctggagagaagatacctgggcatcctgaacagcgtgctgctggacctgatgaagaacctgctgaagctggaccccgccgacagatacctgaccgagcagtgcctgaaccaccccaccttccagacccagagactgctggacagaagccccagcagaagcgccaagagaaagccctaccacgtggagagcagcaccctgagcaacagaaaccaggccggcaagagcaccgccctgcagagccaccacagaagcaacagcaaggacatccagaacctgagcgtgggcctgcccagagccgacgagggcctgcccgccaacgagagcttcctgaacggcaacctggccggcgccagcctgagccccctgcacaccaagacctaccaggccagcagccagcccggcagcaccagcaaggacctgaccaacaacaacatcccccacctgctgagccccaaggaggccaagagcaagaccgagttcgacttcaacatcgaccccaagcccagcgagggccccggcaccaagtacctgaagagcaacagcagaagccagcagaacagacacagcttcatggagagcagccagagcaaggccggcaccctgcagcccaacgagaagcagagcagacacagctacatcgacaccatcccccagagcagcagaagccccagctacagaaccaaggccaagagccacggcgccctgagcgacagcaagagcgtgagcaacctgagcgaggccagagcccagatcgccgagcccagcaccagcagatacttccccagcagctgcctggacctgaacagccccaccagccccacccccaccagacacagcgacaccagaaccctgctgagccccagcggcagaaacaacagaaacgagggcaccctggacagcagaagaaccaccaccagacacagcaagaccatggaggagctgaagctgcccgagcacatggacagcagccacagccacagcctgagcgccccccacgagagcttcagctacggcctgggctacaccagccccttcagcagccagcagagaccccacagacacagcatgtacgtgaccagagacaaggtgagagccaagggcctggacggcagcctgagcatcggccagggcatggccgccagagccaacagcctgcagctgctgagcccccagcccggcgagcagctgccccccgagatgaccgtggccagaagcagcgtgaaggagaccagcagagagggcaccagcagcttccacaccagacagaagagcgagggcggcgtgtaccacgacccccacagcgacgacggcaccgcccccaaggagaacagacacctgtacaacgaccccgtgcccagaagagtgggcagcttctacagagtgcccagccccagacccgacaacagcttccacgagaacaacgtgagcaccagagtgagcagcctgcccagcgagagcagcagcggcaccaaccacagcaagagacagcccgccttcgacccctggaagagccccgagaacatcagccacagcgagcagctgaaggagaaggagaagcagggcttcttcagaagcatgaagaagaagaagaagaagagccagaccgtgcccaacagcgacagccccgacctgctgaccctgcagaagagcatccacagcgccagcacccccagcagcagacccaaggagtggagacccgagaagatcagcgacctgcagacccagagccagcccctgaagagcctgagaaagctgctgcacctgagcagcgccagcaaccaccccgccagcagcgaccccagattccagcccctgaccgcccagcagaccaagaacagcttcagcgagatcagaatccaccccctgagccaggccagcggcggcagcagcaacatcagacaggagcccgcccccaagggcagacccgccctgcagctgcccgacggcggctgcgacggcagaagacagagacaccacagcggcccccaggacagaagattcatgctgagaaccaccgagcagcagggcgagtacttctgctgcggcgaccccaagaagccccacaccccctgcgtgcccaacagagccctgcacagacccatcagcagccccgccccctaccccgtgctgcaggtgagaggcaccagcatgtgccccaccctgcaggtgagaggcaccgacgccttcagctgccccacccagcagagcggcttcagcttcttcgtgagacacgtgatgagagaggccctgatccacagagcccaggtgaaccaggccgccctgctgacctaccacgagaacgccgccctgaccggcaagtag

SEQ ID NO: 31351 - protein, 620 aa, Artificial Sequence
  derived and/or modified sequence
MSALTPPTDMPTPTTDKITQAAMETIYLCKFRVSMDGEWLCLRELDDISLTPDPEPTHEDPNYLMANERMNLMNMAKLSIKGLIESALNLGRTLDSDYAPLQQFFVVMEHCLKHGLKAKKTFLGQNKSFWGPLELVEKLVPEAAEITASVKDLPGLKTPVGRGRAWLRLALMQKKLSEYMKALINKKELLSEFYEPNALMMEEEGAIIAGLLVGLNVIDANFCMKGEDLDSQVGVIDFSMYLKDGNSSKGTEGDGQITAILDQKNYVEELNRHLNATVNNLQAKVDALEKSNTKLTEELAVANNRIITLQEEMERVKEESSYILESNRKGPKQDRTAEGQALSEARKHLKEETQLRLDVEKELEMQISMRQEMELAMKMLEKDVCEKQDALVSLRQQLDDLRALKHELAFKLQSSDLGVKQKSELNSRLEEKTNQMAATIKQLEQRLRQAERSRQSAELDNRLFKQDFGDKINSLQLEVEELTRQRNQLELELKQEKERRLQNDRSIPGRGSQKSESKMDGKHKMQEENVKLKKPLEESHRLQPHPMDEQDQLLLSEKPQLCQLCQEDGSLTKNVCKNCSGTFCDACSTNELPLPSSIKLERVCNPCHKHLMKQYSTSPS

SEQ ID NO: 31352 - DNA, 1863 bp, Artificial Sequence
  derived and/or modified sequence
atgagcgccctgaccccccccaccgacatgcccacccccaccaccgacaagatcacccaggccgccatggagaccatctacctgtgcaagttcagagtgagcatggacggcgagtggctgtgcctgagagagctggacgacatcagcctgacccccgaccccgagcccacccacgaggaccccaactacctgatggccaacgagagaatgaacctgatgaacatggccaagctgagcatcaagggcctgatcgagagcgccctgaacctgggcagaaccctggacagcgactacgcccccctgcagcagttcttcgtggtgatggagcactgcctgaagcacggcctgaaggccaagaagaccttcctgggccagaacaagagcttctggggccccctggagctggtggagaagctggtgcccgaggccgccgagatcaccgccagcgtgaaggacctgcccggcctgaagacccccgtgggcagaggcagagcctggctgagactggccctgatgcagaagaagctgagcgagtacatgaaggccctgatcaacaagaaggagctgctgagcgagttctacgagcccaacgccctgatgatggaggaggagggcgccatcatcgccggcctgctggtgggcctgaacgtgatcgacgccaacttctgcatgaagggcgaggacctggacagccaggtgggcgtgatcgacttcagcatgtacctgaaggacggcaacagcagcaagggcaccgagggcgacggccagatcaccgccatcctggaccagaagaactacgtggaggagctgaacagacacctgaacgccaccgtgaacaacctgcaggccaaggtggacgccctggagaagagcaacaccaagctgaccgaggagctggccgtggccaacaacagaatcatcaccctgcaggaggagatggagagagtgaaggaggagagcagctacatcctggagagcaacagaaagggccccaagcaggacagaaccgccgagggccaggccctgagcgaggccagaaagcacctgaaggaggagacccagctgagactggacgtggagaaggagctggagatgcagatcagcatgagacaggagatggagctggccatgaagatgctggagaaggacgtgtgcgagaagcaggacgccctggtgagcctgagacagcagctggacgacctgagagccctgaagcacgagctggccttcaagctgcagagcagcgacctgggcgtgaagcagaagagcgagctgaacagcagactggaggagaagaccaaccagatggccgccaccatcaagcagctggagcagagactgagacaggccgagagaagcagacagagcgccgagctggacaacagactgttcaagcaggacttcggcgacaagatcaacagcctgcagctggaggtggaggagctgaccagacagagaaaccagctggagctggagctgaagcaggagaaggagagaagactgcagaacgacagaagcatccccggcagaggcagccagaagagcgagagcaagatggacggcaagcacaagatgcaggaggagaacgtgaagctgaagaagcccctggaggagagccacagactgcagccccaccccatggacgagcaggaccagctgctgctgagcgagaagccccagctgtgccagctgtgccaggaggacggcagcctgaccaagaacgtgtgcaagaactgcagcggcaccttctgcgacgcctgcagcaccaacgagctgcccctgcccagcagcatcaagctggagagagtgtgcaacccctgccacaagcacctgatgaagcagtacagcaccagccccagctag

SEQ ID NO: 31353 - DNA, 1863 bp, Artificial Sequence
  derived and/or modified sequence
atgtcagccttaactccacctaccgacatgccaactcctacaaccgacaagatcacacaagcggccatggaaacaatctacttgtgcaaattccgggtgtccatggatggcgagtggctgtgcctccgggaactggacgacatttcccttacaccggatcctgagccaactcacgaggaccctaattacctcatggccaacgaacgcatgaacctgatgaatatggccaagctctccataaaagggttgattgaatccgcactaaatctgggaaggaccctggactcagattatgctcccctgcagcaatttttcgtcgttatggagcactgtctaaagcacgggctcaaagcgaaaaaaacatttctaggccagaataaatccttttgggggcccctggagctcgtcgagaagttagtccctgaggcggcagaaatcactgcatctgtcaaggacttgcccggtctcaaaactccggttggacgcgggagagcctggttgaggttggctctcatgcaaaaaaaactttctgaatacatgaaggcgctgatcaacaaaaaggaactcctgtcagagttctacgagccgaatgccctgatgatggaggaagagggcgctatcattgcaggtttgctggtgggcctcaacgtgatagatgcgaacttttgcatgaagggggaggatttggacagccaggtaggtgttatcgatttctcaatgtatctgaaggatggaaacagctctaagggtacagagggtgatggccagatcaccgctatcctcgatcaaaagaactatgtggaagagctaaatcgacacctgaatgcgacggttaataatctgcaggccaaggttgacgcccttgaaaagtcgaacaccaagcttacagaagaactggcagtcgcaaataatcgtataatcactctgcaggaggaaatggagcgggtcaaggaggaatcctcatacatcttggagagtaaccgaaagggtccaaaacaggaccggacagcagagggacaggccttgtcggaagcacggaaacatctcaaggaggagacgcaactgagattggacgttgagaaagagctagaaatgcaaatcagcatgaggcaggagatggagctcgctatgaagatgcttgagaaggatgtgtgtgagaagcaggatgcactcgtttcattgagacagcagttggatgacctgcgggccttaaagcacgaattggcttttaaacttcaatcatccgacctgggcgtaaaacaaaagagtgagctgaacagccggttggaagagaagaccaaccagatggctgccacaattaagcagctggagcagcgcctgaggcaggctgagagaagcagacagagcgccgaactggataataggctcttcaagcaggactttggtgataaaattaattcactgcagctcgaagtcgaggaattgaccaggcagaggaatcagctcgaactggaactcaagcaggaaaaggaaagacggttgcagaacgacagatcgatcccaggaaggggttcccaaaaaagcgaatcaaaaatggatggaaagcataagatgcaggaggagaatgttaagctgaaaaagcccctggaggaatcccaccgtctgcaacctcacccaatggacgaacaagaccagctgctgctctccgaaaagccccaactgtgtcaactatgtcaggaggatggatctctaaccaaaaacgtgtgcaagaattgttcaggtactttctgtgatgcctgttcaactaacgagctgcccctgccatcaagcattaaacttgagcgcgtctgcaacccctgccacaaacaccttatgaagcaatattcaacttccccaagttag

SEQ ID NO: 31354 - DNA, 1863 bp, Artificial Sequence
  derived and/or modified sequence
atgtctgccctgaccccacccacagacatgcccacccccaccacagacaagatcacccaggccgccatggagaccatctacctgtgcaagttccgggtgtccatggatggagagtggctgtgcctgcgggagctggatgacatcagcctgaccccagaccctgagcccacccatgaggaccccaactacctgatggccaatgaaagaatgaacctgatgaacatggccaagctgagcatcaagggcctcatcgagagcgccctgaacctgggccgcaccctggacagcgactatgcccccctgcagcagttctttgtggtgatggagcactgcctgaagcacggcctgaaggccaagaagaccttcctgggccagaacaagagcttctggggccccctggagctggtggagaagctggtgcctgaggccgctgagatcacagcctctgtgaaggacctgcccggcctgaagacccctgtgggccggggccgggcctggctgcggctggccctgatgcagaagaagctgtctgagtacatgaaggccctgatcaacaagaaggagctgctgtctgagttctatgagcccaatgccctgatgatggaggaggagggcgccatcatcgccggcctgctggtgggcctgaatgtgattgatgccaacttctgcatgaagggggaggacctggacagccaggtgggcgtcatcgacttctccatgtacctgaaggatggcaacagcagcaaaggaacagaaggagatggccagatcacagccatcctggaccagaagaactacgtggaggagctgaacagacacctgaatgccaccgtgaacaacctgcaggccaaggtggatgccctggagaagagcaacaccaagctgacagaggagctggccgtggccaacaaccgcatcatcaccctgcaggaggagatggagcgggtgaaggaggagagcagctacatcctggagagcaacaggaagggccccaagcaggacagaacagctgagggccaggccctgtctgaggccaggaagcacctgaaggaggagacccagctgcggctggatgtggagaaggagctggagatgcagatctccatgaggcaggagatggagctggccatgaagatgctggagaaggatgtgtgtgagaagcaggatgccctggtgtccctgcggcagcagctggatgacctgcgggccctgaagcatgagctggccttcaagctgcagagcagtgacctgggcgtgaagcagaagtctgagctgaacagccggctggaggagaagaccaaccagatggccgccaccatcaagcagctggagcagaggctgcggcaggccgagaggagccggcagagcgctgagctggacaacagactcttcaagcaggactttggagacaagatcaacagcctgcagctggaggtggaggagctgacccggcagaggaaccagctggagctggagctgaagcaggagaaggagcggcggctgcagaatgacaggagcatccctggccggggcagccagaagtctgagagcaagatggatggcaagcacaagatgcaggaggagaatgtgaagctgaagaagcccctggaggagagccaccggctgcagccccaccccatggatgagcaggaccagctgctgctgtctgagaagccccagctgtgccagctgtgccaggaggatggcagcctgaccaagaatgtgtgcaagaactgcagcggcaccttctgtgatgcctgcagcaccaatgagctgcccctgcccagcagcatcaagctggagcgggtgtgcaacccctgccacaagcacctgatgaagcagtacagcaccagccccagctag

SEQ ID NO: 31355 - DNA, 1863 bp, Artificial Sequence
  derived and/or modified sequence
atgagcgccctgaccccccccaccgacatgcccacccccaccaccgacaaaattacccaggccgctatggagaccatctatttatgcaagtttcgcgtcagcatggacggggaatggctttgcctgcgggaactggatgacatttcacttacgccagatcccgagccaactcacgaggatccaaactatctgatggctaatgagcgaatgaatttaatgaatatggccaaactgtcaatcaaaggcttgatcgagtctgctcttaaccttggacgcactctcgactctgattacgcaccgctccagcagttctttgtggttatggagcattgccttaaacatggactgaaggccaagaagacattcctcggccaaaacaagagtttctggggtcctctcgaactggtggaaaaactcgtgcctgaagccgccgaaataacagcgtccgttaaagacttacctggactgaaaactccagtgggacgtggacgggcctggttaaggttggcactgatgcagaaaaaactgtctgagtatatgaaggctctgattaacaagaaagaactgctctcagagttctacgaaccaaacgcacttatgatggaggaagaaggtgctatcatcgccgggttgttggtagggctgaacgtaatcgacgctaatttctgcatgaaaggagaggatctcgacagccaggtgggtgttatcgacttcagcatgtacctcaaggacggtaactcatctaaagggactgagggagacggtcagattactgcgatcctggatcagaagaattacgtcgaggaactgaaccgacatcttaacgccacagtaaacaatttacaggcaaaagtggatgcgctggaaaagagtaacacaaaactaactgaggagctggcagtcgcaaacaaccggattatcactcttcaggaggagatggaacgggtaaaggaagaatcaagctacattctcgagtccaaccggaaagggcctaagcaagaccgcacagccgaaggccaagctctcagtgaggctcgtaagcatttaaaagaggaaacgcaactgcgcctcgatgtagagaaagaacttgaaatgcagattagcatgcggcaggagatggagttagccatgaaaatgctggaaaaggatgtctgcgagaagcaggacgccctcgtctccctcaggcaacagctcgacgatctgcgggccctcaagcacgaattggcctttaagctccagagcagcgacctaggggtgaaacagaaatctgaattgaactcgcgactggaagagaagacaaaccagatggccgcaaccattaagcagttggagcagcggctaaggcaagccgagcggagccgtcaatccgctgaactggacaataggttgtttaagcaggattttggcgacaaaatcaattctttacagttagaagttgaggaattaactagacagagaaaccagcttgaattggagcttaagcaggagaaggagcggcgccttcaaaatgatcggtctatccctggccgcggctctcaaaagagtgaatccaaaatggacggaaaacataagatgcaggaggaaaatgtcaaattgaaaaagcccctagaggaaagccacagattgcaaccacatcccatggacgaacaagatcaattactgctgtctgaaaaaccacagctctgtcagttgtgtcaggaggacgggagcctgacaaagaatgtatgtaagaactgttccgggacattttgtgacgcatgttccactaatgagcttccactcccgtcatcgattaaactcgagagggtctgtaatccttgccataagcacctgatgaagcagtactcgacctcccctagctag

SEQ ID NO: 31356 - DNA, 1863 bp, Artificial Sequence
  derived and/or modified sequence
atgtctgcacttactcccccaactgacatgccaacccctaccaccgacaaaataacccaagctgccatggagaccatctacctgtgcaaattcagggtgtccatggacggcgagtggctgtgcctgagggaactggatgatatctctcttactccagaccctgaacccacacacgaagatccaaattacctaatggcaaatgaaagaatgaacctgatgaatatggcgaagctatccatcaaaggtctgatagaatccgcactgaacctgggacgcacactcgatagcgattacgcgccactacagcagttttttgtggttatggaacactgcctgaagcacggcctcaaggcaaaaaaaacattcctcggccaaaataagtccttctggggtcctttagaactagtggagaaattggtgcctgaagcagccgaaatcacagcatctgttaaggacctccctggccttaagacccccgtgggacgcggtagggcttggttgagactggccctcatgcagaagaaactgtctgagtacatgaaagcacttatcaacaaaaaggaactccttagcgagttctacgagccaaatgccctgatgatggaggaagaaggggcaatcatcgccggtctgctggtcgggttgaatgtaattgacgctaatttttgcatgaagggcgaagatctggactcccaggttggcgttatagatttttcaatgtacttgaaggacggcaattctagtaagggcacggagggagacggtcagatcacagcaattctggatcaaaaaaactacgtagaggaactgaacaggcacctcaatgccactgttaacaatctgcaggctaaagtggacgcgttggaaaagagcaatacaaaactaaccgaagagctggctgtagccaacaatcgcatcataactctgcaggaagaaatggaaagagttaaagaagagagttcatacattttagaaagcaatagaaagggcccaaaacaggaccgcaccgcggaaggacaggcactcagcgaggcccgtaagcatctgaaggaggagacccagctgcgccttgatgttgagaaggagttggagatgcagattagtatgagacaggaaatggagctagctatgaaaatgctcgagaaagatgtgtgcgagaagcaagacgccctggtgagcctgagacagcaactggacgatctacgcgctctgaaacacgaactggctttcaaactccagtcatccgatctgggcgttaaacagaaaagtgaattgaactctcgattagaggagaagacaaaccagatggccgctactataaaacaactggaacagcgcttgcgccaggctgagcgctcaaggcaaagtgctgaacttgacaaccggctgttcaagcaggatttcggcgacaagataaattctctccaactcgaggttgaggaactaactagacagcggaaccaactggagttggaactgaagcaggagaaggaacggagactccagaatgaccggtctattccgggtagagggtcacagaaatcagagtccaagatggacggaaagcataaaatgcaagaagaaaatgtcaagctcaaaaagcccctggaggagtcacaccgcctccagccccaccctatggacgagcaagatcaactactgctgtctgaaaagcctcagctttgtcagctgtgccaagaggacggttccctgaccaagaacgtctgcaagaactgcagtggcaccttttgcgatgcttgctctactaatgaactcccacttccgagtagcatcaagctcgagcgcgtatgcaatccatgtcataagcacctgatgaagcaatactccacttcaccgtcatag

SEQ ID NO: 31357 - DNA, 3098 bp, Artificial Sequence
  derived and/or modified sequence
ctgcttactgcgcacggccaatcctatgagaactcagcatcccagctcatctgagcagatcctggaagtgatttctgcagctcaggattttttttttaagctacattgaaaatataggtttattttttgttcaggtttttcttttatattttttttctgcacaaaggaggaggatttttcacttactcatatcgaggccagatttttaaagccagctaaggcagcatcagctgtgcgggatttaaagcctatagctcagctgaaaaaaaaggtggggggcagggaagggaagataaaaggagaggaagctgggagaagacaagcatcatcttattttgctatgtggtaggaactgtctataagatagtgtagaattgtttatcttgagcagtttgttcttaacctataaggtatttttccttttttttttttttaaacctcccccacccttttcctgaaagctttgtttcagagctttgtattgggtttttttggtgaggaggttgtatttatttttttggtgtgtgtgtgtgagtgtgtgtgtgtctgtgtgtgtgttgtggtcccagctgagtcatcatgtctgctctgacgcctccgaccgatatgccaacccccaccactgacaagatcacacaggctgccatggagaccatctacctttgcaaattccgagtgtccatggatggagaatggctctgcctgcgagagctggatgacatctcacttacacctgacccagagcctacccatgaagatcctaattatctcatggctaatgaacgcatgaacctcatgaacatggccaagctgagtatcaagggcttgattgaatcagctctgaacctggggaggactcttgactctgactatgcacctctccagcaattctttgtggtgatggagcactgtctgaaacatggcttgaaagctaaaaaaacttttctcggacaaaataaatccttctgggggcctctagaactggtagaaaagcttgttccagaagccgcagagataacagcaagtgttaaagatcttccaggacttaagacaccagtaggtagaggaagagcctggcttcgtttggcattaatgcaaaagaaactttcagaatatatgaaagctttgatcaataagaaagaacttctcagtgaattctacgaacccaatgccctcatgatggaagaagaaggagccataattgctggtctgttggtgggtctgaatgtcattgatgccaatttctgtatgaaaggagaagacttggactctcaggttggagttatagatttttcaatgtatctcaaggacgggaacagcagtaaaggtactgaaggagacggtcagattactgcaattctggaccagaagaactatgtagaagaactgaacagacatttgaatgctactgtaaacaaccttcaggcaaaagtagatgcattagaaaaatccaacactaaactgacagaggagcttgcagttgcaaacaacaggatcattaccttacaagaagaaatggaacgagttaaagaggaaagttcctacatactggaatccaatcggaagggtcccaagcaagacagaactgcagaagggcaagcactaagtgaagcaagaaagcatttaaaagaagagacacaattacgattggatgttgagaaagaactggagatgcagatcagcatgaggcaggagatggaattggctatgaagatgctggagaaggatgtctgtgagaagcaggatgccctggtatctcttcggcagcagctggatgacctcagagctctcaagcatgaacttgcctttaagctgcagagttcagacttaggagtaaaacagaaaagtgaactaaacagtcgcttggaagagaagactaatcagatggctgctaccattaaacaacttgaacaaagattgcgccaggctgagcgaagccgccaatctgctgagttggacaaccggctcttcaaacaggactttggagacaagatcaacagtctgcagctggaagtcgaggagctcaccaggcagcggaaccagcttgagttagaactaaaacaggaaaaagaaagaagattacaaaacgacaggagcatcccaggaaggggttcccagaagtcagaatccaagatggatgggaagcacaaaatgcaagaggaaaatgttaaactaaaaaagcccctggaagaaagccacaggctgcaaccccaccctatggatgaacaggatcagctgctgctctctgaaaagccacagttgtgtcagctatgccaggaagacggcagcctaacaaagaatgtgtgtaagaactgcagcggaaccttctgtgatgcctgttcaacaaatgaactgcctcttccttcaagtatcaagcttgagcgagtttgcaatccctgtcacaagcatctgatgaagcaatattctaccagcccatcataagactggaggccaagacctggaccaaaacgtttatgcaggctcctctgtacctgtgttttagctgtcaggatctcatagagcccagttcttagagtcaactaaagagttgataggaatttactaggtccagggagaaaaggcagtggttggggttactggaaattttgctcattttctctaatgactgtatgaataaaagtgaacttacttgagcctttctcttctaaatctaaacaacctgatattgaaggtttgctttatagcatatctttggaaaggcaactcatttttatgattagtgatactggggtggatttaataggagagagaatccaggcagataagaataaaaaggaaaatgatcatctccttctatagcatttgcagattcaagggggagaggtagatgctgagatcaaaatgacagttgttacttatttttccaggtgctgttagtataaacattgtttcctcttcacccctgctaactacctctttaaagtatttctaccaaactgtgaacccaatctcagggaaaagaaattaaaaagtaatataaattctgcatatattaaaaacaatattgtaatatgttataatttcaggaccagaattttctggtctttacctacaagggttttcattatcaaaaaaaa

SEQ ID NO: 31358 - protein, 89 aa, Artificial Sequence
  derived and/or modified sequence
MCDRKAVIKNADMSEEMQQDSVECATQALEKYNIEKDIAAHIKKEFDKKYNPTWHCIVGRNFGSYVTHETKHFIYFYLGQVAILLFKSG

SEQ ID NO: 31359 - protein, 42 aa, Artificial Sequence
  derived and/or modified sequence
MCDRKAVIKNADMSEEMQQDSVECATQALEKYNIEKDIAAHI

SEQ ID NO: 31360 - DNA, 270 bp, Artificial Sequence
  derived and/or modified sequence
atgtgtgaccgtaaggctgtaatcaaaaatgcagacatgtccgaagagatgcagcaggactcagttgagtgtgccacacaggcgttagagaagtataatatcgaaaaagatatcgctgcccatattaaaaaagagtttgacaagaagtacaaccctacctggcactgcattgtgggccggaatttcgggtcttatgtgacacatgaaacgaagcactttatatacttctacttgggacaagttgccatcctgctttttaaaagcggttag
